(19) United States
(12) Patent Application Publication
(10) Pub. No.: US 2005/0084872 A1
(43) Pub. Date: Apr. 21, 2005

(54) Methods for determining whether an agent possesses a defined biological activity

(76) Inventors: Pek Yee Lum, Seattle, WA (US); Yejun Tan, Seattle, WA (US); Hongyue Dai, Bothell, WA (US); Eric Stanley Muise, Jersey City, NJ (US); Joel P. Berger, Hoboken, NJ (US); John R. Thompson, Scotch Plains, NJ (US)

Correspondence Address: CHRISTENSEN, O'CONNOR, JOHNSON, KINDNESS, PLLC, 1420 FIFTH AVENUE, SUITE 2800, SEATTLE, WA, 98101-2347, US

(21) Appl. No.: 10/764,420

(22) Filed: Jan. 23, 2004

Related U.S. Application Data
(60) Provisional application No. 60/442,797, filed on Jan. 24, 2003.
(60) Provisional application No. 60/474,413, filed on May 30, 2003.

(51) Int. Cl. C12Q 1/68; G06F 19/00; G01N 33/48; G01N 33/50

(52) U.S. Cl. 435/6; 702/20

(57) ABSTRACT

In one aspect, the present invention provides methods for determining whether an agent (e.g., candidate drug) possesses a biological activity. In another aspect, the present invention provides populations of nucleic acid molecules useful in the practice of the present invention as probes for measuring the level of expression of populations of genes.

### CROSS-REFERENCES TO RELATED APPLICATIONS

[0001] This application claims the benefit of Provisional Application No. 60/442,797, filed Jan. 24, 2003, and Provisional Application No. 60/474,413, filed May 30, 2003.

### FIELD OF THE INVENTION

[0002] The present invention relates to methods for screening biologically active agents, such as candidate drug molecules, to identify agents that possess a defined biological activity.

### BACKGROUND OF THE INVENTION

[0003] Identifying new drug molecules for treating human diseases is a time consuming and expensive process. A candidate drug molecule is usually first identified in a laboratory using an assay for a desired biological activity. The candidate drug is then tested in animals to identify any adverse side effects that might be caused by the drug. This phase of preclinical research and testing may take more than five years. See, e.g., J. A. Zivin, Understanding Clinical Trials, Scientific American, ps. 69-75 (April 2000). The candidate drug is then subjected to extensive clinical testing in humans to determine whether it continues to exhibit the desired biological activity, and whether it induces undesirable, perhaps fatal, side effects. This process may take up to a decade. Id.

[0004] Adverse effects are often not identified until late in the clinical testing phase when considerable expense has been incurred testing the candidate drug. There is a need, therefore, for methods that increase the likelihood of identifying candidate drugs that possess a desirable biological activity, and which do not cause adverse side effects, early in the testing process, thereby reducing the amount of time and resources expended during drug testing.

### SUMMARY OF THE INVENTION

[0005] In accordance with the foregoing, in one aspect the present invention provides methods for determining whether an agent possesses a defined biological activity. Each method of this aspect of the invention includes the steps of: (a) making at least one comparison from the group consisting of: (1) comparing an efficacy value of the agent to at least one reference efficacy value to yield an efficacy comparison result, wherein each efficacy value represents at least one expression pattern of the same efficacy-related population of genes, or at least one expression pattern of the same efficacy-related population of proteins; (2) comparing a toxicity value of the agent to at least one reference toxicity value to yield a toxicity comparison result, wherein each toxicity value represents at least one expression pattern of the same toxicity-related population of genes, or at least one expression pattern of the same toxicity-related population of proteins; (3) comparing a classifier value of the agent to at least one reference classifier value to yield a classifier comparison result, wherein each classifier value represents at least one expression pattern of the same classifier population of genes, or at least one expression pattern of the same classifier population of proteins; and (b) using the comparison result(s) obtained in step (a) to determine whether the agent possesses the defined biological activity.

[0006] The methods of this aspect of the invention can utilize one, two, or all three of the foregoing comparisons identified by numbers (1), (2) and (3). In embodiments of the invention that utilize two or three of the foregoing comparisons, the comparisons can be made in any temporal sequence (e.g., in embodiments of the invention that utilize all three of the foregoing comparisons, comparison (1) can be made before or after comparison (2), and before or after comparison (3)). Optionally, the methods of this aspect of the invention can include the step of first identifying one or more of the efficacy-related population of genes or proteins, toxicity-related population of genes or proteins, and/or classifier population of genes or proteins. The foregoing populations of genes or proteins can be identified, for example, by using the methods disclosed herein for identifying an efficacy-related population of genes or proteins, a toxicity-related population of genes or proteins, and/or a classifier population of genes or proteins.

[0007] In some embodiments of the methods of this aspect of the invention, the defined biological activity is the ability to affect a biological process in vivo, and at least one of the efficacy value of the agent, the toxicity value of the agent and the classifier value of the agent is/are calculated from gene expression levels, and/or protein expression levels, measured in living cells cultured in vitro. In some embodiments of the methods of this aspect of the invention, the defined biological activity is the ability to affect a biological process in a first living tissue, and at least one of the efficacy value of the agent, the toxicity value of the agent and the classifier value of the agent is/are calculated from gene expression levels, and/or protein expression levels, measured in a second living tissue, wherein the first living tissue is a different type of tissue than the second living tissue.

[0008] The methods of this aspect of the invention are useful in any situation in which it is desirable to know whether an agent possesses a defined biological activity in a living thing (e.g., prokaryotic cell, eukaryotic cell, plant or animal). For example, the methods of this aspect of the invention are useful in the preclinical stage of drug discovery to identify chemical agents that possess a desired biological activity (e.g., a biological activity that ameliorates the symptoms of a disease), but which elicit few, if any, undesirable side effects when administered to a living organism, such as to a human being or other mammal.

[0009] In another aspect, the present invention provides populations of nucleic acid molecules that are useful in the practice of the methods of the present invention as probes for measuring the level of expression of members of a classifier population of genes, or an efficacy-related population of genes, or a toxicity-related population of genes, wherein the classifier population of genes, the efficacy-related population of genes, and the toxicity-related population of genes are each useful for identifying agonists, or partial agonists, of PPARγ. In a related aspect, the present invention provides classifier populations of genes, efficacy-related populations of genes, and toxicity-related populations of genes that are useful in the practice of the methods of the invention for identifying agonists, or partial agonists, of PPARγ.

[0010] In yet another aspect, the present invention provides methods for identifying an efficacy-related population of genes or proteins, methods for identifying a toxicity-related population of genes or proteins, and methods for identifying a classifier population of genes or proteins, as described more fully herein. The methods of this aspect of the invention are useful, for example, for identifying efficacy-related populations of genes or proteins, toxicity-related populations of genes or proteins, and classifier populations of genes or proteins, that are useful in the practice of the methods of the invention for determining whether an agent possesses a defined biological activity.

### DETAILED DESCRIPTION OF THE PREFERRED EMBODIMENT

[0011] Unless specifically defined herein, all terms used herein have the same meaning as they would to one skilled in the art of the present invention. Practitioners are particularly directed to Sambrook et al. (1989) Molecular Cloning: A Laboratory Manual, 2^{nd} ed., Cold Spring Harbor Press, Plainsview, N.Y.(1989), and Ausubel et al., Current Protocols in Molecular Biology (Supplement 47), John Wiley & Sons, New York (1999), for definitions and terms of the art.

[0012] In one aspect, the present invention provides methods for determining whether an agent possesses a defined biological activity. The methods of this aspect of the invention each include the steps of: (1) comparing an efficacy value of the agent to at least one reference efficacy value to yield an efficacy comparison result, wherein each efficacy value represents at least one expression pattern of the same efficacy-related population of genes, or at least one expression pattern of the same efficacy-related population of proteins; (2) comparing a toxicity value of the agent to at least one reference toxicity value to yield a toxicity comparison result, wherein each toxicity value represents at least one expression pattern of the same toxicity-related population of genes, or at least one expression pattern of the same toxicity-related population of proteins; (3) comparing a classifier value of the agent to at least one reference classifier value to yield a classifier comparison result, wherein each classifier value represents at least one expression pattern of the same classifier population of genes, or at least one expression pattern of the same classifier population of proteins; and (b) using the comparison result(s) obtained in step (a) to determine whether the agent possesses the defined biological activity.

[0013] In the practice of this aspect of the invention, the amounts of nucleic acid gene products (e.g., the amount of mRNA transcribed from a gene, as represented by the amount of cDNA made from the transcribed mRNA) from defined gene populations are measured, or the amounts of proteins in defined protein populations are measured, to yield gene or protein expression patterns that provide information about the effect of an agent on a living thing. It is sometimes desirable to measure protein levels instead of the levels of gene transcripts because the amount of a protein in a living thing may depend on factors in addition to the level of transcriptional activity of the gene that encodes the protein. For example, the amount of a protein in a living thing may be affected by the activity of a specific protease in a living thing, or on the activity of the protein translational apparatus. These factors may be affected by an agent used to treat a living thing.

[0014] As used herein, the term “agent” encompasses any physical, chemical, or energetic agent that induces a biological response in a living organism in vivo and/or in vitro. Thus, for example, the term “agent” encompasses chemical molecules, such as candidate therapeutic molecules that may be useful for treating one or more diseases in a living organism, such as in a mammal (e.g., a human being). The term “agent” also encompasses energetic stimuli, such as ultraviolet light. The term “agent” also encompasses physical stimuli, such as forces applied to living cells (e.g., pressure, stretching or shear forces).

[0015] The term “biological activity” refers to the ability of an agent to affect (e.g., stimulate or inhibit) one or more biological processes in a living organism. Examples of biological processes include biochemical pathways; physiological processes that contribute to the internal homeostasis of a living organism; developmental processes that contribute to the normal physical development of a living organism; and acute or chronic diseases.

[0016] As used herein, the phrase “efficacy value” refers to a value that numerically represents the level of expression, in response to an agent, of one of the following: (1) all of the genes within an efficacy-related population of genes; or (2) all of the proteins within an efficacy-related population of proteins.

[0017] As used herein, the phrase “efficacy-related population of genes” refers to a population of genes, present in a living thing, that yields at least one expression pattern, in response to an agent, that correlates (positively or negatively) with the presence of at least one desired biological response caused by the agent in the living thing.

[0018] As used herein, the phrase “efficacy-related population of proteins” refers to a population of proteins, present in a living thing, that yields at least one expression pattern, in response to an agent, that correlates (positively or negatively) with the presence of at least one desired biological response caused by the agent in the living thing.

[0019] As used herein, the phrase “toxicity value” refers to a value that numerically represents the level of expression, in response to an agent, of one of the following: (1) all of the genes within a toxicity-related population of genes; or (2) all of the proteins within a toxicity-related population of proteins.

[0020] As used herein, the phrase “toxicity-related population of genes” refers to a population of genes, present in a living thing, that yields at least one expression pattern, in response to an agent, that correlates (positively or negatively) with the presence of at least one undesirable biological response caused by the agent in the living thing.

[0021] As used herein, the phrase “toxicity-related population of proteins” refers to a population of proteins, present in a living thing, that yields at least one expression pattern, in response to an agent, that correlates (positively or negatively) with the presence of at least one undesirable biological response caused by the agent in the living thing.

[0022] As used herein, the phrase “classifier value” refers to a value that numerically represents the level of expression, in response to an agent, of one of the following: (1) all of the genes within a classifier population of genes; or (2) all of the proteins within a classifier population of proteins.

[0023] As used herein, the phrase “classifier population of genes” refers to a population of genes, present in a living thing, that yields at least two different gene expression patterns caused by at least two different agents. One of the two expression patterns correlates (positively or negatively) with the presence of a first biological response caused by one of the at least two agents. Another of the at least two expression patterns correlates (positively or negatively) with the presence of a second biological response, that is different from the first biological response, caused by another of the at least two agents. Thus, a classifier population of genes is used to classify an agent into one or more classes based upon the expression pattern of the classifier population of genes that is induced by the agent.

[0024] As used herein, the phrase “classifier population of proteins” refers to a population of proteins, present in a living thing, that yields at least two different protein expression patterns caused by at least two different agents. One of the two expression patterns correlates (positively of negatively) with the presence of a first biological response caused by one of the at least two agents. Another of the at least two expression patterns correlates (positively or negatively) with the presence of a second biological response, that is different from the first biological response, caused by another of the at least two agents. Thus, a classifier population of proteins is used to classify an agent into one or more classes based upon the expression pattern of the classifier population of proteins that is induced by the agent.

[0025] Representative Biological Activities: The methods of this aspect of the invention are useful in any situation in which it is desirable to know whether an agent possesses a defined biological activity in a living thing. The term “living thing” encompasses all unicellular and multicellular organisms (e.g., plants and animals, including mammals, such as human beings), and also encompasses living tissue, and living organs.

[0026] The term “biological activity” can refer to a single biological response, or to a combination of biological responses. Representative examples of biological activities include stimulation or suppression of one or more of the following biological processes that affect the concentration of glucose in mammalian blood: uptake, transport, metabolism and/or storage of glucose by living cells. Further representative examples of biological activities include stimulation or suppression of one or more of the following biological processes that affect the concentration of cholesterol in mammalian blood: stimulation or suppression of cholesterol uptake by living cells, and/or cholesterol metabolism by living cells, and/or cholesterol synthesis by living cells. Again by way of non-limiting example, the methods of the invention can be used to identify agents that affect (e.g., stimulate, or inhibit) one or more of the following biological processes or disease states: Alzheimer's disease; schizophrenia; cancerous tumor size; body mass index; inflammation; and cell division rate.

[0027] A biological activity can be defined in terms of any measurable effect, or combination of measurable effects, of an agent on a living thing. For example, a biological activity can be defined with reference to stimulation, and/or inhibition, of one or more biological responses; and/or the absolute and/or relative magnitude of stimulation, and/or inhibition, of one, or more, biological responses; and/or the inability to affect (e.g., the inability to stimulate or inhibit) one, or more, biological responses.

[0028] Thus, for example, a defined biological activity can be the ability to stimulate a target biological response (e.g., raise the level of high density lipoprotein in human blood). Again by way of example, a defined biological activity can be the combination of the ability to stimulate a target biological response (e.g., raise the level of high density lipoprotein in human blood) without stimulating one, or more, undesirable biological responses (e.g., without increasing blood plasma volume, or without causing liver damage). By way of further example, in the context of comparing numerous agents within a population of agents, the defined biological activity can be the combination of causing the strongest stimulation of a target biological response, while causing the least stimulation of an undesirable biological response (i.e., in this example the agent, within the population of agents, that most strongly stimulates the target biological response, but causes the least stimulation of an undesirable biological response, possesses the defined biological activity).

[0029] The use of efficacy values in the practice of the invention: The methods of the invention can include the step of comparing an efficacy value of an agent to at least one reference efficacy value to yield an efficacy comparison result, wherein each efficacy value represents at least one expression pattern of the same efficacy-related population of genes, or at least one expression pattern of the same efficacy-related population of proteins. In some embodiments, an efficacy value of the agent is compared to a scale of efficacy values to yield an efficacy comparison result, wherein each efficacy value represents at least one expression pattern of the same efficacy-related population of genes, or at least one expression pattern of the same efficacy-related population of proteins.

[0030] An efficacy value is a value that numerically represents the level of expression, in response to an agent, of one of the following: (1) all of the genes within an efficacy-related population of genes; or (2) all of the proteins within an efficacy-related population of proteins. The population of efficacy-related genes, or the population of efficacy-related proteins, yields an expression pattern, and, therefore, an efficacy value, that correlates (positively or negatively) with the occurrence of one or more desired biological response(s) caused by an agent in a living thing. A representative example of a desired effect in a living thing is the return of an abnormal expression pattern of a population of genes, and/or proteins, and/or non-protein molecules, in a diseased organism, to a normal expression pattern that is characteristic of a healthy organism. A representative example of a desired effect in a human being suffering from, or predisposed to, atherosclerosis is reduction in the concentration of total cholesterol in the subject's blood plasma.

[0031] The expression pattern of an efficacy-related population of genes or proteins induced by an agent, and, therefore, the efficacy value calculated from the induced gene expression pattern, or protein expression pattern, provides an indication of the extent to which an agent induces one or more desired effect(s) in a living thing. Thus, the effectiveness of an agent at inducing one or more desired effect(s) in a living thing can be compared to the effectiveness of one, or more, other agents at inducing the same desired effect(s) in the same living thing.

[0032] It is typically easier, and more readily informative, to compare efficacy values of different agents, than to directly compare the expression patterns induced in an efficacy-related population of genes, or proteins, by the agents. For example, the efficacy value of a candidate inhibitor of a target biological response (e.g., a candidate cell division inhibitor that may be useful for inhibiting the growth of cancerous cells in a mammal) can be compared to the efficacy value of a known inhibitor of the same target, biological, response to determine whether the two efficacy values are similar. If the efficacy value of the known inhibitor is similar to the efficacy value of the candidate inhibitor, then it is inferred that the candidate inhibitor inhibits the target biological response. Again by way of example, in the context of comparing candidate inhibitors of a target biological response to determine which candidate inhibitor exerts the strongest inhibitory effect on the target biological response, the efficacy values of each candidate inhibitor are compared to each other, and it is inferred that the candidate inhibitor that has the numerically largest efficacy value exerts the strongest inhibitory effect on the target biological response.

[0033] By way of specific and more detailed example, the comparison of efficacy values may be used to identify agents that stimulate a target biological response (e.g., increase the amount of high density lipoprotein in human blood plasma). For example, a population of genes, or proteins, is identified in a living thing that yield(s) at least one expression pattern that positively correlates with the stimulation of the target biological response by at least one agent that is known to stimulate the target biological response. This is the efficacy-related gene population, or efficacy-related protein population. Living cells that include the efficacy-related gene population, or efficacy-related protein population, are contacted with a candidate agent, and the resulting expression pattern of the efficacy-related gene population, or efficacy-related protein population, is measured, and an efficacy value calculated therefrom. The efficacy value of the candidate agent is compared to the efficacy value(s) of one or more reference agent(s) that is/are known to stimulate the target biological response, and if the efficacy value of the candidate agent is sufficiently similar to the efficacy value(s) of the reference agent(s), then it is inferred that the candidate agent is a stimulant of the target biological response.

[0034] An efficacy-related population of genes, or efficacy-related protein population, can be identified, for example, by contacting a living thing (e.g., living tissue, living organ or living organism), or population of living things (e.g., population of living cells in culture), with an agent that is known to cause a target biological response. A population of genes, or proteins, is identified that yields an expression pattern that correlates (positively or negatively) with the occurrence of the target biological response in response to the agent. This population of genes, or proteins, may be used as the efficacy-related gene population, or efficacy-related protein population, respectively.

[0035] In another approach, a diseased organism may be used to identify an efficacy-related population of genes or proteins. Thus, for example, in the context of identifying chemical agents useful for ameliorating the symptoms of a target disease that affects humans, a non-human model organism (e.g., a mouse) is identified that suffers from the target disease, or that suffers from a disease that is similar to the target disease and which is a good experimental model for studying the target disease. The diseased model organism may occur naturally, or may be created by human intervention, such as by a selective breeding program, or by genetic manipulation. For example, the technique of targeted homologous recombination can be used to generate mice in which one or more genes are functionally inactivated. By choosing an appropriate gene to inactivate, the resulting mice may exhibit the symptoms of a disease that afflicts human beings, and may be a useful model system for studying the disease and for identifying candidate chemical agents useful for treating the disease.

[0036] A non-diseased organism of the same species as the diseased organism (e.g., a non-diseased mouse) is treated with an agent that is known to ameliorate the symptoms of the target disease, and the expression pattern of a representative population of genes, or proteins, from the treated organism is measured. The expression pattern of the same representative population of genes, or proteins, is measured in the diseased organism, and the expression patterns of the genes, or proteins, are compared to identify those proteins, or genes that produce transcriptional products (e.g., mRNA molecules), whose amount in the organism is affected (e.g., increased or decreased) by the agent, and which are regulated in the opposite direction in the diseased organism compared to the non-diseased organism (e.g., the level of expression of the genes is higher in a non-diseased organism than in a diseased organism, and the level of expression of the genes is increased, toward the non-diseased level, in the diseased organism in response to treatment with the agent). This population of genes, or proteins, is an efficacy-related population of genes, or an efficacy-related population of proteins, useful in the practice of the present invention for identifying agents that ameliorate the symptoms of the target disease.

[0037] Optionally, one of skill in the art may determine that a correlation (positive or negative) exists between the expression pattern of the efficacy-related gene population (or an efficacy-related population of proteins) and the amelioration of one or more symptoms of the target disease, thereby confirming the usefulness of the gene, or protein, population as an efficacy-related gene population, or efficacy-related protein population, in the practice of the methods of the present invention.

[0038] Example 1 herein describes the use of a strain of mice (referred to as db/db mice) that exhibit the symptoms of diabetes and are useful as a model experimental system for that disease. The db/db mice are used to identify an efficacy-related population of genes whose transcription is reduced in the db/db mice compared to non-diseased mice, and whose transcription is stimulated by rosiglitazone, which is a drug used to treat diabetes.

[0039] For example, an efficacy-related population of genes, or proteins, can be identified in the following manner. Living cells are contacted, in vivo or in vitro, with an amount of a first reference agent that maximally induces (or maximally inhibits) a target biological response. An example of a method for contacting living cells, cultured in vitro, with the first reference agent is addition of the first reference agent to the medium in which the living cells are cultured. Examples of methods for contacting living cells, in vivo, with the first reference agent is injection into the bloodstream, or injection into a target tissue or organ, or nasal administration of the first reference agent, or transdermal administration of the first reference agent, or use of a drug delivery device that is implanted into the body of a living subject and which gradually releases the first reference agent into the living body.

[0040] In the present example, if an efficacy-related population of genes is being sought, messenger RNA is extracted (and may or may not be purified) from the contacted cells and used as a template to synthesize cDNA or cRNA which is then labeled (e.g., with a fluorescent dye). The labeled cDNA or cRNA is then hybridized to nucleic acid molecules immobilized on a substrate (e.g., a DNA microarray). The immobilized nucleic acid molecules represent some, or all, of the genes that are expressed in the cells that were contacted with the first reference agent. The labeled cDNA or cRNA molecules that hybridize to the nucleic acid molecules immobilized on the DNA array are identified, and the level of expression of each hybridizing cDNA or cRNA is measured and compared to the level of expression of the same cDNA or cRNA species in control cells that were not contacted with the first reference agent, thereby revealing a gene expression pattern that was caused by the first reference agent. The population of genes whose expression is affected by the first reference agent can be used as the efficacy-related gene population, and an efficacy value for the first reference agent can be calculated from the levels of expression of all of the mRNAs within the efficacy-related gene population.

[0041] In the present example, if an efficacy-related population of proteins is being sought, some, or all, of the protein is extracted from the contacted cells. The identity and abundance of some or all of the proteins within the extracted protein mixture is determined by any suitable technique, such as mass spectrometry, and compared to the level of expression of the same protein species in control cells that were not contacted with the first reference agent, thereby revealing a protein expression pattern that was caused by the first reference agent. The population of proteins whose expression pattern is affected by the first reference agent can be used as the efficacy-related protein population, and an efficacy value for the first reference agent can be calculated from the levels of expression of all of the proteins within the efficacy-related protein population.

[0042] More typically, the foregoing, exemplary, procedure is repeated with one or more additional reference agents that each have the same effect as the first reference agent on the same target biological response (e.g., all the reference agents either induce or inhibit the same target biological response). The gene expression patterns, or protein expression patterns, induced by each of the reference agents are compared, and a population of genes or proteins whose expression is affected by each reference agent, and that correlates with the effect on the target biological response, is identified. The gene or protein expression patterns caused by each of the reference agents are statistically analyzed to identify the population of genes, or proteins, (within the total population of genes or proteins whose expression is affected by all the reference agents) that produces an expression pattern that most strongly correlates with the occurrence of the target biological response. This population of genes, or this population of proteins, can be used as an efficacy-related gene population, or efficacy-related protein population.

[0043] Example 1 herein describes the identification of an efficacy-related population of genes that is useful in the practice of the methods of the invention for identifying agonists and partial agonists of peroxisome proliferator-activated receptor γ (hereinafter referred to as PPARγ). The peroxisome proliferator-activated receptors are nuclear hormone receptors, activated by fatty acids and their eicosanoid metabolites, that regulate glucose and lipid homeostasis in mammals, such as human beings. The PPARγ subtype plays a central role in the regulation of adipogenesis and is the molecular target for the 2,4-thiazolidinedione class of antidiabetic drugs (e.g., rosiglitazone). See, e.g., J. L. Oberfield, et al., Proc. Nat'l Acad. Sci. U.S.A., 96:6102-6106 (1999). Undesirable side-effects caused by the 2,4-thiazolidinedione class of drugs includes heart enlargement and an increase in blood plasma volume. Thus, there is a need to identify molecules of the 2,4-thiazolidinedione class that are antidiabetic drugs, but which do not cause these undesirable side effects.

[0044] In some embodiments of the methods of the invention, the efficacy-related population of genes or proteins yields at least one efficacy-related expression pattern, in response to an agent, that correlates with the presence of at least one desired biological response caused by the agent in a living thing, wherein the at least one efficacy-related expression pattern appears before the desired biological response. Thus, for example, these embodiments of the methods of the invention are particularly useful for high-throughput screening of numerous drug candidates because it is not necessary to wait for the appearance of the desired biological response in order to identify those drug candidates that possess a defined biological activity.

[0045] Representative examples of techniques for identifying and measuring the expression of an efficacy-related population of genes: efficacy-related populations of genes are identified by measuring the amount of transcriptional expression of genes in a living thing (e.g., a living thing that has been contacted with an agent that affects a target biological response). Gene expression may be measured, for example, by extracting (and optionally purifying) mRNA from the living thing, and using the mRNA as a template to synthesize cDNA which is then labeled (e.g., with a fluorescent dye) and can be used to measure gene expression. While the following, exemplary, description is directed to embodiments of the invention in which the extracted mRNA is used as a template to synthesize cDNA, which is then labeled, it will be understood that the extracted mRNA can also be used as a template to synthesize cRNA which can then be labeled and can be used to measure gene expression.

[0046] RNA molecules useful as templates for cDNA synthesis can be isolated from any organism or part thereof, including organs, tissues, and/or individual cells. Any suitable RNA preparation can be utilized, such as total cellular RNA, or such as cytoplasmic RNA or such as an RNA preparation that is enriched for messenger RNA (mRNA), such as RNA preparations that include greater than 70%, or greater than 80%, or greater than 90%, or greater than 95%, or greater than 99% messenger RNA. Typically, RNA preparations that are enriched for messenger RNA are utilized to provide the RNA template in the practice of the methods of this aspect of the invention. Messenger RNA can be purified in accordance with any art-recognized method, such as by the use of oligo-dT columns (see, e.g., Sambrook et al., 1989, Molecular Cloning-A Laboratory Manual (2nd Ed.), Vol. 1, Chapter 7, Cold Spring Harbor Laboratory, Cold Spring Harbor, N.Y.).

[0047] Total RNA may be isolated from cells by procedures that involve breaking open the cells and, typically, denaturation of the proteins contained therein. Additional steps may be employed to remove DNA. Cell lysis may be accomplished with a nonionic detergent, followed by microcentrifugation to remove the nuclei and hence the bulk of the cellular DNA. In one embodiment, RNA is extracted from cells using guanidinium thiocyanate lysis followed by CsCl centrifugation to separate the RNA from DNA (Chirgwin et al., 1979, Biochemistry 18:5294-5299). Messenger RNA may be selected with oligo-dT cellulose (see Sambrook et al., supra). Separation of RNA from DNA can also be accomplished by organic extraction, for example, with hot phenol or phenol/chloroform/isoamyl alcohol. If desired, RNase inhibitors may be added to the lysis buffer. Likewise, for certain cell types, it may be desirable to add a protein denaturation/digestion step to the protocol.

[0048] The sample of total RNA typically includes a multiplicity of different mRNA molecules, each different mRNA molecule having a different nucleotide sequence (although there may be multiple copies of the same mRNA molecule). In a specific embodiment, the mRNA molecules in the RNA sample comprise at least 100 different nucleotide sequences. In other embodiments, the mRNA molecules of the RNA sample comprise at least 500, 1,000, 5,000, 10,000, 20,000, 30,000, 40,000, 50,000, 60,000, 70,000, 80,000, 90,000 or 100,000 different nucleotide sequences. In another specific embodiment, the RNA sample is a mammalian RNA sample, the mRNA molecules of the mammalian RNA sample comprising about 20,000 to 30,000 different nucleotide sequences, or comprising substantially all of the different mRNA sequences that are expressed in the cell(s) from which the mRNA was extracted.

[0049] In the context of the present example, cDNA molecules are synthesized that are complementary to the RNA template molecules. Each cDNA molecule is preferably sufficiently long (e.g., at least 50 nucleotides in length) to subsequently serve as a specific probe for the mRNA template from which it was synthesized, or to serve as a specific probe for a DNA sequence that is identical to the sequence of the mRNA template from which the cDNA molecule was synthesized. Individual DNA molecules can be complementary to a whole RNA template molecule, or to a portion thereof. Thus, a population of cDNA molecules is synthesized that includes individual DNA molecules that are each complementary to all, or to a portion, of a template RNA molecule. Typically, at least a portion of the complementary sequence of at least 95% (more typically at least 99%) of the template RNA molecules are represented in the population of cDNA molecules.

[0050] Any reverse transcriptase molecule can be utilized to synthesize the cDNA molecules, such as reverse transcriptase molecules derived from Moloney murine leukemia virus (MMLV-RT), avian myeloblastosis virus (AMV-RT), bovine leukemia virus (BLV-RT), Rous sarcoma virus (RSV) and human immunodeficiency virus (HIV-RT). A reverse transcriptase lacking RNaseH activity (e.g., SUPERSCRIPT II™ sold by Stratagene, La Jolla, Calif.) has the advantage that, in the absence of an RNaseH activity, synthesis of second strand cDNA molecules does not occur during synthesis of first strand cDNA molecules. The reverse transcriptase molecule should also preferably be thermostable so that the cDNA synthesis reaction can be conducted at as high a temperature as possible, while still permitting hybridization of any required primer(s) to the RNA template molecules.

[0051] The synthesis of the cDNA molecules can be primed using any suitable primer, typically an oligonucleotide in the range of ten to 60 bases in length. Oligonucleotides that are useful for priming the synthesis of the cDNA molecules can hybridize to any portion of the RNA template molecules, including the oligo-dT tail. In some embodiments, the synthesis of the cDNA molecules is primed using a mixture of primers, such as a mixture of primers having random nucleotide sequences. Typically, for oligonucleotide molecules less than 100 bases in length, hybridization conditions are 5° C. to 10° C. below the homoduplex melting temperature (Tm); see generally, Sambrook et al. Molecular Cloning: A Laboratory Manual, 2nd ed., Cold Spring Harbor Press, 1987; Ausubel et al., Current Protocols in Molecular Biology, Greene Publishing, 1987).

[0052] A primer for priming cDNA synthesis can be prepared by any suitable method, such as phosphotriester and phosphodiester methods of synthesis, or automated embodiments thereof. It is also possible to use a primer that has been isolated from a biological source, such as a restriction endonuclease digest. An oligonucleotide primer can be DNA, RNA, chimeric mixtures or derivatives or modified versions thereof, so long as it is still capable of priming the desired reaction. The oligonucleotide primer can be modified at the base moiety, sugar moiety, or phosphate backbone, and may include other appending groups or labels, so long as it is still capable of priming cDNA synthesis.

[0053] An oligonucleotide primer for priming cDNA synthesis can be derived by cleavage of a larger nucleic acid fragment using non-specific nucleic acid cleaving chemicals or enzymes or site-specific restriction endonucleases; or by synthesis by standard methods known in the art, e.g., by use of an automated DNA synthesizer (such as are commercially available from Biosearch, Applied Biosystems, etc.) and standard phosphoramidite chemistry. As examples, phosphorothioate oligonucleotides may be synthesized by the method of Stein et al. (Nucl. Acids Res. 16:3209-3221, 1988), methylphosphonate oligonucleotides can be prepared by use of controlled pore glass polymer supports (Sarin et al., 1988, Proc. Natl. Acad. Sci. U.S.A. 85:7448-7451).

[0054] Once the desired oligonucleotide is synthesized, it is cleaved from the solid support on which it was synthesized and treated, by methods known in the art, to remove any protecting groups present. The oligonucleotide may then be purified by any method known in the art, including extraction and gel purification. The concentration and purity of the oligonucleotide may be determined, for example, by examining the oligonucleotide that has been separated on an acrylamide gel, or by measuring the optical density at 260 nm in a spectrophotometer.

[0055] After cDNA synthesis is complete, the RNA template molecules can be hydrolyzed, and all, or substantially all (typically more than 99%), of the primers can be removed. Hydrolysis of the RNA template can be achieved, for example, by alkalinization of the solution containing the RNA template (e.g., by addition of an aliquot of a concentrated sodium hydroxide solution). The primers can be removed, for example, by applying the solution containing the RNA template molecules, cDNA molecules, and the primers, to a column that separates nucleic acid molecules on the basis of size. The purified, cDNA molecules, can then, for example, be precipitated and redissolved in a suitable buffer.

[0056] The cDNA molecules are typically labeled to facilitate the detection of the cDNA molecules when they are used as a probe in a hybridization experiment, such as a probe used to screen a DNA microarray, to identify an efficacy-related population of genes. The cDNA molecules can be labeled with any useful label, such as a radioactive atom (e.g., ³²P), but typically the cDNA molecules are labeled with a dye. Examples of suitable dyes include fluorophores and chemiluminescers.

[0057] By way of example, cDNA molecules can be coupled to dye molecules via aminoallyl linkages by incorporating allylamine-derivatized nucleotides (e.g., allylamine-dATP, allylamine-dCTP, allylamine-dGTP, and/or allylamine-dTTP) into the cDNA molecules during synthesis of the cDNA molecules. The allylamine-derivatized nucleotide(s) can then be coupled, via an aminoallyl linkage, to N-hydroxysuccinimide ester derivatives (NHS derivatives) of dyes (e.g., Cy-NHS, Cy3-NHS and/or Cy5-NHS). Again by way of example, in another embodiment, dye-labeled nucleotides may be incorporated into the cDNA molecules during synthesis of the cDNA molecules, which labels the cDNA molecules directly.

[0058] It is also possible to include a spacer (usually 5-16 carbon atoms long) between the dye and the nucleotide, which may improve enzymatic incorporation of the modified nucleotides during synthesis of the cDNA molecules.

[0059] In the context of the present example, the labeled cDNA is hybridized to a DNA array that includes hundreds, or thousands, of identified nucleic acid molecules (e.g., cDNA molecules) that correspond to genes that are expressed in the type of cells wherein gene expression is being analyzed. Typically, hybridization conditions used to hybridize the labeled cDNA to a DNA array are no more than 25° C. to 30° C. (for example, 10° C.) below the melting temperature (Tm) of the native duplex of the cDNA that has the lowest melting temperature (see generally, Sambrook et al. Molecular Cloning: A Laboratory Manual, 2nd ed., Cold Spring Harbor Press, 1987; Ausubel et al., Current Protocols in Molecular Biology, Greene Publishing, 1987). Tm for nucleic acid molecules greater than about 100 bases can be calculated by the formula Tₘ=81.5+0.41%(G+C)−log(Na+). For oligonucleotide molecules less than 100 bases in length, exemplary hybridization conditions are 5° to 10° C. below Tm.

[0060] Preparation of microarrays. Nucleic acid molecules can be immobilized on a solid substrate by any art-recognized means. For example, nucleic acid molecules (such as DNA or RNA molecules) can be immobilized to nitrocellulose, or to a synthetic membrane capable of binding nucleic acid molecules, or to a nucleic acid microarray, such as a DNA microarray. A DNA microarray, or chip, is a microscopic array of DNA fragments, such as synthetic oligonucleotides, disposed in a defined pattern on a solid support, wherein they are amenable to analysis by standard hybridization methods (see, Schena, BioEssays 18: 427, 1996).

[0061] The DNA in a microarray may be derived, for example, from genomic or cDNA libraries, from fully sequenced clones, or from partially sequenced cDNAs known as expressed sequence tags (ESTs). Methods for obtaining such DNA molecules are generally known in the art (see, e.g., Ausubel et al., eds., 1994, Current Protocols in Molecular Biology, Vol. 2, Current Protocols Publishing, New York). Again by way of example, oligonucleotides may be synthesized by conventional methods, such as the methods described herein.

[0062] Microarrays can be made in a number of ways, of which several are described below. However produced, microarrays preferably share certain characteristics. The arrays are preferably reproducible, allowing multiple copies of a given array to be produced and easily compared with each other. Preferably the microarrays are small, usually smaller than 5 cm², and they are made from materials that are stable under nucleic acid hybridization conditions. A given binding site or unique set of binding sites in the microarray should specifically bind the product of a single gene (or a nucleic acid molecule that represents the product of a single gene, such as a cDNA molecule that is complementary to all, or to part, of an mRNA molecule). Although there may be more than one physical binding site (hereinafter “site”) per specific gene product, for the sake of clarity the discussion below will assume that there is a single site.

[0063] In one embodiment, the microarray is an array of polynucleotide probes, the array comprising a support with at least one surface and typically at least 100 different polynucleotide probes, each different polynucleotide probe comprising a different nucleotide sequence and being attached to the surface of the support in a different location on the surface. For example, the nucleotide sequence of each of the different polynucleotide probes can be in the range of 40 to 80 nucleotides in length. For example, the nucleotide sequence of each of the different polynucleotide probes can be in the range of 50 to 70 nucleotides in length. For example, the nucleotide sequence of each of the different polynucleotide probes can be in the range of 50 to 60 nucleotides in length. In specific embodiments, the array comprises polynucleotide probes of at least 2,000, 4,000, 10,000, 15,000, 20,000, 50,000, 80,000, or 100,000 different nucleotide sequences.

[0064] Thus, the array can include polynucleotide probes for most, or all, genes expressed in a cell, tissue, organ or organism. In a specific embodiment, the cell or organism is a mammalian cell or organism. In another specific embodiment, the cell or organism is a human cell or organism. In specific embodiments, the nucleotide sequences of the different polynucleotide probes of the array are specific for at least 50%, at least 75%, at least 80%, at least 85%, at least 90%, at least 95%, or at least 99% of the genes in the genome of the cell or organism. Most preferably, the nucleotide sequences of the different polynucleotide probes of the array are specific for all of the genes in the genome of the cell or organism. In specific embodiments, the polynucleotide probes of the array hybridize specifically and distinguishably to at least 10,000, to at least 20,000, to at least 50,000, to at least 80,000, or to at least 100,000 different polynucleotide sequences. In other specific embodiments, the polynucleotide probes of the array hybridize specifically and distinguishably to at least 90%, at least 95%, or at least 99% of the genes or gene transcripts of the genome of a cell or organism. Most preferably, the polynucleotide probes of the array hybridize specifically and distinguishably to the genes or gene transcripts of the entire genome of a cell or organism.

[0065] In specific embodiments, the array has at least 100, at least 250, at least 1,000, or at least 2,500 probes per 1 cm², preferably all or at least 25% or 50% of which are different from each other. In another embodiment, the array is a positionally addressable array (in that the sequence of the polynucleotide probe at each position is known). In another embodiment, the nucleotide sequence of each polynucleotide probe in the array is a DNA sequence. In another embodiment, the DNA sequence is a single-stranded DNA sequence. The DNA sequence may be, e.g., a cDNA sequence, or a synthetic sequence.

[0066] When a cDNA molecule that corresponds to an mRNA of a cell is made and hybridized to a microarray under suitable hybridization conditions, the level of hybridization to the site in the array corresponding to any particular gene will reflect the prevalence in the cell of mRNA transcribed from that gene. For example, when detectably labeled (e.g., with a fluorophore) DNA complementary to the total cellular mRNA is hybridized to a microarray, the site on the array corresponding to a gene (i.e., capable of specifically binding the product of the gene) that is not transcribed in the cell will have little or no signal (e.g., fluorescent signal), and a gene for which the encoded mRNA is prevalent will have a relatively strong signal.

[0067] In some embodiments, cDNA molecule populations prepared from RNA from two different cell populations, or tissues, or organs, or whole organisms, are hybridized to the binding sites of the array. A single array can be used to simultaneously screen more than one cDNA sample. For example, in the context of the present invention, a single array can be used to simultaneously screen a cDNA sample prepared from a living thing that has been contacted with an agent (e.g., candidate partial agonist of PPARγ), and the same type of living thing that has not been contacted with the agent. The cDNA molecules in the two samples are differently labeled so that they can be distinguished. In one embodiment, for example, cDNA molecules from a cell population treated with a drug is synthesized using a fluorescein-labeled NTP, and cDNA molecules from a control cell population, not treated with the drug, is synthesized using a rhodamine-labeled NTP. When the two populations of cDNA molecules are mixed and hybridized to the DNA array, the relative intensity of signal from each population of cDNA molecules is determined for each site on the array, and any relative difference in abundance of a particular mRNA detected.

[0068] In this representative example, the cDNA molecule population from the drug-treated cells will fluoresce green when the fluorophore is stimulated, and the cDNA molecule population from the untreated cells will fluoresce red. As a result, when the drug treatment has no effect, either directly or indirectly, on the relative abundance of a particular mRNA in a cell, the mRNA will be equally prevalent in treated and untreated cells and red-labeled and green-labeled cDNA molecules will be equally prevalent. When hybridized to the DNA array, the binding site(s) for that species of RNA will emit wavelengths characteristic of both fluorophores (and appear brown in combination). In contrast, when the drug-exposed cell is treated with a drug that, directly or indirectly, increases the prevalence of the mRNA in the cell, the ratio of green to red fluorescence will increase. When the drug decreases the mRNA prevalence, the ratio will decrease.

[0069] The use of a two-color fluorescence labeling and detection scheme to define alterations in gene expression has been described, e.g., in Schena et al., 1995, Science 270:467-470, which is incorporated by reference in its entirety for all purposes. An advantage of using cDNA molecules labeled with two different fluorophores is that a direct and internally controlled comparison of the mRNA levels corresponding to each arrayed gene in two cell states can be made, and variations due to minor differences in experimental conditions (e.g., hybridization conditions) will not affect subsequent analyses. However, it will be recognized that it is also possible to use cDNA molecules from a single cell, and compare, for example, the absolute amount of a particular mRNA in, e.g., a drug-treated or an untreated cell.

[0070] Exemplary microarrays and methods for their manufacture and use are set forth in T. R. Hughes et al., Nature Biotechnology 19: 342-347 (April 2001), which publication is incorporated herein by reference.

[0071] Preparation of nucleic acid molecules for immobilization on microarrays. As noted above, the “binding site” to which a particular, cognate, nucleic acid molecule specifically hybridizes is usually a nucleic acid, or nucleic acid analogue, attached at that binding site. In one embodiment, the binding sites of the microarray are DNA polynucleotides corresponding to at least a portion of some or all genes in an organism's genome. These DNAs can be obtained by, for example, polymerase chain reaction (PCR) amplification of gene segments from genomic DNA, cDNA (e.g., by reverse transcription or RT-PCR), or cloned sequences. Nucleic acid amplification primers are chosen, based on the known sequence of the genes or cDNA, that result in amplification of unique fragments (i.e., fragments that typically do not share more than 10 bases of contiguous identical sequence with any other fragment on the microarray). Computer programs are useful in the design of primers with the required specificity and optimal amplification properties. See, e.g., Oligo version 5.0 (National Biosciences). Typically each gene fragment on the microarray will be between about 50 bp and about 2000 bp, more typically between about 100 bp and about 1000 bp, and usually between about 300 bp and about 800 bp in length.

[0072] Nucleic acid amplification methods are well known and are described, for example, in Innis et al., eds., 1990, PCR Protocols: A Guide to Methods and Applications, Academic Press Inc., San Diego, Calif., which is incorporated by reference in its entirety for all purposes. Computer controlled robotic systems are useful for isolating and amplifying nucleic acids.

[0073] An alternative means for generating the nucleic acid molecules for the microarray is by synthesis of synthetic polynucleotides or oligonucleotides, e.g., using N-phosphonate or phosphoramidite chemistries (e.g., Froehler et al., 1986, Nucleic Acid Res 14:5399-5407). Synthetic sequences are typically between about 15 and about 100 bases in length, such as between about 20 and about 50 bases.

[0074] In some embodiments, synthetic nucleic acids include non-natural bases, e.g., inosine. Where the particular base in a given sequence is unknown or is polymorphic, a universal base, such as inosine or 5-nitroindole, may be substituted. Additionally, it is possible to vary the charge on the phosphate backbone of the oligonucleotide, for example, by thiolation or methylation, or even to use a peptide rather than a phosphate backbone. The making of such modifications is within the skill of one trained in the art.

[0075] As noted above, nucleic acid analogues may be used as binding sites for hybridization. An example of a suitable nucleic acid analogue is peptide nucleic acid (see, e.g., Egholm et al., 1993, Nature 365:566-568; see also U.S. Pat. No. 5,539,083).

[0076] In another embodiment, the binding (hybridization) sites are made from plasmid or phage clones of genes, cDNAs (e.g., expressed sequence tags), or inserts therefrom (Nguyen et al., 1995, Genomics 29:207-209). In yet another embodiment, the polynucleotide of the binding sites is RNA.

[0077] Attaching nucleic acids to the solid support. The nucleic acids, or analogues, are attached to a solid support, which may be made, for example, from glass, silicon, plastic (e.g., polypropylene, nylon, polyester), polyacrylamide, nitrocellulose, cellulose acetate or other materials. In general, non-porous supports, and glass in particular, are preferred. The solid support may also be treated in such a way as to enhance binding of oligonucleotides thereto, or to reduce non-specific binding of unwanted substances thereto. For example, a glass support may be treated with polylysine or silane to facilitate attachment of oligonucleotides to the slide.

[0078] Methods of immobilizing DNA on the solid support may include direct touch, micropipetting (see, e.g., Yershov et al., Proc. Natl. Acad. Sci. USA 93(10):4913-4918 (1996)), or the use of controlled electric fields to direct a given oligonucleotide to a specific spot in the array. Oligonucleotides are typically immobilized at a density of 100 to 10,000 oligonucleotides per cm², such as at a density of about 1000 oligonucleotides per cm².

[0079] A preferred method for attaching the nucleic acids to a surface is by printing on glass plates, as is described generally by Schena et al., 1995, Science 270:467-470. This method is especially useful for preparing microarrays of cDNA. (See also DeRisi et al., 1996, Nature Genetics 14:457-460; Shalon et al., 1996, Genome Res. 6:639-645; and Schena et al., Proc. Natl. Acad. Sci. USA 93(20):10614-19, 1996.)

[0080] In an alternative to immobilizing pre-fabricated oligonucleotides onto a solid support, it is possible to synthesize oligonucleotides directly on the support (see, e.g., Maskos et al., Nucl. Acids Res. 21:2269-70, 1993; Lipshutz et al., 1999, Nat. Genet. 21(1 Suppl):20-4). Methods of synthesizing oligonucleotides directly on a solid support include photolithography (see McGall et al., Proc. Natl. Acad. Sci. (USA) 93:13555-60, 1996) and piezoelectric printing (Lipshutz et al., 1999, Nat. Genet. 21(1 Suppl):20-4).

[0081] A high-density oligonucleotide array may be employed. Techniques are known for producing arrays containing thousands of oligonucleotides complementary to defined sequences, at defined locations on a surface using photolithographic techniques for synthesis in situ (see, Pease et al., 1994, Proc. Natl. Acad. Sci. USA 91:5022-5026; Lockhart et al., 1996, Nature Biotechnol. 14:1675-80) or other methods for rapid synthesis and deposition of defined oligonucleotides (Lipshutz et al., 1999, Nat. Genet. 21(1 Suppl):20-4.).

[0082] In some embodiments, microarrays are manufactured by means of an ink jet printing device for oligonucleotide synthesis, e.g., using the methods and systems described by Blanchard in International Patent Publication No. WO 98/41531, published Sep. 24, 1998; Blanchard et al., 1996, Biosensors and Bioeletronics 11:687-690; Blanchard, 1998, in Synthetic DNA Arrays in Genetic Engineering, Vol. 20, J. K. Setlow, Ed., Plenum Press, New York at pages 111-123; U.S. Pat. No. 6,028,189 to Blanchard. Specifically, the oligonucleotide probes in such microarrays are preferably synthesized in arrays, e.g., on a glass slide, by serially depositing individual nucleotide bases in “microdroplets” of a high surface tension solvent such as propylene carbonate. The microdroplets have small volumes (e.g., 100 pL or less, more preferably 50 pL or less) and are separated from each other on the microarray (e.g., by hydrophobic domains) to form circular surface tension wells which define the locations of the array elements (i.e., the different probes).

[0083] Other methods for making microarrays, e.g., by masking (Maskos and Southern, 1992, Nuc. Acids Res. 20:1679-1684), may also be used. In principle, any type of array, for example dot blots on a nylon hybridization membrane (see Sambrook et al., 1989, Molecular Cloning—A Laboratory Manual (2nd Ed.), Vols. 1-3, Cold Spring Harbor Laboratory, Cold Spring Harbor, N.Y.), could be used, although, as will be recognized by those of skill in the art, very small arrays are typically preferred because hybridization volumes will be smaller.

[0084] Signal detection and data analysis. When fluorescently labeled probes are used, the fluorescence emissions at each site of an array can be detected by scanning confocal laser microscopy. In one embodiment, a separate scan, using the appropriate excitation line, is carried out for each of the two fluorophores used. Alternatively, a laser can be used that allows simultaneous specimen illumination at wavelengths specific to the two fluorophores and emissions from the two fluorophores can be analyzed simultaneously (see Shalon et al., 1996, Genome Research 6:639-645, which is incorporated by reference in its entirety for all purposes). In one embodiment, the arrays are scanned with a laser fluorescent scanner with a computer controlled X-Y stage and a microscope objective. Sequential excitation of the two fluorophores is achieved with a multi-line, mixed gas laser and the emitted light is split by wavelength and detected with two photomultiplier tubes. Fluorescence laser scanning devices are described in Shalon et al., 1996, Genome Res. 6:639-645 and in other references cited herein. Alternatively, the fiber-optic bundle described by Ferguson et al., 1996, Nature Biotechnol. 14:1681-1684, may be used to monitor mRNA abundance levels at a large number of sites simultaneously.

[0085] Signals are recorded and may be analyzed by computer, e.g., using a 12 bit analog to digital board. In some embodiments the scanned image is despeckled using a graphics program (e.g., Hijaak Graphics Suite) and then analyzed using an image gridding program that creates a spreadsheet of the average hybridization at each wavelength at each site. If necessary, an experimentally determined correction for “cross talk” (or overlap) between the channels for the two fluors may be made. For any particular hybridization site on the transcript array, a ratio of the emission of the two fluorophores can be calculated. The ratio is independent of the absolute expression level of the cognate gene, but is useful for genes whose expression is significantly modulated by drug administration.

[0086] The relative abundance of an mRNA in two biological samples is scored as a perturbation and its magnitude determined (i.e., the abundance is different in the two sources of mRNA tested), or as not perturbed (i.e., the relative abundance is the same). Preferably, in addition to identifying a perturbation as positive or negative, it is advantageous to determine the magnitude of the perturbation. This can be carried out, as noted above, by calculating the ratio of the emission of the two fluorophores used for differential labeling, or by analogous methods that will be readily apparent to those of skill in the art.

[0087] By way of example, two samples, each labeled with a different fluor, are hybridized simultaneously to permit differential expression measurements. If neither sample hybridizes to a given spot in the array, no fluorescence will be seen. If only one hybridizes to a given spot, the color of the resulting fluorescence will correspond to that of the fluor used to label the hybridizing sample (for example, green if the sample was labeled with Cy3, or red, if the sample was labeled with Cy5). If both samples hybridize to the same spot, an intermediate color is produced (for example, yellow if the samples were labeled with fluorescein and rhodamine). Then, applying methods of pattern recognition and data analysis known in the art, it is possible to quantify differences in gene expression between the samples. Methods of pattern recognition and data analysis are described in e.g., International Publication WO 00/24936, which is incorporated by reference herein.

[0088] Measurement of Expression Pattern of an Efficacy-Related Population of Proteins: In the practice of some embodiments of the present invention, the expression pattern of an efficacy-related population of proteins in a living thing is measured. Any useful method for measuring protein expression patterns can be used. Typically all, or substantially all, proteins are extracted from a living thing, or a portion thereof. The living thing is typically treated to disrupt cells, for example by homogenizing the cellular material in a blender, or by grinding (in the presence of acid-washed, siliconized, sand if desired) the cellular material with a mortar and pestle, or by subjecting the cellular material to osmotic stress that lyses the cells. Cell disruption may be carried out in the presence of a buffer that maintains the released contents of the disrupted cells at a desired pH, such as the physiological pH of the cells. The buffer may optionally contain inhibitors of endogenous proteases. Physical disruption of the cells can be conducted in the presence of chemical agents (e.g., detergents) that promote the release of proteins.

[0089] The cellular material may be treated in a manner that does not disrupt a significant proportion of cells, but which removes proteins from the surface of the cellular material, and/or from the interstices between cells. For example, cellular material can be soaked in a liquid buffer, or, in the case of plant material, can be subjected to a vacuum, in order to remove proteins located in the intercellular spaces and/or in the plant cell wall. If the cellular material is a microorganism, proteins can be extracted from the microorganism culture medium.

[0090] It may be desirable to include one or more protease inhibitors in the protein extraction buffer. Representative examples of protease inhibitors include: serine protease inhibitors (such as phenylmethylsulfonyl fluoride (PMSF), benzamide, benzamidine HCl, ε-Amino-n-caproic acid and aprotinin (Trasylol)); cysteine protease inhibitors, such as sodium p-hydroxymercuribenzoate; competitive protease inhibitors, such as antipain and leupeptin; covalent protease inhibitors, such as iodoacetate and N-ethylmaleimide; aspartate (acidic) protease inhibitors, such as pepstatin and diazoacetylnorleucine methyl ester (DAN); metalloprotease inhibitors, such as EGTA [ethylene glycol bis(β-aminoethyl ether) N,N,N′N′-tetraacetic acid], and the chelator 1, 10-phenanthroline.

[0091] The mixture of released proteins may, or may not, be treated to completely or partially purify some of the proteins for further analysis, and/or to remove non-protein contaminants (e.g., carbohydrates and lipids). In some embodiments, the complete mixture of released proteins is analyzed to determine the amount and/or identity of some or all of the proteins. For example, the protein mixture may be applied to a substrate bearing antibody molecules that specifically bind to one or more proteins in the mixture. The unbound proteins are removed (e.g., washed away with a buffer solution), and the amount of bound protein(s) is measured. Representative techniques for measuring the amount of protein using antibodies are described in Harlow and Lane, 1988, Antibodies: A Laboratory Manual, Cold Spring Harbor, N.Y., and include such techniques as the ELISA assay. Moreover, protein microarrays can be used to simultaneously measure the amount of a multiplicity of proteins. A surface of the microarray bears protein binding agents, such as monoclonal antibodies specific to a plurality of protein species. Preferably, antibodies are present for a substantial fraction of the encoded proteins, or at least for those proteins whose amount is to be measured. Methods for making monoclonal antibodies are well known (see, e.g., Harlow and Lane, 1988, Antibodies: A Laboratory Manual, Cold Spring Harbor, N.Y.). Protein binding agents are not restricted to monoclonal antibodies, and can be, for example, scFv/Fab diabodies, affibodies, and aptamers. Protein microarrays are generally described by M. F. Templin et al., Protein Microarray Technology, Trends in Biotechnology, 20(4):160-166(2002). Representative examples of protein microarrays are described by H. Zhu et al., Global Analysis of Protein Activities Using Proteome Chips, Science, 293:2102-2105 (2001); and G. MacBeath and S. L. Schreiber, Printing Proteins as Microarrays for High-Throughput Function Determination, Science, 289:1760-1763 (2000).

[0092] In some embodiments, the released protein is treated to completely or partially purify some of the proteins for further analysis, and/or to remove non-protein contaminants. Any useful purification technique, or combination of techniques, can be used. For example, a solution containing extracted proteins can be treated to selectively precipitate certain proteins, such as by dissolving ammonium sulfate in the solution, or by adding trichloroacetic acid. The precipitated material can be separated from the unprecipitated material, for example by centrifugation, or by filtration. The precipitated material can be further fractionated if so desired.

[0093] By way of example, a number of different neutral or slightly acidic salts have been used to solubilize, precipitate, or fractionate proteins in a differential manner. These include NaCl, Na₂SO₄, MgSO₄ and NH₄(SO₄)₂. Ammonium sulfate is a commonly used precipitant for salting proteins out of solution. The solution to be treated with ammonium sulfate may first be clarified by centrifugation. The solution should be in a buffer at neutral pH unless there is a reason to conduct the precipitation at another pH; in most cases the buffer will have ionic strength close to physiological. Precipitation is usually performed at 0-4° C. (to reduce the rate of proteolysis caused by proteases in the solution), and all solutions should be precooled to that temperature range.

[0094] Representative examples of other art-recognized techniques for purifying, or partially purifying, proteins from a living thing are exclusion chromatography, ion-exchange chromatography, hydrophobic interaction chromatography, reversed-phase chromatography and immobilized metal affinity chromatography.

[0095] Hydrophobic interaction chromatography and reversed-phase chromatography are two separation methods based on the interactions between the hydrophobic moieties of a sample and an insoluble, immobilized hydrophobic group present on the chromatography matrix. In hydrophobic interaction chromatography the matrix is hydrophilic and is substituted with short-chain phenyl or octyl nonpolar groups. The mobile phase is usually an aqueous salt solution. In reversed phase chromatography the matrix is silica that has been substituted with longer n-alkyl chains, usually C₈ (octylsilyl) or C₁₈ (octadecylsilyl). The matrix is less polar than the mobile phase. The mobile phase is usually a mixture of water and a less polar organic modifier.

[0096] Separations on hydrophobic interaction chromatography matrices are usually done in aqueous salt solutions, which generally are nondenaturing conditions. Samples are loaded onto the matrix in a high-salt buffer and elution is by a descending salt gradient. Separations on reversed-phase media are usually done in mixtures of aqueous and organic solvents, which are often denaturing conditions. In the case of protein purification, hydrophobic interaction chromatography depends on surface hydrophobic groups and is usually carried out under conditions which maintain the integrity of the protein molecule. Reversed-phase chromatography depends on the native hydrophobicity of the protein and is carried out under conditions which expose nearly all hydrophobic groups to the matrix, i.e., denaturing conditions.

[0097] Ion-exchange chromatography is designed specifically for the separation of ionic or ionizable compounds. The stationary phase (column matrix material) carries ionizable functional groups, fixed by chemical bonding to the stationary phase. These fixed charges carry a counterion of opposite sign. This counterion is not fixed and can be displaced. Ion-exchange chromatography is named on the basis of the sign of the displaceable charges. Thus, in anion ion-exchange chromatography the fixed charges are positive and in cation ion-exchange chromatography the fixed charges are negative.

[0098] Retention of a molecule on an ion-exchange chromatography column involves an electrostatic interaction between the fixed charges and those of the molecule, binding involves replacement of the nonfixed ions by the molecule. Elution, in turn, involves displacement of the molecule from the fixed charges by a new counterion with a greater affinity for the fixed charges than the molecule, and which then becomes the new, nonfixed ion.

[0099] The ability of counterions (salts) to displace molecules bound to fixed charges is a function of the difference in affinities between the fixed charges and the nonfixed charges of both the molecule and the salt. Affinities in turn are affected by several variables, including the magnitude of the net charge of the molecule and the concentration and type of salt used for displacement.

[0100] Solid-phase packings used in ion-exchange chromatography include cellulose, dextrans, agarose, and polystyrene. The exchange groups used include DEAE (diethylaminoethyl), a weak base, that will have a net positive charge when ionized and will therefore bind and exchange anions; and CM (carboxymethyl), a weak acid, with a negative charge when ionized that will bind and exchange cations. Another form of weak anion exchanger contains the PEI (polyethyleneimine) functional group. This material, most usually found on thin layer sheets, is useful for binding proteins at pH values above their pI. The polystyrene matrix can be obtained with quaternary ammonium functional groups for strong base anion exchange or with sulfonic acid functional groups for strong acid cation exchange. Intermediate and weak ion-exchange materials are also available. Ion-exchange chromatography need not be performed using a column, and can be performed as batch ion-exchange chromatography with the slurry of the stationary phase in a vessel such as a beaker.

[0101] Gel filtration is performed using porous beads as the chromatographic support. A column constructed from such beads will have two measurable liquid volumes, the external volume, consisting of the liquid between the beads, and the internal volume, consisting of the liquid within the pores of the beads. Large molecules will equilibrate only with the external volume while small molecules will equilibrate with both the external and internal volumes. A mixture of molecules (such as proteins) is applied in a discrete volume or zone at the top of a gel filtration column and allowed to percolate through the column. The large molecules are excluded from the internal volume and therefore emerge first from the column while the smaller molecules, which can access the internal volume, emerge later. The volume of a conventional matrix used for protein purification is typically 30 to 100 times the volume of the sample to be fractionated. The absorbance of the column effluent can be continuously monitored at a desired wavelength using a flow monitor.

[0102] A technique that can be applied to the purification of proteins is High Performance Liquid Chromatography (HPLC). HPLC is an advancement in both the operational theory and fabrication of traditional chromatographic systems. HPLC systems for the separation of biological macromolecules vary from the traditional column chromatographic systems in three ways; (1) the column packing materials are of much greater mechanical strength, (2) the particle size of the column packing materials has been decreased 5- to 10-fold to enhance adsorption-desorption kinetics and diminish bandspreading, and (3) the columns are operated at 10-60 times higher mobile-phase velocity. Thus, by way of non-limiting example, HPLC can utilize exclusion chromatography, ion-exchange chromatography, hydrophobic interaction chromatography, reversed-phase chromatography and immobilized metal affinity chromatography.

[0103] An exemplary technique that is useful for measuring the amounts of individual proteins in a mixture of proteins is two dimensional gel electrophoresis. This technique typically involves isoelectric focussing of a protein mixture along a first dimension, followed by SDS-PAGE of the focussed proteins along a second dimension (see, e.g., Hames et al., 1990, Gel Electrophoresis of Proteins: A Practical Approach, IRL Press, New York; Shevchenko et al., 1996, Proc. Nat'l Acad. Sci. U.S.A. 93:1440-1445; Sagliocco et al., 1996, Yeast 12:1519-1533; Lander, 1996, Science 274:536-539; and Beaumont et al., Life Science News, 7, 2001, Amersham Pharmacia Biotech. The resulting series of protein “spots” on the second dimension SDS-PAGE gel can be measured to reveal the amount of one or more specific proteins in the mixture. The identity of the measured proteins may, or may not, be known; it is only necessary to be able to identify and measure specific protein “spots” on the second dimension gel. Numerous techniques are available to measure the amount of protein in a “spot” on the second dimension gel. For example, the gel can be stained with a reagent that binds to proteins and yields a visible protein “spot” (e.g., Coomassie blue dye, or staining with silver nitrate), and the density of the stained spot can be measured. Again by way of example, all, or most, proteins in a mixture can be measured with a fluorescent reagent before electrophoretic separation, and the amount of fluorescence in some, or all, of the resolved protein “spots” can be measured (see, e.g., Beaumont et al., Life Science News, 7, 2001, Amersham Pharmacia Biotech).

[0104] Again by way of example, any HPLC technique (e.g., exclusion chromatography, ion-exchange chromatography, hydrophobic interaction chromatography, reversed-phase chromatography and immobilized metal affinity chromatography) can be used to separate proteins in a mixture, and the separated proteins can thereafter be directed to a detector (e.g., spectrophotometer) that detects and measures the amount of individual proteins.

[0105] In some embodiments of the invention it is desirable to both identify and measure the amount of specific proteins. A technique that is useful in these embodiments of the invention is mass spectrometry, in particular the techniques of electrospray ionization mass spectrometry (ESI-MS) and matrix-assisted laser desorption/ionization mass spectrometry (MALDI-MS), although it is understood that mass spectrometry can be used only to measure the amounts of proteins without also identifying (by function and/or sequence) the proteins. These techniques overcame the problem of generating ions from large, non-volatile, analytes, such as proteins, without significant analyte fragmentation (see, e.g., R. Aebersold and D. R. Goodlett, Mass Spectrometry in Proteomics, Chemical Reviews, 102(2): 269-296 (2001)).

[0106] Thus, for example, proteins can be extracted from cells of a living thing and individual proteins purified therefrom using, for example, any of the art-recognized purification techniques described herein (e.g., HPLC). The purified proteins are subjected to enzymatic degradation using a protein-degrading agent (e.g., an enzyme, such as trypsin) that cleaves proteins at specific amino acid sequences. The resulting protein fragments are subjected to mass spectrometry. If the sequence of the complete genome (or at least the sequence of part of the genome) of the living thing from which the proteins were isolated is known, then computer algorithms are available that can compare the observed protein fragments to the protein fragments that are predicted to exist by cleaving the proteins encoded by the genome with the agent used to cleave the extracted proteins. Thus, the identity, and the amount, of the proteins from which the observed fragments are derived can be determined.

[0107] Again by way of example, the use of isotope-coded affinity tags in conjunction with mass spectrometry is a technique that is adapted to permit comparison of the identities and amounts of proteins expressed in different samples of the same type of living thing subjected to different treatments (e.g., the same type of living tissue cultured, in vitro, in the presence or absence of a candidate drug)(see, e.g., S. P. Gygi et al., Quantitative Analysis of Complex Protein Mixtures Using Isotope-Coded Affinity Tags (ICATs), Nature Biotechnology, 17:994-999(1999)). In an exemplary embodiment of this method, two different samples of the same type of living thing are subjected to two different treatments (treatment 1 and treatment 2). Proteins are extracted from the treated living things and are labeled (via cysteine residues) with an ICAT reagent that includes (1) a thiol-specific reactive group, (2) a linker that can include eight deuteriums (yielding a heavy ICAT reagent) or no deuteriums (yielding a light ICAT reagent), and (3) a biotin molecule. Thus, for example, the proteins from treatment 1 may be labeled with the heavy ICAT reagent, and proteins from treatment 2 may be labelled with the light ICAT reagent. The labeled proteins from treatment 1 and treatment 2 are combined and enzymatically cleaved to generate peptide fragments. The tagged (cysteine-containing) fragments are isolated by avidin affinity chromatography (that binds the biotin moiety of the ICAT reagent). The isolated peptides are then separated by mass spectrometry. The quantity and identity of the peptides (and the proteins from which they are derived) may be determined. The method is also applicable to proteins that do not include cysteines by using ICAT reagents that label other amino acids.

[0108] Comparison of Gene Expression Levels: Art-recognized statistical techniques can be used to compare the levels of expression of individual genes, or proteins, to identify genes, or proteins, which exhibit significantly different expression levels in treated living things compared to untreated living things, or in diseased living things compared to non-diseased living things. Thus, for example, a t-test can be used to determine whether the mean value of repeated measurements of the level of expression of a particular gene, or protein, is significantly different in a living thing treated with an agent, compared to the same living thing that has not been treated with the agent. Similarly, Analysis of Variance (ANOVA) can be used to compare the mean values of two or more populations (e.g., two or more populations of cultured cells treated with different amounts of a candidate drug) to determine whether the means are significantly different.

[0109] The following publications describe examples of art-recognized techniques that can be used to compare the levels of expression of individual genes, or proteins, in treated and untreated living things, or in diseased and non-diseased living things, to identify genes which exhibit significantly different expression levels: Nature Genetics, Vol.32, ps. 461-552 (supplement December 2002); Bioinformatics 18(4):546-54 (April 2002); Dudoit, et al. Technical Report 578, University of California at Berkeley; Tusher et al., Proc. Nat'l. Acad. Sci. U.S.A. 98(9):5116-5121 (April 2001); and Kerr, et al., J. Comput. Biol. 7: 819-837.

[0110] Representative examples of other statistical tests that are useful in the practice of the present invention include the chi squared test which can be used, for example, to test for association between two factors (e.g., transcriptional induction, or repression, by a drug molecule and positive or negative correlation with the presence of a disease state). Again by way of example, art-recognized correlation analysis techniques can be used to test whether a correlation exists between two sets of measurements (e.g., between gene expression and disease state). Standard statistical techniques can be found in statistical texts, such as Modern Elementary Statistics, John E. Freund, 7^{th} edition, published by Prentice-Hall; and Practical Statistics for Environmental and Biological Scientists, John Townend, published by John Wiley & Sons, Ltd.

[0111] Calculation of an Efficacy Value: An efficacy value can be calculated by measuring the response, to an agent, of each individual gene, or protein, within the efficacy-related population of genes, or efficacy-related population of proteins, to yield a response value for each gene, or protein, within the population, and then performing at least one calculation on all of the response values to yield an efficacy value that numerically represents the expression pattern of the efficacy-related population of genes, or efficacy-related population of proteins, in response to the agent. For example, nucleic acid arrays can be used to measure the response of each individual gene within the efficacy-related gene population, as described supra. Again by way of example, Northern blots may be used to measure the response of each individual gene within the efficacy-related gene population. Measurement of gene expression is usually easier in vitro than in vivo, and an in vitro system is usually better adapted to facilitate high-throughput screening of multiple agents.

[0112] An efficacy value can be calculated by any suitable means. For example, a living thing (e.g., a rat heart) is contacted with a reference agent (possessing a known biological activity) in a multiplicity of identical, separate, experiments, and the level of expression of each individual gene, or protein, within an efficacy-related gene or protein population, in response to the reference agent, is measured in each of the multiplicity of experiments. The average expression value for each of the genes, or proteins, is calculated by adding together the expression values from each of the multiplicity of experiments, and dividing the sum by the number of experiments.

[0113] The same type of living thing (e.g., a rat heart) is contacted with a candidate agent in a multiplicity of identical, separate, experiments, and the level of expression of each individual gene, or protein, within an efficacy-related gene or protein population, in response to the candidate agent, is measured in each of the multiplicity of experiments. The average expression value for each of the genes, or proteins, is calculated by adding together the expression values from each of the multiplicity of experiments, and dividing the sum by the number of experiments.

[0114] The average expression value for each gene in response to the candidate agent is divided by the average expression value for each gene in response to the reference agent to yield a percentage expression value for each gene. The mean of all of the percentage expression values is calculated and is the efficacy value for the candidate agent. Similarly, if protein expression levels are being measured, the average expression value for each protein in response to the candidate agent is divided by the average expression value for each protein in response to the reference agent to yield a percentage expression value for each protein. The mean of all of the percentage expression values is calculated and is the efficacy value for the candidate agent.

[0115] By way of further example, the log(ratio)s of the expression levels of all of the genes, or proteins, within an efficacy-related population can be represented by a single scale factor (which is the efficacy value for the agent that caused the gene expression pattern or the protein expression pattern). Exemplary methods for calculating the scale factor S include:

$$( 1 ) . S = {\sum }_{i = 1}^{n} {X}_{i} / {\sum }_{i = 1}^{n} {R}_{i} ;$$

$$n stands for the number of genes and \text{/} or proteins . \\ ( 2 ) . S = ( {\sum }_{i = 1}^{n} {X}_{i} / {R}_{i} ) / n$$

[0116] (3). Fit a straight line by: Xᵢ=S*Rᵢ

[0117] (4). Least χ² fitting: choose a value of S to minimize the χ²:

$${χ}^{2} = {\sum }_{i = 1}^{n} {( S * {R}_{i} - {X}_{i} )}^{2} / ( {σ}_{Ri}^{2} + {σ}_{Xi}^{2} )$$

(5). Least square fitting: choose a value of S to minimize the Q²:

$${Q}^{2} = {\sum }_{i = 1}^{n} {( S * {R}_{i} - {X}_{i} )}^{2}$$

[0118] In the foregoing formulae, Ri, σ_{Ri} stand for the log(Ratio) and error of the log(Ratio) for ith gene, or ith protein, from the template experiment, Xi and σ_{Xi} stand for the log(Ratio) and error of log(Ratio) of the same gene, or protein, expressed in response to a candidate agent. The template experiment is the experiment that yields gene expression data, or protein expression data, in response to an agent having a known biological activity. For example, in the context of using the methods of the invention to identify new agonists of PPARγ, the template experiment is treatment of a living thing with at least one known agonist of PPARγ to yield an efficacy-related gene expression pattern, and/or protein expression pattern, that is characteristic of the known agonist of PPARγ.

[0119] Use of a Scale of Efficacy Values: In some embodiments of the methods of this aspect of the invention, an efficacy value of an agent is compared to a scale of efficacy values, typically a continuous scale of efficacy values. The scale of efficacy values can be constructed, for example, by calculating an efficacy value for a reference agent that is known to stimulate a target biological response. This efficacy value forms the upper limit of a continuous scale of efficacy values. The lower limit of the scale can be any value that is less than the efficacy value that forms the upper limit of the scale. For example, the lower limit of the continuous scale can be zero, and the upper limit of the continuous scale can be 1.0. If desired, the scale can be divided into a number of spaced divisions, usually equally spaced divisions, thereby facilitating comparison of an efficacy value of an agent to the scale. For example, a scale that extends from a value of 0 to a value of 1.0 can be divided into the following equally spaced divisions: 0.1, 0.2, 0.3, 0.4, 0.5, 0.6, 0.7, 0.8, 0.9 and 1.0. Optionally, efficacy values can be generated for a multiplicity of reference agents (e.g., 10, 20, 30, 40 or 50 reference agents) that each stimulate the same target, biological, response to different degrees, thereby generating a scale of efficacy values wherein each of the values are actually calculated from expression patterns of an efficacy-related gene population and/or an efficacy-related protein population.

[0120] Thus, for example, the upper limit of a continuous scale of efficacy values can be a value of 1.0, which is the efficacy value of a reference agent that is known to stimulate a target biological response. The lower limit of the scale can be arbitrarily set as zero. If the efficacy value of a candidate agent is 0.9, then it can be inferred that the candidate agent is also likely to stimulate the target biological response, because the efficacy value of the candidate agent is close to the efficacy value of the reference agent that is known to stimulate the target biological response.

[0121] Toxicity Values and Toxicity-Related Populations of Genes and Proteins: The methods of the invention, for determining whether an agent possesses a defined biological activity, can include the step of comparing a toxicity value of an agent to at least one reference toxicity value to yield a toxicity comparison result, wherein each toxicity value represents at least one expression pattern of the same toxicity-related population of genes or toxicity-related population of proteins. In some embodiments, a toxicity value of the agent is compared to a scale of toxicity values to yield a toxicity comparison result, wherein each toxicity value represents at least one expression pattern of the same toxicity-related population of genes or toxicity-related population of proteins.

[0122] A toxicity value is a value that numerically represents the level of expression, in response to an agent, of one of the following: (1) all of the genes within a toxicity-related population of genes; or (2) all of the proteins within a toxicity-related population of proteins. The toxicity-related population of genes, or the toxicity-related population of proteins, yields at least one expression pattern, in response to an agent, that correlates (positively or negatively) with the presence of at least one undesirable biological response caused by the agent in a living thing.

[0123] The gene expression pattern of a toxicity-related population of genes, or proteins, induced by an agent, and, therefore, the toxicity value calculated from the induced gene expression pattern, or protein expression pattern, provides an indication of the extent to which an agent induces one or more undesirable effect(s) in a living thing. Thus, the ability of an agent to induce one, or more, undesirable effect(s) in a living thing can be compared to the ability of one or more other agents to induce the same undesirable effect(s) in the same living thing.

[0124] It is typically easier, and more readily informative, to compare toxicity values for different agents, than to directly compare the gene expression patterns, or protein expression patterns, induced in a toxicity-related population of genes or proteins by the agents. For example, comparison of toxicity values can be used to determine whether a candidate inhibitor of a target biological response (e.g., a candidate inhibitor of cholesterol synthesis in the mammalian liver) causes the same undesirable biological effects (e.g., destruction of liver cells) as a known inhibitor of the same target biological response. Thus, the toxicity value of the candidate inhibitor of the target biological response is compared to the toxicity value of the known inhibitor of the same target, biological, response to determine whether the two toxicity values are similar. If the toxicity value of the known inhibitor is similar to the toxicity value of the candidate inhibitor, then it is inferred that the candidate inhibitor causes the same, or similar, undesirable biological responses as the known inhibitor.

[0125] Again by way of example, in the context of comparing candidate inhibitors of a target biological response to determine which candidate inhibitor is also the weakest inducer of a specific, undesirable, side-effect, the toxicity values of each candidate inhibitor are compared to each other, and it is inferred that the candidate inhibitor that has the numerically smallest toxicity value is the weakest inducer of the undesirable side-effect.

[0126] By way of further example, comparison of toxicity values can be used to identify a partial agonist of a specific biological response (e.g., reduction in the amount of glucose in the blood plasma of a diabetic human being). Typically, an agonist of a target biological response elicits more additional biological responses, including undesirable responses, than a partial agonist of the same target biological response. Consequently, partial agonists of a target biological response are usually preferred over agonists of the target biological response for use as therapeutic agents for treating diseases in which the target biological response is malfunctioning. Thus, when screening candidate therapeutic agents that affect the target biological response, it may be desirable to know whether a candidate agent acts more like a known agonist of the target biological response (and so may have more adverse side effects), or whether the candidate agent acts more like a known partial agonist of the target biological response (and so may have fewer adverse side effects). To this end, a population of genes, or proteins, is identified that yields an expression pattern that correlates (positively or negatively) with the induction of one or more undesirable effects in a living thing in response to a known agonist of the target biological response, and that also yields a different expression pattern that correlates (positively or negatively) with the induction of one or more undesirable effects in the same living thing in response to the partial agonist. This is the population of toxicity-related genes or the population of toxicity-related proteins. Typically, the population of toxicity-related genes, or the population of toxicity-related proteins, is the population of toxicity-related genes, or the population of toxicity-related proteins, that yields expression patterns that most clearly distinguish between the agonist and the partial agonist.

[0127] A toxicity value is calculated for the agonist, and a toxicity value is calculated for the partial agonist. A toxicity value is also calculated for the candidate agent, and this value is compared to the toxicity value calculated for the agonist, and to the toxicity value calculated for the partial agonist. The result of this comparison reveals whether the gene or protein expression pattern induced by the candidate agent is more like the gene or protein expression pattern induced by the agonist, or is more like the gene or protein expression pattern induced by the partial agonist. In this example, the candidate agent would be selected for further study if its toxicity value is closer to the toxicity value of the known partial agonist than to the toxicity value of the known agonist.

[0128] A toxicity-related population of genes or proteins may be identified, for example, by contacting a living thing (e.g., living tissue, living organ or living organism), or population of living things (e.g., population of living cells in culture), with an agent that is known to cause at least one undesirable biological response that is to be measured using the toxicity-related population of genes or proteins. A population of genes or proteins is identified in the living thing that yields at least one expression pattern that correlates (positively or negatively) with the occurrence of the undesirable biological response(s) caused by the agent. This is the toxicity-related population of genes or proteins. The techniques used to measure and analyze gene expression, or protein expression (e.g., gene expression analysis using DNA microarrays, protein expression analysis using protein microarrays) to identify a toxicity-related population of genes or proteins are the same as the techniques that are useful for measuring and analyzing gene expression or protein expression to identify an efficacy-related population of genes or proteins, as described supra.

[0129] Example 2 herein describes the identification of toxicity-related populations of genes that are useful for determining whether the undesirable effects induced by a candidate agent in a living thing are more like the undesirable effects induced in the same living thing by a known agonist of PPARγ, or are more like the undesirable effects induced in the same living thing by a known partial agonist of PPARγ.

[0130] In some embodiments of the methods of the invention, the toxicity-related population of genes or proteins yields at least one toxicity-related gene expression pattern, in response to an agent, that correlates (positively or negatively) with the presence of at least one undesirable biological response caused by the agent in a living thing, wherein the at least one toxicity-related gene expression pattern, or toxicity-related protein expression pattern, appears before the undesirable biological response. Thus, for example, these embodiments of the methods of the invention are particularly useful for high-throughput screening of numerous drug candidates because it is not necessary to wait for the appearance of the undesirable biological response in order to identify those drug candidates that cause the undesirable biological response.

[0131] Calculation of Toxicity Values: A toxicity value is calculated by measuring the response, to an agent, of each individual gene or protein within the toxicity-related gene population, or toxicity-related protein population, to yield a response value for each gene or protein within the population, and then performing at least one calculation on all of the response values to yield a toxicity value that numerically represents the expression pattern of the toxicity-related population of genes, or toxicity-related protein population, in response to the agent. A toxicity value can be calculated by any suitable method, such as the exemplary methods described, supra, for calculating an efficacy value.

[0132] Use of a Scale of Toxicity Values: In some embodiments of the methods of this aspect of the invention, a toxicity value of an agent is compared to a scale of toxicity values, typically a continuous scale of toxicity values. The scale of toxicity values can be constructed, and used, with the same techniques useful for constructing and using a scale of efficacy values. For example, a scale of toxicity values can be constructed by calculating a toxicity value for a reference agent that is known to stimulate an undesirable biological response. This toxicity value forms the upper limit of a continuous scale of toxicity values. The lower limit of the scale can be any value that is less than the toxicity value that forms the upper limit of the scale. For example, the lower limit of the continuous scale can be zero, and the upper limit of the continuous scale can be 1.0. Thus, for example, if the toxicity value of a candidate agent is 0.9, then it can be inferred that the candidate agent is likely to stimulate the undesirable biological response, because the toxicity value of the candidate agent is close to the toxicity value of the reference agent that is known to stimulate the undesirable biological response.

[0133] Classifier Values: The methods of this aspect of the invention can include the step of comparing a classifier value of an agent to at least one reference classifier value to yield a classifier comparison result, wherein each classifier value represents at least one expression pattern of the same classifier population of genes, or classifier population of proteins. In some embodiments, a classifier value of the agent is compared to a scale of classifier values to yield a classifier comparison result, wherein each classifier value represents at least one expression pattern of the same classifier population of genes, or classifier population of proteins.

[0134] A classifier value numerically represents the level of expression, in response to an agent, of one of the following: (1) all of the genes within a classifier population of genes; or (2) all of the proteins within a classifier population of proteins. A classifier population of genes or proteins yields different gene expression patterns, or protein expression patterns, and different calculated classifier values, in response to different reference agents that have different biological activities (e.g., an agonist and a partial agonist of the same target biological response). The gene expression pattern, or protein expression pattern, induced by an agent in the classifier population of genes or proteins correlates (positively or negatively) with the occurrence of the biological activity of the agent. Thus, the biological activities of different agents can be grouped into one, or more, classes based on the gene expression pattern, or protein expression pattern, induced by an agent in one, or more, classifier population(s) of genes or proteins. It is typically easier, and more readily informative, to compare classifier values for different agents, than to compare the gene expression patterns from which the classifier values are calculated.

[0135] Thus, for example, the classifier value of a candidate agent (e.g., a candidate therapeutic drug molecule) can be compared to the classifier value of a first reference agent that possesses a known biological activity, and to the classifier value of a second reference agent, that possesses a known biological activity that is different from the biological activity of the first reference agent. The comparison reveals whether the gene expression pattern, or protein expression pattern, induced by the candidate agent (and, by implication, the biological activity of the candidate agent) is more like the gene expression pattern, or protein expression pattern, induced by the first reference agent, or is more like the gene expression pattern, or protein expression pattern, induced by the second reference agent. The biological activity of the candidate agent can thereby be classified as being more like the first reference agent, or as being more like the second reference agent.

[0136] By way of specific example, the first reference agent may be an agonist of a target biological response in a living thing, and the second reference agent may be a partial agonist of the same target biological response in the same living thing. The agonist stimulates the target biological response in the living thing, but also stimulates other biological responses which may be toxic, or otherwise undesirable, to the living thing. The partial agonist stimulates the same target biological response as the agonist, but stimulates fewer, potentially undesirable, biological responses compared to the agonist. Thus, an agonist is likely to have more undesirable side effects than a partial agonist.

[0137] To determine whether a candidate agent has a biological activity that is more like the biological activity of an agonist of a specific biological response, or is more like the biological activity of a partial agonist of the same biological response, a living thing is contacted with the candidate agent, and the expression pattern of a classifier population of genes, or the expression pattern of a classifier population of proteins, in the living thing is measured. The classifier population of genes, or classifier population of proteins, yields a different expression pattern, and, hence, a different calculated classifier value, in response to the agonist than in response to the partial agonist. A classifier value is calculated for the agonist, and a classifier value is calculated for the partial agonist. A classifier value is also calculated for the candidate agent, and this value is compared to the classifier value calculated for the agonist, and to the classifier value calculated for the partial agonist. The result of this comparison reveals whether the gene expression pattern, or protein expression pattern, induced by the candidate agent is more like the gene expression pattern, or protein expression pattern, induced by the agonist, or is more like the gene expression pattern, or protein expression pattern, induced by the partial agonist.

[0138] A classifier population of genes, or classifier population of proteins, can be identified, for example, by contacting a living thing (e.g., living tissue, living organ or living organism), or population of living things (e.g., population of living cells in culture), with an agent that is known to cause a target biological response. A population of genes, or a population of proteins, is identified in the living thing that yields at least one expression pattern that correlates (positively or negatively) with the occurrence of the target biological response caused by the agent. The foregoing procedure is repeated with a second reference agent, possessing a different biological activity than the first reference agent, to yield a gene expression pattern, or a protein expression pattern, that is characteristic of the second reference agent. The gene expression pattern, or protein expression pattern, of the first reference agent, and the gene expression pattern, or protein expression pattern, of the second reference agent, are compared to identify the population of genes, or proteins (within the total population of genes, or proteins, whose expression is affected by either the first or second reference agents) that produces an expression pattern that most clearly distinguishes between the first reference agent and the second reference agent. This population of genes, or proteins, is the classifier population. It is understood that the same general method can be used to identify a classifier population of genes, or a classifier population of proteins, that distinguishes between two or more reference agents.

[0139] Classifier populations of genes can be identified, for example, in the following manner. Living cells are contacted, in vivo or in vitro, with an amount of a first reference agent that maximally induces (or maximally inhibits) a target biological response. Messenger RNA is extracted from the contacted cells and used as a template to synthesize cDNA which is then labeled (e.g., with a fluorescent dye). The labeled cDNA is used to probe a DNA array that includes hundreds, or thousands, of identified nucleic acid molecules (e.g., cDNA molecules) that correspond to genes that are expressed in the type of cells that were contacted with the first reference agent. The labeled cDNA molecules that hybridize to the nucleic acid molecules immobilized on the DNA array are identified, and the level of expression of each hybridizing cDNA is measured and compared to the level of expression of the same mRNA molecules in a control sample from living cells that were not contacted with the first reference agent, to yield a gene expression pattern that is induced by the first reference agent.

[0140] The foregoing procedure is repeated with a second reference agent, possessing a different biological activity compared to the first reference agent, to yield a gene expression pattern that is characteristic of the second reference agent. For example, the first reference agent may be an agonist of a biological response, and the second reference agent may be a partial agonist of the same biological response. The gene expression pattern of the first reference agent, and the gene expression pattern of the second reference agent, are compared to identify the population of genes (within the total population of genes whose expression is affected by either the first or second reference agents) that produces an expression pattern that most clearly distinguishes between the first reference agent and the second reference agent. This population of genes is the classifier population. In the context of the present example, the classifier population permits classification of a candidate agent as being more similar to the first reference agent than to the second reference agent, or as being more similar to the second reference agent than to the first reference agent. Example 3 herein describes the identification of a classifier population of genes that is useful for classifying candidate agents as being more like an agonist of PPARγ, or as being more like a partial agonist of PPARγ.

[0141] Classifier populations of proteins can be identified, for example, using the same foregoing approach for identifying classifier populations of genes, except that techniques for measuring the amount of individual proteins (e.g., two dimensional gel electrophoresis) are used instead of techniques for measuring the amount of individual genes.

[0142] Calculating a Classifier Value: A classifier value is calculated by measuring the response, to an agent, of each individual gene, or protein, within the classifier gene population, or within the classifier protein population, to yield a response value for each gene within the population, or each protein within the population, and then performing a calculation on all of the response values to yield a classifier value that numerically represents the expression pattern of the classifier population of genes, or proteins, in response to the agent. A classifier value can be calculated by any suitable method, such as the exemplary methods described, supra, for calculating an efficacy value.

[0143] Use of a Scale of Classifier Values: In some embodiments of the methods of this aspect of the invention, a classifier value of an agent is compared to a scale of classifier values, typically a continuous scale of classifier values. The scale of classifier values can be constructed, and used, with the same techniques useful for constructing and using a scale of efficacy values or toxicity values. For example, a scale of classifier values can be constructed by generating classifier values for two reference agents. For example, the classifier value for a partial agonist of a biological response may be 0.1, and the classifier value for an agonist of the same biological response may be 1.0. Thus, the scale of classifier values extends from 0.1 (the classifier value that is most characteristic of a partial agonist of the biological response), to 1.0 (the classifier value that is most characteristic of an agonist of the biological response). Thus, for example, the classifier value of a candidate agent may be 0.6, which is closer to the classifier value of the agonist (1.0), than to the classifier value of the partial agonist (0.1), suggesting that the candidate agent is more likely to be an agonist of the target biological response than a partial agonist of the target biological response.

[0144] Practicing the methods of the invention in vitro: In some embodiments of the methods of the invention, the expression pattern of one, or more, of the classifier population of genes (or classifier population of proteins), the toxicity-related population of genes (or toxicity-related population of proteins), and the efficacy-related population of genes (or efficacy-related population of proteins) is/are measured in the same population of living cells cultured in vitro. The use of a population of living cells, cultured in vitro, to measure gene expression patterns, or protein expression patterns, facilitates rapid, high throughput, screening of numerous agents. Representative examples of living cells that can be cultured in vitro and used in the practice of the present invention to measure the expression pattern of one, or more, of the classifier population of genes (or classifier population of proteins), the toxicity-related population of genes (or toxicity-related population of proteins), and the efficacy-related population of genes (or efficacy-related population of proteins), are 3T3L1 adipocyte cells (available from the American Type Culture Collection, Manassas, Va., as cell line CL-173), hepatocyte cells, myocardiocyte cells, human primary hepatocytes and HEPG2 cells (available from the American Type Culture Collection, Manassas, Va., as cell line HB-8065).

[0145] Typically, but not necessarily, cultured cells are chosen that correspond to the cells that are affected, in vivo, by the agent(s) whose biological activity will be assessed using the cultured cells. For example, cultured liver cells may be used in the practice of the methods of the invention to screen candidate chemical agents that affect an aspect of liver metabolism (e.g., cholesterol synthesis). Similarly, cultured myocardiocyte cells may be used in the practice of the methods of the invention to screen candidate chemical agents that affect an aspect of heart cell metabolism, or cardiac function. Again by way of example, cultured human myoblasts may be used to identify agents that possess the undesirable property of causing cardiac myopathy.

[0146] In some embodiments of the methods of the invention, the expression pattern of at least one member of the group consisting of the classifier population of genes (or classifier population of proteins), the toxicity-related population of genes (or toxicity-related population of proteins), and the efficacy-related population of genes (or efficacy-related population of proteins) is measured in vivo, and the expression pattern of at least one of the foregoing populations of genes or proteins is measured in vitro. For example, chemical agents that affect an aspect of cardiac function (e.g., reduce heart size in a human subject suffering from cardiomyopathy) may be identified by measuring the expression of an efficacy-related gene population in heart tissue of experimental animals treated with candidate agents. Undesirable adverse effects of the candidate agents can be identified by measuring the expression of a toxicity-related gene population in a cardiomyocyte cell population cultured in vitro.

[0147] In some embodiments, the expression pattern of a toxicity-related population of genes (or toxicity-related population of proteins), and/or the expression pattern of an efficacy-related population of genes (or efficacy-related population of proteins) is/are measured, in vitro, using cultured cells that are different from the type(s) of cells that are predominantly (or exclusively) affected, in vivo, by the agent(s) whose biological activity will be assessed using the cultured cells. In these embodiments, the living cells that are used to measure the expression pattern of the toxicity-related population of genes (or toxicity-related population of proteins), and/or the expression pattern of the efficacy-related population of genes (or efficacy-related population of proteins), are typically easier to culture and assay than the cells that suffer the undesirable biological effect(s), or exhibit the desired biological effect(s), in vivo.

[0148] For example, one type of undesirable effect caused by some therapeutic molecules (e.g., rosiglitazone) administered to mammalian subjects is enlargement of the heart, which may also be accompanied by an increase in blood plasma volume. One way to measure these types of undesirable effects is to measure the gene expression pattern of a toxicity-related population of genes in heart tissue of experimental animals (e.g., rats) treated with agents that cause these effects. In some embodiments of the methods of the present invention, however, a more convenient way to measure these changes is to identify cells or tissue that are culturable in vitro, and that exhibit changes in gene expression that correlate with, and preferably precede, the changes in heart size and/or plasma volume observed in vivo. An example of culturable mammalian cells that meet the foregoing criteria with respect to changes in gene expression are mouse 3T3L1 adipocyte cells.

[0149] As described in Example 2, in one option for using 3T3L1 adipocyte mouse cells in the practice of the invention, one, or more, of a classifier population of genes, a toxicity-related population of genes, and an efficacy-related population of genes is/are identified in rat epididymal white adipose tissue (EWAT), in vivo, in accordance with the teachings of the present patent application. Thereafter, the classifier population of genes, and/or the toxicity-related population of genes, and/or the efficacy-related population of genes is/are mapped onto 3T3L1 mouse adipocytes.

[0150] Use of the classifier comparison result, and/or toxicity comparison result, and/or efficacy comparison result to determine whether an agent possesses a defined biological activity: In the practice of the methods of the present invention, one or more of the classifier comparison result, the toxicity comparison result, and/or the efficacy comparison result is/are used to determine whether an agent possesses a defined biological activity. For example, any one of the classifier comparison result, the toxicity comparison result, or the efficacy comparison result may be used alone to determine whether an agent possesses a defined biological activity. More typically, one of the following combinations of comparison results is used to determine whether an agent possesses a defined biological activity: efficacy comparison result and toxicity comparison result; efficacy comparison result and classifier comparison result; classifier comparison result and toxicity comparison result; toxicity comparison result and efficacy comparison result and classifier comparison result.

[0151] The choice of which comparison result, or combination of comparison results, to use to determine whether an agent possesses a defined biological activity, and the weight to give each comparison result when a combination of comparison results is used, mainly depends on the type and magnitude of the defined biological activity that candidate agents desirably possess. The precise weight to give to a comparison result is a decision that is made in the context of a particular experiment, and is a matter of judgment. For example, an investigator might identify a population of chemical compounds that are potent stimulants of a target biological process, and are therefore candidate therapeutic agents for treating diseased subjects in which the target biological process is inactive, or active at a low level, thereby causing disease. The investigator may want to identify those compounds within the population that cause the least number of undesirable side effects. Thus, for example, the investigator may use only the toxicity comparison result to select candidate therapeutic agents (that cause the least number of undesirable side effects) from among the population of chemical compounds that stimulate the target biological response. If the investigator uses one or more comparison results in addition to the toxicity comparison result, such as the combination of the toxicity comparison result and the efficacy comparison result, the investigator may give most weight to the toxicity comparison result since, in this example, all of the compounds are about equally effective stimulants of the target biological process, and the investigator is most interested in identifying those compounds that cause fewest adverse side-effects.

[0152] Again by way of example, an investigator might want to identify a chemical compound that is a potent stimulant of a target biological response, but which does not induce a defined, undesirable, side effect. Thus, the investigator may use the combination of an efficacy comparison result and a toxicity comparison result to determine whether an agent is a potent stimulant of the target biological response, but does not induce the undesirable side effect. Since, in this example, the investigator considers the ability of a compound to stimulate the target biological response to be about equally important as the inability of the compound to induce the undesirable side effect, the investigator may give equal weight, or approximately equal weight, to the efficacy comparison result and to the toxicity comparison result.

[0153] The use of other comparison results, in addition to an efficacy comparison result, and/or a toxicity comparison result, and/or a classifier comparison result, is also within the scope of the invention. Thus, using the techniques described herein, a comparison result can be obtained for any measurable biological response. For example, agonists and partial agonists of PPARγ receptors may also stimulate a related class of molecules called PPARα receptors. Thus, using the techniques described herein, a population of genes, or proteins, can be identified that yield an expression pattern that correlates (positively or negatively) with the stimulation of PPARα receptors by an agent. This population of genes, or proteins, can be used to screen candidate PPARγ agonists, or partial agonists, to identify those candidate agents that possess the undesirable property of stimulating PPARα receptors.

[0154] In another aspect, the present invention provides populations of nucleic acid molecules that are useful in the practice of the methods of the present invention as probes for measuring the level of expression of members of a classifier population of genes, or an efficacy-related population of genes, or a toxicity-related population of genes, wherein the classifier population of genes, the efficacy-related population of genes, and the toxicity-related population of genes are each useful for identifying agonists, or partial agonists, of PPARγ.

[0155] In a further aspect, the present invention provides populations of oligonucleotide probes and populations of genes. The populations of genes include classifier populations of genes, efficacy-related populations of genes, and toxicity-related populations of genes, and are useful, for example, for determining whether an agent possesses a defined biological activity in accordance with the teachings of the present patent application. The populations of oligonucleotide probes are useful, for example, for measuring the expression patterns of classifier populations of genes, efficacy-related populations of genes, or toxicity-related populations of genes of the present invention.

[0156] For example, as more fully described in Example 1 herein, Table 1, entitled “PPARg_Mouse_Efficacy_Probe_{—}52 (Species: db/db Mouse)”, sets forth an efficacy-related population of mouse genes (SEQ ID NOs: 1-50). The population of 52 oligonucleotide probes identified in Table 1 (SEQ ID NOs: 51-102), and the population of 22 oligonucleotide probes (SEQ ID NOs: 52, 53, 58, 59, 65, 66, 68, 69, 71, 73, 75, 76, 78, 82, 86, 88-90, 93, 94, 96, 101) identified in Table 2, entitled “PPARg_{—}3T3L1_Efficacy_Probe_{—}22 (Species: Mouse Cell Line)”, are useful in the practice of the methods of the invention to measure the expression pattern of some or all of the efficacy-related population of genes (SEQ ID NOs: 1-50) described in Table 1.

[0157] Again by way of example, as more fully described in Example 2 herein, Table 4 sets forth a rat toxicity-related population of genes (SEQ ID NOs: 103-152), and a population of oligonucleotide probes (SEQ ID NOs: 153-207) that are useful in the practice of the present invention to measure the expression pattern of the toxicity-related population of genes (SEQ ID NOs: 103-152). Again by way of example, Table 5 sets forth a toxicity-related population of 5 mouse genes (SEQ ID NOs: 208-212) that are useful as early reporters of heart toxicity. Table 5 sets forth a population of oligonucleotide probes (SEQ ID NOs: 213-218) that are useful for measuring the expression pattern of the toxicity-related population of 5 genes (SEQ ID NOs: 208-212).

[0158] Again by way of example, Table 6 sets forth a rat toxicity-related population of genes (SEQ ID NOs: 219-550, 104, 105, 112, 119, 126, 127, 133, 136, 149, 150 and 151), and a population of oligonucleotide probes (SEQ ID NOs: 551-894, 155, 157, 164, 171, 178, 179, 185, 188, 204, 205, and 206) that are useful in the practice of the present invention to measure the expression pattern of the toxicity-related populations of genes (SEQ ID NOs: 219-550, 104, 105, 112, 119, 126, 127, 133, 136, 149, 150 and 151).

[0159] Table 7 sets forth a mouse cell line toxicity-related population of genes (SEQ ID NOs: 895-949, 42 and 45), and a population of oligonucleotide probes (SEQ ID NOs: 950-1019, 863, 93, 94, and 97) that are useful in the practice of the present invention to measure the expression pattern of the toxicity-related populations of genes (SEQ ID NOs: 895-949, 42 and 45).

[0160] Table 8 sets forth a mouse tissue toxicity-related population of genes (SEQ ID NOs: 1020-1035, 896, 900, 902, 903, 905, 906, 13, 908, 912, 917-920, 925, 926, 929, 932, 934, 936-938, 42, 939, 942, 45, 943-946 and 949), and a population of oligonucleotide probes (SEQ ID NOs: 1036-1057, 951, 955, 957, 863, 959, 960, 63, 962, 966, 971-974, 980, 981, 984, 987, 989, 991-996, 93, 998, 94, 999-1001, 1004, 97, 1005-1014, and 1017-1019) that are useful in the practice of the present invention to measure the expression pattern of the toxicity-related populations of genes (SEQ ID NOs: 1020-1035, 896, 900, 902, 903, 905, 906, 13, 908, 912, 917-920, 925, 926, 929, 932, 936-938, 42, 939, 942, 45, 943-946 and 949).

[0161] Table 9 sets forth a rat tissue toxicity-related population of genes (SEQ ID NOs: 1058-1238, 222, 224, 106, 226, 235, 237, 239, 246, 253, 258, 261, 270, 273, 274, 278, 111, 286, 302-304, 307, 308, 316-318, 322, 327, 119, 342, 358, 361, 367-368, 373, 381, 388, 401, 406, 409-410, 416-418, 423, 427-428, 430-432, 434, 439, 441, 447, 450, 455, 461, 464-465, 136, 137, 139, 474, 475, 482, 485, 488, 491, 492, 496, 500, 504, 524, 530, 534, 536, 541, 542, and 547), and a population of oligonucleotide probes (SEQ ID NOs: 1239-1428, 558, 561, 158, 565, 574, 576, 578, 585, 592, 597, 600, 609, 612, 613, 617, 163, 625, 641-643, 646, 647, 655-657, 661, 666, 171, 681, 697, 700, 706, 707, 712, 720, 727, 740, 745, 748, 749, 755-757, 762, 766-767, 769-771, 773, 778, 780, 786, 789, 794, 800, 803-804, 188-189, 191, 813-814, 822-823, 556, 828, 831-832, 836, 840, 844, 864, 871, 876, 878, 883, 884, 889-891) that are useful in the practice of the present invention to measure the expression pattern of the toxicity-related populations of genes (SEQ ID NOs: 1058-1238, 222, 224, 106, 226, 235, 237, 239, 246, 253, 258, 261, 270, 273, 274, 278, 111, 286, 302-304, 307, 308, 316-318, 322, 327, 119, 342, 358, 361, 367-368, 373, 381, 388, 401, 406, 409-410, 416-418, 423, 427-428, 430-432, 434, 439, 441, 447, 450, 455, 461, 464-465, 136, 137, 139, 474, 475, 482, 485, 488, 491, 492, 496, 500, 504, 524, 530, 534, 536, 541, 542, and 547).

[0162] Table 10 sets forth a mouse cell line toxicity-related population of genes (SEQ ID NOs: 1429-1448, 897, 901, 902, 919, 921, 922, 926, 928, 929, 931, 935, 939, 942, 943, and 946), and a population of oligonucleotide probes (SEQ ID NOs: 1449-1471, 952, 956, 957, 973, 975-976, 981, 983, 984, 986, 990, 999-1001, 1004-1007, and 1012-1014) that are useful in the practice of the present invention to measure the expression pattern of the toxicity-related populations of genes (SEQ ID NOs: 1429-1448, 897, 901, 902, 919, 921, 922, 926, 928, 929, 931, 935, 939, 942, 943, and 946).

[0163] Table 12 sets forth a mouse cell line classifier population of genes (SEQ ID NOs: 1472-1730, 2, 896, 1429, 902, 1431, 1434, 15, 18, 19, 22, 25, 1436, 913, 1437, 916, 917, 920, 1441, 32, 923, 927, 39, 934, 935, 210, 939, 44, 1445, 943, 212, 946, 949), and a population of oligonucleotide probes (SEQ ID NOs: 1731-1996, 52, 951, 1450, 957, 1452, 1455, 65, 68, 69, 72, 75, 1457, 967, 1458, 970, 971, 974, 1462, 82, 977-978, 982, 90, 989, 990, 215, 1001, 999, 1000, 96, 1468, 1005-1006, 1970, 218, 1014, 1018, and 1019) that are useful in the practice of the present invention to measure the expression pattern of the classifier populations of genes (SEQ ID NOs: 1472-1730, 2, 896, 1429, 902, 1431, 1434, 15, 18, 19, 22, 25, 1436, 913, 1437, 916, 917, 920, 1441, 32, 923, 927, 39, 934, 935, 210, 939, 44, 1445, 943, 212, 946, 949).

[0164] Table 14 sets forth a mouse cell line population of genes (SEQ ID NOs: 1997-2795, 1473, 1475, 3, 1481, 1429, 1488, 1489, 1021, 1500, 902, 1515, 10, 1521, 13, 1538, 908, 1549, 1025, 1550, 1558, 1559, 1561, 1565, 21, 22, 1574, 912, 1614, 916-919, 1620, 1030, 1031, 922, 1639, 1645, 30, 1651, 35, 1673, 1674, 1682, 1033, 934, 1694, 936, 1034, 937, 210, 42, 939, 1444, 1698, 940, 209, 1703, 943, 1035, 945, 1710, 946, 1711, 1712, 1714, 948, 949, 142, 1728, and 49) that yield an expression pattern that correlates with the stimulation of PPARα receptors by an agent, and a population of oligonucleotide probes (SEQ ID NO. 2796-3683, 1732, 1734, 53, 1740, 1449, 1450, 1747, 1748, 1037, 1759, 957, 1774, 60, 1780, 63, 1797, 962, 1808, 1041, 1809, 1817, 1818, 1820, 1824, 71, 72, 1833, 966, 1873, 970-973, 1879, 1046, 1047, 976, 1898, 1904, 80, 1910, 86, 1932, 1933, 1941, 1049, 989, 1953, 991-993, 1050, 1051, 994, 215, 216, 93, 94, 998-1001, 1465-1467, 1957, 1002, 214, 1962, 1005-1007, 1056, 1057, 1009-1014, 1974, 1975, 1977, 1979, 1016-1019, 1994, 101) that are useful in the practice of the present invention to measure the expression pattern of the foregoing populations of genes (SEQ ID NOs: 1997-2795, 1473, 1475, 3, 1481, 1429, 1488, 1489, 1021, 1500, 902, 1515, 10, 1521, 13, 1538, 908, 1549, 1025, 1550, 1558, 1559, 1561, 1565, 21, 22, 1574, 912, 1614, 916-919, 1620, 1030, 1031, 922, 1639, 1645, 30, 1651, 35, 1673, 1674, 1682, 1033, 934, 1694, 936, 1034, 937, 210, 42, 939, 1444, 1698, 940, 209, 1703, 943, 1035, 945, 1710, 946, 1711, 1712, 1714, 948, 949, 142, 1728, and 49).

[0165] Methods for identifying an efficacy-related population of genes or proteins: In another aspect, the present invention provides methods for identifying an efficacy-related population of genes or proteins which are useful, for example, in the practice of the methods of the present invention for determining whether an agent possesses a defined biological activity. The methods of this aspect of the invention include the steps of (a) contacting a living thing with an agent that is known to elicit a desired biological response; and (b) identifying an efficacy-related population of genes or proteins in the living thing that yields an expression pattern that correlates with the occurrence of the desired biological response caused by the agent.

[0166] In some embodiments, the expression pattern of the efficacy-related population of genes or proteins appears in the living thing before the occurrence of the desired biological response caused by the agent. In some embodiments, the desired biological response does not occur in the living thing. For example, the living thing may be rat epididymal white adipose tissue which includes an efficacy-related population of genes, or proteins, that yields an expression pattern that correlates with the occurrence of a reduction in the concentration of glucose in rat's blood in response to a chemical agent administered to the rat. The expression pattern of the efficacy-related population of genes or proteins appears, however, before the reduction in blood glucose concentration.

[0167] Some embodiments of the methods of this aspect of the invention include the following steps: (a) measuring the level of expression of each member of a multiplicity of genes or proteins in the living thing, contacted with the agent, to yield a multiplicity of expression values; (b) measuring the level of expression of each member of the same multiplicity of genes or proteins in a reference living thing, that is not contacted with the agent, to yield a multiplicity of reference expression values; and (c) comparing the multiplicity of expression values with the multiplicity of reference expression values to identify an efficacy-related population of genes or proteins, wherein each individual gene or protein has an expression value in response to the agent that is significantly different from the corresponding reference expression value.

[0168] The reference living thing can be the living thing that is contacted with the agent before it is contacted with the agent. For example, a sample of cells or tissue may be removed from the living thing before it is contacted with the agent; thereafter, the living thing is contacted with the agent and a further sample of cells or tissue is removed from the living thing, and gene expression is analyzed and compared between the two samples. The reference living thing can also be the same type of cells, tissue, organ or organism as the living thing contacted with the agent, except that the reference living thing is not contacted with the agent. For example, the living thing can be a db/db mouse to which is administered a dosage of rosiglitazone, and the reference living thing can be a different db/db mouse which is not administered a dosage of rosiglitazone. It is understood that typically a population of living things, and reference living things, are used in the practice of this aspect of the invention to provide a sufficiently large number of data for statistical analysis.

[0169] Some agents elicit more than one biological response in a living thing (e.g., more than one desirable biological response, or more than one undesirable biological response, or at least one desirable biological response and at least one undesirable biological response). Elicitation of a biological response may require the action of a target molecule (e.g., protein receptor). Typically, the target molecule is a component of a biochemical signal transduction pathway that is affected by the agent, and that conveys one, or more, biochemical signals (typically in the form of organic molecules, such as lipids) that elicit the biological response. For example, an agent may directly, physically, interact with a target molecule (e.g., a protein receptor molecule located in a cell membrane) to elicit a desired biological response. Again by way of example, an agent may directly, physically, interact with a molecule, and this interaction may trigger the release of one or more signalling molecules that move within and/or between cells. One of these signalling molecules interacts with a target molecule (e.g., a protein receptor molecule) to elicit a desired biological response.

[0170] A first target molecule may be required to elicit a first biological response when a living thing is contacted with an agent, and a second target molecule, that is different from the first target molecule, may be required to elicit a second biological response when the same living thing is contacted with the same agent. In one aspect, the present invention provides methods that can be used to identify an efficacy-related population of genes or proteins that yields an expression pattern that correlates with the occurrence of only the first or the second desired biological response caused by the direct, or indirect, interaction of the agent with one of two types of target molecules. These methods include the steps of (a) contacting the living thing with an agent that is known to elicit at least two different desired biological responses in the living thing, wherein elicitation of a first desired biological response by the agent is mediated by a first target molecule, and elicitation of a second desired biological response by the agent is mediated by a second target molecule that is different from the first target molecule; (b) identifying an efficacy-related population of genes or proteins that yields an expression pattern that correlates with the occurrence of the first and second desired biological responses in response to the agent; (c) contacting a modified living thing with the agent, wherein the modified living thing is a member of the same species as the living thing and does not include any functional first target molecules; (d) identifying an efficacy-related population of genes or proteins that yields an expression pattern that correlates with the occurrence of the second desired biological response in the modified living thing in response to the agent; and (e) comparing the efficacy-related population of genes or proteins identified in step (b) with the efficacy-related population of genes or proteins identified in step (d) to identify an efficacy-related population of genes or proteins that yields an expression pattern that correlates with the occurrence of the first desired biological response caused by the agent.

[0171] It is understood that steps (a) through (d) can be in any temporal sequence (e.g., steps (c) and (d) can be practised, to identify an efficacy-related population of genes or proteins that yields an expression pattern that correlates with the occurrence of the second target biological response, before steps (a) and (b) are practised to identify a population of genes or proteins that yields an expression pattern that correlates with the occurrence of the first and second target biological responses in response to the agent. The modified living thing can be, for example, a so-called “knockout” organism (or cells or tissues derived from a “knockout” organism) which has been genetically modified, for example by the process of targeted homologous recombination, to inactivate all genes encoding a target molecule.

[0172] Methods for identifying a toxicity-related population of genes or proteins: In another aspect, the present invention provides methods for identifying a toxicity-related population of genes or proteins which are useful, for example, in the practice of the methods of the present invention for determining whether an agent possesses a defined biological activity. The methods of this aspect of the invention include the steps of (a) contacting a living thing with an agent that is known to elicit an undesirable biological response; and (b) identifying a toxicity-related population of genes or proteins that yields an expression pattern that correlates with the occurrence of the undesirable biological response caused by the agent.

[0173] In some embodiments, the expression pattern of the toxicity-related population of genes or proteins appears in the living thing before the occurrence of the undesirable biological response caused by the agent. In some embodiments, the undesirable biological response does not occur in the living thing.

[0174] Some embodiments of the methods of this aspect of the invention include the following steps: (a) measuring the level of expression of each member of a multiplicity of genes or proteins in the living thing, contacted with the agent, to yield a multiplicity of expression values; (b) measuring the level of expression of each member of the same multiplicity of genes or proteins in a reference living thing, that is not contacted with the agent, to yield a multiplicity of reference expression values; and (c) comparing the multiplicity of expression values with the multiplicity of reference expression values to identify a toxicity-related population of genes or proteins, wherein each individual gene or protein has an expression value in response to the agent that is significantly different from the corresponding reference expression value.

[0175] As described, supra, in connection with the methods of the invention for identifying an efficacy-related population of genes or proteins, the reference living thing can be the living thing that is contacted with the agent before it is contacted with the agent. The reference living thing can also be the same type of cells, tissue, organ or organism as the living thing contacted with the agent, except that the reference living thing is not contacted with the agent. It is understood that typically a population of living things, and reference living things, are used in the practice of this aspect of the invention to provide a sufficiently large number of data for statistical analysis.

[0176] Some embodiments of the methods of this aspect of the invention permit a user to distinguish between the expression pattern of an efficacy-related population of genes or proteins, and the expression pattern of a toxicity-related population of genes or proteins, wherein both expression patterns are caused by the same agent, and elicitation of the two expression patterns is mediated by two different target molecules. These embodiments include the steps of (a) contacting a living thing with an agent that is known to elicit a desirable biological response and an undesirable biological response in the living thing, wherein elicitation of the desirable biological response is mediated by a first target molecule, and elicitation of the undesirable biological response is mediated by a second target molecule that is different from the first target molecule; (b) identifying a population of genes or proteins that yields an expression pattern that correlates with the occurrence of the desirable and undesirable biological responses caused by the agent; (c) contacting a modified living thing with the agent, wherein the modified living thing is a member of the same species as the living thing and does not include any functional second target molecules; (d) identifying an efficacy-related population of genes or proteins that yields an expression pattern that correlates with the occurrence of the desirable biological response caused by the agent; and (e) comparing the population of genes or proteins identified in step (b) with the efficacy-related population of genes or proteins identified in step (d) to identify a toxicity-related population of genes or proteins that yields an expression pattern that correlates with the occurrence of the undesirable biological response caused by the agent. By way of specific example, the first target molecule can be a PPARγ receptor and the second target molecule can be a PPARα receptor.

[0177] In the context of the methods of this aspect of the invention, the terms “elicitation of the desirable biological response is mediated by a first target molecule” and “elicitation of the undesirable biological response is mediated by a second target molecule” mean that the target molecule is a component of the biochemical signal transduction pathway that is affected by the agent, and that conveys one, or more, biochemical signals (typically in the form of organic molecules, such as lipids) that elicit the desirable, or undesirable, biological response.

[0178] It is understood that steps (a) through (d) can be in any temporal sequence. The modified living thing can be, for example, a so-called “knockout” organism (or cells or tissues derived from a “knockout” organism) which has been genetically modified, by the process of targeted homologous recombination, to inactivate all genes encoding a target molecule.

[0179] Methods for identifying a classifier population of genes or proteins: In another aspect, the present invention provides methods for identifying a classifier population of genes or proteins, which are useful, for example, in the practice of the methods of the present invention for determining whether an agent possesses a defined biological activity. The methods of this aspect of the invention include the steps of (a) contacting a living thing with a first reference agent that is known to cause a first biological response;
[0180] (b) identifying a first population of genes or proteins that yields an expression pattern that correlates with the occurrence of the first biological response caused by the first reference agent; (c) contacting a living thing with a second reference agent that is known to cause a second biological response, wherein the living thing is the same living thing that is contacted with the first reference agent, or is a different living thing that is a member of the same species as the living thing that is contacted with the first reference agent; (d) identifying a second population of genes or proteins that yields an expression pattern that correlates with the occurrence of the second biological response caused by the second reference agent; and (e) comparing the first population of genes or proteins to the second population of genes or proteins and thereby identifying a classifier population of genes or proteins that produces an expression pattern that most clearly distinguishes between the first reference agent and the second reference agent. It is understood that the combination of step (a) and step (b) can be performed before, during or after the combination of step (c) and step (d).

[0181] The following examples merely illustrate the best mode now contemplated for practicing the invention, but should not be construed to limit the invention.

### EXAMPLE 1

[0182] This Example describes the identification of two efficacy-related populations of genes that are both useful in the practice of the methods of the invention for identifying agonists and partial agonists of PPARγ. One efficacy-related population of 50 genes was identified in mouse EWAT tissue. The nucleotide sequences of these 50 genes are set forth in the portion of this patent application entitled SEQUENCE LISTING and are identified in Table 1, (SEQ ID NOs: 1-50). The nucleotide sequences of the 52 oligonucleotide probes used to measure the expression levels of these 50 genes (SEQ ID NOs: 1-50) are set forth in the SEQUENCE LISTING and identified in Table 1, (SEQ ID NOs: 51-102). The other efficacy-related population of genes includes 21 genes that were identified in cultured 3T3L1 mouse adipocyte cells (passages 3-9). These 21 genes, whose nucleotide sequences are set forth in the SEQUENCE LISTING (SEQ ID NOs: 2, 3, 8, 9, 15, 16, 18, 19, 21, 23, 25, 26, 28, 32, 35, 37-39, 42, 44, 49), are a subset of the foregoing 50 genes. The oligonucleotide probes used to measure the expression levels of these 21 genes (SEQ ID NOs: 2, 3, 8, 9, 15, 16, 18, 19, 21, 23, 25, 26, 28, 32, 35, 37-39, 42, 44, 49) are identified in Table 2, (SEQ ID NOs: 52, 53, 58, 59, 65, 66, 68, 69, 71, 73, 75, 76, 78, 82, 86, 88-90, 93, 94, 96, 101).

TABLE 1
PPARγ_Mouse_Efficacy_Probe_52 (Species: db/db Mouse)

| Accession | | Gene SEQ | Probe SEQ |
|---|---|---|---|
| number | Gene Name | ID NO | ID NO |
| AK010455 | 2410008K03Rik | 1 | 51 |
| AW909114 | MGC28611 | 2 | 52 |
| NM_008543 | Madh7 | 3 | 53 |
| AF282730 | Timp4 | 4 | 54 |
| M12347 | Acta1 | 5 | 55 |
| NM_007377 | Aatk | 6 | 56 |
| AK002237 | Gadd45g | 7 | 57 |
| NM_030701 | Pumag-pending | 8 | 58 |
| AK012169 | Slitl2 | 9 | 59 |
| AV279434 | 4930458D05Rik | 10 | 60 |
| NM_022020 | Rbp7 | 11 | 61 |
| NM_019738 | Nupr1 | 12 | 62 |
| AK004867 | 1300002P22Rik | 13 | 63 |
| AK015355 | 4930442A21Rik | 14 | 64 |
| AK009315 | 2310012G06Rik | 15 | 65 |
| AJ277212 | hypothetical | 16 | 66 |
| | protein | | |
| NM_026167 | 1200009K10Rik | 17 | 67 |
| NM_011782 | Adamts5 | 18 | 68 |
| NM_020578 | Ehd3 | 19 | 69 |
| NM_016873 | Wisp2 | 20 | 70 |
| AV280352 | AV280352 | 21 | 71 |
| AK010891 | 2510002J07Rik | 22 | 72 |
| AK020638 | 9530072E15Rik | 23 | 73 |
| AK018128 | 6330406I15Rik | 24 | 74 |
| AK004732 | 1200013A08Rik | 25 | 75 |
| BC004720 | MGC36388 | 26 | 76 |
| NM_026252 | 4930447D24Rik | 27 | 77 |
| NM_031180 | Klb-pending | 28 | 78 |
| NM_020025 | B3galt2 | 29 | 79 |
| AK004897 | Facl2 | 30 | 80 |
| AK016444 | 4931408D14Rik | 31 | 81 |
| AK013740 | 6530401D17Rik | 32 | 82 |
| AF090738 | Irs2 | 33 | 83 |
| | | | 84 |
| AK004293 | 2310041C05Rik | 34 | 85 |
| BC003479 | LOC216820 | 35 | 86 |
| AKO18673 | Mrpl19 | 36 | 87 |
| AB001735 | Adamts1 | 37 | 88 |
| AKO18423 | 8430417G17Rik | 38 | 89 |
| AK016103 | 4930553F04Rik | 39 | 90 |
| BC003755 | Eya2 | 40 | 91 |
| BB265432 | BB265432 | 41 | 92 |
| NM_013743 | Pdk4 | 42 | 93 |
| | | | 94 |
| U03560 | Hsp25 | 43 | 95 |
| J04632 | Gstm1 | 44 | 96 |
| L12447 | Igfbp5 | 45 | 97 |
| M21855 | Cyp2b9 | 46 | 98 |
| AI467229 | Ppp1r3a | 47 | 99 |
| X13297 | Acta2 | 48 | 100 |
| Z37107 | Ephx2 | 49 | 101 |
| AW146087 | BB104597 | 50 | 102 |

[0183] TABLE 2
PPARγ_3T3L1_Efficacy_Probe_22 (Species:
Mouse Cell Line) (A subset of Table_1:
PPARγ_Mouse_Efficacy_Probe_52 (Species: db/db Mouse)

| Accession | | Gene SEQ | Probe SEQ |
|---|---|---|---|
| number | Gene Name | ID NO | ID NO |
| AW909114 | MGC28611 | 2 | 52 |
| NM_008543 | Madh7 | 3 | 53 |
| NM_030701 | Pumag-pending | 8 | 58 |
| AK012169 | Slitl2 | 9 | 59 |
| AK009315 | 2310012G06Rik | 15 | 65 |
| AJ277212 | hypothetical protein | 16 | 66 |
| NM_011782 | Adamts5 | 18 | 68 |
| NM_020578 | Ehd3 | 19 | 69 |
| AV280352 | AV280352 | 21 | 71 |
| AK020638 | 9530072E15Rik | 23 | 73 |
| AK004732 | 1200013A08Rik | 25 | 75 |
| BC004720 | MGC36388 | 26 | 76 |
| NM_031180 | Klb-pending | 28 | 78 |
| AK013740 | 6530401D17Rik | 32 | 82 |
| BC003479 | LOC216820 | 35 | 86 |
| AB001735 | Adamts1 | 37 | 88 |
| AKO18423 | 8430417G17Rik | 38 | 89 |
| AK016103 | 4930553F04Rik | 39 | 90 |
| NM_013743 | Pdk4 | 42 | 93 |
| | | | 94 |
| J04632 | Gstm1 | 44 | 96 |
| Z37107 | Ephx2 | 49 | 101 |

[0184] Genetically altered, diabetic, mice (db/db strain, available from the Jackson Laboratory, Bar Harbor, Me., U.S.A., as strain C57B1/KFJ, and described by Chen et al., Cell 84: 491-495 (1996), and by Combs et al., Endocrinology 142: 998-1007 (2002)), and lean mice, were administered one of two PPARγ agonists, either Rosiglitazone (5-(4-{2-[methyl(pyridin-2-yl)amino]ethoxy}benzyl)-1,3-thiazolidine-2,4-dione) or {2-[2-(4-phenoxy-2-propylphenoxy)ethyl]-1H-indol-5-yl}acetic acid. The PPARγ agonists were orally administered once per day for a period of two days or eight days at a dosage of 10 milligrams per kilogram body weight. EWAT tissue was removed from the treated mice six hours after administration of the second or eighth dose. Both of the treatments were divided into four groups:

[0185] Group 1: db/db vehicle control vs. db/db vehicle control pool (the control pool included all of the mice that were administered the vehicle alone without any PPARγ agonist).

[0186] Group 2: lean mouse vs. db/db vehicle control pool.

[0187] Group 3: db/db vehicle control pool vs. Rosiglitazone-treated db/db mice.

[0188] Group 4: db/db vehicle control pool vs. db/db mice treated with {2-[2-(4-phenoxy-2-propylphenoxy)ethyl]-1H-indol-5-yl}acetic acid.

[0189] A hybrid ANOVA method was used to compute the pvalue (hereafter ANOVA-pvalue) for the null hypothesis that the genes are not differentially regulated within each group. Standard ANOVA estimates the variance within a group by the spread of replicates within each group. The error of the variance within a group can be large when the number of replicates in each group is small, thereby yielding more false positives (mistakenly identifying a non-significant difference between groups as being significant). This problem is avoided by using the hybrid ANOVA method to estimate the error within a group. The variance within a group comes from at least two sources: sample variance and measurement error (platform variance). The Hybrid-ANOVA sets a low limit of the within-group variance to the platform variance. The platform variance is estimated from previous replicates with similar gene expression levels.

[0190] Signature genes were identified for each of the four groups (i.e., genes that showed significant, differential, expression in the comparison made in each of the four groups). Based upon the two day data (each treatment was repeated five times), each probe having an ANOVA-pvalue smaller than 0.01, and having an absolute value of the mean of the logRatio greater than log₁₀ 1.5 was considered to be a signature gene for each group.

[0191] First, the signature genes in Groups 3 and 4 were united. Then the united signature genes from Groups 3 and 4 were compared with the signature genes from Group 2, and the overlapping population of genes between the two compared groups was identified. Then the genes within the overlapping population that were regulated in the opposite direction in the united signature gene population compared to the Group 2 signature gene population were identified (e.g., genes that are differentially expressed at a higher, or lower, level in the db/db mice, but are differentially expressed at a lower, or higher, level in mice treated with a PPARγ agonist are likely to be markers for the desired effect of reducing blood glucose level).

[0192] Finally, artifactual signature genes in Group 1 were removed from the resulting set. The artifactual signature genes are those genes that were differentially regulated in Group 1, and so represented the variation in gene expression between animals. A total of 52 probes (SEQ ID NOs: 51-102) were thereby identified as the efficacy reporter population in the EWAT tissue of db/db mice treated with the PPARγ agonists. These 52 probes (SEQ ID NOs: 51-102) corresponded to 50 genes (SEQ ID NOs: 1-50). These 50 genes (SEQ ID NOs: 1-50) are useful in the practice of the present invention as an efficacy-related population of genes to identify PPARγ agonists and/or PPARγ partial agonists using mouse EWAT tissue.

[0193] The usefulness of the 50 genes (SEQ ID NOs: 1-50), as an efficacy-related population of genes to identify PPARγ agonists and/or PPARγ partial agonists, was confirmed by using the data from the treatments lasting for seven days in which eight doses were administered to the animals (the first dose being administered at day zero) to determine whether the expression of the 50 genes (SEQ ID NOs: 1-50), corresponding to the 52 probes (SEQ ID NOs: 52-102), correlated with the desired biological end point (i.e., lowering of glucose concentration in blood plasma).

[0194] The reduction in the concentration of glucose in blood plasma was measured for each mouse in the study. The correlation coefficient of the logRatio of each of the 52 probes (SEQ ID NOs: 52-102) with the end point data was calculated. Probes with correlation coefficient of more than 0.5 were selected. All 52 probes (SEQ ID NOs: 52-102) were found to have a satisfa end point data.

[0195] The 52 probes (SEQ ID NOs: 52-102) were also mapped onto the gene expression profiles of mouse 3T3L1 adipocyte cells, cultured in vitro, that had been treated with either Rosiglitazone (at an effective concentration of 600 nM) or {2-[2-(4-phenoxy-2-propylphenoxy)ethyl]-1H-indol-5-yl}acetic acid (at an effective concentration of 3870 nM). Twenty four hours after the cells were contacted with one or other of the foregoing agents the cells were harvested and RNA extracted therefrom. Twenty two probes (SEQ ID NOs: 52, 53, 58, 59, 65, 66, 68, 69, 71, 73, 75, 76, 78, 82, 86, 88-90, 93, 94, 96, 101) were identified that were differentially regulated in the 3T3L1 adipocytes in response to both of the foregoing agents. These 22 probes (SEQ ID NOs: 52, 53, 58, 59, 65, 66, 68, 69, 71, 73, 75, 76, 78, 82, 86, 88-90, 93, 94, 96, 101) corresponded to 21 genes (two probes hybridized to the same gene) (SEQ ID NOs: 2, 3, 8, 9, 15, 16, 18, 19, 21, 23, 25, 26, 28, 32, 35, 37-39, 42, 44, 49). These 21 genes (SEQ ID NOs: 2, 3, 8, 9, 15, 16, 18, 19, 21, 23, 25, 26, 28, 32, 35, 37-39, 42, 44, 49) are useful in the practice of the present invention as an efficacy-related population of genes to identify PPARγ agonists and/or PPARγ partial agonists using the 3T3L1 mouse cell line.

[0196] The expression data for the 21 genes (SEQ ID NOs: 2, 3, 8, 9, 15, 16, 18, 19, 21, 23, 25, 26, 28, 32, 35, 37-39, 42, 44, 49) in response to Rosiglitazone and PPARγ agonist {2-[2-(4-phenoxy-2-propylphenoxy)ethyl]-1H-indol-5-yl}acetic acid were averaged and treated as a vector for the full template. Thus, an efficacy value a PPARγ agonist, or partial agonist, was calculated in the following manner. The value (expressed as a percentage) of the logRatio divided by the template logRatio for each of the 22 probes (SEQ ID NOs: 52, 53, 58, 59, 65, 66, 68, 69, 71, 73, 75, 76, 78, 82, 86, 88-90, 93, 94, 96, 101) was calculated, and then the mean of the resulting 22 percentages was calculated. This mean value was the PPARγ efficacy value for the PPARγ agonist, or partial agonist.

[0197] A chi-square fitting was also used to calculate the efficacy value for each tested PPARγ agonist, or partial agonist. The chi-square fitting formula used was:

$${χ}^{2} = {\sum }_{i = 1}^{22} {( S * {R}_{i} - {X}_{i} )}^{2} / ( {σ}_{Ri}^{2} + {σ}_{Xi}^{2} )$$

[0198] Where Ri, σ_{Ri} stand for the logRatio and error for logRatio of the full template. Xi and σ_{Xi} stand for the logRatio and error for logRatio of the testing compound. This chi-square fitting method is described, for example, by W. Press et al., Numerical Recipes in C, Chapter 14, Cambridge University Press (1991).

[0199] A very similar result was obtained using each method for calculating the efficacy values (the correlation coefficient for the scores calculated by the two methods was 0.9996).

[0200] Table 3 shows the efficacy scores for full or partial agonists of PPARγ. A PPARα agonist was included as a control.

TABLE 3

| Compound | Efficacy Score |
|---|---|
| Agonist 1 | 1.033 |
| Agonist | 0.967 |
| Rosiglitazone | |
| Partial agonist 15 | 0.795 |
| Partial agonist 16 | 0.776 |
| Partial agonist 17 | 0.644 |
| Partial agonist 4 | 0.578 |
| Partial agonist (2R)-2-(4-chloro-3-{[3- | 0.561 |
| (6-methoxy-1,2-benzisoxazol-3-yl)-2-methyl- | |
| 6-(trifluoromethoxy)-1H-indol-1- | |
| yl]methyl}phenoxy)propanoate | |
| Partial agonist 10 | 0.511 |
| Partial agonist 12 | 0.469 |
| Partial agonist 9 | 0.463 |
| Partial agonist 11 | 0.447 |
| Partial agonist 14 | 0.376 |
| Partial agonist 13 | 0.367 |
| PPARα agonist | 0.178 |

### EXAMPLE 2

[0201] This Example describes the identification of toxicity-related populations of genes that are useful in the practice of the methods of the invention for evaluating the toxic, or otherwise undesirable, biological activities of agonists and partial agonists of PPARγ.

[0202] Measuring the Toxic Effects of PPARγ Agonists and PPARγ Partial Agonists in Rats: Eleven PPARγ agonists or partial agonists were tested in rats in an experiment that was divided into several experiments (referred to as phases) because the design of the overall experiment required the use of more rats than could be handled in a single experiment. Each phase of the experiment tested 3 compounds, with rosiglitazone present in every phase as a bridging compound. For each compound, 3 doses were selected that represented the effective dose (EC₅₀) in db/db mice, as well as ⅓ and 3 times the EC₅₀. Eight animals were treated per dose and per compound. The treatments lasted 7 days, and a PPARγ agonist or partial agonist was administered once per day. Animals were sacrificed 24 hours, or later, after the last dose of the treatment, so that the plasma volume data could be measured. Heart, kidney and EWAT tissues from phases 5, 7, 8 and 9 were collected. For phase 4, only heart tissues were available. Heart weight, body weight and plasma volume data were recorded for each animal.

[0203] Microarray profiling: Heart, kidney and EWAT tissues were profiled using gene microarrays to identify genes that are toxicity biomarkers. Tissues from the animals treated only with the vehicle (that did not include a PPARγ agonist or partial agonist) were used as the reference channel for the microarray profiling. cDNA made from RNA extracted from tissues from animals treated with a PPARγ agonist, or partial agonist, were labeled with different fluorophores and competitively hybridized with the reference sample on the same array. Approximately 25,000 rat genes had representative oligonucleotide probes on the array. To save the array budget, only a subset of animals were profiled for some phases. When selecting the subset of animals for profiling, efforts were made to avoid biases by choosing animals covering a broad range of biological endpoints. In those phases where a subset were selected, 3 out of 8 rats were selected from the low and medium dose, 6 out of 8 rats were selected from the high dose. It was assumed that effects associated with the high dose were more likely to be drug effects.

[0204] Methods for Identifying Toxicity-Related Genes: Genes were selected whose expression correlated with heart weight increase and/or plasma volume expansion. A dimension reduction approach was also taken to address the statistical overfitting problem. Since there were 25,000 probes printed on the microarray, it was possible to mistakenly select a few genes, by chance, whose expression appeared to be correlated with the biological end point of interest. This is referred to as the overfitting problem. The following approach was used to address the overfitting problem. Regulated genes were identified by first identifying robust signature genes for each compound (i.e., genes whose expression was consistently affected by the compound being tested). The union of the signature genes for all of the compounds tested was clustered into subgroups, and the groups of genes whose expression pattern correlated with the biological endpoint were identified. Since the number of subgroups was usually small (around 4 subgroups), there was no danger of overfitting. This Example describes application of these methods to identifying genes that are markers for increased heart weight in response to a PPARγ agonist or partial agonist.

[0205] (1) Correlating an Increase in Heart Weight with the Expression of Individual Genes in Rat Hearts: Data sets used to identify the correlation were from phases 5, 7, and 8. Gene expression was correlated with an increase in heart weight observed in rats by selecting genes significantly regulated (P<0.01) in more than 3 experiments in each data set. These genes were called the signature genes. The correlation between the log(ratio) of each of the signature genes and the increase in heart weight were calculated for each data set. In this experiment the heart weight was normalized to the body weight. Since the data set for phases 7 and 8 were relatively small, phase 7 data and phase 8 data were also combined for the above calculations, in addition to being used separately. Signature genes were selected that had a magnitude of correlation greater than 0.3 from each data set.

[0206] There were almost no overlapping genes from more than four data sets when the individual animal heart weight data was used. To reduce possible heart weight data measurement error, and to emphasize the drug related toxicity effect, the heart weight data from eight animals (irrespective of whether the animals had been profiled using the microarray) of each treatment group were averaged and used as the toxicity measurement. Using the average endpoint data, 10 overlapping genes were identified.

[0207] Since the magnitude of correlation threshold of 0.3 was arbitrary, and the number of overlapping genes was relatively small, the overlapping genes were used as the seed genes to identify similarly regulated genes in data from phases 5 and the combination of phases 7 plus 8. Genes whose regulation correlated with any of the 10 overlapping genes in either the data from phase 5 or the data from the combination of phases 7 plus 8, with a magnitude of correlation greater than 0.8, were selected. Sixty three probes were thereby identified as toxicity-related genes that indicate an undesirable increase in heart weight.

[0208] It was possible just by chance to incorrectly select a few toxicity-related genes since there were 25,000 genes present on the microarray. Therefore it was important to have some test data sets (which were not involved in the toxicity-related gene selection) to validate the toxicity-related genes.

[0209] (2) Using Strongly Regulated Genes to Identify a Toxicity Related Gene Population: Selecting toxicity-related genes based on the analysis of individual signature gene expression patterns was the most sensitive method to identify a toxicity-related gene population, but also had the highest risk of over-fitting, because of the high degree of freedom. The statistical significance was discounted by the big Bonferroni correction factor. The separate experiments were not fully independent from each other, since a bridging compound was used (rosiglitazone). Therefore a dimension reduction was used to reduce the risk of over-fitting.

[0210] First, robust signature genes (i.e., genes whose expression was consistently affected by the compound being tested and which correlated with the target biological effect) were identified in response to each PPARγ agonist, or partial agonist (P<0.01 and amplitude of log(ratio)>0.15 in at least 80% of the replicates of any treatment, same direction of regulation across multiple doses within a drug, but not in any of the control experiments with log(ratio)>0.2). Then the union of drug signature genes from each phase was analyzed to identify the signature genes that appear in more than one phase. The signature genes from all phases were clustered into a finite number of patterns (<10), and the patterns associated with increased heart weight were identified. The heart tissues from phases 5, 7, 8, 9 were used for selecting the robust signature genes.

[0211] A total of 114 signature genes were selected from all phases. Gene dimension clustering showed that two groups of genes (one up-regulated and one down-regulated) correlated with increased heart weight. The degree of the correlation of these two groups of genes with increased heart weight was further verified by calculating the correlation coefficient between the mean log(ratio) of the up-regulated (or down-regulated) group with the heart weight. The correlations were 0.75 or higher. The chance probability of having such high correlation by random fluctuation was at the level of 2×10⁻⁷.

[0212] Combining the Results of the Gene Expression Analysis Described in Sections (1) and (2): A set of 48 probes were selected from the 114 probes identified in Section (2). Combining these 48 probes with the 63 probes identified as described in Section (1) yielded a total of 85 unique probes. These probes were screened again to identify those probes having a correlation coefficient between gene expression and increase in heart weight greater than 0.4. This process resulted in the final 55 probes. The nucleotide sequence identification numbers of these 55 probes are identified in Table 4, (SEQ ID NOs: 153-207). These 55 probes (SEQ ID NOs: 153-207) corresponded to 50 different genes. The nucleotide sequence identification numbers of these 50 genes are identified in Table 4, (SEQ ID NOs: 103-152). These 50 genes (SEQ ID NOs: 103-152) are useful in the practice of the present invention as a toxicity-related gene population.

TABLE 4
PPARγ_Rat_Heart_Toxicity_HeartWeight_Probe_55
(Species: Rat)

| Accession | | Gene SEQ | Probe SEQ |
|---|---|---|---|
| number | Gene Name | ID NO | ID NO |
| AB011365 | Pparg | 103 | 153 |
| | | | 154 |
| D16478 | Hadha | 104 | 155 |
| J02791 | Acadm | 105 | 156 |
| | | | 157 |
| Y09333 | Mte1 | 106 | 158 |
| AI230591 | g3814478 | 107 | 159 |
| AI105094 | g3709266 | 108 | 160 |
| AA891470 | g3708538 | 109 | 161 |
| AI059241 | g3333018 | 110 | 162 |
| G3638603 | g3638603 | 111 | 163 |
| AA859032 | g2948383 | 112 | 164 |
| BF288765 | g3726475 | 113 | 165 |
| AI071468 | g3397683 | 114 | 166 |
| G3817698 | g3817698 | 115 | 167 |
| AI070283 | Pcsk4 | 116 | 168 |
| G3189597 | g3189597 | 117 | 169 |
| g3815735 | g3815735 | 118 | 170 |
| AI170067 | g3710107 | 119 | 171 |
| AI407765 | g3707790 | 120 | 172 |
| AI170387 | g3710427 | 121 | 173 |
| AI231193 | g3815073 | 122 | 174 |
| g979428 | g979428 | 123 | 175 |
| G3105928 | g3105928 | 124 | 176 |
| AI411979 | g3072442 | 125 | 177 |
| 600523591R1 | 600523591R1 | 126 | 178 |
| AA964752 | g3138244 | 127 | 179 |
| AI009219 | g3223051 | 128 | 180 |
| BE101435 | g2937230 | 129 | 181 |
| AI044576 | g3291437 | 130 | 182 |
| G3036695 | g3036695 | 131 | 183 |
| BG372920 | g3189161 | 132 | 184 |
| AI105417 | g3709501 | 133 | 185 |
| AI177360 | g3727998 | 134 | 186 |
| G3189544 | g3189544 | 135 | 187 |
| AI227820 | Mgll | 136 | 188 |
| AA892864 | Mgll | 137 | 189 |
| BF395162 | g3223602 | 138 | 190 |
| G977669 | g977669 | 139 | 191 |
| g4135065 | g4135065 | 140 | 192 |
| M23601 | Maob | 141 | 193 |
| L23108* | Cd36 | 142 | 194 |
| U75581 | Fabp4 | 143 | 195 |
| | | | 196 |
| | | | 197 |
| NM_012778 | Aqp1 | 144 | 198 |
| U41453 | Akap12 | 145 | 199 |
| U67863 | Mc4r | 146 | 200 |
| | | | 201 |
| NM_031315 | Cte1 | 147 | 202 |
| NM_013120 | Gckr | 148 | 203 |
| NM_017306 | Dci | 149 | 204 |
| NM_022594 | Ech1 | 150 | 205 |
| D00729 | D00729 | 151 | 206 |
| NM_021751 | Prom | 152 | 207 |

*Mouse gene sequence L23108 (SEQ ID NO: 142) and corresponding mouse probe (SEQ ID NO: 194) were used to measure gene expression of the rat homolog(s) to mouse Cd36 gene.

[0213] Identifying a Toxicity-Related Gene Population in Mice that are Early Predictors for Increased Heart Weight: The 55 probes (SEQ ID NOs: 153-207) corresponding to the toxicity-related population of 50 genes (SEQ ID NOs: 103-152), described in the preceding paragraph, were further analyzed to identify a sub-population of genes that are useful as early biomarkers for the onset of the adverse effect of heart weight increase due to administration of a PPARγ agonist or partial agonist.

[0214] In order to find the early biomarkers, the 55 probes (SEQ ID NOs: 153-207) were mapped onto an earlier data set, obtained by treating mice with PPARγ agonists and partial agonists. This earlier experiment was referred to as the “747 tissue experiment” since 747 tissues were collected. PPARγ agonists Rosiglitazone and 5-[4-(3-{4-[4-(methyl sulfonyl)phenoxy]-2-propylphenoxy}propoxy)phenyl]-1,3-thiazolidine-2,4-dione were administered to mice once per day for one to seven days. Tissues were removed 6 hours after the most recent dose of PPARγ agonist from animals with 1, 2, 4 and 8 treatments (note that the first dosage was administered at time zero and tissues were removed from the treated animals six hours later; thus, the animals sacrificed at 7 days had received 8 treatments). By mapping the 55 rat probes (SEQ ID NOs: 153-207) into this set of mice data, and also requiring genes to be regulated by just one or two treatments, five early biomarkers were identified that were useful early reporters of heart toxicity. The nucleotide sequences of these 6 probes (SEQ ID NOs: 213-218), corresponding to 5 genes (SEQ ID NOs: 208-212), as identified in Table 5.

TABLE 5
PPARγ_Mouse_Heart_EarlyBiomarkers_ForHeartWeight_{—}
Probe_5 (species Mouse)

| Accession | | Gene SEQ | Probe SEQ |
|---|---|---|---|
| number | Gene Name | ID NO | ID NO |
| AK003305 | 1110002J19Rik | 208 | 213 |
| AJ001118 | Mgll | 209 | 214 |
| M13264 | Fabp4 | 210 | 215 |
| | | | 216 |
| L02914 | Aqp1 | 2ll | 217 |
| U01841 | Pparg | 212 | 218 |

[0215] These early biomarkers are also useful as a toxicity-related gene population in the practice of the present invention. The use of these early biomarkers helps to identify those candidate PPARγ agonists and/or partial agonists that possess the undesirable property of causing an increase in heart weight.

[0216] Heart Weight Biomarkers in EWAT: EWAT is a target tissue for the PPARγ agonists, and is a useful tissue for microarray profiling because it has a high signal to noise ratio. In addition, it is advantageous to be able to assess both efficacy and toxicity using the same tissue.

[0217] Approximately 1800 robust signature genes were selected (using data from phases 5, 7, 8 and 9). The log(ratio)s of the 1800 robust EWAT signature genes were directly correlated with heart weight. 355 Probes were identified, from the population of 1800 robust probes, that had a correlation value of at least 0.6. The correlation value was a measure of correlation between expression of the gene corresponding to the probe and an increase in heart weight. The identities of these 355 probes are given in Table 6 (SEQ ID NOs: 551-894, 155, 157, 164, 171, 178, 179, 185, 188, 204-206). These 355 probes (SEQ ID NOs: 551-894, 155, 157, 164, 171, 178, 179, 185, 188, 204-206) corresponded to 343 different genes that are identified in Table 6 (SEQ ID NOs: 219-550, 104, 105, 112, 119, 126, 127, 133, 136, 149-151).

TABLE 6
PPARγ_Rat_eWAT_Toxicity_HeartWeight_Probe_355
(Species: Rat)

| Accession | | Gene SEQ | Probe SEQ |
|---|---|---|---|
| number | Gene Name | ID NO | ID NO |
| AA956114 | | 219 | 551 |
| D00688 | Maoa | 220 | 552 |
| | | | 553 |
| D16478 | Hadha | 104 | 155 |
| J02791 | Acadm | 105 | 157 |
| J05029 | Acadl | 221 | 554 |
| | | | 555 |
| | | | 556 |
| K03249 | Ehhadh | 222 | 557 |
| | | | 558 |
| | | | 559 |
| M22756 | Ndufv2 | 223 | 560 |
| M29853 | Cyp4b1 | 224 | 561 |
| | | | 562 |
| | | | 563 |
| G3292626 | g3292626 | 225 | 564 |
| AI170251 | g3710291 | 226 | 565 |
| AI411835 | g3019978 | 227 | 566 |
| AI229166 | g3813053 | 228 | 567 |
| G3667853 | g3667853 | 229 | 568 |
| AA891248 | g3018127 | 230 | 569 |
| G3731024 | g3731024 | 231 | 570 |
| BF282327 | g3812938 | 232 | 571 |
| AA944463 | g3104379 | 233 | 572 |
| G3704882 | g3704882 | 234 | 573 |
| AI113016 | g3512965 | 235 | 574 |
| AW142276 | g3815698 | 236 | 575 |
| G3103828 | g3103828 | 237 | 576 |
| 700034842H1 | 700034842H1 | 238 | 577 |
| AI408705 | g2863227 | 239 | 578 |
| G3227498 | g3227498 | 240 | 579 |
| G3291499 | g3291499 | 241 | 580 |
| AI030918 | g3248744 | 242 | 581 |
| G3712254 | g3712254 | 243 | 582 |
| G3728605 | g3728605 | 244 | 583 |
| G979167 | g979167 | 245 | 584 |
| G3189034 | g3189034 | 246 | 585 |
| G3018667 | g3018667 | 247 | 586 |
| G3188003 | g3188003 | 248 | 587 |
| AI170000 | g3710040 | 249 | 588 |
| X57405 | Notch1 | 250 | 589 |
| G979644 | g979644 | 251 | 590 |
| G3712007 | g3712007 | 252 | 591 |
| AI144876 | Ass | 253 | 592 |
| AI235475 | g3828981 | 254 | 593 |
| AW915407 | g2938925 | 255 | 594 |
| BF288349 | g2938279 | 256 | 595 |
| AI228128 | g3812015 | 257 | 596 |
| AI411031 | g3709121 | 258 | 597 |
| AI168968 | g3705276 | 259 | 598 |
| BF398271 | g3292264 | 260 | 599 |
| G2862965 | g2862965 | 261 | 600 |
| G807326 | g807326 | 262 | 601 |
| G4133385 | g4133385 | 263 | 602 |
| BE107150 | g2939171 | 264 | 603 |
| AI044760 | g3291621 | 265 | 604 |
| BF400209 | g3226969 | 266 | 605 |
| G3705573 | g3705573 | 267 | 606 |
| BF283751 | g4132683 | 268 | 607 |
| AI411520 | g4134016 | 269 | 608 |
| BF560807 | g3187199 | 270 | 609 |
| G3221992 | g3221992 | 271 | 610 |
| G4131482 | g4131482 | 272 | 611 |
| G3071873 | g3071873 | 273 | 612 |
| AA799476 | g2862431 | 274 | 613 |
| G977129 | g977129 | 275 | 614 |
| g3399275 | g3399275 | 276 | 615 |
| G3729761 | g3729761 | 277 | 616 |
| AI411212 | g3710380 | 278 | 617 |
| AI180004 | g3730642 | 279 | 618 |
| AI411375 | g2939160 | 280 | 619 |
| G3223977 | g3223977 | 281 | 620 |
| BE116768 | g3638204 | 282 | 621 |
| BF282695 | g3511588 | 283 | 622 |
| 701347850H1 | 701347850H1 | 284 | 623 |
| G3709587 | g3709587 | 285 | 624 |
| G3813131 | g3813131 | 286 | 625 |
| AI603127 | g3222358 | 287 | 626 |
| G3223106 | g3223106 | 288 | 627 |
| AA859032 | g2948383 | 112 | 164 |
| G3225430 | g3225430 | 289 | 628 |
| G3019722 | g3019722 | 290 | 629 |
| g3292396 | g3292396 | 291 | 630 |
| AI599484 | g3119754 | 292 | 631 |
| BE110616 | g3726615 | 293 | 632 |
| G3187488 | g3187488 | 294 | 633 |
| AI044912 | g3291731 | 295 | 634 |
| AI511066 | g3667675 | 296 | 635 |
| AA891689 | g3018568 | 297 | 636 |
| AA799829 | g4131444 | 298 | 637 |
| AI101639 | g3706514 | 299 | 638 |
| AI013110 | g3227166 | 300 | 639 |
| G3019363 | g3019363 | 301 | 640 |
| g3636884 | g3636884 | 302 | 641 |
| BF284475 | g3711260 | 303 | 642 |
| AA894090 | g3020969 | 304 | 643 |
| G2863149 | g2863149 | 305 | 644 |
| G977018 | g977018 | 306 | 645 |
| BE113034 | g3815452 | 307 | 646 |
| G3137782 | g3137782 | 308 | 647 |
| 700064632H1 | 700064632H1 | 309 | 648 |
| G3292491 | g3292491 | 310 | 649 |
| AI599819 | g3120109 | 311 | 650 |
| AI233766 | g3817646 | 312 | 651 |
| 700508236H1 | 700508236H1 | 313 | 652 |
| 701347935H1 | 701347935H1 | 314 | 653 |
| g2937470 | g2937470 | 315 | 654 |
| AI170808 | g3710848 | 316 | 655 |
| G3727129 | g3727129 | 317 | 656 |
| AW528443 | g4136134 | 318 | 657 |
| AI235135 | g3828641 | 319 | 658 |
| G3511674 | g3511674 | 320 | 659 |
| BG372437 | g4135897 | 321 | 660 |
| BF556962 | g3708808 | 322 | 661 |
| AI144760 | g3666559 | 323 | 662 |
| AI598414 | g3396210 | 324 | 663 |
| g3118749 | g3118749 | 325 | 664 |
| AI511051 | g3511894 | 326 | 665 |
| AA963069 | g3136561 | 327 | 666 |
| G3729474 | g3729474 | 328 | 667 |
| G3709332 | g3709332 | 329 | 668 |
| BF288286 | g2937985 | 330 | 669 |
| AI170067 | g3710107 | 119 | 171 |
| AI175045 | g3725683 | 331 | 670 |
| BG373072 | g3816835 | 332 | 671 |
| BF405032 | g3035182 | 333 | 672 |
| G4134345 | g4134345 | 334 | 673 |
| BG373122 | g978418 | 335 | 674 |
| BG381583 | g4132471 | 336 | 675 |
| G2863503 | g2863503 | 337 | 676 |
| BF281235 | g3121225 | 338 | 677 |
| AA892281 | g3019160 | 339 | 678 |
| AI168935 | g4134349 | 340 | 679 |
| G3223313 | g3223313 | 341 | 680 |
| AA998205 | g3188856 | 342 | 681 |
| G3705112 | g3705112 | 343 | 682 |
| AA799656 | g2862611 | 344 | 683 |
| 701219674H1 | 701219674H1 | 345 | 684 |
| G3103230 | g3103230 | 346 | 685 |
| AA998461 | g3189112 | 347 | 686 |
| BG378631 | g3729576 | 348 | 687 |
| AW525026 | g3246829 | 349 | 688 |
| AA964882 | g3138374 | 350 | 689 |
| G3513255 | g3513255 | 351 | 690 |
| AI009759 | g3223591 | 352 | 691 |
| BG378729 | g3104259 | 353 | 692 |
| BF283386 | g3121114 | 354 | 693 |
| AW915566 | g2864131 | 355 | 694 |
| BF288366 | g2938368 | 356 | 695 |
| g2864124 | g2864124 | 357 | 696 |
| 701216507H1 | 701216507H1 | 358 | 697 |
| G2937254 | g2937254 | 359 | 698 |
| AA892593 | g3019472 | 360 | 699 |
| BG377008 | g2863410 | 361 | 700 |
| AI231886 | g3815766 | 362 | 701 |
| AI406687 | g3019436 | 363 | 702 |
| AI137895 | g3638672 | 364 | 703 |
| BF558361 | g3706834 | 365 | 704 |
| AI060312 | g3334089 | 366 | 705 |
| AI058968 | g3332745 | 367 | 706 |
| 701349156H1 | 701349156H1 | 368 | 707 |
| 700032770H1 | 700032770H1 | 369 | 708 |
| 701220604H1 | 701220604H1 | 370 | 709 |
| 701222864H1 | 701222864H1 | 371 | 710 |
| 701218584H1 | 701218584H1 | 372 | 711 |
| 700508607H1 | 700508607H1 | 373 | 712 |
| G979526 | g979526 | 374 | 713 |
| 600507145R1 | 600507145R1 | 375 | 714 |
| 600513733R1 | 600513733R1 | 376 | 715 |
| 600521564R1 | 600521564R1 | 377 | 716 |
| G979217 | g979217 | 378 | 717 |
| 600521930R1 | 600521930R1 | 379 | 718 |
| 600511860R1 | 600511860R1 | 380 | 719 |
| 600512417R1 | 600512417R1 | 381 | 720 |
| 701417945H1 | 701417945H1 | 382 | 721 |
| 600516384R1 | 600516384R1 | 383 | 722 |
| G3711582 | g3711582 | 384 | 723 |
| 600516355R1 | 600516355R1 | 385 | 724 |
| 600511327R1 | 600511327R1 | 386 | 725 |
| AI600147 | 600521079R1 | 387 | 726 |
| G4134738 | g4134738 | 388 | 727 |
| G3727115 | g3727115 | 389 | 728 |
| 600521206R1 | 600521206R1 | 390 | 729 |
| AA819547 | g2889636 | 391 | 730 |
| BF281400 | g2672900 | 392 | 731 |
| 600523591R1 | 600523591R1 | 126 | 178 |
| 600521690R1 | 600521690R1 | 393 | 732 |
| 600510887R1 | 600510887R1 | 394 | 733 |
| AI175980 | 600512928R1 | 395 | 734 |
| AA944036 | g3103952 | 396 | 735 |
| 600518269R1 | 600518269R1 | 397 | 736 |
| AI175479 | 600513115R1 | 398 | 737 |
| G3188371 | g3188371 | 399 | 738 |
| 700692105H1 | 700692105H1 | 400 | 739 |
| G3225638 | g3225638 | 401 | 740 |
| 600507783R1 | 600507783R1 | 402 | 741 |
| S74321 | cytochrome bc-l | 403 | 742 |
| | complex core P | | |
| BE109568 | 600509475R1 | 404 | 743 |
| G3071118 | g3071118 | 405 | 744 |
| AI010433 | Cdtwl | 406 | 745 |
| G2938798 | g2938798 | 407 | 746 |
| AA866477 | g2961938 | 408 | 747 |
| BG381033 | g4131620 | 409 | 748 |
| 600512426R1 | 600512426R1 | 410 | 749 |
| 600509794R1 | 600509794R1 | 411 | 750 |
| G2862597 | g2862597 | 412 | 751 |
| XM341383 | Pcca | 413 | 752 |
| AI228236 | g3812123 | 414 | 753 |
| 600512874R1 | 600512874R1 | 415 | 754 |
| G4134262 | g4134262 | 416 | 755 |
| 600523104R1 | 600523104R1 | 417 | 756 |
| 600520906R1 | 600520906R1 | 418 | 757 |
| G4131829 | g4131829 | 419 | 758 |
| AI231810 | g3815690 | 420 | 759 |
| AI072712 | 600507095R1 | 421 | 760 |
| 600515268R1 | 600515268R1 | 422 | 761 |
| G3815486 | g3815486 | 423 | 762 |
| 600509881R1 | 600509881R1 | 424 | 763 |
| AI232494 | g3816374 | 425 | 764 |
| AA964752 | g3138244 | 127 | 179 |
| AI410548 | g3073005 | 426 | 765 |
| G3104296 | g3104296 | 427 | 766 |
| 600514084R1 | 600514084R1 | 428 | 767 |
| 600519478R1 | 600519478R1 | 429 | 768 |
| 600508574R1 | 600508574R1 | 430 | 769 |
| AA875107 | g2980055 | 431 | 770 |
| AI104528 | g3708870 | 432 | 771 |
| G3227353 | g3227353 | 433 | 772 |
| AI171656 | g3711696 | 434 | 773 |
| G2863419 | g2863419 | 435 | 774 |
| BE102621 | g3512812 | 436 | 775 |
| G3398286 | g3398286 | 437 | 776 |
| g3830855 | g3830855 | 438 | 777 |
| AI104348 | g3708719 | 439 | 778 |
| AI599410 | g2889576 | 440 | 779 |
| G3831232 | g3831232 | 441 | 780 |
| AI145507 | g3667306 | 442 | 781 |
| G3396295 | g3396295 | 443 | 782 |
| AA891814 | g3018693 | 444 | 783 |
| G4133678 | g4133678 | 445 | 784 |
| AW434257 | g3397092 | 446 | 785 |
| G3019879 | g3019879 | 447 | 786 |
| G3018575 | g3018575 | 448 | 787 |
| AI412460 | g3704629 | 449 | 788 |
| BG381624 | g3018621 | 450 | 789 |
| AW142969 | g3727595 | 451 | 790 |
| G978652 | g978652 | 452 | 791 |
| AI105417 | g3709501 | 133 | 185 |
| AI072493 | g3398687 | 453 | 792 |
| G2862397 | g2862397 | 454 | 793 |
| AA800782 | g4131537 | 455 | 794 |
| AI171367 | g3711407 | 456 | 795 |
| BE111132 | g3397248 | 457 | 796 |
| G977490 | g977490 | 458 | 797 |
| 700585804H1 | 700585804H1 | 459 | 798 |
| BF288776 | g3726534 | 460 | 799 |
| G4135910 | g4135910 | 461 | 800 |
| G979011 | g979011 | 462 | 801 |
| BG374035 | g3726504 | 463 | 802 |
| G978793 | g978793 | 464 | 803 |
| G3707669 | g3707669 | 465 | 804 |
| 701350526H1 | 701350526H1 | 466 | 805 |
| 701216526H1 | 701216526H1 | 467 | 806 |
| AI227820 | Mgll | 136 | 188 |
| BE103080 | g3811971 | 468 | 807 |
| G3666755 | g3666755 | 469 | 808 |
| G3728883 | g3728883 | 470 | 809 |
| G4132495 | g4132495 | 471 | 810 |
| AI011448 | g4133423 | 472 | 811 |
| AI230746 | g3814633 | 473 | 812 |
| AW253370 | g3104091 | 474 | 813 |
| AA965106 | g3138598 | 475 | 814 |
| AI009609 | g4133075 | 476 | 815 |
| BG372547 | g3019278 | 477 | 816 |
| G4135366 | g4135366 | 478 | 817 |
| D50306 | Slc15al | 479 | 818 |
| D30035 | Prdx1 | 480 | 819 |
| | | | 820 |
| M63837 | Pdgfra | 481 | 821 |
| J02749 | Acaa | 482 | 822 |
| | | | 823 |
| X05341 | Acaa2 | 483 | 824 |
| M22631 | Pcca | 484 | 825 |
| L11276 | Acadl | 485 | 554 |
| | | | 555 |
| | | | 556 |
| D16479 | Hadhb | 486 | 826 |
| NM_017005 | Fh | 487 | 827 |
| NM_012891 | Acadvl | 488 | 828 |
| AF160978 | Ly68 | 489 | 829 |
| U40652 | Ptprn | 490 | 830 |
| X68101 | trg | 491 | 831 |
| NM_022398 | LOC64201 | 492 | 832 |
| NM_019274 | Colq | 493 | 833 |
| NM_024360 | Hes1 | 494 | 834 |
| AF034577 | Pdk4 | 495 | 835 |
| AF139830 | Igfbp-5 | 496 | 836 |
| AB047541 | Idh3a | 497 | 837 |
| NM_022503 | Cox7a3 | 498 | 838 |
| D10041 | Facl6 | 499 | 839 |
| AB028626 | Rasa3 | 500 | 840 |
| AJ245619 | Ctl1 | 501 | 841 |
| NM_022540 | Prdx3 | 502 | 842 |
| NM_012817 | Igfbp5 | 503 | 843 |
| NM_031032 | Gmfb | 504 | 844 |
| NM_032614 | Txnl2 | 505 | 845 |
| NM_019147 | Jag1 | 506 | 846 |
| NM_012966 | Hspe1 | 507 | 847 |
| M22030 | ETF | 508 | 848 |
| X61106 | Pgy4 | 509 | 849 |
| NM_012839 | Cycs | 510 | 850 |
| AB047540 | IDH3B | 511 | 851 |
| NM_022395 | Pmpcb | 512 | 852 |
| AJ277747 | Masp2 | 513 | 853 |
| NM_024392 | Hsd17b4 | 514 | 854 |
| NM_031511 | Igf2 | 515 | 855 |
| NM_033349 | Hagh | 516 | 856 |
| NM_031510 | Idh1 | 517 | 857 |
| NM_017267 | Timm44 | 518 | 858 |
| D50664 | Slc15a1 | 519 | 859 |
| NM_012985 | Ndufa5 | 520 | 860 |
| NM_031645 | Ramp1 | 521 | 861 |
| NM_024139 | Chp | 522 | 862 |
| AJ271158 | LOC171069 | 523 | 863 |
| AF150082 | Timm8a | 524 | 864 |
| NM_031354 | Vdac2 | 525 | 865 |
| NM_017306 | Dci | 149 | 204 |
| NM_022594 | Ech1 | 150 | 205 |
| NM_017092 | Tyro3 | 526 | 866 |
| AB032178 | Cox17 | 527 | 867 |
| X56228 | Tst | 528 | 868 |
| NM_032615 | Mir16 | 529 | 869 |
| X05634 | Sod1 | 530 | 870 |
| | | | 871 |
| | | | 872 |
| AJ245707 | Hpcl2 | 531 | 873 |
| J03621 | Suclg1 | 532 | 874 |
| NM_019187 | Coq3 | 533 | 875 |
| NM_024001 | RPT | 534 | 876 |
| NM_019278 | Resp18 | 535 | 877 |
| X97831 | Slc25a20 | 536 | 878 |
| NM_017283 | Psma6 | 537 | 879 |
| NM_031821 | Snk | 538 | 880 |
| AF095449 | Hadhsc | 539 | 881 |
| M89902 | Bdh | 540 | 882 |
| D00729 | D00729 | 151 | 206 |
| AB041723 | Pdcd8 | 541 | 883 |
| AF285103 | Psmb7 | 542 | 884 |
| NM_031851 | Phb | 543 | 885 |
| NM_031350 | Pex3 | 544 | 886 |
| NM_024386 | Hmgcl | 545 | 887 |
| L14684 | EF-G | 546 | 888 |
| U88295 | Cpt2 | 547 | 889 |
| | | | 890 |
| | | | 891 |
| AF239219 | Slc21a11 | 548 | 892 |
| M64780 | Agrn | 549 | 893 |
| AJ007704 | Mlycd | 550 | 894 |

[0218] Mapping the 355 Rat Probes (SEQ ID NOs: 551-894, 155, 157, 164, 171, 178, 179, 185, 188, 204-206) to Mouse 3T3L1 Cells in Culture: Since the 3T3L1 is a mouse cell line, the 355 EWAT probes (SEQ ID NOs: 551-894, 155, 157, 164, 171, 178, 179, 185, 188, 204-206) from rat were mapped to mouse homologs. The mapped mouse probes were then checked in the 3T3L1 PPARγ experiments (as described in Example 3) for regulation. There were 74 probes corresponding to 57 genes which were regulated with magnitude of log(ratio) greater than 0.2 (and P-value of regulation less than 1% in more than 3 experiments) in response to a PPARγ agonist or partial agonist. These 57 genes are useful in the practice of the present invention as a toxicity-related population of genes. The nucleotide sequence identification numbers of these 74 probes are identified in Table 7, (SEQ ID NOs: 950-1019, 863, 93, 94, 97). These 74 probes (SEQ ID NOs: 950-1019, 863, 93, 94, 97) corresponded to 57 different genes. The nucleotide sequence identification numbers of these 57 genes identified in Table 7, (SEQ ID NOs: 895-949, 42, 45).

TABLE 7
PPARγ_3T3L1_Toxicity_HeartWeight_Probe_74
(Species: Mouse Cell Line)

| | | Gene | Probe |
|---|---|---|---|
| Accession | | SEQ | SEQ |
| number | Gene Name | ID NO | ID NO |
| AK003953 | Tst | 895 | 950 |
| AK013511 | Ndufv2 | 896 | 951 |
| AK004125 | 1110036H20Rik | 897 | 952 |
| AK005084 | Ndufa4 | 898 | 953 |
| AF412297 | Ghitm | 899 | 954 |
| NM_026179 | 1300003D03Rik | 900 | 955 |
| AK007415 | 1810010A06Rik | 901 | 956 |
| NM_025384 | 1110003P16Rik | 902 | 957 |
| AK008511 | Usmg5 | 903 | 863 |
| AK018763 | Agt | 904 | 958 |
| BC004045 | LOC212442 | 905 | 959 |
| AK005067 | Chp-pending | 906 | 960 |
| AB047323 | COX17 | 907 | 961 |
| AK002483 | 0610010I20Rik | 908 | 962 |
| AK004390 | 1110067B02Rik | 909 | 963 |
| NM_026614 | 2900002J19Rik | 910 | 964 |
| AK008267 | 1810055D05Rik | 911 | 965 |
| AK009374 | 2310016A09Rik | 912 | 966 |
| AK003283 | Mrpl13 | 913 | 967 |
| NM_011058 | Pdgfra | 914 | 968 |
| AK002593 | Cox7b | 915 | 969 |
| AK005080 | Suclg1 | 916 | 970 |
| AK002889 | 0610041L09Rik | 917 | 971 |
| BC005585 | LOC231086 | 918 | 972 |
| NM_020520 | Slc25a20 | 919 | 973 |
| AK002320 | 0610008C08Rik | 920 | 974 |
| BG172638 | LOC218885 | 921 | 975 |
| BC005792 | Pte1 | 922 | 976 |
| AK003975 | 1500004O06Rik | 923 | 977 |
| | | | 978 |
| NM_021532 | Thyex3-pending | 924 | 979 |
| AK009364 | 1810015H18Rik | 925 | 980 |
| AK002452 | 1110008F13Rik | 926 | 981 |
| BC004020 | BC004020 | 927 | 982 |
| BB004706 | MGC37634 | 928 | 983 |
| NM_013898 | Timm8a | 929 | 984 |
| AK004827 | 0610011D08Rik | 930 | 985 |
| AK004924 | Nudt7 | 931 | 986 |
| AK003393 | Idh3a | 932 | 987 |
| AJ250489 | Ramp1 | 933 | 988 |
| X01756 | Cycs | 934 | 989 |
| BC009134 | AA959601 | 935 | 990 |
| AI648018 | 2610207I16Rik | 936 | 991 |
| | | | 992 |
| | | | 993 |
| AJ131522 | Mlycd | 937 | 994 |
| AF278699 | Angpt14 | 938 | 995 |
| | | | 996 |
| | | | 997 |
| NM_013743 | Pdk4 | 42 | 93 |
| | | | 94 |
| | | | 998 |
| Z71189 | Acadvl | 939 | 999 |
| | | | 1000 |
| | | | 1001 |
| AF030343 | Ech1 | 940 | 1002 |
| D13664 | Osf2-pending | 941 | 1003 |
| D50834 | Cyp4bl | 942 | 1004 |
| L12447 | Igfbp5 | 45 | 97 |
| M93275 | Adfp | 943 | 1005 |
| | | | 1006 |
| | | | 1007 |
| M96163 | Snk | 944 | 1008 |
| U07159 | Acadm | 945 | 1009 |
| | | | 1010 |
| | | | 1011 |
| U21489 | Acadl | 946 | 1012 |
| | | | 1013 |
| | | | 1014 |
| U37501 | Lama5 | 947 | 1015 |
| X70398 | D0H4S114 | 948 | 1016 |
| X89998 | Hsd17b4 | 949 | 1017 |
| | | | 1018 |
| | | | 1019 |

[0219] Toxicity values were calculated from the expression pattern of the 74 probes (SEQ ID NOs: 950-1019, 863, 93, 94, 97) of the toxicity-related population of genes in the following manner. The gene expression profile induced by rosiglitazone (used at an effective concentration of 600 nM) was used as template, and a scale factor S of a given treatment was determined to minimize the following X²:

$${χ}^{2} = {\sum }_{i = 1}^{74} {( S * {R}_{1} - {X}_{1} )}^{2} / ( {σ}_{Ri}^{2} + {σ}_{Xi}^{2} )$$

[0220] where Ri stands for the log(ratio) of the 74 probes whose expression was affected by the high dose of rosiglitazone, σ_{Ri} is the error of Ri, Xi stands for the log(ratio) of the 74 probes (SEQ ID NOs: 950-1019, 863, 93, 94, 97) from that treatment, and σ_{Xi} is the error of Xi. The scale factor S is defined as the toxicity value for that treatment.

[0221] To determine whether the toxicity values, calculated in the foregoing manner, correlated with an increase in heart weight in vivo, heart weights were plotted directly against the calculated toxicity values for 10 full or partial agonists of PPARγ that were tested both in vivo in rat, and in vitro in 3T3L1 cell lines. The data used was obtained from administration of the highest dosage of each of the 10 compounds. The calculated toxicity values for 9 of the 10 compounds correlated highly with the in vivo heart weights (correlation 0.8, P-value=1.8×10⁻³). The fact that the calculated toxicity value for one of the 10 compounds did not correlate highly with the in vivo heart weight was probably because the dosage of this compound, in vivo, was relatively low (30 milligrams per kilogram body weight) compared to the dosage of the other nine compounds (>100 milligrams per kilogram body weight).

[0222] Thus, the 3T3L1 cell line is useful in the practice of the present invention to obtain gene expression data that correlates with an undesirable increase in heart weight caused by a PPARγ agonist or antagonist.

[0223] Early Heart Weight Biomarkers in EWAT: EWAT responded to treatment with a PPARγ agonist, or partial agonist, much more strongly than heart tissues. Therefore EWAT was a sensitive tissue in terms of magnitude of response. The 355 probes (SEQ ID NOs: 551-894, 155, 157, 164, 171, 178, 179, 185, 188, 204-206) corresponding to the toxicity-related population of 343 genes (SEQ ID NOs: 219-550, 104, 105, 112, 119, 126, 127, 133, 136, 149-151), described in this Example, were further analyzed to identify a sub-population of genes that are useful as early biomarkers for the onset of the adverse effect of heart weight increase due to administration of a PPARγ agonist or partial agonist.

[0224] The 355 rat EWAT probes (SEQ ID NOs: 551-894, 155, 157, 164, 171, 178, 179, 185, 188, 204-206) were projected to the “747 tissue experiment” by homolog mapping, and then selecting the subset of PPARγ regulated genes from fat tissues. 46 mouse homologs were regulated in the one day and 2 day treatments. These 46 genes are useful in the practice of the present invention as a toxicity-related gene population. The nucleotide sequences of the 67 probes that hybridized to the 46 genes, identified in Table 8, (SEQ ID NOs: 1036-1057, 951, 955, 957, 863, 959, 960, 63, 962, 966, 971-974, 980, 981, 984, 987, 989, 991-996, 93, 94, 998-1001, 97, 1004-1014, 1017-1019), are set forth in the SEQUENCE LISTING. The nucleotide sequences of the corresponding 46 genes identified in Table 8, (SEQ ID NOs: 1020-1035, 896, 900, 902, 903, 905, 906, 13, 908, 912, 917-920, 925, 926, 929, 932, 934, 936-939, 42, 942-946, 45, 949), are set forth in the SEQUENCE LISTING. Among the 46 genes (SEQ ID NOs: 1020-1035, 896, 900, 902, 903, 905, 906, 13, 908, 912, 917-920, 925, 926, 929, 932, 934, 936-939, 42, 942-946, 45, 949) regulated in the mouse fat tissues, 44 probes overlapped with the 74 3T3L1 probes (SEQ ID NOs: 950-1019, 863, 93, 94, 97).

TABLE 8
PPARγ_Mouse_eWAT_Toxicity_HeartWeight_EarlyProbe_67
(Species: Mouse)

| Accession | | Gene SEQ | Probe SEQ |
|---|---|---|---|
| number | Gene Name | ID NO | ID NO |
| AK010479 | 2410012P20Rik | 1020 | 1036 |
| AK013511 | Ndufv2 | 896 | 951 |
| NM_026179 | 1300003D03Rik | 900 | 955 |
| NM_008303 | Hspe1 | 1021 | 1037 |
| NM_025384 | 1110003P16Rik | 902 | 957 |
| AK008511 | Usmg5 | 903 | 863 |
| NM_011192 | Psme3 | 1022 | 1038 |
| BC004045 | LOC212442 | 905 | 959 |
| AK018125 | Gfm | 1023 | 1039 |
| AK005067 | Chp-pending | 906 | 960 |
| AK004867 | 1300002P22Rik | 13 | 63 |
| AF058955 | Sucla2 | 1024 | 1040 |
| AK002483 | 0610010I20Rik | 908 | 962 |
| NM_019975 | Hpcl-pending | 1025 | 1041 |
| AK009575 | Bdh | 1026 | 1042 |
| AK008788 | 2610003B19Rik | 1027 | 1043 |
| AK009374 | 2310016A09Rik | 912 | 966 |
| AK013955 | 3110001K13Rik | 1028 | 1044 |
| AK003325 | 1110002N22Rik | 1029 | 1045 |
| AK002889 | 0610041L09Rik | 917 | 971 |
| BC005585 | LOC231086 | 918 | 972 |
| NM_020520 | Slc25a20 | 919 | 973 |
| NM_019961 | Pex3 | 1030 | 1046 |
| NM_026494 | AI413471 | 1031 | 1047 |
| AK002320 | 0610008C08Rik | 920 | 974 |
| AK009364 | 1810015H18Rik | 925 | 980 |
| AK002452 | 1110008F13Rik | 926 | 981 |
| NM_013898 | Timm8a | 929 | 984 |
| AK015530 | 4930469P12Rik | 1032 | 1048 |
| AK003393 | Idh3a | 932 | 987 |
| AI195543 | MGC29978 | 1033 | 1049 |
| X01756 | Cycs | 934 | 989 |
| AI648018 | 2610207I16Rik | 936 | 991 |
| | | | 992 |
| | | | 993 |
| Z14050 | Dci | 1034 | 1050 |
| AJ131522 | Mlycd | 937 | 994 |
| | | | 1051 |
| AF278699 | Angptl4 | 938 | 995 |
| | | | 996 |
| NM_013743 | Pdk4 | 42 | 93 |
| | | | 998 |
| | | | 94 |
| Z71189 | Acadvl | 939 | 999 |
| | | | 1000 |
| | | | 1001 |
| D50834 | Cyp4b1 | 942 | 1052 |
| | | | 1053 |
| | | | 1004 |
| L12447 | Igfbp5 | 45 | 1054 |
| | | | 97 |
| | | | 1055 |
| M93275 | Adfp | 943 | 1005 |
| | | | 1006 |
| | | | 1007 |
| M96163 | Snk | 944 | 1008 |
| U01163 | Cpt2 | 1035 | 1056 |
| | | | 1057 |
| U07159 | Acadm | 945 | 1011 |
| | | | 1010 |
| | | | 1009 |
| U21489 | Acadl | 946 | 1012 |
| | | | 1013 |
| | | | 1014 |
| X89998 | Hsd17b4 | 949 | 1018 |
| | | | 1017 |
| | | | 1019 |

[0225] Plasma Volume Expansion Biomarkers in EWAT and 3T3L1 Cells: Using the same procedure that is described in this Example in the section entitled “Measuring the Toxic Effects of PPARγ Agonists and PPARγ Partial Agonists in Rats” for identifying heart weight biomarkers in EWAT, 271 probes were identified in EWAT whose expression was affected by a PPARγ full agonist or partial agonist, and that correlated with plasma volume expansion (PVE). The nucleotide sequences of the 271 probes identified in Table 9, (SEQ ID NOs: 1239-1428, 558, 561, 158, 565, 574, 576, 578, 585, 592, 597, 600, 609, 612, 613, 617, 163, 625, 641-643, 646, 647, 655-657, 661, 666, 171, 681, 697, 700, 706, 707, 712, 720, 727, 740, 745, 748, 749, 755-757, 762, 766, 767, 769-771, 773, 778, 780, 786, 789, 794, 800, 803, 804, 188, 189, 191, 813, 814, 822, 823, 556, 828, 831, 832, 836, 840, 844, 864, 871, 876, 878, 883, 884, 889-891), are set forth in the SEQUENCE LISTING. 259 genes correspond to the 271 probes (SEQ ID NOs: 1239-1428, 558, 561, 158, 565, 574, 576, 578, 585, 592, 597, 600, 609, 612, 613, 617, 163, 625, 641-643, 646, 647, 655-657, 661, 666, 171, 681, 697, 700, 706, 707, 712, 720, 727, 740, 745, 748, 749, 755-757, 762, 766, 767, 769-771, 773, 778, 780, 786, 789, 794, 800, 803, 804, 188, 189, 191, 813, 814, 822, 823, 556, 828, 831, 832, 836, 840, 844, 864, 871, 876, 878, 883, 884, 889-891). The nucleotide sequences of these 259 genes as identified in Table 9 (SEQ ID NOs: 1058-1238, 222, 224, 106, 226, 235, 237, 239, 246, 253, 258, 261, 270, 273, 274, 278, 111, 286, 302-304, 307, 308, 316-318, 322, 327, 119, 342, 358, 361, 367, 368, 373, 381, 388, 401, 406, 409, 410, 416-418, 423, 427, 428, 430-432, 434, 439, 441, 447, 450, 455, 461, 464, 465, 136, 137, 139, 474, 475, 482, 485, 488, 491, 492, 496, 500, 504, 524, 530, 534, 536, 541, 542, 547), are set forth in the SEQUENCE LISTING.

TABLE 9
PPARγ_Rat_eWAT_Toxicity_{—}
PVE_Probe_271 (Species: Rat)

| Accession | | Gene SEQ | Probe |
|---|---|---|---|
| number | Gene Name | ID NO | SEQ ID NO |
| J02752 | RATACOA1 | 1058 | 1239 |
| | | | 1240 |
| J05030 | Acads | 1059 | 1241 |
| | | | 1242 |
| K03249 | Ehhadh | 222 | 558 |
| M17701 | Gapd | 1060 | 1243 |
| | | | 1244 |
| | | | 1245 |
| M29853 | Cyp4b1 | 224 | 561 |
| AA875107 | AA875107 | 1061 | 1246 |
| U39208 | CYP4F6 | 1062 | 1247 |
| U68544 | cyclophilin D | 1063 | 1248 |
| Y09333 | Mte1 | 106 | 158 |
| AI170251 | g3710291 | 226 | 565 |
| AW523642 | g4133650 | 1064 | 1249 |
| 701221122H1 | 701221122H1 | 1065 | 1250 |
| BF288270 | g2937947 | 1066 | 1251 |
| BF415385 | g3711895 | 1067 | 1252 |
| G3332690 | g3332690 | 1068 | 1253 |
| G3705868 | g3705868 | 1069 | 1254 |
| BE111773 | g2938661 | 1070 | 1255 |
| G3708088 | g3708088 | 1071 | 1256 |
| G2936894 | g2936894 | 1072 | 1257 |
| AW918940 | g4134740 | 1073 | 1258 |
| AI113016 | g3512965 | 235 | 574 |
| G3103828 | g3103828 | 237 | 576 |
| G3816318 | g3816318 | 1074 | 1259 |
| AI408705 | g2863227 | 239 | 578 |
| G3710568 | g3710568 | 1075 | 1260 |
| G979671 | g979671 | 1076 | 1261 |
| BF420654 | g3227012 | 1077 | 1262 |
| G3189034 | g3189034 | 246 | 585 |
| G2948676 | g2948676 | 1078 | 1263 |
| G2939411 | g2939411 | 1079 | 1264 |
| AI144876 | Ass | 253 | 592 |
| G2948912 | g2948912 | 1080 | 1265 |
| AI411031 | g3709121 | 258 | 597 |
| G2862965 | g2862965 | 261 | 600 |
| G4132595 | g4132595 | 1081 | 1266 |
| G3812213 | g3812213 | 1082 | 1267 |
| BG373361 | g3333793 | 1083 | 1268 |
| G2672793 | g2672793 | 1084 | 1269 |
| G3292487 | g3292487 | 1085 | 1270 |
| G3226140 | g3226140 | 1086 | 1271 |
| G3727666 | g3727666 | 1087 | 1272 |
| G3730290 | g3730290 | 1088 | 1273 |
| BE109153 | g3638407 | 1089 | 1274 |
| BF560807 | g3187199 | 270 | 609 |
| G3071873 | g3071873 | 273 | 612 |
| AA799476 | g2862431 | 274 | 613 |
| G3708991 | g3708991 | 1090 | 1275 |
| AI411212 | g3710380 | 278 | 617 |
| BG376920 | g2864026 | 1091 | 1276 |
| G3187055 | g3187055 | 1092 | 1277 |
| 701221494H1 | 701221494H1 | 1093 | 1278 |
| G3396562 | g3396562 | 1094 | 1279 |
| AI138016 | g3638793 | 1095 | 1280 |
| G3709353 | g3709353 | 1096 | 1281 |
| G3816414 | g3816414 | 1097 | 1282 |
| AA848702 | g2936242 | 1098 | 1283 |
| G3638603 | g3638603 | 111 | 163 |
| G3813131 | g3813131 | 286 | 625 |
| G3102919 | g3102919 | 1099 | 1284 |
| AI013919 | g4133944 | 1100 | 1285 |
| AI104605 | g4134272 | 1101 | 1286 |
| BG378613 | g3103045 | 1102 | 1287 |
| BG381472 | g3726883 | 1103 | 1288 |
| G2979890 | g2979890 | 1104 | 1289 |
| G2937670 | g2937670 | 1105 | 1290 |
| AA850195 | g2937735 | 1106 | 1291 |
| g3706559 | g3706559 | 1107 | 1292 |
| AA800179 | g2863134 | 1108 | 1293 |
| AI230578 | g3814465 | 1109 | 1294 |
| BE109153 | g3637263 | 1110 | 1295 |
| g3636884 | g3636884 | 302 | 641 |
| AA848951 | g2936491 | 1111 | 1296 |
| BF284475 | g3711260 | 303 | 642 |
| AA799707 | g4131430 | 1112 | 1297 |
| AA894090 | g3020969 | 304 | 643 |
| BE113034 | g3815452 | 307 | 646 |
| G3397918 | g3397918 | 1113 | 1298 |
| G3828291 | g3828291 | 1114 | 1299 |
| G3137782 | g3137782 | 308 | 647 |
| G3728910 | g3728910 | 1115 | 1300 |
| AI229639 | g3813526 | 1116 | 1301 |
| AI170808 | g3710848 | 316 | 655 |
| AA963282 | g3136774 | 1117 | 1302 |
| G3727129 | g3727129 | 317 | 656 |
| AW528443 | g4136134 | 318 | 657 |
| G3333614 | g3333614 | 1118 | 1303 |
| BE110615 | g3226627 | 1119 | 1304 |
| G3512087 | g3512087 | 1120 | 1305 |
| BF556962 | g3708808 | 322 | 661 |
| G3712131 | g3712131 | 1121 | 1306 |
| AW916776 | g3667631 | 1122 | 1307 |
| G2889306 | g2889306 | 1123 | 1308 |
| G3398898 | g3398898 | 1124 | 1309 |
| AA963069 | g3136561 | 327 | 666 |
| AI071994 | g3398188 | 1125 | 1310 |
| AA858867 | g2948218 | 1126 | 1311 |
| AI170067 | g3710107 | 119 | 171 |
| AI412011 | g3247895 | 1127 | 1312 |
| g3511496 | g3511496 | 1128 | 1313 |
| G3710033 | g3710033 | 1129 | 1314 |
| BE109401 | g3247351 | 1130 | 1315 |
| G3019865 | g3019865 | 1131 | 1316 |
| G3813191 | g3813191 | 1132 | 1317 |
| G3815059 | g3815059 | 1133 | 1318 |
| G4132386 | g4132386 | 1134 | 1319 |
| g3398472 | g3398472 | 1135 | 1320 |
| AA819658 | g2888922 | 1136 | 1321 |
| AA998205 | g3188856 | 342 | 681 |
| AA924580 | g3071716 | 1137 | 1322 |
| G980031 | g980031 | 1138 | 1323 |
| 700691760H1 | 700691760H1 | 1139 | 1324 |
| AI234620 | g3828126 | 1140 | 1325 |
| 701216507H1 | 701216507H1 | 358 | 697 |
| BG380734 | g2938750 | 1141 | 1326 |
| BG377008 | g2863410 | 361 | 700 |
| AW918113 | g3291307 | 1142 | 1327 |
| G3730272 | g3730272 | 1143 | 1328 |
| AI058968 | g3332745 | 367 | 706 |
| 701349156H1 | 701349156H1 | 368 | 707 |
| 700692031H1 | 700692031H1 | 1144 | 1329 |
| G980946 | g980946 | 1145 | 1330 |
| 701219843H1 | 701219843H1 | 1146 | 1331 |
| AI577393 | g980620 | 1147 | 1332 |
| 701350827H1 | 701350827H1 | 1148 | 1333 |
| 700506509H1 | 700506509H1 | 1149 | 1334 |
| 700508607H1 | 700508607H1 | 373 | 712 |
| 600512417R1 | 600512417R1 | 381 | 720 |
| G4134738 | g4134738 | 388 | 727 |
| 600521579R1 | 600521579R1 | 1150 | 1335 |
| 600519254R1 | 600519254R1 | 1151 | 1336 |
| G3225638 | g3225638 | 401 | 740 |
| 600518885R1 | 600518885R1 | 1152 | 1337 |
| 600524228R1 | 600524228R1 | 1153 | 1338 |
| AI010433 | Cdtw 1 | 406 | 745 |
| G3710810 | g3710810 | 1154 | 1339 |
| BG381033 | g4131620 | 409 | 748 |
| 600512426R1 | 600512426R1 | 410 | 749 |
| AW915824 | 600510363R1 | 1155 | 1340 |
| 600518233R1 | 600518233R1 | 1156 | 1341 |
| AI599296 | g3711488 | 1157 | 1342 |
| G3103745 | g3103745 | 1158 | 1343 |
| G4134262 | g4134262 | 416 | 755 |
| AI009817 | g3223649 | 1159 | 1344 |
| 600523104R1 | 600523104R1 | 417 | 756 |
| 600520906R1 | 600520906R1 | 418 | 757 |
| AI101492 | g4134011 | 1160 | 1345 |
| AA892500 | g3019379 | 1161 | 1346 |
| AI411374 | g3709749 | 1162 | 1347 |
| G3815486 | g3815486 | 423 | 762 |
| 600512215R1 | 600512215R1 | 1163 | 1348 |
| BG376528 | g3707272 | 1164 | 1349 |
| 600519560R1 | 600519560R1 | 1165 | 1350 |
| AA800476 | g2863431 | 1166 | 1351 |
| G3104296 | g3104296 | 427 | 766 |
| 600514084R1 | 600514084R1 | 428 | 767 |
| BF394796 | 600515077R1 | 1167 | 1352 |
| 600508574R1 | 600508574R1 | 430 | 769 |
| 600516676R1 | 600516676R1 | 1168 | 1353 |
| G3036598 | g3036598 | 1169 | 1354 |
| AA875107 | g2980055 | 431 | 770 |
| AI104528 | g3708870 | 432 | 771 |
| AA799741 | g2862696 | 1170 | 1355 |
| AJ005161 | EF-Ts | 1171 | 1356 |
| G3104097 | g3104097 | 1172 | 1357 |
| AI171656 | g3711696 | 434 | 773 |
| 700506775H1 | 700506775H1 | 1173 | 1358 |
| AI104348 | g3708719 | 439 | 778 |
| AI045456 | g3292275 | 1174 | 1359 |
| G3831232 | g3831232 | 441 | 780 |
| BE349717 | g3020180 | 1175 | 1360 |
| G976906 | g976906 | 1176 | 1361 |
| BE101298 | g3334069 | 1177 | 1362 |
| G3019879 | g3019879 | 447 | 786 |
| g3018118 | g3018118 | 1178 | 1363 |
| BG381624 | g3018621 | 450 | 789 |
| 700688496H1 | 700688496H1 | 1179 | 1364 |
| AI145756 | g3667555 | 1180 | 1365 |
| BF282282 | g3730624 | 1181 | 1366 |
| AA801227 | g4131587 | 1182 | 1367 |
| AA800782 | g4131537 | 455 | 794 |
| BF413204 | g3726768 | 1183 | 1368 |
| AI071674 | g3397889 | 1184 | 1369 |
| AA859467 | g2948987 | 1185 | 1370 |
| G4135910 | g4135910 | 461 | 800 |
| BF282978 | g3019668 | 1186 | 1371 |
| BF394796 | g3332553 | 1187 | 1372 |
| G978793 | g978793 | 464 | 803 |
| G3707669 | g3707669 | 465 | 804 |
| G3709693 | g3709693 | 1188 | 1373 |
| AI231798 | g3815678 | 1189 | 1374 |
| AI227820 | Mgll | 136 | 188 |
| G3813792 | g3813792 | 1190 | 1375 |
| g3104887 | g3104887 | 1191 | 1376 |
| AA892864 | Mgll | 137 | 189 |
| G3222645 | g3222645 | 1192 | 1377 |
| G977669 | g977669 | 139 | 191 |
| AW253370 | g3104091 | 474 | 813 |
| AA965106 | g3138598 | 475 | 814 |
| G3812897 | g3812897 | 1193 | 1378 |
| AW913838 | g3222273 | 1194 | 1379 |
| D10952 | Cox5b | 1195 | 1380 |
| J02749 | Acaa | 482 | 822 |
| | | | 823 |
| L11276 | Acadl | 485 | 556 |
| D16236 | Cdc25a | 1196 | 1381 |
| NM_012891 | Acadvl | 488 | 828 |
| AF061266 | Trrp1 | 1197 | 1382 |
| X68101 | trg | 491 | 831 |
| NM_022398 | LOC64201 | 492 | 832 |
| NM_022182 | Fgf7 | 1198 | 1383 |
| NM_013168 | Hmbs | 1199 | 1384 |
| AF139830 | Igfbp-5 | 496 | 836 |
| AB028626 | Rasa3 | 500 | 840 |
| M29341 | Gapd | 1200 | 1243 |
| | | | 1385 |
| AW917188 | Dpyd | 1201 | 1386 |
| | | | 1387 |
| AF044574 | Decr2 | 1202 | 1388 |
| M96374 | Nrxn1 | 1203 | 1389 |
| AF170918 | Aldh9a1 | 1204 | 1390 |
| | | | 1391 |
| NM_031032 | Gmfb | 504 | 844 |
| NM_017280 | Psma3 | 1205 | 1392 |
| NM_012569 | Gls | 1206 | 1393 |
| AB052846 | Sc5d | 1207 | 1394 |
| NM_017020 | Il6r | 1208 | 1395 |
| NM_021767 | Nrxn1 | 1209 | 1396 |
| L35921 | Gng8 | 1210 | 1397 |
| NM_017183 | Il8rb | 1211 | 1398 |
| AB006614 | Ucp3 | 1212 | 1399 |
| | | | 1400 |
| | | | 1401 |
| NM_023023 | Crmp5 | 1213 | 1402 |
| NM_017321 | Ratireb | 1214 | 1403 |
| AF150091 | Timm10 | 1215 | 1404 |
| NM_019352 | Timm23 | 1216 | 1405 |
| AF019109 | Sort1 | 1217 | 1406 |
| NM_031062 | Mvd | 1218 | 1407 |
| AF026554 | Slc5a6 | 1219 | 1408 |
| J05446 | Gys2 | 1220 | 1409 |
| NM_022541 | Ddp2 | 1221 | 1410 |
| NM_031151 | Mor1 | 1222 | 1411 |
| AF021854 | Pecr | 1223 | 1412 |
| NM_017256 | Tgfbr3 | 1224 | 1413 |
| NM_024398 | Aco2 | 1225 | 1414 |
| NM_023964 | Gapds | 1226 | 1415 |
| D28560 | Enpp2 | 1227 | 1416 |
| AF150082 | Timm8a | 524 | 864 |
| NM_031527 | Ppp1ca | 1228 | 1417 |
| X54510 | Atp5j | 1229 | 1418 |
| NM_024148 | Apex | 1230 | 1419 |
| X05634 | Sod1 | 530 | 871 |
| NM_022500 | Ftl1 | 1231 | 1420 |
| NM_017006 | G6pd | 1232 | 1421 |
| NM_024001 | RPT | 534 | 876 |
| X97831 | Slc25a20 | 536 | 878 |
| D88891 | Bach | 1233 | 1422 |
| AB041723 | Pdcd8 | 541 | 883 |
| AF285103 | Psmb7 | 542 | 884 |
| AY034383 | Dlc2 | 1234 | 1423 |
| U88295 | Cpt2 | 547 | 889 |
| | | | 890 |
| | | | 891 |
| NM_017177 | Chetk | 1235 | 1424 |
| U00926 | Atp5d | 1236 | 1425 |
| J04044 | Alas1 | 1237 | 1426 |
| | | | 1427 |
| AF239045 | Kidins220 | 1238 | 1428 |

[0226] Mapping these 271 EWAT probes (SEQ ID NOs: 1239-1428, 558, 561, 158, 565, 574, 576, 578, 585, 592, 597, 600, 609, 612, 613, 617, 163, 625, 641-643, 646, 647, 655-657, 661, 666, 171, 681, 697, 700, 706, 707, 712, 720, 727, 740, 745, 748, 749, 755-757, 762, 766, 767, 769-771, 773, 778, 780, 786, 789, 794, 800, 803, 804, 188, 189, 191, 813, 814, 822, 823, 556, 828, 831, 832, 836, 840, 844, 864, 871, 876, 878, 883, 884, 889-891) to mice yielded 44 probes that were also regulated by PPARγ agonists in the mouse 3T3L1 cell line. The nucleotide sequences of the 44 probes identified in Table 10, (SEQ ID NOs: 1449-1471, 952, 956, 957, 963, 975, 976, 981, 983, 984, 986, 990, 999-1001, 1004-1007, 1012-1014), are set forth in the SEQUENCE LISTING. The nucleotide sequences of the corresponding 35 genes identified in Table 10, (SEQ ID NOs: 1429-1448, 897, 901, 902, 919, 921, 922, 926, 928, 929, 931, 935, 939, 942, 943, 946), are set forth in the SEQUENCE LISTING.

TABLE 10
PPARγ_3T3L1_Toxicity_{—}
PVE_Probe_44 (Species: Mouse Cell Line)

| Accession | | Gene SEQ | Probe |
|---|---|---|---|
| number | Gene Name | ID NO | SEQ ID NO |
| BC004645 | Aco2 | 1429 | 1449 |
| | | | 1450 |
| AK004125 | 1110036H20Rik | 897 | 952 |
| AK007415 | 1810010A06Rik | 901 | 956 |
| AK007651 | Ubqln1 | 1430 | 1451 |
| NM_025384 | 1110003P16Rik | 902 | 957 |
| NM_015744 | Enpp2 | 1431 | 1452 |
| NM_019993 | Aldh9a1 | 1432 | 1453 |
| BC011289 | 6720463E02Rik | 1433 | 1454 |
| AK004193 | 1110046O21Rik | 1434 | 1455 |
| AK004954 | 1300010A20Rik | 1435 | 1456 |
| AK007497 | 1810014L12Rik | 1436 | 1457 |
| NM_024207 | 1110021N07Rik | 1437 | 1458 |
| AK004634 | Gng31g | 1438 | 1459 |
| AK008088 | Timm13a | 1439 | 1460 |
| NM_020520 | Slc25a20 | 919 | 973 |
| AJ309922 | Mvd | 1440 | 1461 |
| BG172638 | LOC218885 | 921 | 975 |
| BC005792 | Pte1 | 922 | 976 |
| NM_016897 | Timm23 | 1441 | 1462 |
| AK002452 | 1110008F13Rik | 926 | 981 |
| BC002251 | AI480570 | 1442 | 1463 |
| BB004706 | MGC37634 | 928 | 983 |
| NM_007658 | Cdc25a | 1443 | 1464 |
| NM_013898 | Timm8a | 929 | 984 |
| AK004924 | Nudt7 | 931 | 986 |
| BC009134 | AA959601 | 935 | 990 |
| Z71189 | Acadvl | 939 | 999 |
| | | | 1000 |
| | | | 1001 |
| AF006688 | Acox1 | 1444 | 1465 |
| | | | 1466 |
| | | | 1467 |
| D50834 | Cyp4b1 | 942 | 1004 |
| M16229 | Mor1 | 1445 | 1468 |
| M93275 | Adfp | 943 | 1005 |
| | | | 1006 |
| | | | 1007 |
| U21489 | Acadl | 946 | 1012 |
| | | | 1013 |
| | | | 1014 |
| X53802 | Il6ra | 1446 | 1469 |
| AB016248 | Sc5d | 1447 | 1470 |
| NM_008008 | Fgf7 | 1448 | 1471 |

[0227] It is noteworthy that the heart weight and PVE toxicity values from the 3T3L1 model system were highly correlated with the classifier values as described in Example 3. Therefore, in this example, using the 3T3L1 system, only the toxicity value or the classifier need be calculated for each compound.

### EXAMPLE 3

[0228] This Example describes the identification of a classifier population of genes that is useful for classifying candidate agents as being more like a known agonist of PPARγ, or as being more like a known partial agonist of PPARγ.

[0229] The gene expression profile of 26 compounds at high dosage (30×EC₅₀) in 3T3L1 adipocyte cell line were measured using a Rosetta mouse 25K DNA Microarray. The overall experiment was conducted in three phases (i.e., in three separate experiments conducted at three different times) as shown in Table 11 below. Three replicates were done for each of the tested compounds in each phase of the experiment.

[0230] The gene expression measurement levels from the following compound treatments were used as the training set: PPARγ partial agonists: 2-(3-{[3-(4-chlorobenzoyl)-2-methyl-6-(trifluoromethoxy)-1H-indol-1-yl]methyl} phenoxy)-3-methylbutanoate; (2R)-2-(4-chloro-3-{[3-(6-methoxy-1,2-benzisoxazol-3-yl)-2-methyl-6-(trifluoromethoxy)-1H-indol-1-yl]methyl}phenoxy)propanoate; (2S)-2-(4-chloro-3-{[1-(6-chloro-1,2-benzisoxazol-3-yl)-2-methyl-5-(trifluoromethoxy)-1H-indol-3-yl]oxy}phenoxy)propanoic acid; and (2R)-2-(2-chloro-5-{[3-(4-chlorobenzoyl)-2-methyl-6-(trifluoromethoxy)-1H-indol-1-yl]methyl} phenoxy)propanoic acid; and PPARγ agonists: 5-(4-{2-[methyl(pyridin-2-yl)amino]ethoxy} benzyl)-1,3-thiazolidine-2,4-dione, and 5-{4-[2-hydroxy-2-(5-methyl-2-phenyl-1,3-oxazol-4-yl)ethoxy]benzyl}-1,3-thiazolidine-2,4-dione.

[0231] The other PPARγ agonist, and partial agonist, compounds were used in testing the classifier population of genes. The following dosages were used where indicated by a * 0.540 μM in Phase 1, 0.600 μM in Phases 2 and 3; and where indicated by a ** 6.3 μM in Phase 2, 6.324 μM in Phase 3. The PPARα agonist was included as a control.

TABLE 11

| Phase | Phase | Phase | | Dosage |
|---|---|---|---|---|
| 1 | 2 | 3 | Compounds | (μM) |
| | X | X | PPARα agonist | 10.0 |
| | X | | Partial agonist 2 | 0.030 |
| X | | | Partial agonist 3 | 0.300 |
| | X | X | Partial agonist 4 | ** |
| | X | | Partial agonist 2-(3-{[3-(4- | 3.0 |
| | | | chlorobenzoyl)-2-methyl-6- | |
| | | | (trifluoromethoxy)-1H-indol-1- | |
| | | | yl]methyl}phenoxy)-3- | |
| | | | methylbutanoate | |
| X | X | X | Partial agonist (2R)-2-(4-chloro-3- | * |
| | | | {[3-(6-methoxy-1,2- | |
| | | | benzisoxazol-3-yl)-2-methyl-6- | |
| | | | (trifluoromethoxy)-1H-indol-1- | |
| | | | yl]methyl}phenoxy)propanoate | |
| | X | | Partial agonist 5 | 0.3 |
| | X | | Partial agonist 6 | 10.0 |
| X | | | Partial agonist (2S)-2-(4-chloro-3- | 0.12 |
| | | | {[1-(6-chloro- 1,2- | |
| | | | benzisoxazol-3-yl)-2-methyl-5- | |
| | | | (trifluoromethoxy)-1H-indol-3- | |
| | | | yl]oxy}phenoxy)propanoic acid | |
| | X | | Partial agonist 7 | 1.4 |
| | X | | Partial agonist 8 | 0.1 |
| | | X | Partial agonist 9 | 0.158 |
| | | X | Partial agonist 10 | 0.285 |
| X | | | Partial agonist (2R)-2-(2-chloro-5- | 0.054 |
| | | | {[3-(4- chlorobenzoyl)-2- | |
| | | | methyl-6-(trifluoromethoxy)-1H- | |
| | | | indol-1-yl]methyl}phenoxy)pro- | |
| | | | panoic acid | |
| | X | X | Partial agonist 11 | 1.1 |
| | | X | Partial agonist 12 | 0.221 |
| | X | X | Partial agonist 13 | 1.8 |
| | | X | Partial agonist 14 | 0.126 |
| | | X | Partial agonist 15 | 0.2 |
| | | X | Partial agonist 16 | 16.032 |
| | | X | Partial agonist 17 | 1.075 |
| X | | X | Agonist 1 | 3.870 |
| X | | | Agonist 2 | 0.006 |
| | X | | Agonist 3 | 1.5 |
| X | X | X | Agonist 5-(4-{2-[methyl(pyridin- | * |
| | | | 2-yl)amino]ethoxy}benzyl)-1,3- | |
| | | | thiazolidine-2,4-dione) | |
| X | | | Agonist (5-{4-[2-hydroxy-2-(5- | 0.027 |
| | | | methyl-2-phenyl-1,3- oxazol-4- | |
| | | | yl)ethoxy]benzyl}-1,3- | |
| | | | thiazolidine-2,4-dione) | |

[0232] The three replicate gene expression profiles within each phase of the experiment were first combined based on the error-weighted average. Expression profiles of two PPARγ full agonists, and four PPARγ partial agonists (in Phase 1) were chosen for classifier training, and were divided into the following two groups:

[0233] Group 1: two PPARγ full agonists (5-(4-{2-[methyl(pyridin-2-yl)amino]ethoxy} benzyl)-1,3-thiazolidine-2,4-dione and 5-{4-[2-hydroxy-2-(5-methyl-2-phenyl-1,3-oxazol-4-yl)ethoxy]benzyl}-1,3-thiazolidine-2,4-dione)

[0234] Group 2: four PPARγ partial agonists ((2R)-2-(2-chloro-5-{[3-(4-chlorobenzoyl)-2-methyl-6-(trifluoromethoxy)-1H-indol-1-yl]methyl}phenoxy)propanoic acid; (2S)-2-(4-chloro-3-{[1-(6-chloro-1,2-benzisoxazol-3-yl)-2-methyl-5-(trifluoromethoxy)-1H-indol-3-yl]oxy}phenoxy)propanoic acid; (2S)-2-(3-{[1-(4-methoxybenzoyl)-2-methyl-5-(trifluoromethoxy)-1H-indol-3-yl]methyl}phenoxy)propanoic acid; and (2R)-2-(4-chloro-3-{[3-(6-methoxy-1,2-benzisoxazol-3-yl)-2-methyl-6-(trifluoromethoxy)-1H-indol-1-yl]methyl} phenoxy)propanoate).

[0235] The expression profiles of the remaining compounds were used to test the classifier gene population.

[0236] Probes identified in the training gene set that had a pvalue of less than 0.1 in at least one of the above training compound expression profiles were selected. A total of 7,610 probes were selected. The Matlab function ANOVA1 (one-way analysis of variance) was used to calculate the pvalue (hereafter referred to as the ANOVA-pvalue) for the null hypothesis that the means of Group 1 and Group 2 are equal. Probes with an ANOVA-pvalue smaller than 1×10⁻⁷ and an absolute value of the average of logRatio in Group 1 greater than log₁₀ 1.5 (which is a value of 0.1761) were selected. The resulting 303 probes corresponded to 290 genes that were the classifier population that were PPARγ agonist signature genes and that best distinguished partial PPARγ agonists from full PPARγ agonists.

[0237] The nucleotide sequences of the 303 probes identified in Table 12, (SEQ ID NOs: 1731-1996, 52, 951, 1450, 957, 1452, 1455, 65, 68, 69, 72, 75, 1457, 967, 1458, 970, 971, 974, 1462, 82, 977, 978, 982, 90, 989, 990, 215, 999-1001, 96, 1468, 1005, 1006, 218, 1014, 1018, 1019), are set forth in the SEQUENCE LISTING. The nucleotide sequences of the corresponding 290 genes identified in Table 12, (SEQ ID NOs: 1472-1730, 2, 896, 1429, 902, 1431, 15, 18, 19, 22, 25, 1436, 913, 1437, 916, 917, 920, 1441, 32, 923, 927, 39, 934, 935, 210, 939, 44, 1445, 943, 212, 946, 949), are set forth in the SEQUENCE LISTING.

TABLE 12
PPARγ_3T3L1_Compound_Classifier_{—}
Probe_303 (Species: Mouse Cell Line)

| Accession | | Gene | Probe SEQ |
|---|---|---|---|
| number | Gene Name | SEQ ID NO | ID NO |
| AK005615 | 1700001N19Rik | 1472 | 1731 |
| NM_007760 | Crat | 1473 | 1732 |
| AK013984 | 3110003A17Rik | 1474 | 1733 |
| AW909114 | MGC28611 | 2 | 52 |
| AK003912 | 1110025G12Rik | 1475 | 1734 |
| AK013511 | Ndufv2 | 896 | 951 |
| AK009628 | 2310035C23Rik | 1476 | 1735 |
| NM_021704 | Cxcl12 | 1477 | 1736 |
| AK003232 | Cbr3 | 1478 | 1737 |
| BC002149 | 4633402C03Rik | 1479 | 1738 |
| AK011998 | 2610528M18Rik | 1480 | 1739 |
| AK009071 | 2310001K24Rik | 1481 | 1740 |
| AK016432 | 4931406C07Rik | 1482 | 1741 |
| AK017037 | 4930433D19Rik | 1483 | 1742 |
| BC004645 | Aco2 | 1429 | 1450 |
| NM_011677 | Ung | 1484 | 1743 |
| AK013880 | Nars | 1485 | 1744 |
| NM_010697 | Ldb1 | 1486 | 1745 |
| AK019322 | 2900029G13Rik | 1487 | 1746 |
| NM_011868 | Peci | 1488 | 1747 |
| NM_011921 | Aldh1a7 | 1489 | 1748 |
| NM_025772 | Dtnbp1 | 1490 | 1749 |
| AK004338 | 1110061E11Rik | 1491 | 1750 |
| NM_011031 | P4ha2 | 1492 | 1751 |
| NM_007672 | Cdr2 | 1493 | 1752 |
| NM_015734 | Col5a1 | 1494 | 1753 |
| AK010791 | 2410131K14Rik | 1495 | 1754 |
| NM_011701 | Vim | 1496 | 1755 |
| NM_011050 | Pdcd4 | 1497 | 1756 |
| NM_016861 | Pdlim1 | 1498 | 1757 |
| AK011193 | 2600013D04Rik | 1499 | 1758 |
| NM_020026 | B3galt3 | 1500 | 1759 |
| NM_008768 | Orm1 | 1501 | 1760 |
| AV367848 | AA959574 | 1502 | 1761 |
| AK005869 | 1700011I11Rik | 1503 | 1762 |
| NM_008590 | Mest | 1504 | 1763 |
| BI689765 | AA617265 | 1505 | 1764 |
| AK008764 | 2210021K23Rik | 1506 | 1765 |
| NM_025384 | 1110003P16Rik | 902 | 957 |
| NM_010634 | Fabp5 | 1507 | 1766 |
| AK012054 | 2610319K07Rik | 1508 | 1767 |
| NM_015744 | Enpp2 | 1431 | 1452 |
| AF294617 | Pfkfb3 | 1509 | 1768 |
| AV298518 | AV298518 | 1510 | 1769 |
| AK004987 | Mkks | 1511 | 1770 |
| X15052 | Ncam1 | 1512 | 1771 |
| NM_007473 | Aqp7 | 1513 | 1772 |
| AK007902 | 1810059C13Rik | 1514 | 1773 |
| AK019783 | 4930564I24Rik | 1515 | 1774 |
| BC005552 | Asns | 1516 | 1775 |
| NM_016762 | Matn2 | 1517 | 1776 |
| NM_007881 | Drpla | 1518 | 1777 |
| AK009197 | 2310007D03Rik | 1519 | 1778 |
| AK013761 | 2900070E19Rik | 1520 | 1779 |
| NM_009320 | Slc6a6 | 1521 | 1780 |
| NM_008520 | Ltbp3 | 1522 | 1781 |
| AK004614 | 1200006I17Rik | 1523 | 1782 |
| NM_008638 | Mthfd2 | 1524 | 1783 |
| AK012758 | 1200014I03Rik | 1525 | 1784 |
| NM_011424 | Ncor2 | 1526 | 1785 |
| AK020007 | 5830411O09Rik | 1527 | 1786 |
| AV341581 | 6330577E15Rik | 1528 | 1787 |
| AK008165 | 2010009K05Rik | 1529 | 1788 |
| NM_032398 | Plvap | 1530 | 1789 |
| NM_011693 | Vcam1 | 1531 | 1790 |
| BC003432 | Etfa | 1532 | 1791 |
| AK005710 | Slc25a19 | 1533 | 1792 |
| NM_011641 | Trp63 | 1534 | 1793 |
| AK004743 | Myo1c | 1535 | 1794 |
| NM_009149 | Selel | 1536 | 1795 |
| NM_009058 | Rgds | 1537 | 1796 |
| AK004759 | 1200014F01Rik | 1538 | 1797 |
| AK004153 | 1110038D17Rik | 1539 | 1798 |
| AK010185 | 2310075M15Rik | 1540 | 1799 |
| AK002769 | 0610037F22Rik | 1541 | 1800 |
| AK019459 | Atp5f1 | 1542 | 1801 |
| AF179996 | Sept8 | 1543 | 1802 |
| NM_011462 | Spin | 1544 | 1803 |
| AK017610 | 2810011K15Rik | 1545 | 1804 |
| NM_021893 | Pdcd1lg1 | 1546 | 1805 |
| AK004193 | 1110046O21Rik | 1434 | 1455 |
| BC003988 | Rbm5 | 1547 | 1806 |
| AK009315 | 2310012G06Rik | 15 | 65 |
| AK021117 | C030033M12Rik | 1548 | 1807 |
| AV378562 | 2410022M24Rik | 1549 | 1808 |
| NM_007945 | Eps8 | 1550 | 1809 |
| NM_008608 | Mmp14 | 1551 | 1810 |
| NM_013655 | Cxcl12 | 1552 | 1811 |
| AK003270 | Tbrg1 | 1553 | 1812 |
| AK006810 | 2210018M03Rik | 1554 | 1813 |
| AK005515 | 1600021P15Rik | 1555 | 1814 |
| BB001681 | MICAL-3 | 1556 | 1815 |
| AK021325 | D730003I15Rik | 1557 | 1816 |
| NM_011782 | Adamts5 | 18 | 68 |
| AW120656 | MGC28924 | 1558 | 1817 |
| AK002851 | 0610039N19Rik | 1559 | 1818 |
| NM_011598 | Tlbp | 1560 | 1819 |
| AV075202 | Acadvl | 1561 | 1820 |
| AK013448 | 2810487F15Rik | 1562 | 1821 |
| NM_019729 | Usp8 | 1563 | 1822 |
| NM_020578 | Ehd3 | 19 | 69 |
| BE947541 | BE947541 | 1564 | 1823 |
| AK017403 | 5430437E11Rik | 1565 | 1824 |
| AK004526 | 1810061M12Rik | 1566 | 1825 |
| AK004642 | Lfng | 1567 | 1826 |
| NM_011766 | Zfpm2 | 1568 | 1827 |
| AK010506 | Pbx4 | 1569 | 1828 |
| BB113348 | BB113348 | 1570 | 1829 |
| AK019860 | Agpt2 | 1571 | 1830 |
| AK018466 | 8430436O14Rik | 1572 | 1831 |
| AK013157 | 2810425J22Rik | 1573 | 1832 |
| AK010891 | 2510002J07Rik | 22 | 72 |
| AK002480 | 0610010I13Rik | 1574 | 1833 |
| NM_008735 | Nrip1 | 1575 | 1834 |
| AK007896 | Cdc42ep1 | 1576 | 1835 |
| NM_015757 | Pcdh13 | 1577 | 1836 |
| AW476152 | Adamts2 | 1578 | 1837 |
| NM_007941 | Epim | 1579 | 1838 |
| AK011976 | Angptl2 | 1580 | 1839 |
| AK007873 | 1810055P05Rik | 1581 | 1840 |
| AK004732 | 1200013A08Rik | 25 | 75 |
| NM_021528 | C4st2-pending | 1582 | 1841 |
| AK009739 | Klf15 | 1583 | 1842 |
| AK014643 | 4733401N06Rik | 1584 | 1843 |
| AV221349 | ri\|3322401K10\| | 1585 | 1844 |
| | PX00010E04\|\|2295 | | |
| AK004659 | Cf12 | 1586 | 1845 |
| AK007497 | 1810014L12Rik | 1436 | 1457 |
| AK004770 | 9130009D18Rik | 1587 | 1846 |
| NM_023294 | 2610020P18Rik | 1588 | 1847 |
| AK004670 | 1200009F10Rik | 1589 | 1848 |
| NM_023058 | Pkmyt1-pending | 1590 | 1849 |
| BI101760 | AW214504 | 1591 | 1850 |
| AK011889 | 2610205H19Rik | 1592 | 1851 |
| NM_011812 | Fbln5 | 1593 | 1852 |
| NM_008216 | Has2 | 1594 | 1853 |
| AK003283 | Mrpl13 | 913 | 967 |
| NM_007705 | Cirbp | 1595 | 1854 |
| NM_025892 | 1500031L02Rik | 1596 | 1855 |
| NM_024207 | 1110021N07Rik | 1437 | 1458 |
| AK002277 | Igfbp7 | 1597 | 1856 |
| NM_008564 | Mcmd2 | 1598 | 1857 |
| AV102233 | AV102233 | 1599 | 1858 |
| NM_008486 | Anpep | 1600 | 1859 |
| BC002107 | D5Ertd371e | 1601 | 1860 |
| NM_007970 | Ezh1 | 1602 | 1861 |
| AK002744 | 0610033L03Rik | 1603 | 1862 |
| AK017684 | 5730466C23Rik | 1604 | 1863 |
| AK003387 | Ube2g2 | 1605 | 1864 |
| AK002942 | 0610020I02Rik | 1606 | 1865 |
| NM_010225 | Foxf2 | 1607 | 1866 |
| AV077222 | 2810422B09Rik | 1608 | 1867 |
| AK007959 | Klf3 | 1609 | 1868 |
| AK021144 | C030044C12Rik | 1610 | 1869 |
| BF160060 | AV212693 | 1611 | 1870 |
| NM_025910 | 1810047J07Rik | 1612 | 1871 |
| AV247986 | Dysf | 1613 | 1872 |
| AK017918 | 5830411H19Rik | 1614 | 1873 |
| AK005080 | Suclg1 | 916 | 970 |
| AW490567 | Jag1 | 1615 | 1874 |
| AV238629 | AV238629 | 1616 | 1875 |
| AK006128 | Abcc3 | 1617 | 1876 |
| AK002889 | 0610041L09Rik | 917 | 971 |
| AK018089 | 6230416A05Rik | 1618 | 1877 |
| NM_008810 | Pdha1 | 1619 | 1878 |
| NM_025626 | 3110001A13Rik | 1620 | 1879 |
| AF096898 | D15Mit260 | 1621 | 1880 |
| AK003535 | 1110007F12Rik | 1622 | 1881 |
| NM_023644 | Mccc1 | 1623 | 1882 |
| AK008125 | 2010005I16Rik | 1624 | 1883 |
| BC004702 | Birc5 | 1625 | 1884 |
| BE553640 | 1700084G18Rik | 1626 | 1885 |
| AJ276796 | Cars | 1627 | 1886 |
| NM_019804 | B4galt4 | 1628 | 1887 |
| AK008255 | 2010015J01Rik | 1629 | 1888 |
| NM_011796 | Capn10 | 1630 | 1889 |
| AK004851 | 1300002F13Rik | 1631 | 1890 |
| NM_007620 | Cbr1 | 1632 | 1891 |
| AK010706 | 2410055N02Rik | 1633 | 1892 |
| AK008822 | 4933404O11Rik | 1634 | 1893 |
| NM_010918 | Nktr | 1635 | 1894 |
| AK002320 | 0610008C08Rik | 920 | 974 |
| NM_009104 | Rrm2 | 1636 | 1895 |
| BC004801 | LOC207933 | 1637 | 1896 |
| AK009291 | 2310011D08Rik | 1638 | 1897 |
| NM_010422 | Hexb | 1639 | 1898 |
| AK013062 | 2810410A03Rik | 1640 | 1899 |
| AK003556 | 2310075G14Rik | 1641 | 1900 |
| NM_016788 | Tnk2 | 1642 | 1901 |
| NM_007707 | Cish3 | 1643 | 1902 |
| NM_016897 | Timm23 | 1441 | 1462 |
| NM_016810 | Gosr1 | 1644 | 1903 |
| AK016659 | 4933405A16Rik | 1645 | 1904 |
| AK020118 | 6720429C22Rik | 1646 | 1905 |
| AK020182 | 7330412A13Rik | 1647 | 1906 |
| AK011182 | 2600010N21Rik | 1648 | 1907 |
| NM_009378 | Thbd | 1649 | 1908 |
| AK007856 | 1810054D07Rik | 1650 | 1909 |
| NM_024223 | Crip2 | 1651 | 1910 |
| AK020048 | 6030408B16Rik | 1652 | 1911 |
| AK019002 | 1810004I06Rik | 1653 | 1912 |
| AK013740 | 6530401D17Rik | 32 | 82 |
| AK010344 | 2410002L19Rik | 1654 | 1913 |
| NM_011479 | Sptlc2 | 1655 | 1914 |
| AK003709 | 1110014L14Rik | 1656 | 1915 |
| NM_025809 | 1200003C23Rik | 1657 | 1916 |
| AK008679 | 2210008N01Rik | 1658 | 1917 |
| AK003975 | 1500004O06Rik | 923 | 978 |
| | | | 977 |
| AK010747 | 2410089E03Rik | 1659 | 1918 |
| NM_026473 | 2310057H16Rik | 1660 | 1919 |
| NM_008910 | Ppm1a | 1661 | 1920 |
| AK003621 | 1110012D08Rik | 1662 | 1921 |
| AK004432 | 1190001I08Rik | 1663 | 1922 |
| AK018500 | 2700038I16Rik | 1664 | 1923 |
| AK016881 | 4933424A20Rik | 1665 | 1924 |
| NM_026842 | Ubqln1 | 1666 | 1925 |
| BC004020 | BC004020 | 927 | 982 |
| AK002699 | Ptk9l | 1667 | 1926 |
| NM_008841 | Pik3r2 | 1668 | 1927 |
| NM_016812 | Banp | 1669 | 1928 |
| BC003261 | Stk5 | 1670 | 1929 |
| AK003995 | 1110030N17Rik | 1671 | 1930 |
| NM_007996 | Fdx1 | 1672 | 1931 |
| NM_013792 | Naglu | 1673 | 1932 |
| AC002397 | CD4, A-2, B, GNB3, | 1674 | 1933 |
| | C8, ISOT, TPI, B7, | | |
| | ENO2, DRPLA, U7snRNA, | | |
| | C10, PTPN6, BAP, C2F | | |
| NM_017370 | Hp | 1675 | 1934 |
| AK010043 | 2310065E01Rik | 1676 | 1935 |
| BC003908 | 2310046B19Rik | 1677 | 1936 |
| NM_007609 | Casp11 | 1678 | 1937 |
| BE994229 | Tcfcp2 | 1679 | 1938 |
| NM_008055 | Fzd4 | 1680 | 1939 |
| AK003586 | 1110008K06Rik | 1681 | 1940 |
| AK013580 | 2900024C23Rik | 1682 | 1941 |
| BC004633 | 2410011G03Rik | 1683 | 1942 |
| AK009883 | Atp5g1 | 1684 | 1943 |
| AK010765 | Bag4 | 1685 | 1944 |
| AK002531 | Sat | 1686 | 1945 |
| AK016103 | 4930553F04Rik | 39 | 90 |
| BC003766 | Nfix | 1687 | 1946 |
| BC010825 | 1700112L09Rik | 1688 | 1947 |
| U03419 | Col1a1 | 1689 | 1948 |
| U03715 | Col18a1 | 1690 | 1949 |
| M20497 | Fabp4 | 1691 | 1950 |
| AA543477 | Mgst1 | 1692 | 1951 |
| Z38015 | DM-PK | 1693 | 1952 |
| X01756 | Cycs | 934 | 989 |
| L02331 | Sult1a1 | 1694 | 1953 |
| BC007148 | Vps26 | 1695 | 1954 |
| AF013262 | Lum | 1696 | 1955 |
| BC009134 | AA959601 | 935 | 990 |
| BC008989 | LOC217166 | 1697 | 1956 |
| M13264 | Fabp4 | 210 | 215 |
| Z71189 | Acadvl | 939 | 1001 |
| | | | 999 |
| | | | 1000 |
| AF007267 | Pmm1 | 1698 | 1957 |
| AF011450 | Col15a1 | 1699 | 1958 |
| AF057286 | Epn2 | 1700 | 1959 |
| D01093 | Pcsk4 | 1701 | 1960 |
| D86949 | Plxna2 | 1702 | 1961 |
| J04632 | Gstm1 | 44 | 96 |
| J04696 | Gstm2 | 1703 | 1962 |
| L02918 | Col5a2 | 1704 | 1963 |
| L57509 | Ddr1 | 1705 | 1964 |
| M16229 | Mor1 | 1445 | 1468 |
| M18194 | Fn1 | 1706 | 1965 |
| M32240 | Pmp22 | 1707 | 1966 |
| | | | 1967 |
| | | | 1968 |
| M93275 | Adfp | 943 | 1005 |
| | | | 1006 |
| U01841 | Pparg | 212 | 1969 |
| | | | 1970 |
| | | | 218 |
| U03283 | Cyp1b1 | 1708 | 1971 |
| | | | 1972 |
| U08020 | Col1a1 | 1709 | 1973 |
| U14332 | Il15 | 1710 | 1974 |
| U21489 | Acadl | 946 | 1014 |
| U43298 | Lamb3 | 1711 | 1975 |
| U58883 | Sorbs1 | 1712 | 1976 |
| | | | 1977 |
| U67187 | Rgs2 | 1713 | 1978 |
| U79550 | Snai2 | 1714 | 1979 |
| X04017 | Sparc | 1715 | 1980 |
| X04367 | Pdgfrb | 1716 | 1981 |
| | | | 1982 |
| X63535 | Axl | 1717 | 1983 |
| X67469 | Lrp1 | 1718 | 1984 |
| X89998 | Hsd17b4 | 949 | 1018 |
| | | | 1019 |
| Y15163 | Cited2 | 1719 | 1985 |
| J03484 | Lamc1 | 1720 | 1986 |
| X04972 | Sod2 | 1721 | 1987 |
| X69620 | Inhbb | 1722 | 1988 |
| AI314880 | Tstap91a | 1723 | 1989 |
| AI746433 | A1746433 | 1724 | 1990 |
| U70139 | Ccr4 | 1725 | 1991 |
| AB023957 | EIG180 | 1726 | 1992 |
| NM_011513 | Surf5 | 1727 | 1993 |
| NM_010284 | Ghr | 1728 | 1994 |
| AI448406 | AI562151 | 1729 | 1995 |
| AI449447 | AI449447 | 1730 | 1996 |

[0238] The average of the logRatio of each of the 303 probes (SEQ ID NOs: 1731-1996, 52, 951, 1450, 957, 1452, 1455, 65, 68, 69, 72, 75, 1457, 967, 1458, 970, 971, 974, 1462, 82, 977, 978, 982, 90, 989, 990, 215, 999-1001, 96, 1468, 1005, 1006, 218, 1014, 1018, 1019) in Group 1 was calculated and served as the template. A classifier value for a PPARγ agonist, or partial agonist, was calculated in the following manner. The value (expressed as a percentage) of the logRatio divided by the template logRatio for each of the 303 probes (SEQ ID NOs: 1731-1996, 52, 951, 1450, 957, 1452, 1455, 65, 68, 69, 72, 75, 1457, 967, 1458, 970, 971, 974, 1462, 82, 977, 978, 982, 90, 989, 990, 215, 999-1001, 96, 1468, 1005, 1006, 218, 1014, 1018, 1019) was calculated, and then the mean of the resulting 303 percentages was calculated. This mean value was the classifier value for the PPARγ agonist, or partial agonist.

[0239] Table 13 below shows the classifier value for the compounds that were tested in Phase 3 of the 3T3L1 experiment.

TABLE 13

| Compound | Classifier Value |
|---|---|
| Agonist 1 | 0.881 |
| Agonist 5-(4-{2-[methyl(pyridin-2- | 0.850 |
| yl)amino]ethoxy}benzyl)-1,3- | |
| thiazolidine-2,4-dione) | |
| Partial agonist 16 | 0.708 |
| Partial agonist 15 | 0.651 |
| Partial agonist 17 | 0.550 |
| Partial agonist 4 | 0.473 |
| Partial agonist 10 | 0.387 |
| Partial agonist 13 | 0.363 |
| Partial agonist 9 | 0.352 |
| Partial agonist 12 | 0.350 |
| Partial agonist | 0.341 |
| (2R)-2-(4-chloro-3-{[3-(6- | |
| methoxy-1,2-benzisoxazol-3-yl)-2- | |
| methyl-6-(trifluoromethoxy)-1H-indol-1- | |
| yl]methyl}phenoxy)propanoate | |
| Partial agonist 11 | 0.309 |
| Partial agonist 14 | 0.302 |
| PPARα agonist | 0.096 |

[0240] This classifier gene population is useful for ranking candidate partial agonists of PPARγ and full agonists of PPARγ relative to one or more known partial agonists of PPARγ and one or more known full agonists of PPARγ.

### EXAMPLE 4

[0241] This Example describes the identification of a population of genes that yield an expression pattern that correlates with the stimulation of PPARα receptors by an agent. This population of genes can be used, for example, to screen candidate PPARγ agonists, or partial agonists, to identify those candidate agents that possess the undesirable property of stimulating PPARα receptors. This population of genes can also be used, for example, to identify PPARα agonists, or PPARα partial agonists.

[0242] Wild type mice, and mice that had been genetically modified to inactivate all copies of the gene encoding the PPARα protein (called PPARα knockout mice), were treated with PPARα agonists. Genes whose expression was significantly affected in wild type mice in response to the PPARα agonists, but which was not significantly affected in PPARα knockout mice, were identified. The resulting gene set was considered a PPARα receptor-dependent signature gene set.

[0243] Two PPARα agonists were orally administered to wild type mice (abbreviated as WT mice) and to PPARα knockout mice (abbreviated as KO mice). The two compounds were Fenofibrate (administered at a dosage of 200 milligrams per kilogram body weight), and [4-chloro-6-(2,3-xylidino)-2-pyrimidinylthio]acetic acid (administered at a dosage of 30 milligrams per kilogram body weight). The PPARα agonists were administered at day 1 and day 7. Three experimental conditions were tested for each PPARα agonist:
[0244] WT control pool vs. WT treatment (hereafter WT vs. WT treatment)
[0245] KO control pool vs. KO treatment (hereafter KO vs. KO treatment)
[0246] WT treatment vs. KO treatment (hereafter WT treatment vs. KO treatment)

[0247] The hybrid ANOVA method described in Example 1 was used to calculate the ANOVA-pvalue and the average of logRatio of gene expression for each gene in each of the 12 experimental groups (i.e., two drug treatments×two time points×three conditions). Signature genes were identified that had an ANOVA-pvalue less than 0.01, and the absolute value of the average of logRatio greater than log₁₀1.5.

[0248] The union of the one day signature genes with the seven day signature genes for each of the two PPARα: agonist treatments under each of the three experimental conditions (WT vs. WT treatment; KO vs. KO treatment; WT treatment vs. KO treatment) was used to identify genes whose expression was significantly regulated in the WT vs. WT treatment, and WT treatment vs. KO treatment groups, but not in the KO vs. KO treatment group, for each of the two PPARα agonist treatments. The genes that were common to the PPARα agonist treatments were identified, thereby yielding a total of 978 probes as identified in Table 14, (SEQ ID NOs: 2796-3683, 1732, 1734, 53, 1740, 1449, 1450, 1747, 1748, 1037, 1759, 957, 1774, 60, 1780, 63, 1797, 962, 1808, 1041, 1809, 1817, 1818, 1820, 1824, 71, 72, 1833, 966, 1873, 970-973, 1879, 1046, 1047, 976, 1898, 1904, 80, 1910, 86, 1932, 1933, 1941, 1049, 989, 1953, 991-993, 1050, 1051, 994, 215, 216, 93, 94, 998-1001, 1465-1467, 1957, 1002, 214, 1962, 1005-1007, 1056, 1057, 1009-1014, 1974, 1975, 1977, 1979, 1016-1019, 1994, 101), corresponding to 870 unique genes as identified in Table 14, (SEQ ID NOs: 1997-2795, 1473, 1475, 3, 1481, 1429, 1488, 1489, 1021, 1500, 902, 1515, 10, 1521, 13, 1538, 908, 1549, 1025, 1550, 1558, 1559, 1561, 1565, 21, 22, 1574, 912, 1614, 916-919, 1620, 1030, 1031, 922, 1639, 1645, 30, 1651, 35, 1673, 1674, 1682, 1033, 934, 1694, 936, 1034, 937, 210, 42, 939, 1444, 1698, 940, 209, 1703, 943, 1035, 945, 1710, 946, 1711, 1712, 1714, 948, 949, 142, 1728, 49).

TABLE 14
PPARα_3T3L1_Liver_Depended_Regulation_Probe_978
(Species: Mouse Cell Line)

| Accession | Gene | Gene SEQ | Probe SEQ |
|---|---|---|---|
| number | Name | ID NO | ID NO |
| AK005570 | 1600032L17Rik | 1997 | 2796 |
| NM_008298 | Dnaja1 | 1998 | 2797 |
| AW122190 | AW122190 | 1999 | 2798 |
| AK018646 | 9130022K13Rik | 2000 | 2799 |
| AK020256 | 9030616G12Rik | 2001 | 2800 |
| AK012001 | 2610306P15Rik | 2002 | 2801 |
| AV225723 | AA408038 | 2003 | 2802 |
| AK012577 | 2700087I09Rik | 2004 | 2803 |
| AK015314 | 0710001P09Rik | 2005 | 2804 |
| NM_019926 | Mtm1 | 2006 | 2805 |
| BE691027 | BE691027 | 2007 | 2806 |
| AK019063 | 2210408B16Rik | 2008 | 2807 |
| AK005808 | 1700010A17Rik | 2009 | 2808 |
| AV269843 | MGC30495 | 2010 | 2809 |
| AK014452 | 3830422K02Rik | 2011 | 2810 |
| NM_019723 | Slc22a9 | 2012 | 2811 |
| BC011492 | 9130020G10Rik | 2013 | 2812 |
| AI449628 | AI449595 | 2014 | 2813 |
| BC004092 | Nd1-pending | 2015 | 2814 |
| NM_007760 | Crat | 1473 | 1732 |
| | | | 2815 |
| BF455494 | BF455494 | 2016 | 2816 |
| NM_021526 | Poh1-pending | 2017 | 2817 |
| AK012370 | Scd1 | 2018 | 2818 |
| AK012685 | 2810007J24Rik | 2019 | 2819 |
| AK019713 | 4930529O08Rik | 2020 | 2820 |
| AK015561 | 4930472G13Rik | 2021 | 2821 |
| AK007857 | 1810054F20Rik | 2022 | 2822 |
| NM_028119 | 2610043A19Rik | 2023 | 2823 |
| AK015340 | 4930439B20Rik | 2024 | 2824 |
| NM_010139 | Epha2 | 2025 | 2825 |
| AK002693 | Dgat2l1 | 2026 | 2826 |
| AK016318 | 4930579F01Rik | 2027 | 2827 |
| AK013414 | Sip1 | 2028 | 2828 |
| NM_027288 | 2410030O07Rik | 2029 | 2829 |
| BC002151 | 1110056N09Rik | 2030 | 2830 |
| AK009210 | 2310007J06Rik | 2031 | 2831 |
| AV356694 | AV356694 | 2032 | 2832 |
| AK005622 | Insl6 | 2033 | 2833 |
| AK009377 | 2310016C08Rik | 2034 | 2834 |
| AK003912 | 1110025G12Rik | 1475 | 1734 |
| BB541540 | Clcn2 | 2035 | 2835 |
| NM_025558 | 1810044O22Rik | 2036 | 2836 |
| NM_008543 | Madh7 | 3 | 53 |
| NM_011596 | Atp6vOa2 | 2037 | 2837 |
| AF339106 | Foxp2 | 2038 | 2838 |
| AK003879 | 5730512J02Rik | 2039 | 2839 |
| NM_008878 | Serpinf2 | 2040 | 2840 |
| NM_018760 | Slc4a4 | 2041 | 2841 |
| NM_008129 | Gclm | 2042 | 2842 |
| AK013628 | 2900040J22Rik | 2043 | 2843 |
| NM_008681 | Ndrl | 2044 | 2844 |
| BF579112 | AW121759 | 2045 | 2845 |
| AK009071 | 2310001K24Rik | 1481 | 1740 |
| AK017628 | 5730438N18Rik | 2046 | 2846 |
| AK012088 | Facl3 | 2047 | 2847 |
| NM_026586 | 6720475J19Rik | 2048 | 2848 |
| NM_007930 | Enc1 | 2049 | 2849 |
| AK009134 | Acyp2 | 2050 | 2850 |
| BC004645 | Aco2 | 1429 | 1449 |
| | | | 1450 |
| | | | 2851 |
| AV278562 | AV278562 | 2051 | 2852 |
| AK018792 | 1520401O13Rik | 2052 | 2853 |
| AK010547 | 5730471K09Rik | 2053 | 2854 |
| NM_010237 | Frk | 2054 | 2855 |
| AK014380 | 3321402G02Rik | 2055 | 2856 |
| NM_010001 | Cyp2c37 | 2056 | 2857 |
| NM_009794 | Capn2 | 2057 | 2858 |
| AK005616 | 1700001O02Rik | 2058 | 2859 |
| NM_027280 | Nkd1 | 2059 | 2860 |
| AK013597 | 2900026A02Rik | 2060 | 2861 |
| AK004307 | Grhpr | 2061 | 2862 |
| NM_008253 | Hmgb3 | 2062 | 2863 |
| AK008360 | Fcgrt | 2063 | 2864 |
| AK009343 | 2310014L03Rik | 2064 | 2865 |
| AV115239 | AV115239 | 2065 | 2866 |
| NM_008769 | Otc | 2066 | 2867 |
| AK004782 | Lgals8 | 2067 | 2868 |
| AK011596 | Trfr | 2068 | 2869 |
| NM_011868 | Peci | 1488 | 1747 |
| AK006140 | 1700020A13Rik | 2069 | 2870 |
| W29450 | AA410048 | 2070 | 2871 |
| BC004728 | BC004728 | 2071 | 2872 |
| AL359935 | LOC209798 | 2072 | 2873 |
| BG970486 | ri\|1700025L02\| | 2073 | 2874 |
| | ZX00037H10\|\|1579 | | |
| BC005759 | Secl412 | 2074 | 2875 |
| NM_011921 | Aldh1a7 | 1489 | 1748 |
| AK016187 | 4930562A09Rik | 2075 | 2876 |
| AK003420 | 1110004G24Rik | 2076 | 2877 |
| NM_023805 | Slc38a3 | 2077 | 2878 |
| AK018155 | 6330410P18Rik | 2078 | 2879 |
| AK004550 | 1200002M06Rik | 2079 | 2880 |
| AK013094 | 2810416A17Rik | 2080 | 2881 |
| NM_018743 | LOC55933 | 2081 | 2882 |
| AW456595 | AW456595 | 2082 | 2883 |
| AK020668 | 1200007B05Rik | 2083 | 2884 |
| NM_007437 | Aldh3a2 | 2084 | 2885 |
| NM_010437 | Hivep2 | 2085 | 2886 |
| NM_007706 | Cish2 | 2086 | 2887 |
| AK017063 | 4933435A13Rik | 2087 | 2888 |
| AV278924 | ri\|4933404M19\| | 2088 | 2889 |
| | PX00019F10\|\|1119 | | |
| NM_008303 | Hspe1 | 1021 | 1037 |
| AK003228 | 1110001I14Rik | 2089 | 2890 |
| NM_022880 | Slc29a1 | 2090 | 2891 |
| AK005033 | D7Ertd753e | 2091 | 2892 |
| NM_010497 | Idh1 | 2092 | 2893 |
| AB051827 | Arhu | 2093 | 2894 |
| NM_026172 | Decr1 | 2094 | 2895 |
| AK014017 | Egfr | 2095 | 2896 |
| NM_010324 | Got1 | 2096 | 2897 |
| NM_011066 | Per2 | 2097 | 2898 |
| AK004305 | D10Ertd749e | 2098 | 2899 |
| AK020922 | Pde6h | 2099 | 2900 |
| NM_009381 | Thrsp | 2100 | 2901 |
| NM_009016 | Raet1a | 2101 | 2902 |
| NM_025545 | Aptx | 2102 | 2903 |
| NM_008382 | Inhbe | 2103 | 2904 |
| NM_030262 | BC003494 | 2104 | 2905 |
| BB312353 | BB312353 | 2105 | 2906 |
| AK007138 | 2810433K01Rik | 2106 | 2907 |
| AK017354 | 5430428G01Rik | 2107 | 2908 |
| AK016991 | 4933430F16Rik | 2108 | 2909 |
| NM_011020 | Osp94 | 2109 | 2910 |
| NM_019447 | Hgfac | 2110 | 2911 |
| NM_020026 | B3galt3 | 1500 | 1759 |
| AK004138 | 1110037D04Rik | 2111 | 2912 |
| AK004650 | 1200008D14Rik | 2112 | 2913 |
| NM_008331 | Ifit1 | 2113 | 2914 |
| AI551079 | Cyp4a12 | 2114 | 2915 |
| AK002555 | D18Ertd240e | 2115 | 2916 |
| NM_025566 | 2600017J23Rik | 2116 | 2917 |
| AK002477 | Tm4sfl1 | 2117 | 2918 |
| BF322562 | Copbl | 2118 | 2919 |
| BB561321 | BB561321 | 2119 | 2920 |
| AK014658 | 4833406M21Rik | 2120 | 2921 |
| AK020935 | A930036K24Rik | 2121 | 2922 |
| AK004600 | Arhgef3 | 2122 | 2923 |
| NM_016808 | Usp2 | 2123 | 2924 |
| NM_015818 | Hs6st1 | 2124 | 2925 |
| NM_025384 | 1110003P16Rik | 902 | 957 |
| NM_019781 | Pex14 | 2125 | 2926 |
| NM_010867 | Myom1 | 2126 | 2927 |
| AF288783 | Pyg1 | 2127 | 2928 |
| AK008330 | 2010107C10Rik | 2128 | 2929 |
| NM_008260 | Foxa3 | 2129 | 2930 |
| NM_010707 | Lgals6 | 2130 | 2931 |
| AI849720 | Ndst1 | 2131 | 2932 |
| NM_011967 | Psma5 | 2132 | 2933 |
| AK003902 | 1110021L09Rik | 2133 | 2934 |
| NM_009289 | Stk2 | 2134 | 2935 |
| AK012110 | 2610511G02Rik | 2135 | 2936 |
| AK010754 | 2410091N08Rik | 2136 | 2937 |
| NM_032400 | Gpr91 | 2137 | 2938 |
| AK021023 | B430311C09Rik | 2138 | 2939 |
| BB557066 | BB557066 | 2139 | 2940 |
| BC004781 | BC004781 | 2140 | 2941 |
| AK004768 | Osbpl3 | 2141 | 2942 |
| NM_025591 | 2010309E21Rik | 2142 | 2943 |
| AK019783 | 4930564I24Rik | 1515 | 1774 |
| AK006955 | 1700080G11Rik | 2143 | 2944 |
| AK013642 | 2900042M13Rik | 2144 | 2945 |
| NM_023143 | C1r | 2145 | 2946 |
| NM_019758 | Mtch2-pending | 2146 | 2947 |
| BE691256 | 2010004B12Rik | 2147 | 2948 |
| BC003488 | Lmo4 | 2148 | 2949 |
| AK021389 | 2610511G02Rik | 2149 | 2950 |
| BB463934 | 1200006P13Rik | 2150 | 2951 |
| AK010472 | 2410012H22Rik | 2151 | 2952 |
| AK005060 | 1300019H02Rik | 2152 | 2953 |
| AK004287 | 1110057L18Rik | 2153 | 2954 |
| AK018458 | 8430436A10Rik | 2154 | 2955 |
| AK006159 | 1700020G04Rik | 2155 | 2956 |
| AK004926 | Igfals | 2156 | 2957 |
| AK013959 | Trim13 | 2157 | 2958 |
| AF304306 | Hsd17b11 | 2158 | 2959 |
| AK004934 | 1300007L22Rik | 2159 | 2960 |
| AK007710 | 1810036L03Rik | 2160 | 2961 |
| AV279434 | 4930458D05Rik | 10 | 60 |
| AK017766 | 5730512J02Rik | 2161 | 2962 |
| NM_009320 | Slc6a6 | 1521 | 1780 |
| AK014728 | 4833419J07Rik | 2162 | 2963 |
| AK014047 | 3110013K01Rik | 2163 | 2964 |
| BB429858 | BB429858 | 2164 | 2965 |
| AK011567 | 2610027H17Rik | 2165 | 2966 |
| NM_030611 | Hsd17b5 | 2166 | 2967 |
| NM_009444 | Tgoln2 | 2167 | 2968 |
| AW743226 | AW743226 | 2168 | 2969 |
| NM_011201 | Ptpn1 | 2169 | 2970 |
| AK012041 | Ris2 | 2170 | 2971 |
| AK011544 | 1500031M22Rik | 2171 | 2972 |
| BB556229 | 2310015N21Rik | 2172 | 2973 |
| AK014518 | Hal | 2173 | 2974 |
| AK020424 | 9430019C24Rik | 2174 | 2975 |
| AK011578 | Pinx1-pending | 2175 | 2976 |
| AK011605 | Mrpl45 | 2176 | 2977 |
| NM_019992 | Brdg1-pending | 2177 | 2978 |
| AK003434 | Rbpms | 2178 | 2979 |
| BB131710 | BB131710 | 2179 | 2980 |
| AK002718 | Oprs1 | 2180 | 2981 |
| AK009386 | 2310016F22Rik | 2181 | 2982 |
| NM_017380 | 9-Sep | 2182 | 2983 |
| NM_007647 | Entpd5 | 2183 | 2984 |
| NM_009799 | Car1 | 2184 | 2985 |
| NM_016974 | Dbp | 2185 | 2986 |
| AK005032 | 1300017E09Rik | 2186 | 2987 |
| AK021388 | E130114A11Rik | 2187 | 2988 |
| AK003418 | 1110004G14Rik | 2188 | 2989 |
| NM_021548 | Arpp19-pending | 2189 | 2990 |
| AK002217 | 0610005C13Rik | 2190 | 2991 |
| NM_011825 | Prdc-pending | 2191 | 2992 |
| AK005781 | 1700008N02Rik | 2192 | 2993 |
| AK013950 | 3110001I22Rik | 2193 | 2994 |
| AK015354 | Optn | 2194 | 2995 |
| AK003939 | 1110028A07Rik | 2195 | 2996 |
| NM_010892 | Nek2 | 2196 | 2997 |
| AK021082 | C030014O09Rik | 2197 | 2998 |
| BB299566 | BB299566 | 2198 | 2999 |
| AK015050 | 4930402H24Rik | 2199 | 3000 |
| NM_021507 | Sqrdl | 2200 | 3001 |
| NM_023431 | 9430059D04Rik | 2201 | 3002 |
| NM_023160 | Cml1 | 2202 | 3003 |
| AK004867 | 1300002P22Rik | 13 | 63 |
| AK002437 | 0610009O20Rik | 2203 | 3004 |
| BC006074 | 1110018G07Rik | 2204 | 3005 |
| AK002772 | 1500036F01Rik | 2205 | 3006 |
| AK005035 | 1300017J02Rik | 2206 | 3007 |
| AF241249 | 1110033G01Rik | 2207 | 3008 |
| AJ131870 | Atp2a2 | 2208 | 3009 |
| NM_031396 | Cnnm1 | 2209 | 3010 |
| NM_010189 | Fcgrt | 2210 | 3011 |
| NM_011396 | Slc22a5 | 2211 | 3012 |
| | | | 3013 |
| | | | 3014 |
| AV021580 | 4922501H04Rik | 2212 | 3015 |
| AK018177 | Unc5h2 | 2213 | 3016 |
| AK007678 | 1810033A06Rik | 2214 | 3017 |
| AK004759 | 1200014F01Rik | 1538 | 1797 |
| AK011406 | 2610016A03Rik | 2215 | 3018 |
| AK006138 | 1700019P01Rik | 2216 | 3019 |
| AK012473 | 2700063E05Rik | 2217 | 3020 |
| NM_031192 | Ren1 | 2218 | 3021 |
| AV268127 | MGC36416 | 2219 | 3022 |
| NM_025827 | 1300002A08Rik | 2220 | 3023 |
| AK010382 | 2410004E01Rik | 2221 | 3024 |
| AK020283 | 9130219B18Rik | 2222 | 3025 |
| BB568823 | 2210414H16Rik | 2223 | 3026 |
| AK004660 | Abcd3 | 2224 | 3027 |
| AK013812 | 2900083I11Rik | 2225 | 3028 |
| AK003873 | 1110020M10Rik | 2226 | 3029 |
| AK012785 | Pxf | 2227 | 3030 |
| NM_025661 | Ormdl3 | 2228 | 3031 |
| AK018462 | 8430436I03Rik | 2229 | 3032 |
| NM_021304 | Abhd1 | 2230 | 3033 |
| BC004668 | Hps4 | 2231 | 3034 |
| M64404 | Il1rn | 2232 | 3035 |
| NM_026232 | 4933433D23Rik | 2233 | 3036 |
| NM_016669 | Crym | 2234 | 3037 |
| BE987053 | BE987053 | 2235 | 3038 |
| AK015509 | 4930465M17Rik | 2236 | 3039 |
| AK014531 | Palmd | 2237 | 3040 |
| AK018084 | 6230410J09Rik | 2238 | 3041 |
| NM_023465 | Catnbip1 | 2239 | 3042 |
| AK011759 | 2610043O12Rik | 2240 | 3043 |
| AK010209 | 2310076O21Rik | 2241 | 3044 |
| NM_022985 | Awp1-pending | 2242 | 3045 |
| AK016295 | 4930577M16Rik | 2243 | 3046 |
| AF173639 | AI197390 | 2244 | 3047 |
| NM_007980 | Fabp2 | 2245 | 3048 |
| AK002483 | 0610010I20Rik | 908 | 962 |
| AK021270 | C530009C10Rik | 2246 | 3049 |
| AK014111 | Hhex | 2247 | 3050 |
| AK007296 | 1700127B04Rik | 2248 | 3051 |
| AK011417 | Pov1 | 2249 | 3052 |
| AV378562 | 2410022M24Rik | 1549 | 1808 |
| NM_010004 | Cyp2c40 | 2250 | 3053 |
| NM_022983 | Edg7 | 2251 | 3054 |
| NM_019975 | Hpcl-pending | 1025 | 1041 |
| NM_007945 | Eps8 | 1550 | 1809 |
| AV174028 | Bace | 2252 | 3055 |
| AI430696 | Peg3 | 2253 | 3056 |
| NM_013837 | Tpst1 | 2254 | 3057 |
| AI266962 | Cml1 | 2255 | 3058 |
| NM_013484 | C2 | 2256 | 3059 |
| NM_007994 | Fbp2 | 2257 | 3060 |
| | | | 3061 |
| | | | 3062 |
| NM_013545 | Hcph | 2258 | 3063 |
| AK010430 | Ddah1 | 2259 | 3064 |
| AK012478 | 2700063L20Rik | 2260 | 3065 |
| AK008965 | Agpat3 | 2261 | 3066 |
| NM_013731 | Sgk2 | 2262 | 3067 |
| AK007574 | Fgf21 | 2263 | 3068 |
| AK013765 | Ecgf1 | 2264 | 3069 |
| NM_011933 | Decr2 | 2265 | 3070 |
| NM_010391 | H2-Q10 | 2266 | 3071 |
| | | | 3072 |
| | | | 3073 |
| AK004956 | 1300010F03Rik | 2267 | 3074 |
| AK014740 | 4833420O05Rik | 2268 | 3075 |
| AK014558 | 4632408A20Rik | 2269 | 3076 |
| AW120656 | MGC28924 | 1558 | 1817 |
| AK002851 | 0610039N19Rik | 1559 | 1818 |
| AK004204 | 1110048P06Rik | 2270 | 3077 |
| NM_009364 | Tfpi2 | 2271 | 3078 |
| AV075202 | Acadvl | 1561 | 1820 |
| BC003258 | BC003323 | 2272 | 3079 |
| NM_028094 | 2010321J07Rik | 2273 | 3080 |
| BB641340 | ri\|A930014C21\| | 2274 | 3081 |
| | PX00066C21\|\|1837 | | |
| NM_010512 | Igf1 | 2275 | 3082 |
| | | | 3083 |
| NM_007405 | Adcy6 | 2276 | 3084 |
| NM_020009 | Frap1 | 2277 | 3085 |
| AK017403 | 5430437E11Rik | 1565 | 1824 |
| BC004083 | Htatip2 | 2278 | 3086 |
| BB229969 | BB229969 | 2279 | 3087 |
| AV280352 | AV280352 | 21 | 71 |
| BF532887 | ri\|6330415L08\| | 2280 | 3088 |
| | PX00008D23\|\|2975 | | |
| NM_011706 | Trpv2 | 2281 | 3089 |
| AK009125 | 2310003N14Rik | 2282 | 3090 |
| AK013267 | 2810439F02Rik | 2283 | 3091 |
| AK010969 | Psmd4 | 2284 | 3092 |
| AK013874 | 3010001A07Rik | 2285 | 3093 |
| AK011778 | 2610100B16Rik | 2286 | 3094 |
| AK017346 | Ches1 | 2287 | 3095 |
| NM_008796 | Pctp | 2288 | 3096 |
| AY004874 | Slc23a1 | 2289 | 3097 |
| AK009258 | 2310009O17Rik | 2290 | 3098 |
| AK002859 | Aspa | 2291 | 3099 |
| BB483938 | AI452195 | 2292 | 3100 |
| AK013679 | 2900053I11Rik | 2293 | 3101 |
| AK017598 | 5730422A13Rik | 2294 | 3102 |
| AK010891 | 2510002J07Rik | 22 | 72 |
| NM_010431 | Hif1a | 2295 | 3103 |
| | | | 3104 |
| AK002480 | 0610010I13Rik | 1574 | 1833 |
| AK009374 | 2310016A09Rik | 912 | 966 |
| AK006771 | 1700052K11Rik | 2296 | 3105 |
| AK016911 | 4933425E08Rik | 2297 | 3106 |
| NM_007635 | Ccng2 | 2298 | 3107 |
| NM_010160 | Cugbp2 | 2299 | 3108 |
| NM_022434 | Cyp4f14 | 2300 | 3109 |
| AK013725 | Dnclc1 | 2301 | 3110 |
| NM_009824 | Cbfa2t3h | 2302 | 3111 |
| AK007630 | Cdkn1a | 2303 | 3112 |
| | | | 3113 |
| AK006385 | 1700026H06Rik | 2304 | 3114 |
| AI875461 | AI875461 | 2305 | 3115 |
| AK004319 | 1110059L23Rik | 2306 | 3116 |
| BE990725 | BE990725 | 2307 | 3117 |
| NM_009362 | Tff1 | 2308 | 3118 |
| NM_011723 | Xdh | 2309 | 3119 |
| NM_010863 | Myo1b | 2310 | 3120 |
| AK004905 | 1300004O04Rik | 2311 | 3121 |
| NM_008391 | Irf2 | 2312 | 3122 |
| AK014490 | 3110020O18Rik | 2313 | 3123 |
| AK017615 | Sec61a2-pending | 2314 | 3124 |
| AK009820 | 2310045I24Rik | 2315 | 3125 |
| BB358694 | LOC217698 | 2316 | 3126 |
| AK002528 | Cyp4a10 | 2317 | 3127 |
| BB234992 | LOC217698 | 2318 | 3128 |
| AK010202 | 2310076L09Rik | 2319 | 3129 |
| AK018164 | 6330412C24Rik | 2320 | 3130 |
| AK005010 | 1300015B04Rik | 2321 | 3131 |
| NM_026164 | 1200006O19Rik | 2322 | 3132 |
| AK005064 | 1300019I21Rik | 2323 | 3133 |
| NM_008645 | Mug1 | 2324 | 3134 |
| NM_016915 | Pla2g6 | 2325 | 3135 |
| NM_030565 | BC004044 | 2326 | 3136 |
| NM_010255 | Gamt | 2327 | 3137 |
| NM_008555 | Masp1 | 2328 | 3138 |
| BB498227 | BB498227 | 2329 | 3139 |
| AK011462 | 2610019F03Rik | 2330 | 3140 |
| BB160481 | BB160481 | 2331 | 3141 |
| AK018558 | 9030618K22Rik | 2332 | 3142 |
| AK009057 | 2310001A20Rik | 2333 | 3143 |
| AK009156 | 2310004N24Rik | 2334 | 3144 |
| AF377871 | Pawr | 2335 | 3145 |
| AK005014 | 1300015D01Rik | 2336 | 3146 |
| NM_025621 | 2310050C09Rik | 2337 | 3147 |
| NM_025459 | 1810015C04Rik | 2338 | 3148 |
| AK009724 | 2310040G24Rik | 2339 | 3149 |
| BE993937 | AI666798 | 2340 | 3150 |
| X70514 | Nodal | 2341 | 3151 |
| AK020074 | 6030458C11Rik | 2342 | 3152 |
| AK005383 | Pcbp4 | 2343 | 3153 |
| AK016973 | 4833415F11Rik | 2344 | 3154 |
| NM_007865 | DII1 | 2345 | 3155 |
| AK009083 | Gale | 2346 | 3156 |
| AK012415 | 2700053F16Rik | 2347 | 3157 |
| NM_013534 | Grcb | 2348 | 3158 |
| AV294988 | Tacc2 | 2349 | 3159 |
| AK010289 | 2400006N03Rik | 2350 | 3160 |
| AK015259 | 493043l09Rik | 2351 | 3161 |
| AK013911 | Igsf4 | 2352 | 3162 |
| BB157693 | BB157693 | 2353 | 3163 |
| BF018327 | H2-M10.1 | 2354 | 3164 |
| AK011266 | Gdm1 | 2355 | 3165 |
| NM_024240 | 4933405K01Rik | 2356 | 3166 |
| AK008690 | Abhd2 | 2357 | 3167 |
| NM_008156 | Gpld1 | 2358 | 3168 |
| AK006091 | 1700018L02Rik | 2359 | 3169 |
| AK007264 | 1700124F02Rik | 2360 | 3170 |
| AK021282 | AI848120 | 2361 | 3171 |
| AK008072 | 2010003K11Rik | 2362 | 3172 |
| NM_007954 | Es1 | 2363 | 3173 |
| AK017446 | 5530402H23Rik | 2364 | 3174 |
| NM_023207 | W1d | 2365 | 3175 |
| BC002253 | AI314967 | 2366 | 3176 |
| NM_008223 | Serpind1 | 2367 | 3177 |
| AK009154 | 2310004N11Rik | 2368 | 3178 |
| AK009435 | D17Wsu51e | 2369 | 3179 |
| AK004708 | 1200011I23Rik | 2370 | 3180 |
| NM_021371 | Caln1 | 2371 | 3181 |
| AK005346 | 1500032M05Rik | 2372 | 3182 |
| NM_019687 | Slc22a4 | 2373 | 3183 |
| AK008038 | Slc25a10 | 2374 | 3184 |
| AK004692 | Sdh1 | 2375 | 3185 |
| NM_019867 | Ngef | 2376 | 3186 |
| AK007649 | 1810030A06Rik | 2377 | 3187 |
| NM_010321 | Gnmt | 2378 | 3188 |
| AK010239 | Fzd7 | 2379 | 3189 |
| AK008081 | D15Ertd747e | 2380 | 3190 |
| AK007644 | Dexi | 2381 | 3191 |
| AK012103 | Hsd17b12 | 2382 | 3192 |
| AK014853 | 4921509J17Rik | 2383 | 3193 |
| AK010372 | 2410003M15Rik | 2384 | 3194 |
| NM_011172 | Prodh | 2385 | 3195 |
| AK018414 | 8430415E04Rik | 2386 | 3196 |
| AK015901 | MGC28623 | 2387 | 3197 |
| BC003470 | Pspla1-pending | 2388 | 3198 |
| NM_009040 | Rdh6 | 2389 | 3199 |
| NM_007972 | F10 | 2390 | 3200 |
| AK009002 | 2300002C06Rik | 2391 | 3201 |
| AK005015 | Csad | 2392 | 3202 |
| AK007603 | 1810026B04Rik | 2393 | 3203 |
| AK008844 | 2210407G14Rik | 2394 | 3204 |
| NM_008295 | Hsd3b5 | 2395 | 3205 |
| AK021253 | C430046K18Rik | 2396 | 3206 |
| AK009918 | Cdk3 | 2397 | 3207 |
| AK002327 | 2310075M17Rik | 2398 | 3208 |
| NM_010169 | F2r | 2399 | 3209 |
| AW319694 | Bucs1 | 2400 | 3210 |
| AK014861 | 4921510J17Rik | 2401 | 3211 |
| NM_008804 | Pde9a | 2402 | 3212 |
| NM_018868 | Nol5 | 2403 | 3213 |
| BB233906 | LOC217698 | 2404 | 3214 |
| AK003407 | 1110004C05Rik | 2405 | 3215 |
| BC003974 | 4933436C10Rik | 2406 | 3216 |
| AJ272272 | Psma1 | 2407 | 3217 |
| AK014460 | 3930402G23Rik | 2408 | 3218 |
| NM_009025 | Rasa3 | 2409 | 3219 |
| AK004971 | 1300012D20Rik | 2410 | 3220 |
| AK003561 | 1110008B24Rik | 2411 | 3221 |
| AK020191 | 8030402F09Rik | 2412 | 3222 |
| AK016678 | 4933405P16Rik | 2413 | 3223 |
| NM_008655 | Gadd45b | 2414 | 3224 |
| AK017918 | 5830411H19Rik | 1614 | 1873 |
| AK005080 | Suclg1 | 916 | 970 |
| NM_021314 | Tacc2 | 2415 | 3225 |
| BB483548 | ri\|C030045D06\| | 2416 | 3226 |
| | PX00075C24\|\|1567 | | |
| NM_030692 | Sacm1l | 2417 | 3227 |
| NM_008086 | Gas1 | 2418 | 3228 |
| AK019250 | 2810030D12Rik | 2419 | 3229 |
| AK002889 | 0610041L09Rik | 917 | 971 |
| BC005585 | LOC231086 | 918 | 972 |
| AK008206 | Snrk | 2420 | 3230 |
| NM_018795 | Abcc6 | 2421 | 3231 |
| NM_025626 | 3110001A13Rik | 1620 | 1879 |
| NM_025834 | 1300015B06Rik | 2422 | 3232 |
| AK004936 | Apoa5 | 2423 | 3233 |
| NM_011068 | Pex11a | 2424 | 3234 |
| AK018684 | Hao3 | 2425 | 3235 |
| AK017563 | 5730415C11Rik | 2426 | 3236 |
| AK009450 | 2310021M12Rik | 2427 | 3237 |
| AK006541 | Fac15 | 2428 | 3238 |
| NM_020520 | Slc25a20 | 919 | 973 |
| NM_010172 | F7 | 2429 | 3239 |
| AK007384 | Sult1c1 | 2430 | 3240 |
| AK008800 | 2210402C18Rik | 2431 | 3241 |
| AK010648 | 2410041F14Rik | 2432 | 3242 |
| AK004920 | 1300006O23Rik | 2433 | 3243 |
| AK013742 | Sca10 | 2434 | 3244 |
| AK010922 | 2510006M18Rik | 2435 | 3245 |
| AK003249 | Ppp1r14a | 2436 | 3246 |
| AK016667 | 4933405K01Rik | 2437 | 3247 |
| AF307987 | Ccl21c | 2438 | 3248 |
| AK013918 | 3100002J04Rik | 2439 | 3249 |
| AK002436 | Ran | 2440 | 3250 |
| AK005003 | 1300014I06Rik | 2441 | 3251 |
| AK009263 | 2410001H17Rik | 2442 | 3252 |
| AK007239 | Meig1 | 2443 | 3253 |
| AK009310 | Fetub | 2444 | 3254 |
| AK004787 | 1200015G06Rik | 2445 | 3255 |
| AK003046 | Nrn1 | 2446 | 3256 |
| AK018565 | 9030622O22Rik | 2447 | 3257 |
| NM_010702 | Lect2 | 2448 | 3258 |
| NM_008222 | Hccs | 2449 | 3259 |
| AK015368 | 4930443B20Rik | 2450 | 3260 |
| AK021146 | C030044E10Rik | 2451 | 3261 |
| NM_016843 | Sca10 | 2452 | 3262 |
| AK004540 | Arsa | 2453 | 3263 |
| NM_033037 | Cdo1 | 2454 | 3264 |
| AV252417 | AV252417 | 2455 | 3265 |
| AK013296 | Apex1 | 2456 | 3266 |
| AW476218 | AW476218 | 2457 | 3267 |
| NM_030687 | Slc21a5 | 2458 | 3268 |
| BB533722 | BB533722 | 2459 | 3269 |
| NM_019961 | Pex3 | 1030 | 1046 |
| NM_016763 | Hsdl7b10 | 2460 | 3270 |
| NM_008777 | Pah | 2461 | 3271 |
| BF459334 | BF459334 | 2462 | 3272 |
| AK018358 | 6820402I19Rik | 2463 | 3273 |
| AK010168 | 2010004E11Rik | 2464 | 3274 |
| AK011123 | Scarb2 | 2465 | 3275 |
| BB280678 | BB280678 | 2466 | 3276 |
| NM_026178 | Mmd | 2467 | 3277 |
| NM_012057 | Irf5 | 2468 | 3278 |
| NM_010476 | Hsd17b7 | 2469 | 3279 |
| NM_009862 | Cdc451 | 2470 | 3280 |
| NM_009266 | Sps2 | 2471 | 3281 |
| NM_026011 | 2610313E07Rik | 2472 | 3282 |
| NM_026494 | AI413471 | 1031 | 1047 |
| NM_009075 | Rpia | 2473 | 3283 |
| BB540470 | Cyp4a12 | 2474 | 3284 |
| BB487754 | AI197264 | 2475 | 3285 |
| BE991963 | Enc1 | 2476 | 3286 |
| BC005792 | Pte1 | 922 | 976 |
| AK014609 | 4633401B06Rik | 2477 | 3287 |
| AK020260 | 9030421L11Rik | 2478 | 3288 |
| NM_010422 | Hexb | 1639 | 1898 |
| AK013557 | 2900019G14Rik | 2479 | 3289 |
| AK004798 | 1200015P04Rik | 2480 | 3290 |
| AB042027 | GRSP1 | 2481 | 3291 |
| AK012897 | Hbb-y | 2482 | 3292 |
| BI556028 | ri\|E130107N23\| | 2483 | 3293 |
| | PX00091H11\|\|1437 | | |
| AK014530 | 4933402G07Rik | 2484 | 3294 |
| AK014514 | 4631408O11Rik | 2485 | 3295 |
| AI450589 | 0610012F22Rik | 2486 | 3296 |
| NM_008304 | Sdc2 | 2487 | 3297 |
| AW049168 | Dscrll1 | 2488 | 3298 |
| AK018100 | 6230429P13Rik | 2489 | 3299 |
| AK011 002 | Map2k3 | 2490 | 3300 |
| AK007964 | MGC28885 | 2491 | 3301 |
| BC005529 | Rin2 | 2492 | 3302 |
| NM_008294 | Hsd3b4 | 2493 | 3303 |
| | | | 3304 |
| | | | 3305 |
| AV287497 | Xnp | 2494 | 3306 |
| AK012712 | 2810011L15Rik | 2495 | 3307 |
| BF785788 | R74766 | 2496 | 3308 |
| AK017688 | 5730469M10Rik | 2497 | 3309 |
| AK007400 | Lbh-pending | 2498 | 3310 |
| BB282142 | BB282142 | 2499 | 3311 |
| NM_011704 | Vnn1 | 2500 | 3312 |
| | | | 3313 |
| | | | 3314 |
| NM_013465 | Ahsg | 2501 | 3315 |
| NM_015755 | Hunk | 2502 | 3316 |
| BC002120 | 1810013P09Rik | 2503 | 3317 |
| NM_023617 | 1200011D03Rik | 2504 | 3318 |
| BC003451 | LOC232087 | 2505 | 3319 |
| AK007392 | Ela1 | 2506 | 3320 |
| AK016659 | 4933405A16Rik | 1645 | 1904 |
| AK020614 | 9530058B02Rik | 2507 | 3321 |
| AK021029 | B830003A16Rik | 2508 | 3322 |
| AK010119 | Ptp1a | 2509 | 3323 |
| AK003844 | 1110020B03Rik | 2510 | 3324 |
| NM_013797 | Slc21a1 | 2511 | 3325 |
| NM_016723 | Uch13 | 2512 | 3326 |
| BG961761 | ri\|9430029L20\| | 2513 | 3327 |
| | PX00109E05\|\|1326 | | |
| NM_010591 | Jun | 2514 | 3328 |
| | | | 3329 |
| | | | 3330 |
| AK012213 | Aldh1b1 | 2515 | 3331 |
| NM_025964 | 2310038H17Rik | 2516 | 3332 |
| AK002826 | 0610039C21Rik | 2517 | 3333 |
| | | | 3334 |
| AK004897 | Facl2 | 30 | 80 |
| NM_011994 | Abcd2 | 2518 | 3335 |
| AK017296 | Ntn3 | 2519 | 3336 |
| NM_016928 | Tlr5 | 2520 | 3337 |
| NM_010776 | Mbl2 | 2521 | 3338 |
| NM_012006 | Cte1 | 2522 | 3339 |
| | | | 3340 |
| | | | 3341 |
| AK002968 | 0710001L09Rik | 2523 | 3342 |
| AK007645 | Gcst | 2524 | 3343 |
| AK012581 | 0610025L06Rik | 2525 | 3344 |
| AK008702 | 2210010N10Rik | 2526 | 3345 |
| BI329624 | ri\|9530008L14\| | 2527 | 3346 |
| | PX00111H18\|\|1536 | | |
| NM_025768 | Grtp1 | 2528 | 3347 |
| NM_009624 | Adcy9 | 2529 | 3348 |
| NM_024223 | Crip2 | 1651 | 1910 |
| NM_011966 | Psma4 | 2530 | 3349 |
| AK005897 | 1700012D01Rik | 2531 | 3350 |
| NM_016748 | Ctps | 2532 | 3351 |
| AK017309 | Pex1 | 2533 | 3352 |
| AK003554 | 0610008K04Rik | 2534 | 3353 |
| NM_012050 | Omd | 2535 | 3354 |
| AK004609 | 1200006F02Rik | 2536 | 3355 |
| AK007115 | 1700102P08Rik | 2537 | 3356 |
| NM_013631 | Pklr | 2538 | 3357 |
| BB503671 | Hsd3b2 | 2539 | 3358 |
| AK019762 | 4930552P12Rik | 2540 | 3359 |
| AK019519 | 4833432B22Rik | 2541 | 3360 |
| NM_008990 | Pvrl2 | 2542 | 3361 |
| BB348963 | BB348963 | 2543 | 3362 |
| AK005546 | 1600027G01Rik | 2544 | 3363 |
| AK007970 | Acf-pending | 2545 | 3364 |
| AK003859 | Rtn4 | 2546 | 3365 |
| | | | 3366 |
| | | | 3367 |
| AK017475 | 5730402C02Rik | 2547 | 3368 |
| NM_023175 | D16Ertd502e | 2548 | 3369 |
| AK018142 | 6330408G06Rik | 2549 | 3370 |
| AK008100 | 2010004M01Rik | 2550 | 3371 |
| AK002565 | Ap3s1 | 2551 | 3372 |
| AK003760 | 1110017O10Rik | 2552 | 3373 |
| BB166389 | 5730408C10Rik | 2553 | 3374 |
| AK004889 | Acadsb | 2554 | 3375 |
| BC002130 | Dusp14 | 2555 | 3376 |
| NM_023792 | Pank | 2556 | 3377 |
| BC003479 | LOC216820 | 35 | 86 |
| AK003397 | 1110003P22Rik | 2557 | 3378 |
| AK019381 | Pxmp4 | 2558 | 3379 |
| NM_007686 | Cfi | 2559 | 3380 |
| NM_007976 | F5 | 2560 | 3381 |
| NM_011375 | Siat9 | 2561 | 3382 |
| AK018506 | 8430438D04Rik | 2562 | 3383 |
| AF102849 | Haik1-pending | 2563 | 3384 |
| AK008673 | 2210008K22Rik | 2564 | 3385 |
| NM_011792 | Bace | 2565 | 3386 |
| NM_022882 | Lpin2 | 2566 | 3387 |
| AK015721 | 4930506M07Rik | 2567 | 3388 |
| NM_019933 | Ptpn4 | 2568 | 3389 |
| AK011880 | 2610204K03Rik | 2569 | 3390 |
| NM_018884 | Semcap3-pending | 2570 | 3391 |
| AK016577 | 4932702F08Rik | 2571 | 3392 |
| AK018332 | 6530411B15Rik | 2572 | 3393 |
| AK017185 | 5033421K01Rik | 2573 | 3394 |
| NM_011937 | Gnpi | 2574 | 3395 |
| AK019527 | Wrnip | 2575 | 3396 |
| NM_010062 | Dnase2a | 2576 | 3397 |
| AW494273 | AW494273 | 2577 | 3398 |
| AK008793 | 2210401N16Rik | 2578 | 3399 |
| NM_010158 | Khdrbs3 | 2579 | 3400 |
| NM_013565 | Itga3 | 2580 | 3401 |
| AK009895 | Sfrs3 | 2581 | 3402 |
| NM_025994 | 2600015J22Rik | 2582 | 3403 |
| NM_025341 | 0610041D24Rik | 2583 | 3404 |
| AK013477 | 1110011E12Rik | 2584 | 3405 |
| AK010387 | 2410004H02Rik | 2585 | 3406 |
| AK011735 | Ppp2r4 | 2586 | 3407 |
| NM_007799 | Ctse | 2587 | 3408 |
| NM_016689 | Aqp3 | 2588 | 3409 |
| AK006350 | Rasl2-9 | 2589 | 3410 |
| AK008555 | Pso | 2590 | 3411 |
| AF177211 | Gpr105 | 2591 | 3412 |
| AK014427 | 3830408G10Rik | 2592 | 3413 |
| NM_008574 | Mcsp | 2593 | 3414 |
| NM_016917 | Slc39a1 | 2594 | 3415 |
| NM_016918 | Nudt5 | 2595 | 3416 |
| AB055897 | AW413091 | 2596 | 3417 |
| AK017223 | 5133401H06Rik | 2597 | 3418 |
| NM_013697 | Ttr | 2598 | 3419 |
| AK003996 | 1110030O19Rik | 2599 | 3420 |
| AK003495 | 1110006G02Rik | 2600 | 3421 |
| AK020110 | Lbh-pending | 2601 | 3422 |
| AK015173 | 4930421P07Rik | 2602 | 3423 |
| AK014774 | 4833426J09Rik | 2603 | 3424 |
| NM_013792 | Nag1u | 1673 | 1932 |
| NM_008455 | Klkb1 | 2604 | 3425 |
| NM_019840 | Pde4b | 2605 | 3426 |
| NM_011920 | Abcg2 | 2606 | 3427 |
| AK020473 | 9430063L05Rik | 2607 | 3428 |
| AC002397 | CD4, A-2, B, GNB3, | 1674 | 1933 |
| | C8, ISOT, TPI, B7, | | |
| | ENO2, DRPLA, | | |
| | U7snRNA, C10, PTPN6, | | |
| | BAP,C2F | | |
| NM_019878 | Sult1b1 | 2608 | 3429 |
| NM_022014 | Fn3k | 2609 | 3430 |
| BC002197 | C79952 | 2610 | 3431 |
| AK002691 | D14Uc1a2 | 2611 | 3432 |
| NM_019877 | Copz2 | 2612 | 3433 |
| AK017527 | 5730408K05Rik | 2613 | 3434 |
| AK016217 | 4930564C03Rik | 2614 | 3435 |
| AK008119 | 2010005E21Rik | 2615 | 3436 |
| NM_019983 | Rab5ef-pending | 2616 | 3437 |
| NM_025597 | 2700033I16Rik | 2617 | 3438 |
| AK013580 | 2900024C23Rik | 1682 | 1941 |
| NM_008063 | G6pt1 | 2618 | 3439 |
| AK002609 | 0610012J09Rik | 2619 | 3440 |
| BC003725 | BC003725 | 2620 | 3441 |
| AK020692 | Dbi | 2621 | 3442 |
| AK002641 | 0610016O18Rik | 2622 | 3443 |
| AB042745 | Nox4 | 2623 | 3444 |
| BE988332 | BE988332 | 2624 | 3445 |
| AK008235 | 2010013I23Rik | 2625 | 3446 |
| NM_009900 | Clcn2 | 2626 | 3447 |
| NM_008639 | Mtnr1a | 2627 | 3448 |
| AK020546 | 9530006C21Rik | 2628 | 3449 |
| AK008532 | 2610318G18Rik | 2629 | 3450 |
| AK009250 | 2310009E07Rik | 2630 | 3451 |
| AK010068 | D8Ertd91e | 2631 | 3452 |
| AK013269 | 2810439K08Rik | 2632 | 3453 |
| AK002408 | 0610009I22Rik | 2633 | 3454 |
| AK019969 | 5730504C04Rik | 2634 | 3455 |
| NM_027853 | 0610006F02Rik | 2635 | 3456 |
| BC003306 | Def8 | 2636 | 3457 |
| NM_010501 | Ifit3 | 2637 | 3458 |
| NM_007494 | Ass1 | 2638 | 3459 |
| AK008954 | 2210416J07Rik | 2639 | 3460 |
| AV059994 | AV059994 | 2640 | 3461 |
| AK010810 | 2410150I18Rik | 2641 | 3462 |
| NM_009196 | Slc16a1 | 2642 | 3463 |
| BF682011 | Ugp2 | 2643 | 3464 |
| AI195543 | MGC29978 | 1033 | 1049 |
| BE993080 | Hsd17b11 | 2644 | 3465 |
| M16357 | Mup3 | 2645 | 3466 |
| M14044 | Anxa2 | 2646 | 3467 |
| Y10221 | Cyp4a12 | 2647 | 3468 |
| AA239277 | Crot | 2648 | 3469 |
| X01756 | Cycs | 934 | 989 |
| BC007172 | Galnt2 | 2649 | 3470 |
| L02331 | Sult1a1 | 1694 | 1953 |
| M17818 | Mup1 | 2650 | 3471 |
| NM_009360 | Tfam | 2651 | 3472 |
| | | | 3473 |
| BE947329 | AW109744 | 2652 | 3474 |
| AF009605 | Pck1 | 2653 | 3475 |
| | | | 3476 |
| M21285 | Scd1 | 2654 | 3477 |
| | | | 3478 |
| X53451 | Gstp2 | 2655 | 3479 |
| X71479 | Cyp4a12 | 2656 | 3480 |
| | | | 3481 |
| | | | 3482 |
| BF449960 | AW554572 | 2657 | 3483 |
| NM_008615 | Mod1 | 2658 | 3484 |
| | | | 3485 |
| | | | 3486 |
| W50759 | Apoc3 | 2659 | 3487 |
| AI648018 | 2610207I16Rik | 936 | 991 |
| | | | 992 |
| | | | 993 |
| M10022 | Cyp1a2 | 2660 | 3488 |
| | | | 3489 |
| | | | 3490 |
| U57999 | Psap | 2661 | 3491 |
| Z14050 | Dci | 1034 | 1050 |
| W54127 | Acat1 | 2662 | 3492 |
| | | | 3493 |
| | | | 3494 |
| Y09085 | Hif1a | 2663 | 3495 |
| AI155095 | AI155095 | 2664 | 3496 |
| X51397 | Myd88 | 2665 | 3497 |
| | | | 3498 |
| Y11638 | Cyp4a14 | 2666 | 3499 |
| | | | 3500 |
| | | | 3501 |
| L33417 | V1d1r | 2667 | 3502 |
| AW909415 | 1110048B16Rik | 2668 | 3503 |
| AJ007749 | Casp8 | 2669 | 3504 |
| AJ131522 | Mlycd | 937 | 1051 |
| | | | 994 |
| AJ011967 | Gdf15 | 2670 | 3505 |
| M64248 | Apoa4 | 2671 | 3506 |
| M30697 | Abcb1a | 2672 | 3507 |
| AB010826 | Cpt1b | 2673 | 3508 |
| | | | 3509 |
| | | | 3510 |
| NM_008342 | Igfbp2 | 2674 | 3511 |
| | | | 3512 |
| | | | 3513 |
| AW986355 | Aco2 | 2675 | 3514 |
| AW456981 | Mg11 | 2676 | 3515 |
| NM_025670 | 5730403B10Rik | 2677 | 3516 |
| X00945 | Spi1-6 | 2678 | 3517 |
| X06454 | C4 | 2679 | 3518 |
| AF072757 | Slc27a2 | 2680 | 3519 |
| | | | 3520 |
| | | | 3521 |
| M25944 | Car2 | 2681 | 3522 |
| M13264 | Fabp4 | 210 | 215 |
| | | | 216 |
| | | | 3523 |
| D16215 | Fmo1 | 2682 | 3524 |
| AF064088 | Tieg | 2683 | 3525 |
| NM_013743 | Pdk4 | 42 | 93 |
| | | | 998 |
| | | | 94 |
| BC008241 | Psmb4 | 2684 | 3526 |
| Z71189 | Acadv1 | 939 | 1001 |
| | | | 999 |
| | | | 1000 |
| S75207 | Hsd11b1 | 2685 | 3527 |
| | | | 3528 |
| | | | 3529 |
| AB033885 | Fac14 | 2686 | 3530 |
| | | | 3531 |
| | | | 3532 |
| AA591552 | Hsp86-1 | 2687 | 3533 |
| AA986766 | AA986766 | 2688 | 3534 |
| AB003303 | Slc10a1 | 2689 | 3535 |
| AB006361 | Ptgds | 2690 | 3536 |
| AF006688 | Acox1 | 1444 | 1465 |
| | | | 1467 |
| | | | 1466 |
| AF007267 | Pmm1 | 1698 | 1957 |
| AF030343 | Ech1 | 940 | 1002 |
| AF031814 | Nr1i2 | 2691 | 3537 |
| AF033196 | Rdh5 | 2692 | 3538 |
| AF038939 | Peg3 | 2693 | 3539 |
| AJ001118 | Mg11 | 209 | 214 |
| D17674 | Cyp2c29 | 2694 | 3540 |
| | | | 3541 |
| | | | 3542 |
| D28530 | Ptprs | 2695 | 3543 |
| D29016 | Fdft1 | 2696 | 3544 |
| | | | 3545 |
| | | | 3546 |
| D86563 | Rab4a | 2697 | 3547 |
| J03398 | Abcb4 | 2698 | 3548 |
| | | | 3549 |
| | | | 3550 |
| J03549 | Cyp2a4 | 2699 | 3551 |
| | | | 3552 |
| | | | 3553 |
| J04696 | Gstm2 | 1703 | 1962 |
| L20509 | Cct3 | 2700 | 3554 |
| L31783 | Umpk | 2701 | 3555 |
| L47970 | Mttp | 2702 | 3556 |
| | | | 3557 |
| | | | 3558 |
| M16465 | S100a10 | 2703 | 3559 |
| M21065 | Irf1 | 2704 | 3560 |
| M21856 | Cyp2b10 | 2705 | 3561 |
| M27167 | Cyp2d10 | 2706 | 3562 |
| M29008 | AI194696 | 2707 | 3563 |
| M29009 | Cfh | 2708 | 3564 |
| M31885 | Idb1 | 2709 | 3565 |
| M64250 | Apoa4 | 2710 | 3566 |
| | | | 3567 |
| | | | 3568 |
| M75886 | Hsd3b2 | 2711 | 3569 |
| M77003 | Gpam | 2712 | 3570 |
| | | | 3571 |
| | | | 3572 |
| M77497 | Cyp2f2 | 2713 | 3573 |
| M83649 | Tnfrsf6 | 2714 | 3574 |
| M93275 | Adfp | 943 | 1007 |
| | | | 1005 |
| | | | 1006 |
| U01163 | Cpt2 | 1035 | 1056 |
| | | | 1057 |
| U07159 | Acadm | 945 | 1009 |
| | | | 1011 |
| | | | 1010 |
| U09507 | Cdkn1a | 2715 | 3575 |
| | | | 3576 |
| U13371 | Kdt1 | 2716 | 3577 |
| U14332 | Il15 | 1710 | 1974 |
| U21489 | Acad1 | 946 | 1014 |
| | | | 1012 |
| | | | 1013 |
| U23922 | Il12rb1 | 2717 | 3578 |
| U36993 | Cyp7b1 | 2718 | 3579 |
| | | | 3580 |
| | | | 3581 |
| U38196 | Mpp1 | 2719 | 3582 |
| U43298 | Lamb3 | 1711 | 1975 |
| U47543 | Nab2 | 2720 | 3583 |
| U48403 | Gyk | 2721 | 3584 |
| | | | 3585 |
| | | | 3586 |
| U48420 | Gstt2 | 2722 | 3587 |
| U58883 | Sorbs1 | 1712 | 1977 |
| | | | 3588 |
| U59418 | Ppp2r5c | 2723 | 3589 |
| U60987 | Gdm1 | 2724 | 3590 |
| | | | 3591 |
| U79550 | Snai2 | 1714 | 1979 |
| U83176 | Gt(ROSA)26asSor | 2725 | 3592 |
| U89491 | Ephx1 | 2726 | 3593 |
| X04480 | Igf1 | 2727 | 3594 |
| X05475 | C9 | 2728 | 3595 |
| X13135 | Fasn | 2729 | 3596 |
| | | | 3597 |
| | | | 3598 |
| X53584 | Hsp60 | 2730 | 3599 |
| X62940 | Tgfb1i4 | 2731 | 3600 |
| X70067 | Rnps1 | 2732 | 3601 |
| X70398 | D0H4S114 | 948 | 1016 |
| X83971 | Fos12 | 2733 | 3602 |
| X89864 | Cyp2a5 | 2734 | 3603 |
| | | | 3551 |
| | | | 3604 |
| X89998 | Hsdl7b4 | 949 | 1018 |
| | | | 1017 |
| | | | 1019 |
| X96618 | Rga | 2735 | 3605 |
| Y14660 | Fabp1 | 2736 | 3606 |
| | | | 3607 |
| | | | 3608 |
| D87521 | Prkdc | 2737 | 3609 |
| M33960 | Serpine1 | 2738 | 3610 |
| | | | 3611 |
| | | | 3612 |
| AF071315 | Cops6 | 2739 | 3613 |
| U33557 | Fpgs | 2740 | 3614 |
| X95280 | G0s2 | 2741 | 3615 |
| ABO11000 | Chk1 | 2742 | 3616 |
| AF026073 | Sultn | 2743 | 3617 |
| AJ000059 | Hyal2 | 2744 | 3618 |
| M14757 | Abcb1b | 2745 | 3619 |
| M61737 | Fsp27 | 2746 | 3620 |
| AF075717 | TIF2 | 2747 | 3621 |
| AI326224 | AI326224 | 2748 | 3622 |
| J00423 | Hprt | 2749 | 3623 |
| | | | 3624 |
| | | | 3625 |
| L23108 | Cd36 | 142 | 3626 |
| | | | 3627 |
| | | | 3628 |
| X00479 | Cyp1a2 | 2750 | 3488 |
| | | | 3489 |
| | | | 3490 |
| AI118433 | C8a | 2751 | 3629 |
| AI132306 | AI132306 | 2752 | 3630 |
| AI255955 | Il1rap | 2753 | 3631 |
| AI265707 | AI265623 | 2754 | 3632 |
| AI663818 | AI663818 | 2755 | 3633 |
| AI854637 | | 2756 | 3634 |
| AI132665 | LOC208677 | 2757 | 3635 |
| AI255958 | LOC226105 | 2758 | 3636 |
| AI266885 | AI266885 | 2759 | 3637 |
| AI530213 | Ugp2 | 2760 | 3638 |
| AI461749 | AI451155 | 2761 | 3639 |
| AI464465 | | 2762 | 3640 |
| AI503986 | | 2763 | 3641 |
| D16333 | Cpo | 2764 | 3642 |
| X78683 | Bcap37 | 2765 | 3643 |
| AI482473 | Syt14 | 2766 | 3644 |
| AI662255 | AI662255 | 2767 | 3645 |
| AI785285 | Dscr111 | 2768 | 3646 |
| AI851538 | Kcnn2 | 2769 | 3647 |
| AB027290 | Rab9 | 2770 | 3648 |
| AF126798 | Fads2 | 2771 | 3649 |
| | | | 3650 |
| | | | 3651 |
| NM_011080 | Phxr1 | 2772 | 3652 |
| U12790 | Hmgcs2 | 2773 | 3653 |
| | | | 3654 |
| | | | 3655 |
| NM_008686 | Nfe211 | 2774 | 3656 |
| AB017136 | Homer2-pending | 2775 | 3657 |
| NM_007843 | Defb1 | 2776 | 3658 |
| AI647584 | AI647584 | 2777 | 3659 |
| AW060343 | AW060343 | 2778 | 3660 |
| AI647917 | 3200002M13Rik | 2779 | 3661 |
| AI595938 | AI595938 | 2780 | 3662 |
| NM_010284 | Ghr | 1728 | 1994 |
| AW061234 | AW061234 | 2781 | 3663 |
| NM_008509 | Lp1 | 2782 | 3664 |
| | | | 3665 |
| | | | 3666 |
| Z37107 | Ephx2 | 49 | 101 |
| AI324870 | AI324870 | 2783 | 3667 |
| X84014 | Lama3 | 2784 | 3668 |
| Z31362 | Npn3 | 2785 | 3669 |
| U39066 | Map2k6 | 2786 | 3670 |
| Z97207 | Hspc121-pending | 2787 | 3671 |
| AF161071 | Slc2a5 | 2788 | 3672 |
| | | | 3673 |
| AI646798 | AI646798 | 2789 | 3674 |
| AF133903 | Abcb11 | 2790 | 3675 |
| | | | 3676 |
| NM_008254 | Hmgc1 | 2791 | 3677 |
| | | | 3678 |
| | | | 3679 |
| AF112185 | Scnn1a | 2792 | 3680 |
| AI642194 | AI463690 | 2793 | 3681 |
| AI893641 | AI893641 | 2794 | 3682 |
| AI596436 | AI596436 | 2795 | 3683 |

[0249] While the preferred embodiment of the invention has been illustrated and described, it will be appreciated that various changes can be made therein without departing from the spirit and scope of the invention.

The application's sequence listing, which the Patent Office published only in electronic form, follows.

SEQUENCE LISTING (3683 sequences)

SEQ ID NO: 1 - DNA, 1531 bp, Mus musculus
cggcctaggtctcgctggcggccaggccggggctgccgtatctgcgatggaacttcacatcctagagcaccgggtgcgagtactgagcattgcccgtccgggcctctggctctacacccacccgctcatcaagctgctcttcctgccctgtcgcagtcggtgcaagttcttcagcctgactgagactccggaagattacactctcatggtggatgaggagggctttaaagagctacccccatccgagttcctgcaagtggctgaggccacatggctggtgatgaacgtatctcacagtggctccgtggtgcaggctgctggagtaaccaagattgcccggtctgtcattgccccgctggctgaacaccatgtgtctgttctgatgttgtccacataccagacagacttcatcctggtacgggagcaggacctgtctgtggtgatccacacactggcccaggagttccaaatctaccgtgaagtaggcggggagcctgtgcccgttactggagacgattccagcaatggctttccccagatccagcacgggcccagtcccacggtgcatcccattcagagccctcagaaccgcttttgtgtcctcacactggaccctgagacactgccggctgtcgccaccaccctcatcgatgtcctcttctactcccacagtgtccccaaggaagcggcctcgggcggtcctgaatcaacgtccattccgttcttcgctttctccctcatcgaggggtacatctccattgtcatggatgcagagatccagagaaagttccccagtgacctcctgctgaccagttcttctggggagctgtggaggatggtgcgcatcgggggacagcccctgggcttcgatgaatgtgggattgtggcccagattgcgggtcccctggcggctgttgacatctctgcttactacatcagcacattcaactttgaccatgcgctggttcctgaagacgagatcggctgtgtcattgatattctccagcgaaggcaggaaagccaggcttccaaggacccatagggaagcaccagacccccagcattcccgtaaagccccccggggctccagaaacttttctgagcttcagaacaagtccctggtcctgccgagggatcctggttctgctgtctgtctgtcagctgtatggagctgggactcgtggccatgcctggttctgctgtctgtctgtcagctgtatggagctgggactcgtggccatgcctgcccacaaaagataccttggtgcttggggcttagatccccgacccaacattttctatgtgacctcagcaatgcacagagcctgcttgcctgcagctggagccgcctctcccctggctaaggctcacatccccgggccgggctttgacctccagcctgcactgctttcctagccagatgagttcagcagtgcactcccttcgcgggactccgaaggaagaattaaatctcacttttattttcatgactgtttatataaataaaagacttgcggatttgtgccctccg

SEQ ID NO: 2 - DNA, 635 bp, Mus musculus
  misc_feature 628: n = A,T,C or G
tctttctttctttctttctttctttctttctttctttctttcttaatcttttatcttttaccaagtctcaggagctctgctaaccagaccaacttctgggtgacccaaatgctcgggaagatccgggggactctctactcggtgacaaattcagaactctgtaccccttctgcttgacttccacccctgtccatcttggtcccctccactgtctctttggctcccctgcccagcatagaggaggcaggattgcggatcagtagcaaacctttcccaaaagctctgcgcaccacggaggaggagaagtagaacaataatggatccaggctggcattgagggaactgaacaccacagcctccacccgccacgaggggctctgcctcaggtagaaccccaccaggtgggacatgttgtagggtccaaagcacaccaggaaattaagaagcgtcacaacagccaggcccactgcccggcgtcgcctctgagccccaacgtggggctgcgtgagcatgatccacacgaagcgccaataacagaagatggtgactgccatgggaacgaaaaacaggaccaggcacagctccagtcgtacgggcagtaccacatccagctgctcttgggtgaagntctcgta

SEQ ID NO: 3 - DNA, 308 bp, Mus musculus
ttctaagaaaaacaaacctgagatttatcaaagaaaaatttatttcatctcaaatataaatatattatcacttgtaaatataaagaccttttataagcatcattatttatctattctgcaatctctataaacgagaagaataaagaaaagatgcactttgctttaatataaatgcaaataacatcccaaattaaaaaaaaaaagataaacacaagattggtgtttttttctatgggtgttatcacctagctgaatgtttttctaaaggagtttatgttccattaaacaatttttaaaatgtatactgt

SEQ ID NO: 4 - DNA, 940 bp, Mus musculus
  misc_feature 801, 885: n = A,T,C or G
tcatgccctggagtcccctggctgcgctgagctgggcgctggtgctgaggctgctggctttgctgtggccccctggacggggtgaggcgtgcagctgtgcgcctgcgcacccccagcagcacttctgccactcggctctagtgatacgggccaaaatatccagtgagaaagtagtccctgccagcaaagaccctgctgacactcaaaaactgatccggtatgaaatcaaacagataaagatgtttaaagggttcgagaaggccaaggatattcagtatgtctacacgccatttgactcttccctctgtggtgtgaagctagaaaccaacagtcacaagcagtatcttttgactggccagattctcagtgatggaaaagtcttcatccatctgtgcaactacattgagccctgggaggacctgtccttggtgcagagggagagcctgaatcatcactaccaccagaactgtggctgccaaatcaccacttgctatgcagtgccatgtaccatctcagcccccaatgagtgtctctggaccgactggctgctggaacggaagctctatgggtaccaggcccagcactatgtctgcatgaagcatgttgatggcatctgcagctggtaccgaggccacctacacctccggaaggagtacgttgacatcatccagccctagtagggaccaggaaccacatccttggaagcattctgaagaccaagccagttctctgtggtcctttgaccatcaccacctgctgtgttgctgccagataatggaaaatgacaagtggatggaatgnccagcaaatggaggctgtggggcatgtgacagcttgtgtctgctgttcacatctccagctcacaacttgtcaagggttggaaangtatcttatctgccttgccctcaacccctcttccctgtctcccaaaccctgttag

SEQ ID NO: 5 - DNA, 1446 bp, Mus musculus
acacggacgtaagcctcacttcctaccctcggcacccagggcagagtcagagcagcagaaactagacaccatgtgcgacgaagacgagaccaccgctcttgtgtgtgacaacggctctggcctggtgaaagctggctttgccggggatgatgcccccagggctgtgttcccatccatcgtgggccgaccccgtcaccagggtgtcatggtaggtatgggtcagaaggactcctacgtgggtgatgaggcccagagcaagcgaggtatcctgaccctgaagtaccccattgaacatggcatcatcaccaactgggacgacatggagaagatctggcaccacaccttctacaatgagctgcgtgtggcccctgaggagcacccgactctgctcaccgaggcccccctgaaccccaaagctaaccgggagaagatgactcaaatcatgtttgagaccttcaacgtgcctgccatgtatgtggctatccaggcggtgctgtccctctatgcctccggccgtaccaccggcatcgtgttggattctggggacggtgtcacccacaacgtgcccatctatgagggctatgccctgccacacgccatcatgcgtctggacctggccggtcgcgacctcactgactacctgatgaaaatcctcactgagcgtggctattccttcgtgaccacagctgaacgtgagattgtgcgcgacatcaaagagaagctgtgctatgtggccctggacttcgagaatgagatggccaccgctgcctcttcctcctccctggagaagagctatgagctgcctgacgggcaggtcatcaccatcggcaatgagcgtttccgttgcccggagacgctcttccagccttcctttatcggtatggagtctgcggggatccatgagaccacctacaacagcatcatgaagtgcgacatcgacatcaggaaggacctgtacgccaacaacgtcatgtcagggggcaccaccatgtaccctggtatcgctgaccgcatgcagaaggagatcacagctctggctcccagcaccatgaagatcaagatcatcgccccccctgagcgcaagtactcagtgtggatcggtggctccatcctggcctcgctgtccaccttccagcagatgtggatcaccaagcaggagtacgacgaggctggcccctccattgtgcaccgcaaatgcttctaggcgcaccgcatctgcgttcgcgctctctctcctcaggacgacaatcgacaatcgtgctgtggttgcagggtggccccgtcctccgccgtggctccatcgccgccactgcagccggcgcctgtttttgacgtgtacatagattgactcgttttacctcattttgttatttttcaaacaaagccctgtggaaaggaaatggaaaacttgaagcattaaagccagccattctgttttgctccaat

SEQ ID NO: 6 - DNA, 5152 bp, Mus musculus
gcagcgtccagagccgacggtgccccgctcagtgagctgtcctggtcctcgtccctcgcggtggtagccgtgtccttctctggaatcttcactgtcgtcatcctcatgctggcctgcctgtgttgtaagaagggcggcatcgggttcaaggagtttgagaatgctgaaggggatgagtatgtggccgacttctcggagcagggctccccggctgcagctgcacagaccggccccgatgtgtatgtcctgcccctcaccgaggtctccttacccatggccaagcagccgggtcgctccgtgcaacttctcaagtccacggacctgggccggcacagcctcctgtacttaaaggagattggccacggctggtttgggaaggtgtttttgggggaggtacactcgggcgtcagtggcacgcaggtggtggtgaaggagctgaaggtgagcgccagcgtgcaggagcagatgcagttcctggaggaggcgcagccctacagggccctgcagcacagcaacctgctccagtgcctggcccagtgtgctgaagtgaccccctacctgctggttatggagttctgtccactgggggacctcaaaggttatctacggagctgccgggtgacagagtccatggcgcctgacccacttaccttgcagcgcatggcgtgcgaggtggcgtgtggcgtcttgcatctacatcgacacaactatgtacacagtgacctggccctgaggaactgcctgcttacggctgacctgacagtgaaggttggtgattatggcctgtcgcattgcaaatacagggaagactatctcgtgaccgctgaccagctgtgggtgccgctgcgctggatcgcgccagagctggtggacgaggttcacggcaacctgctggtggtggaccagaccaagagcagcaacgtgtggtccctgggtgtgaccatctgggagcttttcgagttgggtgcgcagccgtacccccagcactcggaccggcaggtgctggcttacgccgtccgggagcagcagcttaagttgcccaagccccagctgcagctggctctatctgatcgatggtacgaggtgatgcagttctgctggctgcagccagagcagaggcccacagctgaagaggttcatctactgctgtcctacttgtgtgctaagggcaccacagaattggaggaggagtttgagcggcgctggcgctccctgcggcccgggggcagcacgggcctgggctcgggttctgcagccccagcagctgccaccgccgcctccgcggagctcaccgctgcctcgtctttcccgctgctggagcggttcaccagcgacggctttcacgtggacagtgatgacgtgctgacggtcacggagacaagccacggcctcaactttgaatacaagtgggaggctggctgtggcgctgaggagtacccaccctcgggggctgcatcaagcccaggctcggcagcgcgcctgcaggagttgtgcgcgcctgacagttcaccgccgggtgtggtgccagtcctcagtgcccacagcccctcagtgggtagcgagtacttcatccgcctggagggggcagtgcctgctgctggccacgatccagactgtgccggctgcgctcccagcccccaggctgtgactgaccaggacaataactctgaggagagcactgttgcgtcccttgccatggagccattgctgggccatgcacccccaactgagggtctgtggggcccctgtgaccaccattcacataggaggcaagggtcaccctgtccctcacgctcaccctctcctgggaccccgatgttgccagctgaagacatagactggggtgtggctaccttctgcccgcccttctttgatgacccactgggtgcatctccctcggggagtcctggggcccagccctcccccagtgatgaggagccagaggaggggaaggtggggttggccgctcagtgtggacactggagctctaacatgtcagctaacaacaacagtgccagtcgcgacccagaatcctgggatcctggctatgttagcagcttcacagacagctacagggacgactgctccagcttagagcagacccctcgagcctcccctgaggtgggccatctcctgtcccaggaggatcccagagattttctccctgggctagtagcagtctcccctggtcaggagccaagccgtcccttcaacctgctccccctgtgtcctgccaaaggcctggcacctgctgcctgcctcatcacatccccttggacagagggagctgtgggtggggctgagaaccccattgtggaacccaaacttgcccaggaggctgagggatctgctgaaccccagctaccccttccttccgtcccctccccatcctgtgaaggagcctcacttccctcggaggaggcaagcgctcctgacatcctacctgcctcacccacacccgctgctggcagctgggtgaccgtccctgagccagcccccaccctggagagcagcggcagttctctggggcaagaggcacccagcagcgaggacgaagacacgaccgaggcaacatcaggagtcttcaccgacctgtccagtgacggcccacacacggagaagtcaggcatagtaccagccttgcgcagtctgcagaagcaggtggggacccctgactccctggactctctggacataccgtcctcagccagtgatggtggctgtgaggtcttaagcccatcagctgctggtccacctggcgggcagccccgtgctgtggacagtggctatgatacagagaactatgagtctcctgagtttgtgctcaaggaggcccatgagtcgagtgagcctgaggcctttggggagccagcctcagagggtgaaagcccagggcccgatcctctgctctctgtctcccttggtggcctcagcaagaagagcccctaccgagactctgcctacttttcagacctggatgccgagtccgaacccacctttggccctgagaagcacagtgggatccaggactcccaaaaggagcaagacctgaggagcccacctagcccagggcatcagtctgtgcaggcttttcccaggtctgcagtgtccagcgaggtgctgtcccctccacagcagtcagaggagcccttgccagaagtccccaggccagagcctctcggggctcaaggcccagttggagtgcagcctgtgcccggcccaagtcattccaaatgtttcccgctgacctccgttccactgatctcagaaggcagtggcacggagccccagggtccctcaggacagctgtcagggcgagcccagcaggggcagatgggcaatcctagcacacccagatccccgctctgcctggccctgcctggccaccccggggctttggagggccggccggaggaggatgaggacaccgaggacagcgaggagtctgatgaggagctccggtgctacagcgtccaggagcccagtgaggacagcgaggaggagccgccagcggtgcccgtggtggtggctgagagccagagtgcccgaaatctacgcagcctgctgaagatgcccagcctgctgtcagaggccttctgtgacgacctggagcgcaagaagaaggctgtgtccttcttcgatgatgtcacggtctacctctttgaccaggaaagccccacccgagagactggggagccctttcccagcacaaaggaatcactccctacgttcctggagggtggccccagctcacccagtgccaccggcctgccactgcgggctggccactctcctgacagctctgctcctgaaccaggcagtaggttcgaatgggatggtgatttcccgttggtgcccggcaaggctgctttggtgactgagctggatcctgctgaccctgtcctggcggcgcctcccacgccagctgcgcccttctcacgcttcaccgtgtcacccacacctgcctcccgcttttccatcacccacatatctgactcagatgcccagtccgtgggaggcccagcagcaggtgctgggggccgatacacagaggcttgagacccaggttatcccacccttcggaggctggcatcactggagcccctgccatcctgcccaggcagcgacaaggttggtgactgactgggaatgaatggggaccaccggcaccctacagcatcctggagaagcaggtggacaagaggcctgtatctagccctagacgcattgggctgtgtaccttctctgtgctgccctgatgacagaatgtgtcccgagtggatgctggggtttgctgctagcccctggagatacctgtagcctgggggggtctatgggtgtctgtaagcatatgtgtacacactcaagaagggccccctgactcttaggtgactctccactcctgggaagagcctccctccccaatatgtctgttggtggtaaactggcctcaggccaggccaggaccaggcagtccaagggcctgtatgcccttgttggctaggtcctgccatgtgttcaaagggcacttggccaggtttcaggatggctttaagcctgcaggtcccttttgggttcccccacctttcttacctgggtctaggtttgctcagagcaaggttggacctctgggctctaagcccttatctcagagtccgtagctatttccccttcactgcctctgtggacgcccttccccacagggtcggtctggattgttctggcccaggtcctgcccagtagtaggggcttccaggctgcggctggctgcctcagagatgccctctgcagggtagtgtgggcagctctctgttgcagggcagtgcctgccccacaccctggtggctagaggagagtagggggtaccctacagccactgggggctcctgcctgcaggcagggctgggagaaaacagggctggggtgggcagtacagggaatatttttgtaacttgctggagtgaatgaaaatggggcgattctaagttattgttgccaaagacatgtaaagtatattgttgctttgggggtgggggcaatgttttctgttttgtttttgtttctgtttttagtttgaggcttaggatggacgctggtgcaatgattttcttgttccttgttttttaagagaaaccaagctaaaaaaaaaaaa

SEQ ID NO: 7 - DNA, 1077 bp, Mus musculus
ggcactccgttggtggtgggcgcgatcggactctgggaatctttacctgcgctcgggttccctccgcactcttttggataacttgctgttcgtggatcgcacaatgactctggaagaagtccgtggccaggatacagttccggaaagcacagccaggatgcagggcgccgggaaagcactgcacgaacttctgctgtcggcgcacggccagggctgtctgaccgctggcgtctacgagtccgccaaagtcctgaatgtggaccctgacaatgtgaccttttgcgtgctggctgccgatgaagaagatgagggcgacatagcgctgcagatccatttcacgttgattcaggcgttctgctgtgagaacgacattgatatcgtgcgcgtgggagacgtgcagaggctggcggcgatcgtgggcgccgacgaagaggggggcgcgccgggagacctgcattgcatcctcatttcgaatcctaatgaggacacatggaaggaccctgccttggagaagctcagtttgttctgcgaggagagccgcagcttcaacgactgggtgcccagcatcacccttcccgagtgacagcctggcagggaccttggtctgatcgacttggtgacactctagcgcgctgctggctctggagtggccctccgagggcgctcgagtgcgcgtggagactggcaggcgatgttgcctggagagcgaggagcgcggcctcccaagaagggggtctggcggcagcggggacaccttgttccgagcccaggactctgccagtgtccggagaggctgctagcacaggaaggcctaggcgaggacgttggccccagggccgggaagaaccgaccagcgaggcaggtgtgactcagcaagcagccttccagtgaaaggaggggaaagaaaggcaggcgaccgcctggacttggtacagcggcaggagcggccactgcaggagcgagctggacttagccgactgcactgctctttcaaaaaacggatcccgggcaatgctttcattttctaaaggacgctatcgtggaagctttgaatatcacaataaacttattgaaacg

SEQ ID NO: 8 - DNA, 1956 bp, Mus musculus
ctcgccttgagccttcgctaggtgaggcactctgaagctggactggccagatccactcatgagcaagtcagaccattttctagtgataaacggcaagaactgctgtgtgttccgagatgaaaacatcgccaaggtcttgccaccggtgttggggctggaatttgtgttcggactcctgggcaatggccttgccttgtggattttctgtttccacctcaagtcctggaaatccagccggattttcttgttcaacttggccgtggctgactttctcctgatcatctgcctgccgttcctgacggacaactatgtccataactgggactggaggttcggaggcatcccttgccgtgtgatgctcttcatgttggctatgaaccgacagggcagcatcatcttcctcaccgtggtggctgtggaccgctacttccgggtggtccatccacaccacttcttgaacaagatctccaaccggacggcggccatcatttcttgcttcttgtggggtctcaccatcggcctgactgtccacctcctctatacaaacatgatgaccaaaaatggcgaggcatatctgtgtagcagcttcagcatctgttacaacttcaggtggcacgatgctatgttcctcttggaattcttcttgcccctggccatcatcttgttctgctcaggcaggatcatctggagcctgaggcagagacagatggacagacatgccaagatcaagagggccatcaacttcatcatggtggtggctattgtattcatcatttgcttcctacccagtgtggctgtgcgcatccgcatcttctggcttctctacaaatataacgtacgcaactgtgacatctactcctcggtggacctggctttctttaccacccttagctttacctacatgaacagcatgctggaccctgtggtctactatttctccagcccatctttccccaacttcttctccacgtgtatcaaccgctgccttcgaaagaaaacattgggtgaacccgataataaccgaagcactagtgtggagctcacgggggaccccagcacaaccagaagtattccaggggcgctaatggctgaccccagtgagccaggcagccccccttatctggcttccacatctcgttaagttactatgacaagaagggagattgccgctcaggcctgtgctctctggagaggcgatttggccgttcgttgaacagggtaacatcttcagatttggcttacgctttcttggaacttctagattcggagaatcgaatttagagaaacggcgtggtgcagtgagcagttttggttgcgaggtgcagccatagaaaatctcagaggaacagaaagcagagtttccagacagtggaaacttctcagccttccaagcttacaggactgaagaagacagagtcctgcagagtttgagtcccagatgcacccagacacacctcagttctgctcaaagtcacggatggctcttcgtcctagggtcctacctagcctgtccgtgggccccagtgaggacaaggagatccacgaaactggaggggatctctacccagatgtcactgataagccagttggtcacttgtgttcggtgggaccagtatacctttcagccagactttagcagaaatgctaaagaggggaggagatgcaaaagatttgattgttctccaagtctccaaaggtggtaagagggggttagccccaggagggactgaactcagtgctggagagaaacaataacaaattcagctgagctttaaaaggctttggggaaacagtggcttcccccctctgtctgcgtttcttagtaaaaggaattcaactgtgtccatggttggggggggggggggcggttcattacttgggtttctgtactttaacatctaccatttcaataaatttcgactgaaaaaaaaaaaaaaaaaaaaaaaaaaaaaaaaa

SEQ ID NO: 9 - DNA, 2793 bp, Mus musculus
ggagtctggagccggagccagagaccggggctgggaaaccccagcccgggacgggacgcagcagcctctggatcccgggaccccggacctctcaggaccggccagaggtgaaggactgaggccccactgaggccttggaccgcaccgcctggctccttcagccgcagtcgtctcctgggacagaagatgcactccaggagctgcctgccacctctcctgttgttgcttctggtgctcctggggtctggagtacagggttgcccatcaggctgccagtgcaaccagccacagacagtcttctgcactgcccgtcagggaaccacagtgccccgagacgtgccacctgacacagtgggcctgtacatctttgagaacggcatcacgacacttgatgtgggctgttttgctggccttccgggcctgcagcttctggacttgtcacagaaccagatcactagcctgcccgggggcatctttcagccacttgttaacctcagtaacctggacctgactgccaacaaactgcacgagatctccaacgagaccttccgtggcctgcggcgcctggagcgcctctacctgggcaagaaccgaattcgccacatccaaccgggtgccttcgacgcgcttgatcgcctcctggagctcaagctgccagacaatgagcttcgggtgttgcccccattgcacttgccccgcctgctgctgcttgacctcagccacaacagcatcccagccctggaagccggaatactggataccgccaatgtagaggcattgaggttggctggcctagggctgcggcagctggatgaggggctttttggccgccttctcaacctccatgacttggatgtttatgacaaccagttggagcatatgccatctgtgattcaaggcctgcgtggcctgacacgcctgcggctggctggcaacacccgtattgcccagatacggcccgaggacctcgctggtctgactgccctacaggaattggatgtgagcaacctaagcctgcaggccctgcccagtgacctctcgagtctctttccccgcctgcgcctcttagcagctgccaggaaccccttcaactgcttgtgccccttgagctggtttggtccttgggtgcgtgagaaccatgttgtgttggccagccctgaggagacgcgttgtcactttccacccaagaatgctggccgactgctcctggatctggattatgcagattttggctgcccagtcaccactaccacggccacagtacctactataaggtctactatcagggaacccacactttcaacttctagccaagctcccacctggcccagcctcacagagccaactacccaggcctccaccgtactatcgactgccccaccaaccatgaggccagctcctcagccccaggactgtccagcatccatctgcctgaatggtggtagctgccgtttgggagcaagacaccactgggagtgcctatgccctgagggcttcattggcctgtactgtgagagtccagtggagcaagggatgaagcccagctccataccagacactccaaggccccctccactgctgcctctcagcattgagccggtgagccccacctccttgcgtgtgaagctgcagcgctacttgcagggtaacactgtgcagctacggagcctccggctcacctatcgcaacctgtctggccctgacaaacgactggtgacattacggctgcctgcttcacttgcagagtatacagtcacccagctgcgacccaatgccacctattctatctgtgtcacacccttgggagctggacggacacctgaaggtgaggaggcctgtggggaggccaacacttcccaggcagtccgctctaaccatgccccagttacccaggcccgtgagggcaacctgccactcctcattgcgcctgccctggctgctgtacttctggctgtgttagccgctgcaggggcagcctactgtgtgcggcgggcacgggcaacttctacagctcaggacaaagggcaggtggggccagggactggacccctggaactagagggggtgaaagcccctttggagccaggctccaaggcaacagagggaggtggggaggctttgtcaggtggtcctgaatgtgaggtgcctcttatgggctacccagggcccagccttcagggggtcctccctgctaagcactacatttagactggtgagaaagagcagccagggggtcaggctttcagtcaccaccctcctgctgccacagaaggaagttctcagtatacaccacagtgcacgtgcatgatggagctgtgggaccctctctgggctgggtctcatctgtaagctgctacagcccagatgaactctgccagccgccagtgcatccagtacagcgcctgccatcttgtgcaatgtgcaaccctgggatgtgagccctgccatgtgctggtaacatggctaggcatgttgggcttcccaaaccatggagtctggtaaccagtgaaggaagcccccagaaataatgagtggggaaggtactagggcactggccttggcctcaaaagtgcaggcacacttgaaactggaaaggaaggtgctctgggcacatgtggatttgcttctattgttttgttttgttttttctaatgtatttataaaagatcttttcccatttatgctgggaaagtgtttttcaaactcagtgacaaggactttggtttttgtaagactgttgatgatatgaaggccttttgtaagaaaataaaaaataaagtaaattgcctgtct

SEQ ID NO: 10 - DNA, 1832 bp, Mus musculus
gactggctacccccatagcccgcagcccacgccgaggtgcagggaacctgcggggatcctcgctgccggagggcctcgagctgaagggaacgaggcgggcggcaaagactcctcagagcccggctccgggctggacgctgtgttttccgaactgcggctggactgcctgggactctgacacctaccgctctcggctttcctggggacctcttcctgagggcgtgctgagacatggagggcgcagacctggcggtgaagctcctgtccacctggctgacgctggtgggcggcctcatccttttaccctcggccttcggattatccctgggtatctcggagatctacatgaagatcctggtgaaaaccttggagtgggccacattacgaattcagaaaggagcccccaaggagtcagctcttaaaaactcagcttctgtgggtattatccaaagagatgagtcacccatggagaaagggctctctggtcttcgaggaagggacttcgagctctctgatgtgttctatttctccaagaaggggttggaagccattgtggaggatgaagtgacccagaggttctcctccgaagagctagtatcatggaacctcctcacacgaaccaatgtcaactttcagtacatcagtccaaggctcaccatggtgtgggtgctgggtgtcctagtgcgctattgcttcctgctacctctgagggtcaccctggctttcattgggatcagcttgctgattataggaactacactggttggccagcttccagacagcagcctcaaaaactggctgagtgagctggtgcatctgacctgctgcaggatctgtgttcggtccctatctggcacatccattaccataacaagcagtacagaccccagaagggaggtatctgtgtcgccaatcacacctctcccattgatgtcctaatcctggccaccgatggatgttacgccatggttgggcaggttcacggtggattgatggggatcattcagagagccatggttaaggcttgtcctcacgtctggtttgagcgctcagaaataaaggacagacatctagtgactaagagattaaaagaacacattgctgacaagaaaaagttacccattctaatcttcccagaaggtacttgcatcaacaatacttcagtcatgatgtttaaaaagggaagctttgaaatcggaggaaccatctatccagtggccataaagtataacccccagttcggcgatgccttctggaacagtagtaaatacaacttggtgagctacctgcttcgaatcatgaccagctgggccattgtctgcgacgtgtggtacatgcctcccatgactagagaggaaggagaagacgcagttcagtttgcaaacagggtaaaatccgctatcgctgtacaaggagggctgacggaacttccctgggatggagggctgaagagagcaaaggtgaaggacaccttcaaggaagaacaacagaagtaattacagcaagatgatcgtgggcaacggttctcccaacctggcgagggactgaagcatcgtggataaacatgtgttcgcagaactggccttcagaagtgaaagatgatgatgttgttttgttgtgttgtttttttgcttgtttgtttattgttcatttttttttctacttgattttgtctctatcctcatgccagaagctgaacctgcaacaggtgtcctttttgatgttttcgttcttgtgttggctcaaggaattgttaggcccgttcttgagtggaaacagacttttataaaatgatgatgttgatggtgattgaatgaaatctttgtatggac

SEQ ID NO: 11 - DNA, 596 bp, Mus musculus
ggcggacagacaccaaaccatgccagcagacctcagcggtacctggaatcttctcagcagcgacaacttcgagggctacatgctggccctgggtattgactttgcaactcgtaagattgccaagttgctgaagccacagaaagtgattgagcaaaatggggactccttcaccatccagacgtgcagcagcctcaggaactaccttgtaaaattcaaagttggagaagagtttgaggaggataacaaaggcctggataacagaaaatgcacgagcctggttacctgggagaatgacaaactcacttgcgtacagagaggagagaagaaaaacagaggctggagccactggatcgaaggggaccagctccacctggaaatgttctgcgaaggccaggtgtgcaagcaaaccttccagagagcctgatacatctccagcaacagagcccgcttgaggcaactactcaatgccaagttatctcgtagaaggaacgggtgtttgtctgttttgggttgatgaagggtcttgtcattggaaagatgtcacacagcctgtatgagaaactgtttgatttcaggacagtttcagctccaataaa

SEQ ID NO: 12 - DNA, 639 bp, Mus musculus
cacaggcaagactttggagagagcagactaggcataatggccaccttgccaccaacagccaacccttcccagcaacctctaaacctagaggatgaagatggaatcctggatgaatatgatcagtacagcctggcccatccctgtgtcgtcgggggaggtcggaaaggtcggaccaagagagaagctgctgccaataccaaccgccctagccctggcgggcatgagaggaagctgctgaccaagttccagaactctgaaaggaaaaaagcctggcgctgagacggagctggagataaggccagaccacagacaccacacccagcaatggatacaggacatcacacccagcaatggatacaggacatcacacccagcaatggatacaggaccttggagaaattaggagttgtaagcaggacctaggcctgcttgattctttcccacctaagtgaggttctggagagggagcccttccacccttccagacccagcaaaagggcaagatgggagcaagaagcagagggtagacgggcagagctaggaagacagcccccaaaagaactgtgggggaaataaatcggatgcccttgggtggcagcaacaataaatcgtacagcagtgacagcaaaaaaaaaaaaa

SEQ ID NO: 13 - DNA, 2979 bp, Mus musculus
gtgaggcgcaggataccttgagaaaatggctgagtatctgaggctgccccactccctggctatgatccgcctctgcaatccaccggtcaatgccatcagtccaactgtaatcacagaagtaaggaatggactccagaaagctagtttggaccatacggttagagccatagtgatctgtggagcaaatgacaacttctgtgcaggtgctgatatccatggctttaaatctcccactggccttacattaggaagcttggtagatgaaatacagcgataccagaagccagtggtggccgccatccaaggcgtggctcttggaggaggactagagctggccttgggctgtcactatcggattgccaatgcaaaggctcgtgttggcttcccggaagtgatgctgggaattcttcctggtgcaagaggaacgcagcttctacccagggtcgttggagttcctgttgctcttgacttaattacctcaggaagacatatttcaacagatgaagcactcaagcttggaattctggatgtagttgtaaagtcagacccagttgaagaagccatcaaatttgctcagacggttataggtaaacccatagaaccccgcaggatcctaaacaagccagtcccaagcttgcccaacatggacagtgtttttgcagaagccattgccaaggtacggaagcagtaccctggccgcctggctccggagacttgtgtccgttcagtccaggcctccgtgaagcatccatatgaagtggccatcaaggaagaagcaaagctgtttatgtaccttcgggggtcggggcaggctagagccctgcagtacgccttttttgctgaaaagtctgcaaataagtggtcaactccctcaggagcatcttggaaaacagcatctgctcaacccgtctcctcggttggtgttcttggcttgggaacgatgggccgaggcatcgccatctcttttgcaagggtggggatccctgtggttgctgtagagtcagacccaaagcagctagatactgcaaagaagataataacttccaccttggaaaaggaagcatcgaagagtggccaagcttcagcaaaaccaaacctcaggttctcctcatccacaaaggagctttcgagtgtggatttagtgattgaagcagtgttcgaagatatgaacctgaagaagaaggtcttcgctgaactgtcagccctgtgcaagccgggagcctttctgtgcaccaatacctcagcactggatgtggatgacattgcttcttccacagatcgcccccagctggtgattggcacccacttcttctccccagcccacatcatgaggttactagaggtcattcctagccgatactcttcccccactaccatcgccacagtcatgagcttatccaaaaggattggaaagattggagtcgttgttggtaactgctatggatttgttgggaatcgaatgttggctccctattacaaccagggctatttcttgatagaggaaggtagtaagccagagggtgtagatggggtcttagaagagtttggttttagaatgggacccttcagggtgtctgacctcgcagggctagatgtgggttggaaagttcgcaaagggcaaggccttactggaccgtccttacctccaggaacccccacccgaaagaggggcaataccaggtactccccaattgctgatatgctctgtgaagctgggcgatttggtcagaagacaggtaagggctggtatcagtatgacaagccactgggtcgcatccacaaacctgatccctggctttctgagtttctgtcacagtatagagaaacccatcacatcaagcagcgctccatcagcaaggaggaaatcctggagcgttgcttatattcccttatcaacgaggcattccgcatcttggaggaggggatggccgctagcccagagcacattgatgtcatctacttgcatgggtatgggtggccaaggcacgtgggtgggcccatgtactatgctgcctcagttgggctgcccacagttctagagaaattgcagaaatattacagacagaatcctgacatcccccagctggagcccagtgactacctgaggaggctggttgcccagggaagccctcctctgaaagaatggcaaagcttggcaggaccccatagcagcaaactgtgattcagccttctgcattttgccatgtatggtggcatctaatttcagtgtgattcattcctaaaatccaaacagatttctctgaagtacaaatgatgattgctgctgttgctgctgctgctggtggtggtggtgctaaatggtcagcaaaagcccctctctgtatcttcctacctcataattctaatggccagatttcaggaatgtgttttctatacctccgacggtacttctatcagaaaaattcagcaaatatgtatttactactgcaagcgttcttctcttttgactgtttgcttggtatagccataacttatacaaaatgttgctaagagaataattcataactccagttgacaacccagatataccttttagcaaatcaacaaaagtggcatggacatacaagtcacacatttcagctgtgtgacggaacatgatgcaccatggtgctgtgttgcagcattgctctgactaagaggaggcagccaaagaaggccacatgtcatatggatgtggatataaaattccagaatatacagatctgagaacaatgtagatgagtagcccaaggctataattgttttaagttaaaattactgctgattaatacagagtatctttggagtttgataaacttttctaaaattactttagtggtgtatctgtaacacattgagttcaatggttcaaagtgaactatgtagtgtgtgtgtatatacacacaacatatatatatatacatatatatatatatattctatctcaatgaagttaataaaattaatgatggtaaagcc

SEQ ID NO: 14 - DNA, 1846 bp, Mus musculus
gagttgctgcttgggacgcgggctgcgcggttggtgaacagccttgccgttttgctgtcacgtaccttccctgagcctgggacggagggggcgcgcgcgtgtgcgtgtgttgtgtgagggacagcgggactcgggcagggccgtctcctgatcccttttcccttagcggaggcggcagtgcgcacgctggtttgctcgccgcccacttgggagcgggctcagggtgcggagtgcgtcttcggttttgttttttggttttttgttttttttgaacttgtgagagtctttttcccctcccttttccatttttattttcttttggctccgtgcctctagggctggtttacccggcccctgaattaccgcttcctgaccccggtcgccaatcttgccccaggttgctccccggctctgcccctgcccctccccgagggtgggaagccttgcctagtgggtctctgaagcgtagccgcacctgcctcagtatgcacggggtcaacgaccctccactttttataaaagacattaaggccggactgaaaaacttaaatgtcgtctttattgtcctggagataggtaagtgagcgtcgcagcccgccccacaccctcgagagctcggacctcttcctcgcccgcgaccccacgtgctcctggcgcagaatcctacccggggacagaagtcagtcacgtagcgagccagaggatggtgaaagagctccctcgaatgaactccttatctaacacacctttctttctcccctttttgatttttacatttcacaggacgagtgaccaaaccaaagacggctatgaagtgagatcctgccaagtagctgatagcacggcgagcatcactatttctgtgtgggatgagatccgaggagagcctttaaaagatgatctaagccaaagagacacatgtagtttttaaactacatgacctacttgaacacttagtgcacttttatttattcttaactgtgaaaactttgtctcttacgggtttccttttatatttttggtttgttgaaaagagtggttggtttttactgaaaaaactgttacactgctcagttacatcctattgaagaataggaactctgaaagcaggaacatttattttttgagcaagaacttactgggtatcacttgaaaacctgtccctgtttcgagggtgagttacttaagacaccagcttatatatagcctctgtgagtctggcttctgcataaactttgtaatgtttgtcataatgtttaatggaacttgtcttaaacttgaatattgccacctgaagcaataaccaccccaagccagaaacttggacagcattgtcaacatttttgagtattcctgatctaggaatggcttgactccctagagtgtctgcctgccataaggattttttcacagacagaatcagaatcatcctaaactcttgtttattgaccagataaccaaattcttcatcagaattatggaataaaatatgtaatataacaagtaatttttagaagaaaacggtttaagatgatgctcttaacatttgttgcaaacattgaagtttacattgaagaaaaatttacaactgagtccctgaatgctttatttttgaagttaccatgttaaatattgaagtgtaattggagggattgaagagagctataacacctttattggacagtggtctcattgatactagttgtatttttgaggcagggtctttctctgtgcagccctggttggttggaacttgttatatatatatatatatcaggtgggtctctgaactatagattgacctgcctctctcttcctggagctgggattaaagttgtgtagcatc

SEQ ID NO: 15 - DNA, 1496 bp, Mus musculus
ggggtggcagggattaagtcacctctgttctctacctcccatgcctctctcctcacctggattcacaaatttaaagatggggatcgaggtctgaggacaccaaagggcaaggggagccctggggtcagatactgtatagtcagctgtgaactccagatagaggcaagagcggatgcgaagggcgggctcctagaaccagggttagagcaagagcagagggagcttcgcagaacagcgagtgctgtggcgactacagggcatcagaggtgacaagtaatcaaccactcctctttcactgaacccagccttagggagttagggtttccccagagtctggacaacaggccttaagacaagggaagagaagggtgggtatgatggaaatacttggtgctgttctgccttccaggactccctccccctggttcccttatttctaagtcggctttgccaactgctgtgtggctaccaagggagggaaagagacaccctcctccagagttctatgctcaggaagtttctttaaccctgtggttcaagagtagcttgaaggaggcccctgaaaaacaaacaaacaaacaaacaaacaaagccaaccctggtagggttcatccttacattcccaaggtgggaggagctcaggtaagagaagagtcccaagatgcacttcaagcctggggctggagccaaagcagaggaagaactaggcactgaccgagcattcaaggaccaaggtcctttcaaatccagggcacagctgtgatgacagagagccccacacctctttagtcctctaaagggagatgggggtgaaatcaatggggatttctccctgacttagcaaacaaggaagcaggcagaagagaacagctcaggatttactggtggagggaaaaggagccgggaacaatagtccattgttcgctaaagagaaacagtgttgtgaagactggaccatgactggctgaggtggcttccttggggactgactcctgggtagtagtaagccttcggtagcagacctgccttcagccagggacctgaggggagcttctacagggcacaggctgtcccaagtgtcactgtcttgtcccagcctcttaagaaaggacttgattttttttattaccttgaggattctgggagggaattcggggctgtgactctgtaccgtggtcaccctgaagtatagcaacagaaggaggctgggctatgaagaacacctgtgcttgctctgttctggagtttgcctcaccctaactgccagtctgggatgtggcttgggctgtgtcattggccttgactgttcagcaggctttcctggcctgtctgcccatgacctgagatcaactcaccctggtacaccacctgagtcccactatctccctgtgatgggtgacctttgtgtactgtgtcttgggtccattatatgaattgtgagcagggttcatctattttaaacacaaatgtttacaaaataaagaatatttcaaacc

SEQ ID NO: 16 - DNA, 905 bp, Mus musculus
agcagtcttatacgcacagcacgcagtccgtgttctttgtctgggagctgacgtaggacacaggatcctccccacgaactccctctcctcagagacttcccctcccacccctgccacatgggatgggttcttgcagtcagcctgggcaggctgtctcacacattccagggttcacattcataaacacagtctgtgaacaacagtgccaacacctcccaccatcgagtaagcagctgtccccagagatgcggggtccccgcggccatctcctctcaccagggcagctgcccatcatcgccaagaataaactccagctagtcgctgcgtggatctgaatcatctgagagcttccaaaggaggggagtgactacccaggacgcacaagcagactatataagttcccaagggttgggcctcacgcagatcctttcctgtggctactgcctgccagagagctaccaacaacgagcttgcttggcatccaacatgtccgaggctggcactcctgaaggccccatcaagaagaagcggccccctgtgaaggaagaagacctgaagggggcccgagggaccctggccaagaaccaggacatcaagtctaagacataccaggtcatgcgggactacgagcaagccggctcagctgccccatctgtattcagccgcaaccgcacaggcaccgagacagtctttgagaagcccaaagagggaccagccaagagcgtgtttggctgagacatgcacattgcaccatccacccggacacaggagcctccccacgaactttttttttttttttttttgtaatgctggaagatgcctttcctctgctgtctcttgaaccatcatgactcccacaaccctagcccttggaaacaccaataaagagtatgcccaatgtcccc

SEQ ID NO: 17 - DNA, 3223 bp, Mus musculus
gggaggctctgccgctgcggccgcagcagctcagctcccattcccaggcagcttggaacagggactttggcaaataactggagcggcgttcgggttaggttctgaggccttcagactgggactgagctccaccgccagcatctccgacagctttcagactgccgtgggccttctctgttgccgcgactctgtctgctcaaccctgagaagtgatggatattcttcacagaggagaattggttgctgcaatactccgcaaccgatcacttgtggaagaggaagaccagcacttgaaactgtgccttggaagtgaaatgggcctctcttcccatttgcagtcttgcaaggcaggaagtacacgcatctttaccagcaacagccacagttctgtggtgttacagggctttgaccagcttcggcttgatggattgctttgtgatgtgacactgatgccaggtgatacagatgatgcttaccctgtgcacagagtcatgatggcatctgctagtgactacttcaaagctatgttcacaggtggaatgaaagaacaagagctgatgtgcattaagcttcatggcgtgagcagagtgggtctacggaaaattattgatttcatctatactgcaaagctttctcttaacatggacacccttcaggatacgctggaagccgccagctttcttcagattcttccggttttagacttctgcaaagtgtttctcatatctggggtcactttggataactgtgttgaagttggacggattgccaacacctaccatctgacagaagtggataaatatgtcaacagcttcgtcttaaagaattttgctgcattgctgagcactggggagttcctgaagcttcccttcgagcgccttgcctttgtcctgtccagcaacagccttaagcgctgcaccgaacttgacctcttcaaagctacctgtcgctggcttcgcctggaagaacctagaatggacgttgctgcaaaactaatgaagaatatacgatttccgctgatgacaccacaggagctcattaattatgtgcaaaccgtggatttcatgagaactgacaatacttgcgtcaatttgcttctggaagccagcaattaccaaatgatgccgtttatgcagccagttatgcagtcagacaggactgccattcggtctgacaccactcgtttggttacactcggaggagtcctgagacagcagcttgtcgtcagtaaagaattgcgcatgtatgatgaaaagacccacgagtggaaatctctagcccccatggatgccccaagataccagcatggcattgctgtcatcggaaattttctctacgttgttggtgggcagagtaattatgacacaaaaggaaaaaccgccgtcgatacagtgtttagatttgatcctcgatacaacaaatggatccaagttgcatctttaaatgaaaagcgcaccttcttccacctaagtgccctcaaaggatttctgtatgcagttggtggacgaaatgcagctggagaactccctactgtggaatgttacaatccgagaacaaatgaatggacctatgttgccaaaatgaatgaacctcactatggccatgctggaactgtgtatggaggagtgatgtatatttcaggaggaattacccatgacactttccaaaaggagctcatgtgcttcgaccctgatactgacaaatggacccagaaggcaccgatgaccactgtccgaggcctacactgcatgtgtacggtgggagataggctctacgtcattggtggcaaccatttccgaggaaccagtgattatgatgatgtcctgagctgtgaatactactcacctatccttgaccagtggaccccaattgcttccatgttaagagggcagagtgatgttggggtcgctgtctttgagaataaaatctatgtggttggtggctattcatggaataatcgctgtatggtagagatagtgcagaagtatgatccagagaaaaatgaatggcataaggttttcgatctgccagagtctcttggtggtattcgagcttgtacacttacagtttatccacctgaagaagccacaccatcaccttctagagagtcccctctttctggaccctaagatcatccttacaattaagatgctatattcctatctttgcaatgtgtcatgattatcttcttttccccccttaagtagcatatatgttagagttagccttcagtaattgatacagaaaaaaaattgacattgatgttacttgtgatgtttgtatggcctagaatgtttataaagtggtaacaaaccatccttgaaatatatcccatagaagctgatgtttaacatgaaaacaaaaaaagtattgtctacaaagtgtttcttcagtactttctaaatgctgtgtactgagtgtaagggattcctcatcttacattataagccaagttgaaggtggattatagtaaatgtacaactgtgctcactaggtttcaaagtgaagaagttttcctttcatctttaactgtaagatgtcaaagggaggcagcctgctccaataggaaacagtacacaaaaggttgccaactcgcatgagctacctccctcttttcataaagtatttttgacacatctgtcaacccacctgactgtgtgggtgcattgagaacacaccaagtttctaagacacacaggagaaataactgaaattcaccaacactagtttgtgggggaaagcatgacccctctgcttataagaattggtttggggttttttttaagtgtgtatagatgaacacacacatacttatatcaaatacaaatttttaaaaattgactgtcaggtcaaataaatgtgaaattaaacaaaattcttctaaaaagcagcttccatgaaaaatggggattcagtatgcacacattaaatgcatatatttcaaaccatactgaatttaggtggataagggctagaaattttgagcaactaaatttatcacttgaccaaattttaccataaagaattatattctctttttctcgtttgctgttgaagtaacttacctgttgtgtggattctgtattctgtacactcttggttcatgaggttatttagcacaaagtgtaacagcttcacctgggaagctgcttttgctctatgatgtccatggtttcccttcttttcttcaataaaaacatttaatgtcattctgctctgtgcc

SEQ ID NO: 18 - DNA, 3002 bp, Mus musculus
ccggcgggcagcgcactatgcggctcgagtgggcgtccttgttgctgctactgctgctgctgagcgcgtcctgcctgtccctggccgctgacagccccgccgcggcacctgcccaggataaaaccaggcagcctcaggctgcagcagcggccgccgagccggaccagccgcagggggaggaaacacgggagcgaggccatttacaacccttggccgggcagcgcaggagcggcgggctggtccataatatagaccaactctactctggcggtggcaaagtgggctaccttgtctacgcgggcggccggaggttcctgctggacctggagagagatgacacagtgggtgctgctggtagcatcgttactgcaggaggagggctgagcgcatcctctggccaccggggtcactgtttctacagaggcaccgtggacggcagccctcgatccctagctgtctttgacctctgcgggggtctcgatggcttctttgcagtcaagcatgcgcgctacactctaaagccactcctgcgtgggtcctgggcagagtatgaacgaatttatggggatggatcttcccgcatcctgcatgtctacaaccgcgagggctttagcttcgaggccctgccgccacgcgccagttgcgagactcctgcatccccatctgggccccaagagagcccctcggtgcacagtagatctaggagacgctcagcgctggccccgcagctgctggaccactcagctttctcgccatctgggaacgcgggacctcagacttggtggaggcgtaggcgccgttccatctccagggcccgccaggtggagctcctcttggtggctgactcgtccatggccaggatgtatgggcggggcctgcagcattacctgctgaccctggcctccatcgccaacaggctgtacagtcatgcaagcattgagaaccacatccgcctggcggtggtgaaggtggtggtgctgacggacaaggacacgagtctggaggtgagcaagaatgcggccacgaccctcaagaacttttgcaaatggcagcaccaacataaccagctaggggatgatcacgaagagcactacgatgcagccatcctgttcacccgagaggatttatgtgggcatcattcatgtgacaccctgggaatggcagacgttgggaccatatgttctccggagcgcagctgtgcagtgattgaagatgatggcctccatgcagccttcactgtggctcatgaaattgggcatctacttggcctttctcatgacgattccaaattctgtgaagagaacttcggtactacagaagacaagcgtttaatgtcttcaatccttaccagcatcgatgcatccaagccctggtccaaatgcacgtcagccaccatcacagaattcctggatgatggtcatggtaattgtttgctagacctaccacggaagcagattttgggtcccgaggaactcccaggacagacctacgatgccacccagcagtgcaacttgacatttgggcctgagtactcggtgtgccctggcatggatgtctgtgcgcggctgtggtgtgctgtggtgcgccaaggccaaatggtgtgtctgaccaagaagctgccggctgtggagggcactccctgtgggaagggaagagtctgccttcaaggcaaatgtgtggacaaaactaagaaaaaatattactcgacatcaagccatggaaattgggggtcctggggcccctggggtcagtgttctcgctcatgcgggggaggagtgcagtttgcctaccgccattgtaataaccctgcacctcgaaacagtggccgctactgcacagggaagagggccatataccgttcctgcagtgttacaccctgcccacccaatggtaaatcttttcgccatgagcagtgtgaagccaaaaatggctatcagtctgatgcaaaaggagtcaaaacatttgtagaatgggttcccaaatatgcaggtgtcctgccggcagatgtgtgcaagcttacctgcagagctaagggcacaggctactatgtggtcttttctccaaaggttacggatgggactgaatgcaggccgtacagcaactctgtgtgtgtccgaggacggtgtgtgagaactggatgtgacggcattattggctcaaagctacaatatgacaagtgtggagtgtgcggaggggataactccagttgtacaaagattatcggaaccttcaataaaaaaagcaagggttatactgacgttgtgaggatccctgaaggagcaacccacataaaagtccgacagttcaaagccaaagaccagactagattccctgcctacttagccctgaagaagaaaactggcgagtaccttatcaatggcaagtacatgatttccacttcagagaccatcatcgacatcaatggtaccgtcatgaactacagtggatggagccacagagatgattttttacatgggatgggctattcagccacaaaagaaatcctgatcgtgcagatccttgccacagacccaactaaagcgctaggcgtccgttacagcttttttgttcccaagaagaccactcaaaaagtaaactctgtcatcagccatggcagcaacaaggtgggaccacactctacacagctgcagtgggtgacaggtccatggctggcctgctccaggacctgtgacacaggctggcacactaggaccgtgcagtgccaggatggaaacaggaaattagctaaaggatgccttctctctcagaggccttctgcatttaagcaatgtctgctgaagaaatgttagcctgtggtttactctaatgcacaaaaaaacaacaggaggatcatcgcagatacagctgtggtgaagacaaggcctacccaaagcacagaaagtcatgccttcatgtcattgtcaccacgagtcgaattatgggcagaatctgctctctgcgaccaaaaggtttactctacttggtgaatgatggtaccgtga

SEQ ID NO: 19 - DNA, 3635 bp, Mus musculus
  misc_feature 2833: n = A,T,C or G
gccgcgccgggggcggcgggatgctgctgcggatgcggagctgtgtgagccgctgcctacccggcgcagcctgggctccgcagtagcggagctcgagcatcctttagtcatctatctggggagacctggaactcaggcttcggcttcccggcaggtttgtctttaatttccaaggttgcagttctcttgacacaatccacagcatccttctctccaaccgggctgtggatgaacctgggactggactgaatccagcagctggggcagcccgggccatggtgcgtctgagccccgagctctggtaaggcagtagtggcggcgttgttcgagctaggcgggtgccactcccgggagcttcctcccagctgtcacaatgttcagttggctgggtaacgatgatcgccgcaagaaggaccctgaggtcttccagacggtgagcgatggactcaaaaaactctacaagaccaagctgctgcctctggaagagtattaccgcttccacgagttccactcgcccgccctggaagatgctgatttcgacaacaagcccatggtcctgttggtgggccagtactctaccggcaagaccaccttcatcaggtacctgctggaacaggattttccaggcatgaggattgggcctgagccgaccactgattccttcatagcagtgatgcagggagatgtggaggggatcattcccgggaatgccttggtggtggatccaaagaaacccttcagaaagctcaacgcctttggcaacgccttcctgaacaggtttgtgtgtgcccagctgcccaacgccgtgcttgaaagtatcagtgtgatcgacacaccggggatcctctctggggagaagcagaggatcagccgagggtatgattttgctgcggtcctcgaatggtttgctgagcgggtggaccgaattatcctactcttcgacgcccacaagctggacatctccgatgagttctcagaagtcatcaaggctctcaagaaccatgaggacaagatgcgcgtagtgttgaacaaggctgaccagatcgagacccagcagctgatgcgagtatacggagccctcatgtggtccctggggaagatcgtgaacacccccgaggtgatccgggtctacattggctccttctggtcccacccactcctcattcccgacaaccggaagctctttgaagctgaagagcaagacttgttcagagacattcagagtctaccccgtaatgctgctcttcgaaagctcaacgatctcatcaagagagcccggctggccaaggtccacgcctacatcatcagctccttgaagaaggagatgccctcagtgtttgggaaggacaccaaaaagaaagaactggtgaacaacctggctgagatctatggccggattgagcgagaacaccagatctcccctggagacttccccaacctgaagaagatgcaggaccagctgcaggcccaggacttcagcaaattccagccactgaagagcaagctgctggaagtggttgatgatatgctggctcatgacattgcccagctcatggtgctggtgcgccaggaagagacccaacggcctgtccagatggtgaagggcggagcatttgagggaaccttacaaggccccttcgggcacggctatggagagggagctggggagggcatcgatgatgccgagtgggtggtggcgcgggacaagcctatgtatgatgagatcttctacaccttatccccagtggatggcaagatcacaggtgccaacgccaagaaggagatggtgcgctccaagttgcccaacagcgtgctgggcaagatctggaagctagccgacattgacaaggatggcatgttggatgacgaggagtttgccctggccaaccaccttatcaaagtcaagctagaggggcatgagctgcccagtgagctacctgcccacctcctccctccatataagaggaaagtatcagaatgagagagccaggtaacctcagacagacagtatcaaaagagaggatagacatgtagaccacacacacacacacacacacacacacacacacacacacacacaacttgacagtcacactataaatgagaagggttcacctttgtctgagcacctctccaagttcccagggttggtagaagggcagctttccctcctctgtcttaggatataggcctgtgtccaaacattccctccatcttccattcccccacagacatgaggcagttaacacagatggcccacccactctacccccagtgcctccacatctaggctccgagcagatggaaaaggctttttcatggaatagaaaatttgctttattttctatgcttttattttttttccctctggggcttcctaagtagaaattgactcagggcctgggagctgtgagggaaaggagaagctgaaagaggaggaccaatctgagaaacctccatagggcactgcaccccacacttgaaaagacactggcctatgttctctgtgtttttctcaacccaagactctctgtcttcctcagtaaacatggaccttgaattctgcctgccactttgggtcaaagactcacaaacaggaaaagaaaaaagaaaaaatttggtaggaaagcaacaaggaagataaccctgtgtttttttttcaacaggacattggattggtggttcatgggtttgtcccccacccccagcgtggtatctctggatactcagtttctttatacataccaagccattcctgtgtggcaagagcagggttaggcactttctatgtattagtccctgtggccttcatgaatgccctaggcaagtttgnttccctcctgttactgcatttttcaggtgaagagccaaagactcagagtagtttagggtaccttcccaaactccgggaagtcccaagaagagaagattcaaatccagaacttgagacacccctctgtcccaattctgtgatggatgaaagatcccagtgttgctacgtggtgacaaagcacaggacagtctgaacacacagcccctcacacagccttccaaagcatccaggcaagggagggagggaggttcaccagcctttgatgggccaacaatctgaccatctgtcaccttgtagaagcaaactgtgccttctggcctgcgcctcgtgttcacaacatcacagaagaccagccaagccatcaggagagtgggctggactgctagatgttgtctgtgcctattcctgctcagcctcccgttcattagcctaaagcatcccagctcaaattcagccccaggcttttacaaagcaggacttcatgctaattcacagaaggccatcttgaaaggactgggaccttgttctctagagttccaaggactctggtgtccttggcaaaatttccatcattctcagtgccctctatctcctctgtggtctccccctggcttgccctatgcccactgttgcagtagctctctgctacactcctactgtgatggaaaacaaagcaagtataacttattttgtatctatgttcagactatatcgactgttctgtgtatcttcaatgtgcttataactgcagtgtgtttgtcattaggattcatgttaatacaacatatttaccctcgtgccg

SEQ ID NO: 20 - DNA, 1734 bp, Mus musculus
cccacgcgtccgcgctcctgatctccagaggaccccgggctgggacaggggccttggcgaggctgcagctgctgtggcagtagcttgggatggaggtctttcttgctgggaactgaggagctgagaggctcctgtcaggctcctgtcctaaactcttggcacttgcggtggcttgggcttcacacactgtcagacaccttcttggtggcctcctcggcctcaggtttgaagctggctccacaagggacacggtgacatgaggggcaacccactgatccatcttctggccatttccttcctctgcattctctcaatggtgtattcccagctgtgcccagcaccctgtgcctgtccttggacaccaccccagtgcccaccgggggtacccctggtgctggatggctgtggctgctgtcgagtgtgtgcacggaggctgggggagtcctgcgaccacctgcatgtctgcgaccccagccagggcctggtttgtcagcctggggcaggccccagtggccgtggtgctgtgtgcctcttcgaagaggatgacgggagctgtgaggtgaatggccgcaggtacctggatggggagacctttaaacccaattgcagggttttgtgccgctgtgatgacggtggtttcacctgcctgccgctgtgcagtgaggatgtgcggctgcccagctgggactgcccacgccccaggagaatacaggtgccaggaaggtgctgccccgagtgggtgtgtgaccaggcagtgatgcagccggcaatccagccctcctcagcccaaggacaccaactttctgcccttgtcactcctgcatctgccgatggcccctgtccaaactggagcacagcctggggcccctgctcaaccacctgtgggttgggcatagccacccgagtatccaaccagaaccgattctgccaactggagatccagcgtcgcctgtgtctgtccagaccctgcctggcatccaggagccacggctcatggaacagtgccttctagagccattgcggggatgtggatacagggcctgccattctcagcaaatgtccctaggaccaggccctggactgatggtagatgcccctctccatgctcttggctgcagttaactgtcctgggtggattcagtgtccagagcctctgagcgatccctgctctgtctgaggtgggggaagcaggtgaccagctccatttctctggattctgacccaggcttctgggttctcctggctagttcctcaaaacttccctgtatgaaaaggacaaccaaaaggacctttaaagctaagctgtactgggcaagcctggccaccatgctggggatagtgacagtaataggtaccaggcagcagattgcctgaaacatccaggtcccttcttggacttctatgtgcttgtcccaaagattatgggtgaccttgtaagtgtgcctttcctgatctgagaacaccctgcccggctgggaagaattttctgggaacatgaagagatggaatcacactattcttaagagcgtttgccaagtccaggaacttgacctttgtatttgtaaaaatacacatctcttaaatgctcacaaagcaagaggctccacacttctggcaggccagggcctttctcttcagcatgagagagacaaggaacagtagagtaccctcctctggaggactggcccggtctggaataaacacccaaatcaagtgtggaaaaaaaaaaaaaaa

SEQ ID NO: 21 - DNA, 265 bp, Mus musculus
cacgactgaaagaaattctccaacaccctagctgacaggatggcatctgaagtgatctatttaattgttgaagaaggggagacagttaagttggtggtcttttttatcccttctatgctccctgcagcagtaacatgtatgagtaccatgcaccaactgattgtgccattggagttcttttaacagtattcacaaccaagttaggggaacatttgtatccaataaaggggtgggagtgcggttttaggcattcatttgggagaac

SEQ ID NO: 22 - DNA, 1351 bp, Mus musculus
  misc_feature 7: n = A,T,C or G
cggtggngcggccgccatggacccgtggccatggctgacggcggcgctgctgctgctgttgctgcttgtgcagctgagccgcacagccaggttctacgccaaggtcggtctctactgcgtgctctgcctgtccttctccgccgcggcctcgatcgtctgcctgctgcgccacggcggccgcaccgtggataacatgagcatcatcagctggttcgttcggtccttcaagtacgtgtatggccttcgctttgaggtcagcggacagaagaaactggaggtggatggtccctgtgtcatcatctctaatcaccagagcatcctggacatgatgggtctcatggaaatactccctaagcgctgtgtgcagatcgccaagcgtgagctaatgttcacagggcctgtgggcctcatcatgtaccttgggggtgtctacttcatcaaccgccagcaagccagaactgccatgtctgtgatggccgacctgggcgacctcatggtcaaggagaatctcaaagtgtggatctacccagagggtacacgcaacgacaatggggacctgttgcccttttaaaaaaggagccttctacttggccatccaggcccaggtgcccatcatccccgtggtgtactcgtctttctcttccttctacaatgtcaagacgaagctcttcacctcaggaacaatcaaggtacaagtgctggatgctgtccctaccaatggtctgacagatgctgatgtcaccaagctggtggacacttgctaccagtccatgagggccacctttctacagatttctcagattccccaagagaactctgccattaaggagcctggggtcttgccagcccagtagcccaggctacaggggcaggggagctggggaaagagcagaggctgaaggatggacagaaggccacgccctcccacttaccaaccatcaccttatcctgctcccctgctggcctggctctctcgttggggcctggaaacaggaagccctttctagcacaggccttagatccaggaccctatgtaacttcccacctcaagcctgtgcctccagcatccagatgtggccatccagcaggtgggctggcccacaagaccacaaggcacctaggagtgcacaacacattacccaaggcccaccccatcgtgcaggacaaatgttcagaaaccaagcagtggcctgtatcaggccatcatgaagaggagaaacttggtctcccagtctcaaggaagcctggctcacacagcaccagaggcagagcctgccgcccgcaccgtccgacggcctcagtcacaaatcactgctgtgtttggttctttttctataaatgaactctcagg

SEQ ID NO: 23 - DNA, 766 bp, Mus musculus
tttcttcctgaatgtgcatcacgctttgtagcccccccacccccaaccttgacctgctcagtacactcagacttgcatctttagcagtttggttgtttttttgtttttttttttaaactttctttcacttcattggcacttaattgtttttccttataagactttttggaggtcatcaacaaagaccataaactgatatcctagtgtgcttcctctgtgtgtgcgtgtgcgtgtgtgtgtgtgtgtctaacattccaaatactttttttcttttccactgtttgtaaagggcaacaaattaatatttcaaaggttgttttaatagttccttacaacccgaccttaactacttctgtgcagtcccacacagtgccgacattagagagatgacattgctttgtcttgtcagccgccatccttcctgagctgtttgctgctgcattgccacttcttcccctgtttcgcttctcttaagcagtttcaatatctttcattatagtcacaatattgccacggtttattataataagggggttttaatttgatttagagcattcaaagtgtttttcatcactttgtgtttatactataatccttgagtgtatgttgtgtgtatgtgtgcatgggtggttatgcatgtgttcatagggtaatgccttcttgggactgtgttactgttctctcagtttattatgccatccaaatggtggacgagaacgctatgactgtagttagctcacaatttttaaataaaggataccacagt

SEQ ID NO: 24 - DNA, 2052 bp, Mus musculus
tggtgcgagtccgtggccagacccagcctgacctccatttcatccggggagctgcgcagtctgtggacgtgcgactgcgagctggccctgctgcccctgtcgcagctgctccgcctacagcctggtgccttccaactgcgcggtgagcagctcctggtgcccgggcccggggaacccgcggccgcacgtgggggcttcaacgtcttcggggacggccttgtgcgcctagaagggcagctctatcgcctcagcagctacatcaagagatatgtggaactgaccaactactgtgattataaagactacagggaaacgatactgagcaaacctatggtattctttattaacgtgcagaccaagaaggacatttcaaaagaaaggacctatgcgtttcttgtgaacacaaggcaccccaagataagaagacagatagagcaagggatggacatggtcatttcctcagtgattggagaaagctatagacttcagtttgatttccaggaagtagtgaagaatttcttccctccaggaacgattgtgctgaatggagagaatttgagcttcacctacgaattcaaggcagatgccctgtttgatttcttctactggtttgggctcagcaattccaccgtaaaagtgcacggaaaggttctgaacttgacaagtacgaacccagaaaagaaagaaacaatcaagttatttctggaaaaaatgagtgaacctctaatacgaaggagtagtttctctgatcggaaatttagcgtcacatctagaggttcaatagatgacgttttcaactgcaatctgtcacccagatcatcggttacagaaccacttttggcagaattctcatttccaagtcttctggaatgtgaagagacatccagccaacttatctgattggtctgaacattcaagctgtcgccctttgggggtctgtggcacacagtgggttaaaggggtaaaagaaggcagggagtggacatttctatccctttgccagcctctggccctccaaggttctatagaggaccccctttcccatccctaggcactggcaggcccagtggcttccgtcaaggttatgattatgggatggaaggattttgtctctgtggcatagggtgtcattgacattgaacacttctctgaggaattttcaggggtaaccaagcacccatgaactttgcttagtaccctggcactctgaagaccctcctggcaacctctgtgggaggcatctgactgggatgctaacctgtgatgtatcctggatcacagaatggccctctgcagccagcagccccagcaagccttggggctaaactcttctcttgcaaatatgtcaggtaaagccagtactgatatttccctgggaaacaaatctgatgtccaacctgccactggaatgaacattcaagatactggctgctgaaggatctctgcaggccaccaggatgagccctccctgaaatgtaaagccaggtggggtgccaatcaaccagtgacaagggagggtcctcctccctacaggtacaccgtagtagttggtgtttgaaatacactttaacaatcttaatatgagaaaaagagcccagggaaactaagccattaccatggtacactggacatcagggcgctttctgccccacagctccagtgggattcactgaaaggggaaaaaaatgatccaatccacatataaaagtttgcgtgagtggccgggcctggtgcctgtaattctagcactcgggaggtggaggaagtagaatgaggagttcaagaccacccttggctacatcaggagttcaaggccaacttgctctgttactacaggagactgtataataaaaacaaacctgcatcattgcacatgtaaatttgcacctatactcataagaaggcagatttatgggcccctagtggcatcttttctgtccttctaaaaacatattcccacactacatattttgatagcaaggttgatggccagccatttgtatctgagatgctacctagtacatatgcacaattaaaagttttcttagcgtt

SEQ ID NO: 25 - DNA, 2137 bp, Mus musculus
gagagttagagctgagtaagacaaagcacgtcccccgcaggcgccatggagctgctgtcccgcgtcctgctgtggaaactgctgcttcttcagagctctgcagtcctgtcctcagggccttcagggaccgcagcagccagcagctctctggtgtctgagtctgtggtgagcttggcagccggaacccaggctgtgctacgctgccagagcccccgcatggtgtggacccaagaccggctgcatgatcgccagcgcgtggtccactgggacctcagcgggggcccgggcagccaacggcgccgacttgtggatatgtattcggcgggtgaacagcgcgtgtacgagccgcgcgatcgcgaccgcctcctgctgtcgccttctgctttccacgacggcaacttctcgctgctcattcgcgctgtggacagaggcgatgaaggggtgtacacctgcaacctgcaccatcactactgccacctcgatgagagcctggctgtgcgcctcgaggttacagaggatcccctattaagtcgcgcatactgggacggtgagaaggaagtgttggtggtggcccatggcgcgccggcactgatgacctgcatcaaccgtgcgcacgtgtggactgaccgccatttagaggaggcgcagcaggtggtccattgggaccgacagctacctggggtgtcacacgaccgcgccgaccgcctgcttgacctgtatgcatctggcgagcgccgcgcctatgggccacccttcctgcgtgatcgcgtgtcagtgaacaccaacgcttttgcacgcggtgacttctccctacgcatcgatgagctggagcgagctgatgagggcatctattcctgccacctgcaccatcactactgtggcctccacgagcgccgagtcttccacctacaggtcacagagcctgcctttgagccaccagctcgtgcttctcctggcaatgggtctggtcacagcagtgctcctagcccagatcccaccctgacccgaggccacagcatcatcaatgttattgtcccagaggaccacacacatttcttccagcaactgggctatgtgttggccacgctgctgctcttcatcttgctgctcatcactgtagtcctggctacacgatatcgtcacagcggaggatgcaagacgtcggacaaaaaagctgggaagtcaaaggggaaggatgtgaacatggtggagtttgctgtagccacaagggatcaggctccatataggactgaggacatccagctagattacaaaaacaacatcctgaaggagagggctgagctggcccatagtcctctgcctgccaaggatgtggatctggataaagagttcaggaaggagtactgcaaataaatggaccctgagcttctggctgggccagcagctctgtatcaaaggacatctccctgaccctcctgcggtattcctggctcttctcagcggctggtccgacttacctagaaacttggcagagcagctgcctgtactttgcccttcctagaatcgccacccctcatcttggtgagcaactgtgggttccctagagactctggtatagtacgattgctgcccttcacctgtgcccactgatggttgtacccccaacttaaacacaacaaagatcccttgttaatatccaccaaatgcaaagtccctcgtggcctcttactgctagggtcaggaagacacttaaaaattccagttaagactccctagccaccagttaaacacattagccattgtcctggggggtcttcctgagctgcattgtgcctgtgtactgttcagagccctgctgttataggttctgactcatgggcccgccttgctgctttgggcaacttgaggctagcccagggccctttctctgcttctgattcctttctgccgaatgcctcccaagagctacaccagcagttactgggtaccgtatgactcttggccttgacatccctccctaggctggagtctggggttggggccccatttgtcctctgttttggctgaagatggggcgaagatttggctgagtggcctatgctgtcacatcaaacagctatcatttactcctacttgggaagttttcatgtgacaataaaagatacatctgattttt

SEQ ID NO: 26 - DNA, 1473 bp, Mus musculus
ctggggatcatcccctatgctggcatcgacctagctgtctatgagacattgaaaaatacctggctccagcgctacgcagtaaacagtgcagaccccggtgtgttcgtgctcctggcctgtggtactatctccagtacttgtggccagctggccagctacccactagccctggtcaggacccggatgcaggcacaagcctccattgagggcgcacctgaggtaaccatgagcagcctcttcaaacagattctgcggactgagggggcctttgggctctaccgggggctggcccccaacttcatgaaggtgatcccggctgtgagcatcagctacgtggtctacgaaaacctgaagatcaccctgggcgtgcagtctcggtgacgggagggtggtggacttggtgagcctgggctgcggcccagggtatgcagccacctcattctgtgaatgtgccaacactaagctgacttacccaagctgtgaaacccaggataccataggggacgggcagggagctggcaagctctgggctggttctgctgacctggcagaccttcgtgtctcttccaaggaagacctgtggatgttccttggggttcaggggtcagtaagatgtaggctcctgcactagagacaggacgttttcctcagtgcctgccagatagcgagcttggatgccagcttagttcttccatctcgttcactcagccggacctcagccacggcatccctctggtccaaagagcattcctgtgcccctcatatctttccactgatgcgctgtggtagaaagtgggcctgcccccactctttcttgtccttctgtccatctttcctcagtgctgctcttccaaacctgtttcccaagctgcagcatccatgcggacctgtggtacgggaagctgaagaagtaccattatgtcctcgcctattctgagcccaccagcaaggccacctggctgtgcccaggtacaggcactggctgcctgacagcgtggtgcatggctttgctgaaagctagtgctaggacctggaacccagaggacttgtgctgcctgcatgggcctaacgtcctctgagctgcccctaagccctgtcaggactggcaccaactcatgcccacactcattgttcagttctgtgtgtgagggtaggcagggtacctgccccatgtcagccgccctgatgagaagaaaacgatgctgaaggccttaattatgtcttagtgggtaaaggatttggttcagaaggacaagctggacactgcaagtgccacactcgctgtgagcccggggcaggtagtttccctgctctcaaatctgttctgagagccctgtggggccaagcgggaccagcctcacattccacgtgtgtaccactctgcttggagcctatttattttgtatttatttgaacagagttatgtcctaactatttttatagatttgtttaattaataaaaaaaaaaaaaaa

SEQ ID NO: 27 - DNA, 1586 bp, Mus musculus
gaacccctgtctggtcagtcttcattgtttccgatggaagatggattcctggatgatggccgtggggatcaacctcttcatagtggtctggggtcacctcactgcttcactcaccagaatggggagagagtggaacgatactctcgcaaagtgtttgtgggtggattgcctcctgatattgatgaagatgagatcacagctagtttccgtcgctttggccctttgattgtggattggcctcataaggcagagagcaaatcttattttccaccaaaaggctatgcattcctgctgtttcaagatgaaagttctgttcaggctctcattgatgcatgtattgaagaagatggaaaactttacctgtgtgtatcaagtccaaccatcaaggataaaccagtgcagatccggccctggaatctcagtgacagtgactttgtgatggatggctcacagccacttgacccacggaaaacaatatttgttggtggtgttcctcgaccattacgagctgtggagcttgcaatgataatggatcggctgtatggaggcgtctgctatgctggaatcgatactgacccagagctcaaatacccaaaaggagctagaagagtcgcgttttctaatcaacagagttacatagctgctatcagtgcccgctttgttcagctgcagcatggagagatagataaacgggtggaggttaagccatatgtcttggatgaccagctgtgtgatgaatgtcaaggggcccgttgtggggggaaatttgctccatttttctgtgctaatgttacctgtctgcagtattactgtgaatattgctgggctgctattcactctcgtgctggcagagaattccacaagcccctggtgaaggaaggtggtgaccgccctcggcatatttcattccgctggaactgaagaatgaatgactccagagctcatttgcaggcctcagaagaagtgccctcttttgttaattccaactcttcctcagcctcttcacactggcatgtcctgcacagcagtgtgtaactatcagtggtagaatgaaaagaacaacctacaacataggtattttgtagactctcgtgtcactgcaaacagtatgttcaactccatttcacattgccattatgttgcatgcaggttttaattctcttgttttgctggaggccaagaggatctaaacttgctgtagcattttcttagaggagagaaatattaacagagaaatgagacaatattttgaggttttaattgctggtaatgatataacatataagaaaactttattgagataatcaccaacagtaacactatcatctgttctgacacagtctcccccaggaaagtgctcttgccagttcttttctttcattccttctctctctcttttctatccctttttattctttaacagcaatggaggaagttaacagttattaacaggaaagagtatgtcagagcaagcaaatgcatgagcaagattgagcagtgtaaccataagagctttgaggctgatgatagcttgatcatgcctcaaatgccttcatacaacagaaaaaataaagtaggcagagctg

SEQ ID NO: 28 - DNA, 3439 bp, Mus musculus
aatgaagacaggctgtgcagcagggtctccggggaatgaatggattttcttcagctctgatgaaagaaacacacgctctaggaaaacaatgtccaacagggcactgcaaagatctgccgtgctgtctgcgtttgttctgctgcgagctgttaccggcttctccggagacgggaaagcaatatgggataaaaaacagtacgtgagtccggtaaacccaagtcagctgttcctctatgacactttccctaaaaacttttcctggggcgttgggaccggagcatttcaagtggaagggagttggaagacagatggaagaggaccctcgatctgggatcggtacgtctactcacacctgagaggtgtcaacggcacagacagatccactgacagttacatctttctggaaaaagacttgttggctctggattttttaggagtttctttttatcagttctcaatctcctggccacggttgtttcccaatggaacagtagcagcagtgaatgcgcaaggtctccggtactaccgtgcacttctggactcgctggtacttaggaatatcgagcccattgttaccttgtaccattgggatttgcctctgacgctccaggaagaatatgggggctggaaaaatgcaactatgatagatctcttcaacgactatgccacatactgcttccagacctttggagaccgtgtcaaatattggattacaattcacaacccttaccttgttgcttggcatgggtttggcacaggtatgcatgcaccaggagagaagggaaatttaacagctgtctacactgtgggacacaacctgatcaaggcacattcgaaagtgtggcataactacgacaaaaacttccgccctcatcagaagggttggctctccatcaccttggggtcccattggatagagccaaacagaacagacaacatggaggacgtgatcaactgccagcactccatgtcctctgtgcttggatggttcgccaaccccatccacggggacggcgactaccctgagttcatgaagacgggcgccatgatccccgagttctctgaggcagagaaggaggaggtgaggggcacggctgatttctttgccttttccttcgggcccaacaacttcaggccctcaaacaccgtggtgaaaatgggacaaaatgtatcactcaacttaaggcaggtgctgaactggattaaactggaatacgatgaccctcaaatcttgatttcggagaacggctggttcacagatagctatataaagacagaggacaccacggccatctacatgatgaagaatttcctaaaccaggttcttcaagcaataaaatttgatgaaatccgcgtgtttggttatacggcctggactcttctggatggctttgagtggcaggatgcctatacgacccgacgagggctgttttatgtggactttaacagtgagcagaaagagaggaaacccaagtcctcggctcattactacaagcagatcatacaagacaacggcttccctttgaaagagtccacgccagacatgaagggtcggttcccctgtgatttctcttggggagtcactgagtctgttcttaagcccgagtttacggtctcctccccgcagtttaccgatcctcacctgtatgtgtggaatgtcactggcaacagattgctctaccgagtggaaggggtaaggctgaaaacaagaccatcccagtgcacagattatgtgagcatcaaaaaacgagttgaaatgttggcaaaaatgaaagtcacccactaccagtttgctctggactggacctctatccttcccactggcaatctgtccaaagttaacagacaagtgttaaggtactataggtgtgtggtgagcgaaggactgaagctgggcgtcttccccatggtgacgttgtaccacccaacccactcccatctcggcctccccctgccacttctgagcagtggggggtggctaaacatgaacacagccaaggccttccaggactacgctgagctgtgcttccgggagttgggggacttggtgaagctctggatcaccatcaatgagcctaacaggctgagtgacatgtacaaccgcacgagtaatgacacctaccgtgcagcccacaacctgatgatcgcccatgcccaggtctggcacctctatgataggcagtataggccggtccagcatggggctgtgtcgctgtccttacattgcgactgggcagaacctgccaacccctttgtggattcacactggaaggcagccgagcgcttcctccagtttgagatcgcctggtttgcagatccgctcttcaagactggcgactatccatcggttatgaaggaatacatcgcctccaagaaccagcgagggctgtctagctcagtcctgccgcgcttcaccgcgaaggagagcaggctggtgaagggtaccgtcgacttctacgcactgaaccacttcactacgaggttcgtgatacacaagcagctgaacaccaaccgctcagttgcagacagggacgtccagttcctgcaggacatcacccgcctaagctcgcccagccgcctggctgtaacaccctggggagtgcgcaagctccttgcgtggatccggaggaactacagagacagggatatctacatcacagccaatggcatcgatgacctggctctagaggatgatcagatccgaaagtactacttggagaagtatgtccaggaggctctgaaagcatatctcattgacaaggtcaaaatcaaaggctactatgcattcaaactgactgaagagaaatctaagcctagatttggatttttcacctctgacttcagagctaagtcctctgtccagttttacagcaagctgatcagcagcagtggcctccccgctgagaacagaagtcctgcgtgtggtcagcctgcggaagacacagactgcaccatttgctcatttctcgtggagaagaaaccactcatcttcttcggttgctgcttcatctccactctggctgtactgctatccatcaccgtttttcatcatcaaaagagaagaaaattccagaaagcaaggaacttacaaaatataccattgaagaaaggccacagcagagttttcagctaaactgccatttctgtcatagtttcaagattcactccggctccatgtactggtaacttacgatgtgagagacagctgtaaccaaggtgaagacaatcgatgcctctgaagtgtggttcaaataattccttcaggtcccgacaatcagtgagtccgttctccgagctgaagacaccctgacagtaactctgggcgtgaccctaaacatcgcttcaggaagtgtgaatcacgacttcacatcctttttctctagcattcttctgtaaataacaatcactattcatggtcaagaaattaattttaaaaagt

SEQ ID NO: 29 - DNA, 1269 bp, Mus musculus
atgcttcagtggagaagacgacactgctgctttgcaaaaatgacctggagccctaagaggtctctgctccggactccccttacgggtgtgctttctctagtgtttctctttgctatgttcttgtttttcaatcatcatgactggttaccaggtagaccaggattcaaagaaaatcctgtgacatacactttccgaggatttcgttctacaaaaagtgagacaaaccatagctcccttcggaccatctggaaagaagtagctcctcagactctgaggcctcacatagcaagcaactccagtaacaccgagctatcaccacagggagtcacagggctgcagaacactctcagtgccaatggcagcatttataatgaaaaaggaactggacatccaaactcttaccatttcaaatatattatcaatgagcctgaaaaatgccaagagaaaagtccatttttaatactattaatagctgcagaacctggacaaatcgaagcaagaagagctatacggcaaacttggggcaatgaaactttggcacctggcatccaaatcatacgggtttttttgttgggcataagtattaagctaaatggctatcttcaacatgcaattcaagaagaaagcagacagtatcatgatataattcagcaggaatatttagatacatactataatctgaccattaaaacactaatgggtatgaactgggttgcaacatactgtccacatactccctatgttatgaaaacggacagtgacatgtttgtcaacacagaatacttaatacacaagttactaaagccagacctgcctcctagacataactattttactggctatctaatgagaggatatgcaccgaacagaaacaaagacagtaagtggtacatgccaccagacctttacccaagtgagcgctaccctgtcttctgctcaggaactggttatgtgttttctggggatctggcagagaagatatttaaggtttctttaggtatccgtcgtttgcacttggaagatgtatatgtagggatctgtcttgccaagttgagagttgatcctgtgccccctcccaatgagttcgtgttcaatcactggcgagtttcttattcaagctgtaaatacagccacctaattacctctcatcagttccagcctagtgaactgataaaatactggaaccatttacaacaaaataagcacaacgcctgtgccaatgcagcaaaggaaaaggcaggcaggtatcgacaccgcaaactacactag

SEQ ID NO: 30 - DNA, 2848 bp, Mus musculus
ggtggattgcagtgacagccgcctgtggagcagcccgggcagcggaggagaattctgcatagagaaccaccaacccagaaccatggaagtccatgaattgttccggtattttcgaatgccagagctgattgacattcggcagtacgtgcgcacccttccaaccaacaccctcatggggtttggggcttttgcagcgctcaccaccttctggtatgccaccaggcctaaggccctgaagccaccatgtgacctctccatgcagtcagtggaaatagcgggtaccactgatggtattcgaagatcagcagtccttgaagatgacaagctcttggtgtactactacgacgatgtcagaaccatgtacgatggcttccagagggggattcaggtgtcaaataatggtccttgtttaggttctcggaagccaaaccagccctatgagtggatttcctacaaagaggtggcagaactggctgagtgcataggctccgggctgatccagaaggggttcaagccttgctccgagcagttcatcggcctcttctctcaaaacagacccgagtgggtgatcgtcgagcaaggatgcttctcttactcaatggtggtcgtcccgctctatgacacccttggagctgacgccatcacctacatagtgaacaaagctgaactctctgtgatttttgctgacaagccagaaaaagccaaactcttattagaaggtgtagaaaacaagttaacaccatgccttaaaatcatagtcatcatggactcctacggcagtgatctggtggaacgaggcaagaagtgtggggtggaaatcatcagcctcaaagctctggaggaccttggaagagtgaacagagtgaagcccaagcctccagaacccgaagatcttgcgataatttgtttcacaagtggaactacaggcaaccccaaaggagcaatgatcactcaccaaaacattataaacgactgctcaggttttataaaagcaacagagagtgcattcatcgcttccacagatgatgtgctgatatctttcttgcctctcgcccatatgtttgagaccgttgtagagtgtgtaatgctgtgtcatggagctaagataggatttttccaaggagatatcaggctgcttatggacgacctcaaggtgcttcagcccaccatcttccctgtggttcccaggctgctgaaccggatgttcgacagaatttttggacaagcaaacacttccttgaagcgatggctgttggactttgcctccaaaaggaaagaggcggagcttcgcagtggcatcgtcagaaacaacagcctgtgggataaactcatcttccacaagatacagtcgagcctgggtgggaaagtccggctgatgatcacaggagcagccccggtgtctgccacagtgctgacgtttctgaggacagcgctcggctgccagttctatgaaggctacggacagaccgagtgcactgctggttgctgcctgagcttgcccggagactggacggcaggccatgttggagcccccatgccttgcaattatgtaaagcttgtggatgtggaagaaatgaattacctggcatccaagggcgagggtgaggtgtgtgtgaaaggggcaaatgtgttcaaaggctacttgaaagacccagcaagaacagctgaagccctggataaagatggctggttacacacgggggacattggaaaatggctgccaaatggcaccttgaagattatcgacaggaaaaagcacatatttaaactagcccaaggagagtacatagcaccagaaaagattgaaaatatctacctgcggagtgaagccgtggcccaggtgtttgtccacggagaaagcttgcaggcctttctcatagcagttgtggtacccgacgttgagagcctaccgtcctgggcacagaagagaggcttacaagggtccttcgaagaactgtgcaggaacaaggatatcaataaagctatcctggacgacttgttgaaacttgggaaggaagccggtctgaagccatttgaacaggtcaaaggcattgctgtgcacccggaattattttctattgacaacggccttctgactccaacactgaaggcgaagaggccagagctacggaactatttcaggtcgcagatagatgaactgtacgccaccatcaagatctaacgtgaggaaggatacttagaagaaatggcgcatctccacaatcctcctcgtaccaatggccttcgagttggtaactttgcctgcagcgagtgtgggaaaggaaatgccctgccgccggacttgtccacggggtcttaccatagggatagtcgagggcacggaacactgccttacttacagtcacctgtgttgcagcccatgatcccggggacacacaatttccaaaacgagccttaaacattgtaaaggggaacccataaaagtgctaagttatttaagacttcttcaaccaataaggtggatgctacaagttctgtctcctgtttttctaactgaggggttaggacttattctttctgatatgtctgctgcttgctgcgcgttttgcagctgtctgctgctctgaagagcaccgtacactggaggaaagctgtccctttaagaacaactgtccaggctgaagaaagtcacagtggaccagaggttttccttttgaacccctcctcccccttgcccctttccctcaccacctcacatacagtacactcacatgacctttctggtttgtaagggttccacacggtccctgtttgcgcctgctggaacatgaggttttcagtaaactaaagagcagaccctcttcagaacatgtgggtgtccagtctc

SEQ ID NO: 31 - DNA, 3031 bp, Mus musculus
gaatgtggacttctacaagaaatcagaaacagtaaagaacagccttgctgcctgcaggggtgactgaggccctgaagtccagagctttgctgagtcgtcacttgggagagtaaatctccaatggtctgcccgtgcagtgagcattgtaacctgtatcactgtaaatcttatttgcacccaaacaagtacagttaacaaaagttaaagccagccaggaagtggtggcccacgcctttaatcccagcactcaggaggcagaggcagacagatctctttgggccagtttggtctacaaagattgttctaggacagccagggctgcacagagaaactctgtctcaaaacaaacaaacaaagaggctgatggatcaatcaattgaaagctgagcccagcaggtgagggaaaactcccgtctttgtcatggcgcgtgtccactcctcaaggccatggagattcggaccgaagggttccagagatcgcgtggtgaggccgtgtggagtttgccatgcaggggagctcccagcaccaagcatctgccagcaaagagcccaacttgaaccttggaaaactgtgtcctctcttcccaagtgttccactgagccactgacttctccaggagtcattcagattctaatcgtaacccttgaagcagccatttctttctgtgctgtggaagctgaacttgctaaagcagctaggattggtcccctggtggtcttggccagttcttggacaacgaggctatagccaggtccttaggcagagtcttgagccagtacaggtccatgcttcccagcggggatggatttcttttcggacatacctcgtagaaactggtttgtctggagctccatcacttgtgctatactgcctgggcagagggaaagaccacaggggaggcggtggctgtgccgggcagggagacctcacagctattgtgctccatggaacagcccaggccctgccatcctgcatggatgttttgtttagtcaaggctggctgaccccaaagcggggaattattattgtaacatgtgtttggtggaagggcgatgttgggagacggtgggaggggagaggcgtcttattgctgtctgggtgggttggagctggtaggagcttctaccactctcctccgctctatctccttgtcccgggatccatgctgttcctctaagagaagcaatgaaaggtcaacctcgggctgctgaaaacacgcccccttgaggttatccgacggcctaagctgtatcctatgggatgggaaaggtgtgctgttgtcggtgggatcatctgaaggctgacccttcaagcgccagggtagctagctgtgcagctagctcagagttaaaacgagctcgggagaagacataggaagccattgtcttgctggattttctggcccattaagaagtctggactgtaaccttgaagacaggatgtgacccccacataagttcctcaccttgatgacccacatgaatccatcacagtgctctccagcgctcatctctcactgggactgagaatgaaagagttggtctttgaatgtgttctcaccatagccacataggaagaatgtcgcatctgtttgccacctctctggcaggtcccctgaatctgtaggtcagagggcaggaatccacttgccaatgcatgttaagtaccaggctttgtgcgtctacacgcggagaatgccaggctgccccacaaggtaccctgctggttgtaaaagatggaatttgctgttgaagtcacagtttgcaatcttgatgttcacgccagcctctgagggtttgtctgccttgaaggctgtcaggacagtgcacttctggtggcacattagacactactgttggaatttgcttcaggcctctgttttctctcccactgccacgaggcaccgggtacccaaatacctctcttccactagcaggtttcataacaaggctgatttcccagtgtcgatcatttggatcactcttgttgggattgttggggtcttcatgcatccttagctcacaggatgttctctggatggtagaggcgtgctttgcattgaggatgcaatgggtggacattgagaatgctgggttatcttggctgaggatcttcagcagctgcccgtgtggggtctctctttctctcaagcagatatggctgaggggccctgcagcttgtccagacctgccggtgggcctcagagtcaagggcacagggtggggcggggaggtggggagagtgagcttaagtttgagaaaggtgtgcacttgtttcaagtcacctcaggtgagagccgaaggttcacctggtgaagttatctttatagtagaaataaacgcactgctggaccaaaaaaaaatttttttaaataattttcaaaggaaaaagtgattaaaagaaaagaagtgaaaagtataaaagattaaaactagggagagctaagaggagcaacaaaccagacccagccaggactcccaggggattgtaaaatgtttgcgattgtaaaacgacagtttcatataaagtcacttgcatggcaaggctggggtagtcagtaatagaattctcaactggcccctttgcttaaaggaaactatacaaggtcccaaagggcttttgtttttatgtgggtcctgattaccaatacttaccttattagaaatgacaacctataagattcttcaatggccttctcatctctagtttgcacagggctcgcagtgtttggctttttttccagagctttatcagagcaacttcgcttaagactctaaactcgggtttcagagtgatgccgccatttaacgggcattgggacaaaacgccagagtaagccgtcactttagtgtcagcctaagcacggagagggtggtctcagcctgctcagttgctctggagtagattcttgcttctggagaactctagaacctcctgagtcagtctcagcatcttcaattaaagctaagtgcaaaggatggaaatcttgttccctcagccgcccaggaggctacaagaccttgtgtcatt

SEQ ID NO: 32 - DNA, 1530 bp, Mus musculus
  misc_feature 1523: n = A,T,C or G
ccgcgcgagccagaggaaggcagagggaccgcggagcaaacagcacgccccgggcagagccagccagccagccagccagccagcgagcgccgggggagcccgcggggagggagccgccgattgaacaccctgcaagatgaaccccctgctgtcccgggccaacccgctgttcgcccccacgctgagcgtcatggcggcgctcaccccgggctgcatcctcaccaccgccttcaaagacaggagcgcgcccgtgcgcatgcacgtctccaggatcctgctcaaaaaagtggaagacttcaccggacccagaaagaagagcgacctgggcttcatcaccttccacatctctgcggatctggagaagactttcgactggaacgtcaagcagctcttcctttatctgtcggcagaatattccaccaaaagcaacgctgtgaaccaggtggtcctctgggacaagatccttctgcgaggcgagaaccccaagctgaacctgaaagacgtcaaaagcaagtattttttctttgacgatggacacgggctcaagggaaacaggaatgtcactttgactctctcctggcaagtgataccgattgctgggatcctgcctcttgtgactggatctggacgcgtgtctgtcccgtttccagattcctatgaaatagccacgactttttgaagaattctctctgcattggaaacggggacatctgtggactcaagaaatcccatctccttaacaattacctcaagcctggctgacttctcttttggtttgtttattttaaaacatgcctggttttgtctgggactggctgcactcatcctcatgcttccctgagcctacatagagactatattcattgatcttagtgtgtgtgtgtgacattgggtatcactcttcctctggtataagaattaacatcaaattttatagttggagggaaaggctaatagagttctggaactttctttattctaccaatgaaacaacaaagaagttcaccagagtaggttattattagacagttggataatgaggattgaaaataatacacagttttgtcatattcactacattatcccatgtgatatataaaatttggggagaattttaaaattagatgttttggtattgtcacaataactgtattttattcctgagattccttgtaggtccacattgaatgccgttttcttatatcttctagggtgtgtttgattactagaaaaattgtgatttgtttcgtaagagtctgacatgcaaaatagttaaacacgagtcagaaatcttactgctttccttccttgccagcaaatgtgaccatttaaatagtgaacgtatcttgaggctgtaaatgattctgcctctctttaagtgtgtgtcttacagtggtttctcaacaaagattgctgtgcagtgtatctttgtcttagcactgttgctgaagtttgaaaatgtttgcatgtttaacatgagatcgtatgttctagtatgtttaatgccattaaataaatgaagnatgaatg

SEQ ID NO: 33 - DNA, 2207 bp, Mus musculus
ctctagatgaatacactctcatgagggccaccttctctggtagttcaggtcgcctctgcccatccttccctgcgtcctctcccaaagtggcctacaacccttacccagaggactatggagacattgagattggttctcacaagagttccagcagtaacctgggggcagatgatggctacatgcccatgacccctggggcagcccttaggagtggtggtcccaatagctgcaagagcgatgactacatgcccatgagccccacaagcgtgtctgctcccaagcagatcctgcagccacgcttggcagcggccttgcccccttccggagcagccgtgccagcacccccttcaggggtgggcaggaccttcccagtaaacggaggtggctacaaagccagctccccagcggagagctccccagaagacagtgggtacatgcgaatgtggtgtggctccaagctgtctatggagaacccagaccctaagctactccccaacggggactacctcaacatgtcccccagcgaggcaggcactgcagggaccccacctgacttctcagcagctttgcgtggaggcagtgaaggcctcaaaggcatcccgggccactgctacagctctttgccccgctcttataaggctccctgttcctgcagcggagacaatgaccagtatgtgctcatgagctcccctgtgggccggatcttggaagaggagagactggagccccaggccaccccaggggctggcacctttggggcagctggtggtagtcatacccagcctcatcactcagcagtgccttcctccatgaggccgagtgccatcggtggccgccctgagggcttcctgggccagcgatgtcgggcagtgcggcctacacgcctatcgctagagggactgcagacccttcccagcatgcaagagtaccctctacccacagagcccaagagccctggcgagtacatcaacattgactttggtgaggcaggtacccgtctgtctccgcctgcccccccactactggcatccgcggcctcatcttcttcactgctctcagctagtagtcctgcttcatccctgggttcaggaaccccaggcaccagcagcgacagccggcagcgctctccactctctgactatatgaacctggacttcagttctcccaagtcccccaagcctagcacccgcagtggggacacagtaggctccatggatggccttctctctccagaggcttcatccccatacccaccactgcccccacgtccttccacttccccttcctccttacagcagcctctgccacctgccccgggagacctataccgcctgcctccagcatcagctgccacttcccagggtcccactgctggctcctcaatgtcctccgagcctggggataatggtgactataccgagatggcctttggtgtggctgcaaccccgccacaacctatcgtggcacctccaaagccagaaggtgcccgagtggccagtcccacatcgggcttgaagcggctaagtctcatggatcaggtatctggggtggaggctttccttcaagtcagccagccccctgacccccaccggggtgctaaggtcatccgtgcagacccacaggggggacgtcgtcgccacagttcagagaccttttcctctaccaccaccgtcaccccagtgtccccatcctttgcccacaattccaagcgccacaattcggcctctgtggaaaatgtctcactcaggaaaagcagtgaaggcagcagtaccctgggaggaggtgatgagccgcccacatccccaggacaggcacagcccttggtggctgtgcccccagtgccacaggctaggccgtggaaccccggtcagcccggagctttgattggctgtcctggaggcagcagttctcccatgcgcagagagacctccgtgggtttccagaacggcctcaactatatcgccatcgatgtgagaggcgagcaggggtccttggcgcagtctcagccgcagccaggagacaagaactcctggagccggacccgtagccttggggggctcctcggcaccgtcggaggctctggcgccagcggagtgtgtgggggtccaggcactggagctttgccctctgccagcacctatgcaagcatcgacttcctgtcccatcacttgaaggaagccacagtcgtgaaaggtgaggccctttga

SEQ ID NO: 34 - DNA, 1111 bp, Mus musculus
gctgaccagtgctaccctcagctgggtctaggcctccgtctaccagtccttagaccacggactggtcttggcctattctcatctaagtagacattcagatgtggccagcagctgcatccagggcatgagagaagcaggctgagtgccaggcaccgtgcaggtcacttccgtcctctgggcagcgtttctcctgggacttcatttctaccagtagcagccctggtagtgtctggcagttctagccatctcgtcttcagagctctgaaggtgggattcggcaggctgaggggcatgtcagcaggactgaggccccacagaagccaggatctaccaggttgctccagaagctggagcgtgatgagctggaactagctagcgttactctggggaagctctacctaaaggctccaggcagccttgcttaccgtatgtgaggtcagggtaccgggtgctggggattgcttgtggcccactcacctcgtggggcggtggcccgcaaccctggcttaccctgaggctctaatgccccctggtgcaggagaaagctccgggactaggctctgtaggccctacacactgaggagtcctgcaccttgctttgggacaatgccaacagtatacatccctctctggtcccatgccagctgatagtgtaaagaggacttcacacaggctcccgggtggctgctttctctcccagctgtttccagtttcactggtgtaaacctgtactgcgggcagggcccccactgaaggctgagtgaagggcaaaaggtgaaggcctcttgaacagccccagctgatgcccattttgcagcagttattttttgattaattttggcagcctatggccattgttatgacgacgacttgaagaacctgactaagtataacctgactaagtgttccctccaaaggggcatgtatctttccatggggcaggccctgccctgtcatgccagccagcgtgcaccttgacactggtgccgtgggcaacacagacattcaagcctactcaatatgacaattcctcagaaatgaggacacttagctgacacacaaagcacctttttatacagatcaatgttttctcattaaactgactctattc

SEQ ID NO: 35 - DNA, 1250 bp, Mus musculus
cccacgcgtccggcgggagcatgaagttgattgaccatgatctctccgtcctttaggaaaggtatgctgaaggagagggtcatggacttggcctcccagacgaccatcctgcccctgctgtttggctgcctggggattttcagcctcttcaggctgctgcagaggatccgctcaaaggcttacctgaggaatgctgtggtggtagtcacgggcgccacctcaggtctcggcagagaatgtgccaaagtcttccatgctgcgggggctaaactggtcctctgtggacgaaatgtgaaggccctggaggagctcagccgggaacttgctggttcttctcagggacagacacaccaacccttcgtggtgacctttgacctcgcggatcctggtactattgctgctgcagcagctgagatcctccagtgctttggctatgtggacgttctcatcaataatgctgggattagctaccgtggtaccattagtgataccatagtggacgtggaccggaaggtgatggaaataaactactttggccctgttgctctaacaaaagcgctcctaccctccatggtggaaaggaagcaaggccacatcgtcgccatcagcagcatccagggcaagatcagcattcctttccgatcggcatattcagcctccaagcatgcaacccaggcattctttgactgtctgcgtgcagagatggaagaggctaacatcaaggtgactgtgataagccctggctacatccataccaacctctctgtaaatgctgtcactgccgatggctccagatatggagctctagacaagaacacagcccagggccgaagcgctgcagaggtggcccaggatgtctttgatgctgtggggaagaagaaaaaagatgttctcctgacagactttgtgccatccatggctgtctacatcagaactctggctcccgggctcttcttcagaatcatggcctctcgggccagaaaagagcggaaatccaagagctcctgatgctggtagggctgctggcttgggcagcctgatcagaccgactaccacaccttcctgggtggggattgcagtgcacgggatccgccgctaagacctggtggagggctaccttgtatttgtttcccagggagtgattagctcttaaggagtgaaatatggagttgtacaggaacactaaacgatgtaaaataaatgactgaagagtgggtcagagttcacagtaaaaaaaaaaaaaaaaaaaa

SEQ ID NO: 36 - DNA, 1399 bp, Mus musculus
agtgcatttctccagtgctccaaccccttgcctttctgcccagacttcctctttagaggccttgcgtttagccttcgctccggtgtgctaagaccttatggttactttgctgttgttcttgttttattgatcttatggttactttgctgttgttcttgttttattggtctaagaggtgagggccatcatcatcatccatcttgaatgacgaacgctgttcctaagtgggttggttcgtcatatgctcaaaacagcccggctactaaataggaggccttaccacatggcttgaatttctgtctgtctgtttggttggttggttttaagacagtgtcaagctcctgattctgtacttcctaagtaagattacatactcacagccccacactccccacactccccacactcgggctaacacaggctcacagccccacattcggatgcgatagcaccttagaagatgaatctcagctagtttctgtctttggtgttccttgcctgtcaagatagcaggagtacttgtgggttactacatccttcttgctgctcacctccaaatgccctttgccttgaaccctagatcctatcatttccctttagccaaactcagaacctcagaagcccctgtctgtcagagagggagtgaagaacagtttggctgacctcttagggttcttcttatccccagtttaaagaccaagtgccagagaatatttttttttcttctgtttttcgagacagggtttctctgtgtatccctggctgtcctggaactcactcagtagaccaagttggcatcaaactcagaattccacctgcctctgcctcccaagtgctgggattgaaggtgtgcaccaccactgcctggctgagaactttttttttttttttaaagatttcttatttgtttttcattacaggtggttgtgagccatcatgtggttggtgggatttgaactcatgacctcccgaagagaagtggatgctctttaaccactgagccatctcaccagcgagaacatttttttttaaagatagggtattggtgacagttggcgggtctccctacaggatgtgatatagtcacagtgagtctccctttctttctttcttttttattttttgtttgtttgtttttcgagacatggtttctctgtaaccctggctgtcctggaactcactttgtagaccagctggcctcgaactcagaaatccgccagcctctgcctcccgagtgctgggattaaaggtgtgtaccaacacacccggcgagtctccctttcttaaccccatgaggataatccttcgccaccatgatgtgctctcctaactcattttgggcactgttacctacacacgtcctcttttcatagacaaggaaactgagaacaaacaaggt

SEQ ID NO: 37 - DNA, 4858 bp, Mus musculus
gcagctccgagctaggtgctatcgcaaggccagagcgcacagcccggcggagagagcagatccttgctcagatcgagtcaaatcggggccaaggcggaggacgaagagtccaggctcctattctggacttgttccccagctccgggggcgcttctaggtcctgcagcagccaggagtgcggagccaccaactcggtgctggaatgaaaaaattcccgcgcgccagtgcagaatctttctaagtgacccggagcttcgggtgctagctctgcacgaactttcccatcaaagtgatcgtgaattttaagcatcaggagcaggccagcgaagctctacgcgtctaaacgtctatccagaccaagagttctctgcggtgcagggtgcggtgccatgcagccaaaagtccctttggggtcacgcaagcagaagccctgctccgacatgggggacgtccagcgggcagcgagatctcggggctctctgtccgcacacatgctgttgctgctcctcgcttccataacaatgctgctatgtgcgcggggcgcacacgggcgccccacggaggaagatgaggagctggtcctgccctcgctggagcgcgccccgggccacgattccaccaccacacgccttcgtctggacgcctttggccagcagctacatctgaagttgcagccggacagcggtttcttggcgcctggcttcaccctgcagactgtggggcgcagtcccgggtccgaggcacaacatctggaccccaccggggacctggctcactgcttctactctggcacggtgaacggtgatcccggctctgccgcagccctcagcctctgtgaaggtgtgcgtggtgccttctacctacaaggagaggagttcttcattcagccagcgcctggagtggccaccgagcgcctggcccctgccgtgcccgaggaggagtcatccgcacggccgcagttccacatcctgaggcgaaggcggcggggcagtggcggcgccaagtgcggcgtcatggacgacgagaccctgccaaccagcgactcgcgacccgagagccagaacacccggaaccagtggcctgtgcgggaccccacgcctcaggacgcgggaaagccatcaggaccaggaagcataaggaagaagcgatttgtgtccagcccccgttatgtggaaaccatgctcgtggctgaccagtccatggccgacttccacggcagcggtctaaagcattaccttctaaccctgttctcggtggcagccaggttttacaagcatcccagcattaggaattcaattagcctggtggtggtgaagatcttggtcatatatgaggagcagaagggaccagaagttacctccaatgcagctctcacccttcggaatttctgcaactggcagaaacaacacaacagccccagtgaccgggatccagagcactatgacactgcaattctgttcaccagacaggatttatgtggctcccacacgtgtgacactctcgggatggcagatgttggaactgtatgtgaccccagcaggagctgctcagtcatagaagatgatggtttgcaagccgccttcaccacagcccacgaattgggccatgtgtttaacatgccgcacgatgatgctaagcactgtgccagcttgaatggtgtgactggcgattctcatctgatggcctcgatgctctccagcttagaccatagccagccctggtcaccttgcagtgcctacatggtcacgtccttcctagataatggacacggggaatgtttgatggacaagccccagaatccaatcaagctcccttctgatcttcccggtaccttgtacgatgccaaccgccagtgtcagtttacattcggagaggaatccaagcactgccctgatgcagccagcacatgtactaccctgtggtgcactggcacctccggtggcttactggtgtgccaaacaaaacacttcccttgggcagatggcaccagctgtggagaagggaagtggtgtgtcagtggcaagtgcgtgaacaagacagacatgaagcattttgctactcctgttcatggaagctggggaccatggggaccgtggggagactgctcaagaacctgtggtggtggagttcaatacacaatgagagaatgtgacaacccagtcccaaagaacggagggaagtactgtgaaggcaaacgagtccgctacaggtcctgtaacatcgaggactgtccagacaataacggaaaaacgttcagagaggagcagtgcgaggcgcacaatgagttttccaaagcttcctttgggaatgagcccactgtagagtggacacccaagtacgccggcgtctcgccaaaggacaggtgcaagctcacctgtgaagccaaaggcattggctactttttcgtcttacagcccaaggttgtagatggcactccctgtagtccagactctacctctgtctgtgtgcaagggcagtgtgtgaaagctggctgtgatcgcatcatagactccaaaaagaagtttgataagtgtggcgtttgtggaggaaacggttccacatgcaagaagatgtcaggaatagtcactagtacaagacctgggtatcatgacattgtcacaattcctgctggagccaccaacattgaagtgaaacatcggaatcaaagggggtccagaaacaatggcagctttctggctattagagccgctgatggtacctatattctgaatggaaacttcactctgtccacactagagcaagacctcacctacaaaggtactgtcttaaggtacagtggttcctcggctgcgctggagagaatccgcagctttagtccactcaaagaacccttaaccatccaggttcttatggtaggccatgctctccgacccaaaattaaattcacctactttatgaagaagaagacagagtcattcaacgccattcccacattttctgagtgggtgattgaagagtggggggagtgctccaagacatgcggctcaggttggcagagaagagtagtgcagtgcagagacattaatggacaccctgcttccgaatgtgcaaaggaagtgaagccagccagtaccagaccttgtgcagaccttccttgcccacactggcaggtgggggattggtcaccatgttccaaaacttgcgggaagggttacaagaagagaaccttgaaatgtgtgtcccacgatgggggcgtgttatcaaatgagagctgtgatcctttgaagaagccaaagcattacattgacttttgcacactgacacagtgcagttaagaggcgttagaggacaaggtagcgtggggaggggctgatacactgagtgctggagggatccagtgagtcaaaccagtaagcagtgaggtgtggcaaggaggtgtgtgtaggggatacatagcaaaggaggtagatcaggacactaccctgccagttacattctgataaggtagttaatgaggcacagtagcatctgaaagaccatacagagcactaaggagccccaaagcactattagtatctcttttcttatatctatcgcccaaataattttcagagtctggcagaagccctgttgcactgtactgactagatacttcttatcacaaagattgggaaaggcaaagcagaaagatggtaagactgggtttcaaacaaggcttggtttctatcactggaggcaaggaggaggggacaaacaagatcattattcgaagtcgctggttgctgtggttttacggaaggttgatgcatcattcctatcaacagtgaaaagttcagcttgttcaacgtgacagaaaggctcatctccgtgaaagagctcctgatttcttcttacaccatctcagttcttaactataattcatgttgaggtagaaacaattcatctatttataaaatgtacattggaaaaaaaaaagtgaagtttatgaggtacacataaaaactgaaggaaacaatgagcaacatgcctcctgctttgcttcctcctgaggtaaacctgcctggggattgaggttgtttaagattatccatggctcacaagaggcagtaaaataatacatgttgtgccagagttagaatggggtatagagatcagggtcccatgagatggggaacatggtgatcactcatctcacatgggaggctgctgcagggtagcaggtccactcctggcagctggtccaacagtcgtatcctggtgaatgtctgttcagctcttctactgagagagaatatgactgtttccatatgtatatgtatatagtaaaatatgttactatgaattgcatgtactttataagtattggtgtgtctgttccttctaagaaggactatagtttataataaatgcctataataacatatttatttttatacatttatttctaatgataaaacctttaagttatatcgcttttgtaaaagtgcatataaaaatagagtatttatacaatatatgttaactagaaataataaaagaacacttttgaatgtgtatgcctattttctggagtgggattaacttctgggcaagaaatctgatgagacacaaacattggacttcaagacagttttaaaatttgggtaaatgaactgtatttcctgtttatagacgtactaataaaaaagaagttgatgatgtctttagtggtaagattgttactaatgtggttggcaaattgctgtaaagagccagatagtaagcatttatggcattgtaggctatctttcctgccacaaccatgtgacagtgagtgctttgtaggactgagagcagccataaatgacatgtaaatgataaactgtggctgtgctttaataaaactttatttacaaaa

SEQ ID NO: 38 - DNA, 2125 bp, Mus musculus
gaagtcccttgggaataacttgatcagattagcatgtggttagccaatagcaactggaaggactctccacgtgttactttgttgcgttattaggaactgtgtctgggaagacctgcccagtgcttgctactcatgttcctttgtgttcctgtgttctaattcatgagaggagatgagcacagactgtgcgggcaactccacctgccctgtcaacagtacggaggaagacccgcccgtgggaatggagggccatgcgaatctaaagctgctttttacagtgctctcggctgtgatggtgggtttggtcatgttctcttttggatgttctgtggagagtcagaagctctggttgcacctcagaagaccctggggcatcgcagtgggcctgctttcccagtttggacttatgcctctgacagcttatctgttagccattggcttcggtctgaaaccattccaagctattgctgtcctcatgatggggagctgccctgggggcaccatctctaatgttctcaccttctgggttgatggagatatggatctcagcatcagtatgacaacctgttccacagtggccgccctgggaatgatgcctctctgcctctacatctacacccggtcctggactctgacacagaacctcgtcattccgtatcagagcataggaattacccttgtgtccctggtggttcctgtggcttctggcgtctatgtgaattataggtggccaaagcaagcaacggtcattctcaaggtcggagccattctgggtggcatgctcctcctggtggtggcagttactggcatggtcctggcaaaaggctggaacacagacgtcactcttctggtcatcagctgcattttccccttggtcggccatgtcacaggcttcctgctggcattcctcacccaccaatcttggcaaaggtgcaggaccatttccatagagactggcgctcagaacatccagctgtgcatcgccatgctgcagctgtccttctctgctgagtacctggtccagctgctaaactttgcattggcctatggactcttccaagtgctgcacgggctgctcattgtcgcagcatatcaggcatacaagaggaggcagaagagtaaatgcaggagacagcacccggattgcccagacgtctgctacgagaagcagcccagagagaccagtgctttcttggataaaggggatgaggctgccgtaactctggggccagtgcagccagagcagcaccacagggctgctgagctgactagccacattccttcatgtgaatagtgggaggcacggaccagcttggccctccatcctcctccgtggccagtgaagaccatgtatggttggcagaaagcagaggtgtctccccacaaagctgtcctcccattgtggaatgtaatccaagagggagaatgccatgcagaggagacatcactcacactgcaggacagagcttcttgacttcaggcaggtgctctggagaactagagaagagacactaagagaattagcttcggtggtatgatgcttattcttaaggaatcaagcattgtttaaatttgattatgtgtgtaatgcaagcgggctagctctttctcttgagagggacaggtgccttgaatctcctaactgtagatatacaggatcgccccaatctccaaaacaccagagacatacgttcatccattcaagtattctgagcaccaaatcaccagaaaagcctgtggcttgtttcctgtttgttttcatagctgatcagtgattatctcagaacatcttcacacacctgtgttacctacctcattccttagaacagtggctgcttccaaatgttgtgtaatgtaggactgtaatttattgaaggcatctttataagtatttagacatcttccagcgcagggctgctgcgaacccctggccctgaccccatgtccccgtaggttctttcctgcagctgcagtgggcaggcccacagctcctcagaatcccggacagattgttcagtctcagaagggctttgctgttcactcccgccagtcctaagaaatgattgctcatcgttttgacttgcgaaaacatctcattaaaattatgatctcaaaattaccaacc

SEQ ID NO: 39 - DNA, 1407 bp, Mus musculus
  misc_feature 167, 168: n = A,T,C or G
tgcgcgcgctccgcctgcgctccaccgagaggccccgcggcgcggctggccgagccaggaggcggcgatccggcctgggccgggacttccttcctcccgggcgggacaacagaaccacccgcagccagcagggagctcctggcagctcgctgagctagagcgcaagnntgggctccctgctgagcagcgacagctccaagtccgcgcccgcctccgccaccccgcggactctggagcgcacggggactcggagctgcccatcacctccttcgactgctcagtgtgtctggaggtgctacaccagccggtccggacccgctgtggccacgtgttctgccgatcttgcattgcgaccagtataaagaacaataataaatggacatgtccatactgccgggcataccttccttcagagggagtgcccgcaactgacatagccaagaggatgaagtcagaataccagaactgtgctgagtgtggaactctggtttgcctcagtgacatgagggcgcacataaggacctgtgagaagtacatcgataaatatggcccgctgctagaacttggcgacaccacagcaagatgtgtatgtccattttgtcagcgggaactggatgaagactgcttgctggatcattgcattatccaccacagatcagaaaggaggcccgtgttctgtccactttgccattcacgacctgatgaaagcccaagtaccttcaatggcagtttaattagacatttgcaagtcagtcacactttgttttatgatgatttcatagattttgatataattgaggaagccattattcgcagagtgctagaccgctcacttcttgaatatgtgaatcagtcaaacaccacataattttatgactaggaaggggaccattcactcgtaccatttaagatgctgcttgaaggactggagggggattgtcgacgtttgatggagaaacatgtactacagtattacctgcttgtctttgttatgttgcattcaaaaaccgtgttcattctggcttagatctgcccttacattcttgagtctattagacatttaaccacgagacacagcctctcagccattaacagatggaagagacacgacacaggctggctatgtgatggagcagcttcctgtgtccattagtgatgtgtgtataacgctacatattcccaactgtcatcatggttaggcgagaaagccaatctctgttccatgctaaaagacggagaaaggaacaaaatatggacattaaaggaaatctgaaatgtattcaaattctcatgctctaatctccaataaggaacgtgaataatcttatgaaaaggaggaaagggaagaatttgaagtcaccaaaatccaatttagccaaattatagtacataatataatactgcagc

SEQ ID NO: 40 - DNA, 2378 bp, Mus musculus
cctgggtatagtcacctattgggagacacggagccgggactctctctcattccacgggctcactgggaacactggaggaaacagatccaggcaattgcctggaatgtaatggcgctctccatgaaagagctgtgactcgaatgttaggttttttctgactttgcaaattctcagagctcatggtgaaggtcaaccccttctgcacaggagcccggagctagaacaagcagcaggaaaggtacaaggcaatgttagaagtggtgacctcacccagcctcgcaacaagcagtgactggagcgagcacggtgctgccgtggggacgctgagtgacagggaaggcatcgccaaatcagcggctctgagtgtgcctcagctctttgtgaagtctcatccacgtgtccctcctggtcagtcctccacagccatggcggcctatggccagacacagtacagcacaggcattcagcaggcaccaccctatacagcgtacccaactccggcgcaagcctatggaatccccccttacagcatcaagacagaagacagtttgaatcactcccccagccagagcgggttcctgagctacggaccgagcttcagcaccgcgcctgctggacagagcccctacacctaccccgtgcacagcaccgctgggctctatcaaggcgccaacggactgaccaacaccgctggatttgggagcgtgcaccaggattatccgtcctaccccagcttttcacagaaccagtacccccagtatttcagcccatcatacaacccgccctacgtccctgccagcagcctctgctcctcgcccctctccacgtccacctacgtcctccaggaggctcctcacaatgtccccagccagagttctgagtccctggccggagactacaacacacacaacggaccctccacaccagcaaaggagggtgacacagagaggccacatcgagcctcggatgggaagctacggggccggtcaaagagaaatagtgacccttccccagcaggagacaatgaaatcgagcgcgtgttcgtctgggacctggacgagacaatcattatcttccactccctgctcacagggacgtttgcatccagatacgggaaggacaccacgacgtctgtgcgcattggcctgatgatggaggagatgatcttcaaccttgctgacacacacctgttcttcaatgacctggaggactgtgaccaaatccacgtggatgatgtctcatccgatgacaatggtcaggatttaagcacatacaacttctccactgatggcttccacagcacggcgccaggagccagcttgtgcctgggtacaggtgttcatggcggtgtggactggatgaggaaactggccttccgctaccgtcgtgtgaaggagatgtacaacacctaccgcaacaacgtgggtggcttgataggtgctcccaaaagagagacctggctgcagctgcgcgccgagctggaggccctgactgacctctggctcacccactccctgaaagccctcaatctcatcaactctcgacccaactgtgtcaatgtgttggtcaccaccacgcaactgatccctgcattggccaaggtcctgctgtacggtctgggctccgtgttccccatcgagaacatctacagtgcgaccaagacaggcaaggagagctgcttcgaaagaatcatgcagaggtttggccgcaaagctgtctacattgtgataggcgacggggtagaggaagagcaaggagccaaaaagcacaacatgcctttctggaggatatcctgtcatgctgacctggaggctctaaggcatgccctggaactggagtatctatagcagtgcgggacgcagccaccgcctgccacccaccagccaggcccctgtcatctcataccatgagggccctagacaccagaaactagctaggggccctatacctaggggacatgttccacagccatttcagaagtgtcttcttcccttggggacggagagtcggactctgatatgaaacccagagacccaaatgagggcgccccagctcgtcttgttctcctttttaatttatggactgcacccgttactcccattacccacgggtccctgtgttgtcgtttctcggctgtaggtctggtttcgggtggtgagtacccagtttgtgtttcagagacaatcattctctgggcattggcaagggaggtggtgtggggctgtggggaagcccgatgtcatgtggacagtgtgcgtgccttatgccgccatcttgtgttgtaggagagggggactctgggaaggcaagggtactcggccatgatggataaaggcattcaataaaaaccacgtttacattttaaaaaaaaaaaaaaa

SEQ ID NO: 41 - DNA, 297 bp, Mus musculus
ccccatttttttctttttttttttttctaatccaccgtcacttttaaccccctcttctgctgcccgggggatcggatggaagataaatgttatttcttcacttttgtaagactctgttctgggtgtgggccaggagcttttagatagaagctgcctttcagtgaccatgtgggcattgaggctggtcccagagatgctcgaaattcagtgaaagctatcccttttcatgctagcccagcccagcccaccctccgactggttcttggtttaataaacacatgtaagagttctttccac

SEQ ID NO: 42 - DNA, 3449 bp, Mus musculus
gagcacccgggaccctgggaccacaacgcacttgctccctctcgaccgcgctcctgacccgcagccctcgccaaccctacggatcctaaccaccgccagcctaggtgggcgtcaggatgaaggcagcccgcttcgtgatgcgcagcgccagctcgctgagcagcgccagcctggtccccagggaggtcgagctgttctcccgctacagcccgtccccgctgtccatgaagcagctgctggactttggttcagaaaatgcctgtgaaagaacgtcctttgcttttctgcggcaagagctgcccgtccgcctggccaatatcctgaaggagattgacatcctgcctgaccgcttagtgaacactccttcggtgcagctggtgaagagctggtatatccagagcctgatggatttggtggagttccatgagaagagcccagaagaccagaaagccctgtcagagtttgtagacacgctggtcaaagttcgaaacagacatcataatgtggtccctacaatggctcaaggcatcctggagtataaagacacctgcacagtggaccccgttaccaatcaaaatcttcagtattttttagaccggttttacatgaaccgcatttctactcggatgctcatgaatcagcacatcctcatattcagtgactcaaagacgggaaacccaagccacattggaagtatcgacccaaactgtgatgtggtagcagtagtccaagatgcctttgagtgtgcaaagatgctctgcgaccagtattatctaacatcgccagaattaaacctcacacaagtcaatggaaaatttccaggccaaccaatccacattgtgtacgttccttcacaccttcaccacatgctcttcgaactcttcaagaatgccatgagggccacggtcgagcatcaagaaaaccgtccttccttgaccccagtagaggccactgtcgtcttgggaaaagaagaccttacaatcaagatttctgaccgaggaggcggtgttcctctgaggattactgaccgcctctttagttacacgtactccactgctccaacacctgtgatggacaattcccggaatgcccctttggctggttttggttatggcttgccaatttctcgtctctacgccaagtattttcaaggagatctgaatctctactctatgtcaggttatgggacagacgctatcatctacttaaaggctttatcttctgagtctgtagaaaagctcccagtctttaacaagtcagccttcaaacattatcagatgagctccgaagctgatgactggtgtatcccaagcagggaaccgaagaacctggcgaaggagaagctggcagtgtgaagcggatgacgcctgacattttacgggatcaaagtgggtctgtggcattgctgcttcgtgaatgtgtgtggactctagtttccgcaaaacaacgcaacacaaaaccaagcaagcaaaacacaaacacgagtacaaaccttgacctgatgagggacagagcttggttggatgacccgggagaagtcagggcagggctccaggggataacaggtgtcctgcttctcctttggcaatgcaaaatgactcctgactgttccaaatactgaaaagaagtctgcctctgagttacagctctttctcaacaagtacagagtttgaggcttgcagttgcaacagctggatgtttggtggttcttgctgccagccaaataaattggtgtttagtgaacattttcagtgtttccccgccatgcaaagcttggcgccttgggagaaatgtgtgtaaatgtacattgtataggtattagtgtgctctagaaaggacaggatggaaggaatcaaagcactttatcgagcttgtggctgagcattgcagcctatgtgcaaacccagaggaaaagtatctctgtcaagacagctccagtatcatgcagctttttatgtttgcactcaaaaagccagtgccttctggctggtgccgaggcttgggtgaaatgttaaatatgcactgacctcagaaagtcgagttcaaaagggagataaaattgccaaagtgatccaaggattgtgcatgttgggaaacccatatgagagaaaggattctcatacttagaactttcctatgaagaaatggtggtaaactttctctacctagaagtagtggaaatttcaaggtcatcttaaaaaagatgtgcgttgtatattttaactacattctctacactctaacattaacatatctattcaaatttgtctagttgccaattgtcttcagagtgtgaaaatttaaatccttcttgaagtatctttcgtgagagtagtatggaagtaaaacgttctcatatcaggaggatgtcatttgtgaagcatggggacatcatgaactagtgatgtgcgtgaggcttgggaggctgaagggtaaggatcagcgggaggccatccatgtaggagagagaattaaaacgaggagcgagggaagcaatggagagagggaagcaagaaaggaaccagaaggctggcatcatcctatttcccacaggctaacccaagggatgctctgtgcctttcctggggagggaagggggtgaactggtagatttgaaagcagtatggcttcttctgtgggtctccctcttactagacaaggtgaaatgataattcgtgtcaaattaatgtgaaatttttttcctgcattgtaatattatgaggcctgagtcgcagttgagtttgaaatttgtatttaatttcacagtgacctagagctaaggtgctcccggttgtggcaataggagccacaagtattttctttctttctttcgttctttctttctttctttctttctttctttctttctttctttctttccttccttccttccttccttccttccttccttccttccttccttcttcctttccttttcttttctcttctcttcttttcttttttctgtttctttttctttttttgcattgtagatgttgtccttaaaagatcagggcagtgactttcacagcaggactttgactcccacattggttgatcacacaaaactgtcagcatttgggtaatctgatgtatagttgttttgttgctgatgtttccattgaaatttcagctctgagtttgtgcacatgaatacttacttgtgtttaccaaaggtctaaggcatttggttacttaacccaaatatcctgaactgtgcgtaaagtaatagagaaaagctttagggtctcaatagtgtcacctgtgtaaatcaaatcaaaatagccttccctattatttatgaacccatgggagactttaaactcttgtagatagatgctaaatgcccaggcccacttaacttattaatgtgtgaattacatttatgtttttagtttatatgcaaagaattgtgataattttataataaatatttttattataatagt

SEQ ID NO: 43 - DNA, 634 bp, Mus musculus
atgaccgagcgccgcgtgcccttctcgctgctgcggacgccgagctggggaccattccgggactggtaccctgcacacagccgcctcttcgatcaagctttcggggtgccccggttgcccgatgagtggtcgcagtggttcagcgccgctgggtggcccggatacgtgcgcccgctgcccgccgcgaccgccgagggcctcgcggtgaccctagccgcaccagccttcagccgagcgctcaaccgacagctcagcagcggggtctcggagatccgacagacggctgatcgctggcgcgtgtccctggacgtcaaccacttcgctccggaggagctcacagtgaagaccaaggaaggcgtggtggagatcactggcaagcacgaagaaaggcaggacgaacatggctacatctctcggtgcttcacccggaaatacacgctccctccaggtgtggaccccaccctagtgtcctcttccctatcccctgagggcacacttaccgtggaggctccgttgcccaaagcagtcacgcagtcagcggagatcaccattccggttactttcgaggcccgcgcccaaattgggggcccagaagctgggaagtctgaacagtctggagccaagtagaagccat

SEQ ID NO: 44 - DNA, 1287 bp, Mus musculus
cctgccttccgctttagggtctgctgctctggttacagacctaggaaggggagtgcctaattgggattggtgcagggttgggagggacccgctgttttgtcctgcccacgtttctctagtagtctgtataaagtcacaactccaaacacacaggtcagtcctgctgaagccagtttgagaagaccacagcaccagcaccatgcctatgatactgggatactggaacgtccgcggactgacacacccgatccgcatgctcctggaatacacagactcaagctatgatgagaagagatacaccatgggtgacgctcccgactttgacagaagccagtggctgaatgagaagttcaagctgggcctggactttcccaatctgccttacttgatcgatggatcacacaagatcacccagagcaatgccatcctgcgctaccttgcccgaaagcaccacctggatggagagacagaggaggagaggatccgtgcagacattgtggagaaccaggtcatggacacccgcatgcagctcatcatgctctgttacaaccctgactttgagaagcagaagccagagttcttgaagaccatccctgagaaaatgaagctctactctgagttcctgggcaagaggccatggtttgcaggggacaaggtcacctatgtggatttccttgcttatgacattcttgaccagtaccgtatgtttgagcccaagtgcctggacgccttcccaaacctgagggacttcctggcccgcttcgagggcctcaagaagatctctgcctacatgaagagtagccgctacatcgcaacacctatattttcaaagatggcccactggagtaacaagtaggcccttgctacacgggcactcactaggaggacctgtccacactggggatcctgcaggccctgggtggggacagcaccctggccttctgcactgtggctcctggttctctctccttcccgctcccttctgcagcttggtcagccccatctcctcaccctcttcccagtcaagtccacacagccttcattctccccagtttctttcacatggccccttcttcattggctccctgacccaacctcacagcccgtttctgcgaactgaggtctgtcctgaactcacgcttcctagaattaccccgatggtcaacactatcttagtgctagccctccctagagttaccccgaagtcaatacttgagtgccagcctgttcctggtggagtagcctccccaggtctgtctcgtctacaataaagtctgaaacacactt

SEQ ID NO: 45 - DNA, 5561 bp, Mus musculus
  misc_feature 4879, 5116: n = A,T,C or G
ttttttttcttcacctcctcccttttcaaggcctccaagctaattatttctgttgctttggagtgagcaattctgtggttctctccaccaccacccccaattctgacccgatcccgcctgggggtttctacggtctccgctcactctgcgtgcacctggcgcgcctctttttttcacccccaacctgttgcaagtctttaatcctcgcaattgggacttgcgtgcaggcacctgaatcctccttgcctcatattttgcaagtgtttgggggagagcacctgctctacctgcaagagatttaaaaggaaaaaaatctccaggctccctctttctccacacactctcgctctcctgccccgccccgaggtaaagccagactccgagaaaatggtgatcagcgtggtcctcctgctgctggccgcctatgccgtaccggctcaaggcctgggttctttcgtgcattgtgaaccctgcgacgagaaagctctgtccatgtgtccccccagccctctgggctgtgagctggtcaaagagcccggctgtggctgctgcatgacttgcgccctggcggagggacagtcgtgtggtgtctacacagagcgctgcgcccagggtttgcgctgcctcccccggcaggatgaggagaagccgctgcacgccctgctgcacggccgcggggtttgcctcaacgaaaagagctacggcgagcaaaccaagatagagagagactctcgggaacacgaggaacccaccacctccgagatggctgaagagacctactcccccaaggtcttccggcccaagcacactcgcatttccgagctgaaggctgaggctgtgaagaaggaccgcagaaagaagctgacccagtccaagtttgtggggggtgcagagaacactgcccaccccagagtcatccctgcacctgagatgagacaggaatccgaacaaggcccctgccgcagacacatggaagcttccctccaggagttcaaagccagcccacgcatggtgccccgtgctgtgtacctgcccaactgtgaccgcaaaggattctacaagagaaagcagtgtaagccctcccgtggccgcaaacgtggcatctgctggtgtgtggacaagtacggaatgaagctgccgggcatggagtacgtggatggggactttcagtgccacgccttcgacagcagtaacgttgagtgacgcgtcccctcccttcctccccctatcctacccccccagccccaactccagccagcgcctccctccaccccaggacgtcactcatttcatctcatttaggggaaatatatatacatatatatttgaggaaactgaggacctcggaatctctagcaagggctaaggagacactccccaccatgaccccggaaatgtattcctttttgaagcaagttgaacggacagagaagggaaggagagaagaagcaagagggagcgagagatggaaagaaagcaaagcgttggaatagaggaaaagagggaaggacagataggattagagagagaagagagaaacagcaaggcagaaaggactccacaaccaaggctgaatctgcccttttgctttcagctctagcctggggtcagaaaaagtgtggcattcagtgacacccagtttagattggtcaaggggagaaaagaaacaaggtgtgtcagtgcctctcgggtctgtcccctcctgcagccagcagtgtggatggctagacccctcaccctcctctcctcttacccaagtgcagggtgatttcatccccaaatttacaaagactaaaatgcattccatccctctgaaaataaacaaaagtgagtgattgaagataggttttcccccagcagacaagtgaactcagaatgtgtgcaaattttactcttgttaaagatttttttaagaagtcagtacgcacccccaacactggaaagacttgattctccagggtgacaagcaattcagaagcgcgtggcttcggcccttgatttcactagactcaaagctggcccggcagcctctgtggaggaggatgagaggtggagaaaaccaaggggcttgtactcacccacaagactccatgtagactttataggcatataaatctattttctttacctttttttccctttccctttctttcgaagttttgcattacctctttaaagtagttttttttaggacactgaagatcttcctcattctgggaaaaatccatatttcacaaatacaacccagaacgccagcttggcctgcgtccaggcagcctttctcgtgagctacaagtgtggctcttttgtggggcaccgatttggatcttctcatgattccaaacgtgtgttgaagtgaatccaccaagccaggtaactgccagcacccaagggtgcatcaagtgcatagcccaggtcaccccatttcagccttccaacccgcagaaagtaactgtctcacaccacaccacataaacctgccagatccatctgtaacccactggcctgcccagacctttttttcccatctgcatttttttttttgaactgcattttgaaagcctccctcagatgccaggctgacagatcagagagaaactaacatgagagatgacagaggaggaggaagtggagggtgggggcagagacttccacagagagacatagaagatggagcagaggtctgggggtggggaggacaagaaagagacagagagaggaaaataccaatagaattttccttggtgtctcccatctaatcaactctctgagatttgagaggaaaaagaaggcaggggaagaacttgaggtagaaatgaggtcagttcaagtcacagggcccagatggtgggtaactgaggcaggatccagacttgagacacacggttggaaacaaggctggttagcctgactgggtattgaagggtgaagaggatgccttggaaagacagcacaacttcagttcaacttcaggcccccaaggaggaactgaggccaaagaatccttcaagtgcttcatgagtctcctctgcccgactcaaacatccttccctgtgatggaggatggtagaaagcccaggacaactcaggcccggatcttcacgactgttgtcatttgccagcctgattttgatccaagagaagcatctcattgcccactggcttcttcaacaaagaggtgcttaacaaaaggctcaggactatctttgaagactgaagataaccttccaggagaggagactcggacattggtacaggaggccccttttggcgggggacacagctctttgcgctctcttgatggcatggcatagtagaggccccctccaacccggaacatggagcaacacaaagggagagcaaagaaactgacgtgcgtcgactcataggacatgggtggctgcgggcacagaaagggatgcctcctgttgcctggacaggacagttggctgggaaggaaagagaaaattgatcttcataagacaaagggcctgatgggatggcaatagaaggacttaccagacctgcagggtcagtatacccatcaccccgcacaacatccccagcccccaactcaaacttcaatatatcttaggccagtatcctagacctaagtctctcctttctgccattatttctccgcatcttgagcagtcatctgactgagatttgccaagtggatactggggtaccactgccccccaagaaaagactgagccaggaactgcctactcgctccccctcccgagcctggagctaactcctgtgaggggtgctctcttcaccccacaacttactagaccttgagtgagcctctgtcccttatgtgggctcttcgctgtgagccacagatggaggtcattgtatagacagttagccttccccaggtcagcctacctcccccaaacttgtgagtctccccgctgctcatatggagaggcatgtctaagacagcaagtcttctagaggaagcttgcctttaacagacagatggaactaaaccttccaaatgggagatctggctgaacccaggatacagagaccatggacatggatggggtcatcaagagaagagggatgtccttctccaggttagggagagagaaggcaagtttgcaacgatcccatcatgccctgagcaagaagcttttggcccaggctagcctttaactccattagaggcctctctgttgggtttatccacagcagtaggcccaagtatggcctgtccccacctctactatcccgtggaaggtttcttcccacccctttttgacaaatgcctcactcgagcagtggaaagatagctctcttccccctcttctgccaggtaacaaagagacctaaccaggacctattctccaccccagccagtcttgaccagccagaacaaagcagggaacctggagaataaaagactctacgttcctctgacaaagactctacgtttctctgacggccaggcctaaacagacaaggcttgggaacatctgccccacaggatacggaggaggtcagctgtgctcactcctcttctccttccaagaccctcttccgaccatgacttatctccatggtaacatcctcaccatcattctcccactaccaagggttgccatggcaacctcccaaccacctgcccatcccaggcaggcagctgtccttctgctcagaaccctagaggactctaggtgaaattttacagcttaagagaggagtgagccaaggagaagagaccctgtagtcctctggctttcaagagaaagaaggctatgatttaaaacacagtagaagggaaagaggtctcgtcgaggtcgacctctcccggggagcttaggggttgtactgtctttattttttaaaccactaaagtgcaatntttcctgcactcttgttaccccgcctctcttccctgttaggttttcatttccttgagcagactttcttggttttttaatggagtatagactttcaccacttcacagactctggcctcctctccaagtctctctggatggggaaaaggaaggtagagggtcagaggggaaggggtccctcgtcaccccgcatccattcacccccacttctctggtccctagtcaccggcttcaccccnatctccgacaccatcactgtcacacagtagcctgtcacacggatagtacagttcagacaagactccttcagattccgagacgcctaccggttgtttttggtttttgttttgttttcttttgtttgtttgtttgtttgttttttacaacagcaataaccacatcacatattactgtagctctctatagtgttacgttcagacaccgtagctctgtcctctcttattttgttggttttgacttaaaaaaaaatacttatgctttttactggtgaaacagattgaaaaaaaaattgaacaacaaaccagtttgtgaaaaaaaaaaaaaatgtgaaaaaaaatcaccccgatgtggaagagctcggctcctctttagcattttgtacttaaggaaataaaaaagaaaaacctggaagatctcacattttattacaaagtgaaaaaaaaa

SEQ ID NO: 46 - DNA, 1853 bp, Mus musculus
catggatcctagtgtgctgctcctccttgctgtccttctgagcttatttctactcctggtcaggggccatgcaaagatccatggccatcttccaccaggaccccatcctctacccctcttggggaacctgttgcagatggatagaggaggccttcttaagtgtttcattcagcttcaagaaaaacatggcgatgtgttcacagtgcacttgggaccgaggcccgtggttgtgttgtgtgggacacagacgataagggaggctctggtggaccacgctgaggctttttctggccgagggaccattgctgcagctcagctagttatgcaggactatggtatattttttgccagtgggcaacgctggaagacccttcggcgattctctctggccaccatgaaagagtttggaatgggaaagcggagtgtggaggagaggataaaggaggaggcccaatgtttggtggaggaattgaagaaataccagggagtgcccctggatcccacctttctcttccagtgcatcacagccaacatcatctgctccattgtctttggagagcgttttgactacacagatgaccagttccttcatctgctgaatctgatgtataagatcttttcactcttaagctcattctctggtcagatgtttgagctcttctctggattcctgaagtactttcctggtgtacacagacaaattgtcaaaaaacagcaggaactcctcgactacattgcccatagtgtggagaagcacaaggccaccttggaccccagtgctccacgagactacattgatacctaccttctgaggatggagaaggagaagtcaaaccacaacacagagttccatcaccagaacctcatgatgtctgtgctctctctcttctttgtcggaactgagaccacaagcgccaccctccactatggagtcctgctcatgctcaagtacccccatgtcacagagaaagtccaaaaggagattgatcaggtgatcggctcacaccggctaccaactcttgatgaccgcaccaaaatgccatacacagatgcagtcatccatgagattcagagattttcagatcttgtcccaattggtctaccacataaagtcatcaaagacacactgttccgagggtacctgctccccaagaacactgaggtgtaccccgtccttagttcagctctacatgatccacagtactttgaacaaccagacaagttcaatcctgagcagtttctagatgccaatggggcactgaagaaatgtgaagcttttctgcccttctccacaggaaagcgcatttgtcttggtgaaagcattgcccgcaacgaattgttcattttcttcacaaccattctccagaacttctctgtggcaagccctgttgctccaaaggacattgacctcactcccaaagagagtggtattggaaaaatacctccagcacaccagatctacttcttagcccgctaattggggtgagggagccaggtgtcaccacttatgttgagaatggctctgtctttgtgcctctaagagagctggtggaaaccaggccattggtagctgctcacacccttccttctactgttgttctccaaagctccaaggcatgttcttcttccctgggaatggcgctggagaaagcaatcaactgtctgttttgatttctggagtccacaactcatgctgagtcacttccctcttcctcccaacagtccaagtgtccacttatcagctctccatgatctgtgatctgtgctagtggactctatataaggtctgatttctaatgctacagacttgcctagtatgtatggctcaggtaaacagaatcacatagtgtgtg

SEQ ID NO: 47 - DNA, 467 bp, Mus musculus
ttttttttttattaaggttttgcacaatgtactgtttaatttttgaaaagtcaatgttctgtgtataattttccacatattaaaataatataaaataaaaatattggacttttaaaattgattaatattttaaatatttgtttaataaggttttagcaacaacaatagaacaatttatttcaaaatacgtgcacattccaagctaggctggtagcttctttaaaatccaatttgtaatttttaaagtttgagtcctgtggtataaacagtagaatatttatcacacatgtttcaaatgatggaaattaagttgtgctgacaagatttttattataaccccccccccaaaatacaaaagcaaccatggttaatcaattgaataacagtaacccttttaactaatctctccagagattcacaactgaggcggtgcctggcaagaaactacttaagacagggttaacacc

SEQ ID NO: 48 - DNA, 1780 bp, Mus musculus
ggacaccacccacccagagtggagaagcccagccagtcgctgtcaggaaccctgagacgctgctccagctatgtgtgaagaggaagacagcacagccctggtgtgcgacaatggctctgggctctgtaaggccggcttcgctggtgatgatgctcccagggctgttttcccatccatcgtgggacgtcccagacatcagggagtaatggttggaatgggccaaaaagacagctatgtgggggatgaagcccagagcaagagagggatcctgacgctgaagtatccgatagaacacggcatcatcaccaactgggacgacatggaaaagatctggcaccactctttctataacgagcttcgtgtggcccctgaagagcatccgacactgctgacagaggcaccactgaaccctaaggccaaccgggagaaaatgacccagattatgtttgagaccttcaatgtccccgccatgtatgtggctattcaggctgtgctgtccctctatgcctctggacgtacaactggtattgtgctggactctggagatggtgtgactcacaacgtgcctatctatgagggctatgccctgcctcatgccatcatgcgtctggacttggctggccgagatctcaccgactacctcatgaagatcctgactgagcgtggctattccttcgtgactactgccgagcgtgagattgtccgtgacatcaaggagaagctgtgctatgtagctctggactttgaaaatgagatggccacggccgcctcctcttcctccctggagaagagctacgaactgcctgacgggcaggtgatcaccattggaaacgaacgcttccgctgcccagagactctcttccagccatctttcattgggatggagtcagcgggcatccacgaaaccacctataacagcatcatgaagtgtgatattgacatcaggaaggatctctatgctaacaacgtcctgtcagggggtaccaccatgtacccaggcattgctgacaggatgcagaaggagatcacagccctcgcacccagcaccatgaagatcaagatcattgcccctccagaacgcaagtactctgtctggatcggtggctccatcctggcttcgctgtctaccttccagcagatgtggatcagcaaacaggaatacgacgaagctgggccctccatcgtccaccgcaaatgcttctaagtcccccctgctctgcctctagcacacaactgtgaacgttttgtggatcagcgcctccagttcctttccaaatcattcctgcccaaagctttgatttgttactcgtggtttttttaaaaataaatcagacatgtgctacccttaacttgtagccctggcctagcaacactgattcaattgtgtttctgttaggtgagaatcatttattatagggtggccccctctagtggtcaggaatagatgtgacacaactagaaaagtatattcccaggcatggatggcatcaatcacttcaacagaggaaggtccacttaaatgatgtaaacggggtatttgagagcgtataggacttgtatagattacatataataatatatattagtaccaataggaaaaatcgacactgacttcacagctagagtgactattttactttatacatacaggtgaccagataggtaaaaaacaattttacgtgtatttaaaatttggcaagtaatatggttttattaaaatcacatcttttgtattaaagcatacacacgtgcatggatatgcatgcgtgacttttaactt

SEQ ID NO: 49 - DNA, 1990 bp, Mus musculus
ctgcatcccgggccgccatggcgctgcgtgtagccgcgttcgaccttgacggagtgctggccctcccctctatcgccggggctttccgccgcagcgaagaggccctggcactgcctagagacttcctgcttggtgcgtaccagacggaattcccagagggacccactgagcaactcatgaaagggaagatcacattttcgcagtgggtaccactcatggatgaaagctacaggaagtcctccaaaacctgtggagccaatctacctgagaatttctccataagtcaaatattcagccaagctatggcagcaagaagcatcaaccgccccatgcttcaggcagccattgctctcaaaaagaaaggattcacaacatgcattgtcaccaacaactggctggacgacggagacaagagagacagcctggcccagatgatgtgtgagctgagccaacactttgacttcctgatagagtcctgtcaggttgggatgatcaagcctgagcctcagatctacaattttttactggataccctgaaggcaaaacccaatgaggttgttttcctagatgactttggaagtaatctgaagccagcccgtgacatggggatggttaccatcctggtccacaacacagcctccgctctgagagaactggagaaggtcacagggacacagtttcctgaggccccactgccagtcccatgcaatccaaatgacgtcagccatggatatgtgacagtgaagccagggatccgcctgcattttgtggagatgggctctggccctgccctatgcctttgccatgggtttcctgagagctggttttcttggaggtaccagatccctgctctggcccaggcaggctttcgtgttctggctatagacatgaaaggctatggagactcatcttctcctcctgaaatagaagaatatgccatggaattgctgtgtaaggagatggtgacattcctggataagctgggaatccctcaagcagtgttcattggccatgactgggctggtgtgatggtgtggaacatggctctcttctaccctgagagagtgagggctgtggccagtttgaacacgccgtttatgccaccagatcctgatgtgtctcccatgaaagttatccgatctatcccagttttcaattatcagctgtactttcaagaaccaggagtggccgaggctgaactggagaagaacatgagtcggactttcaaaagcttcttccgagccagtgatgagacaggtttcatcgctgtgcataaagccactgaaatagggggaatccttgtgaatactccagaagatcccaacctcagcaaaattactactgaggaagaaatagagttttacatacagcagttcaagaagactggcttcagaggtcctctgaactggtaccggaacacagaaagaaactggaagtggagctgtaaagggttgggacgaaagatcttggtcccagccctgatggtcacagctgagaaggacattgtactccgtcctgaaatgtccaagaacatggaaaagtggatccctttcctgaaaaggggacacattgaagactgtggtcactggacacagatagagaaaccaactgaggtgaaccagattctcatcaagtggctgcagactgaagtccagaacccatcagtgacctccaagatttagccactggggacacattttagtttctggaacacagcctgatctacaagtaccagcatcgttcttttgccagccagtgattttcttttaaatgaaaatgatgggatgagatgtaattttagatcgggaagagagtgtgtgtctaattcttttgagtatgcctgtgccatcagagaagagatcccaccccagtaggaaggtatggggcagtccagtttataactttgcaaccaaacccaagcctgctctttttgaagcagctgattggagagtaaagattttcattcaataaagctaaacctcagggctcc

SEQ ID NO: 50 - DNA, 725 bp, Mus musculus
tagcggataattatgagtctttcccatcttctacactgcacactccagaatcctgctatatacacaaacaatctttcatttgtctgtttaaagataattatatacattcatctgtataggccctctctctctgtcctctttctgctgactctgctttggctgcaggagagcaaagcgctgtccaggagttcaggacagtgcttggacctggccttgaggtcaggacactgcctcattaacagcccaggcggggtccagaggctcatagggctgtagccagttgtcgttgtcgttctcttcgaggacctgtggccctctaaccggcaaagagcagatggtcataggatccggatgttcactgccgtcgtgagctcggggccttaagtaggcgcggagcgcccctgagaaagtgtcggtgaagctgaagatgtgcgagccatcagacacgttgaagaaagacagcttcccggcctcgtagtccaacaggacgcctatcctccggggaggcacgcgtagcgccagtgccacgcgatgcgggtccagcacgaagtactcgcagcggttccacagccccatcacccagtagccagccgccgggctcaggcgcgcgggcccggagcgctccaccgactccagacaggcgcccaggaaccagcggctgcgccggcccacgtgcacctcccagagtggcggccgctggagaagcgctcccggctcagcacgca

SEQ ID NO: 51 - DNA, 60 bp, Artificial Sequence
  oligonucleotide probe
ctcacttttattttcatgactgtttatataaataaaagacttgcggatttgtgccctccg

SEQ ID NO: 52 - DNA, 60 bp, Artificial Sequence
  oligonucleotide probe
caggggtggaagtcaagcagaaggggtacagagttctgaatttgtcaccgagtagagagt

SEQ ID NO: 53 - DNA, 60 bp, Artificial Sequence
  oligonucleotide probe
ctcattggaaatttagcattgtagtgctttgagagaggaaaggactccttaaaagaaaaa

SEQ ID NO: 54 - DNA, 60 bp, Artificial Sequence
  oligonucleotide probe
gacatcatccagccctagtagggaccaggaaccacatccttggaagcattctgaagacca

SEQ ID NO: 55 - DNA, 60 bp, Artificial Sequence
  oligonucleotide probe
gcgcctgtttttgacgtgtacatagattgactcgttttacctcattttgttatttttcaa

SEQ ID NO: 56 - DNA, 60 bp, Artificial Sequence
  oligonucleotide probe
aggcttaggatggacgctggtgcaatgattttcttgttccttgttttttaagagaaacca

SEQ ID NO: 57 - DNA, 60 bp, Artificial Sequence
  oligonucleotide probe
gcaatgctttcattttctaaaggacgctatcgtggaagctttgaatatcacaataaactt

SEQ ID NO: 58 - DNA, 60 bp, Artificial Sequence
  oligonucleotide probe
actcagtgctggagagaaacaataacaaattcagctgagctttaaaaggctttggggaaa

SEQ ID NO: 59 - DNA, 60 bp, Artificial Sequence
  oligonucleotide probe
gtgacaaggactttggtttttgtaagactgttgatgatatgaaggccttttgtaagaaaa

SEQ ID NO: 60 - DNA, 60 bp, Artificial Sequence
  oligonucleotide probe
tggctcaaggaattgttaggcccgttcttgagtggaaacagacttttataaaatgatgat

SEQ ID NO: 61 - DNA, 60 bp, Artificial Sequence
  oligonucleotide probe
ctcgtagaaggaacgggtgtttgtctgttttgggttgatgaagggtcttgtcattggaaa

SEQ ID NO: 62 - DNA, 60 bp, Artificial Sequence
  oligonucleotide probe
tacaggacatcacacccagcaatggatacaggaccttggagaaattaggagttgtaagca

SEQ ID NO: 63 - DNA, 60 bp, Artificial Sequence
  oligonucleotide probe
ggaatgtgttttctatacctccgacggtacttctatcagaaaaattcagcaaatatgtat

SEQ ID NO: 64 - DNA, 60 bp, Artificial Sequence
  oligonucleotide probe
agggattgaagagagctataacacctttattggacagtggtctcattgatactagttgta

SEQ ID NO: 65 - DNA, 60 bp, Artificial Sequence
  oligonucleotide probe
gtgtcttgggtccattatatgaattgtgagcagggttcatctattttaaacacaaatgtt

SEQ ID NO: 66 - DNA, 60 bp, Artificial Sequence
  oligonucleotide probe
agcccaaagagggaccagccaagagcgtgtttggctgagacatgcacattgcaccatcca

SEQ ID NO: 67 - DNA, 60 bp, Artificial Sequence
  oligonucleotide probe
tgtattctgtacactcttggttcatgaggttatttagcacaaagtgtaacagcttcacct

SEQ ID NO: 68 - DNA, 60 bp, Artificial Sequence
  oligonucleotide probe
catttaagcaatgtctgctgaagaaatgttagcctgtggtttactctaatgcacaaaaaa

SEQ ID NO: 69 - DNA, 60 bp, Artificial Sequence
  oligonucleotide probe
atgttcagactatatcgactgttctgtgtatcttcaatgtgcttataactgcagtgtgtt

SEQ ID NO: 70 - DNA, 60 bp, Artificial Sequence
  oligonucleotide probe
ctgggaagaattttctgggaacatgaagagatggaatcacactattcttaagagcgtttg

SEQ ID NO: 71 - DNA, 60 bp, Artificial Sequence
  oligonucleotide probe
ccattggagttcttttaacagtattcacaaccaagttaggggaacatttgtatccaataa

SEQ ID NO: 72 - DNA, 60 bp, Artificial Sequence
  oligonucleotide probe
acggcctcagtcacaaatcactgctgtgtttggttctttttctataaatgaactctcagg

SEQ ID NO: 73 - DNA, 60 bp, Artificial Sequence
  oligonucleotide probe
ttgttttaatagttccttacaacccgaccttaactacttctgtgcagtcccacacagtgc

SEQ ID NO: 74 - DNA, 60 bp, Artificial Sequence
  oligonucleotide probe
ttctgtccttctaaaaacatattcccacactacatattttgatagcaaggttgatggcca

SEQ ID NO: 75 - DNA, 60 bp, Artificial Sequence
  oligonucleotide probe
gtcacatcaaacagctatcatttactcctacttgggaagttttcatgtgacaataaaaga

SEQ ID NO: 76 - DNA, 60 bp, Artificial Sequence
  oligonucleotide probe
tgctgaaggccttaattatgtcttagtgggtaaaggatttggttcagaaggacaagctgg

SEQ ID NO: 77 - DNA, 60 bp, Artificial Sequence
  oligonucleotide probe
tggaggaagttaacagttattaacaggaaagagtatgtcagagcaagcaaatgcatgagc

SEQ ID NO: 78 - DNA, 60 bp, Artificial Sequence
  oligonucleotide probe
cgacttcacatcctttttctctagcattcttctgtaaataacaatcactattcatggtca

SEQ ID NO: 79 - DNA, 60 bp, Artificial Sequence
  oligonucleotide probe
ttctttaggtatccgtcgtttgcacttggaagatgtatatgtagggatctgtcttgccaa

SEQ ID NO: 80 - DNA, 60 bp, Artificial Sequence
  oligonucleotide probe
taagaacaactgtccaggctgaagaaagtcacagtggaccagaggttttccttttgaacc

SEQ ID NO: 81 - DNA, 60 bp, Artificial Sequence
  oligonucleotide probe
tagaacctcctgagtcagtctcagcatcttcaattaaagctaagtgcaaaggatggaaat

SEQ ID NO: 82 - DNA, 60 bp, Artificial Sequence
  oligonucleotide probe
gtgatttgtttcgtaagagtctgacatgcaaaatagttaaacacgagtcagaaatcttac

SEQ ID NO: 83 - DNA, 60 bp, Artificial Sequence
  oligonucleotide probe
agagacctccgtgggtttccagaacggcctcaactatatcgccatcgatgtgagaggcga

SEQ ID NO: 84 - DNA, 60 bp, Artificial Sequence
  oligonucleotide probe
atcgacttcctgtcccatcacttgaaggaagccacagtcgtgaaaggtgaggccctttga

SEQ ID NO: 85 - DNA, 60 bp, Artificial Sequence
  oligonucleotide probe
ttatgacgacgacttgaagaacctgactaagtataacctgactaagtgttccctccaaag

SEQ ID NO: 86 - DNA, 60 bp, Artificial Sequence
  oligonucleotide probe
gctcttaaggagtgaaatatggagttgtacaggaacactaaacgatgtaaaataaatgac

SEQ ID NO: 87 - DNA, 60 bp, Artificial Sequence
  oligonucleotide probe
tgctctcctaactcattttgggcactgttacctacacacgtcctcttttcatagacaagg

SEQ ID NO: 88 - DNA, 60 bp, Artificial Sequence
  oligonucleotide probe
ggcaagaaatctgatgagacacaaacattggacttcaagacagttttaaaatttgggtaa

SEQ ID NO: 89 - DNA, 60 bp, Artificial Sequence
  oligonucleotide probe
gccagtcctaagaaatgattgctcatcgttttgacttgcgaaaacatctcattaaaatta

SEQ ID NO: 90 - DNA, 60 bp, Artificial Sequence
  oligonucleotide probe
ctctgttccatgctaaaagacggagaaaggaacaaaatatggacattaaaggaaatctga

SEQ ID NO: 91 - DNA, 60 bp, Artificial Sequence
  oligonucleotide probe
gggtactcggccatgatggataaaggcattcaataaaaaccacgtttacattttaaaaaa

SEQ ID NO: 92 - DNA, 60 bp, Artificial Sequence
  oligonucleotide probe
gggatcggatggaagataaatgttatttcttcacttttgtaagactctgttctgggtgtg

SEQ ID NO: 93 - DNA, 60 bp, Artificial Sequence
  oligonucleotide probe
acttgtgtttaccaaaggtctaaggcatttggttacttaacccaaatatcctgaactgtg

SEQ ID NO: 94 - DNA, 60 bp, Artificial Sequence
  oligonucleotide probe
gtagatagatgctaaatgcccaggcccacttaacttattaatgtgtgaattacatttatg

SEQ ID NO: 95 - DNA, 60 bp, Artificial Sequence
  oligonucleotide probe
aaaggcaggacgaacatggctacatctctcggtgcttcacccggaaatacacgctccctc

SEQ ID NO: 96 - DNA, 60 bp, Artificial Sequence
  oligonucleotide probe
atcgcaacacctatattttcaaagatggcccactggagtaacaagtaggcccttgctaca

SEQ ID NO: 97 - DNA, 60 bp, Artificial Sequence
  oligonucleotide probe
ggctcctctttagcattttgtacttaaggaaataaaaaagaaaaacctggaagatctcac

SEQ ID NO: 98 - DNA, 60 bp, Artificial Sequence
  oligonucleotide probe
ctaatgctacagacttgcctagtatgtatggctcaggtaaacagaatcacatagtgtgtg

SEQ ID NO: 99 - DNA, 60 bp, Artificial Sequence
  oligonucleotide probe
gcctagcttggaatgtgcacgtattttgaaataaattgttctattgttgttgctaaaacc

SEQ ID NO: 100 - DNA, 60 bp, Artificial Sequence
  oligonucleotide probe
ctccagttcctttccaaatcattcctgcccaaagctttgatttgttactcgtggtttttt

SEQ ID NO: 101 - DNA, 60 bp, Artificial Sequence
  oligonucleotide probe
acattttagtttctggaacacagcctgatctacaagtaccagcatcgttcttttgccagc

SEQ ID NO: 102 - DNA, 60 bp, Artificial Sequence
  oligonucleotide probe
atctttaaacagacaaatgaaagattgtttgtgtatatagcaggattctggagtgtgcag

SEQ ID NO: 103 - DNA, 1636 bp, Rattus norvegicus
gaaattaccatggttgacacagagatgccattctggcccaccaacttcggaatcagctctgtggacctctctgtgatggatgaccactcccattcctttgacatcaaaccctttaccacggttgatttctccagcatttctgctccacactatgaagacatcccgttcacaagagctgacccaatggttgctgattacaaatatgacctgaagctccaagaataccaaagtgcgatcaaagtagagcctgcgtccccgccttattattctgaaaaaacccaactctacaacaggccacatgaagagccttcaaactccctcatggccatcgagtgccgagtctgtggggataaagcatcaggcttccactatggagtccatgcttgtgaaggatgcaagggttttttccgaagaaccatccgattgaagcttatttatgataggtgtgatcttaactgtcggatccacaaaaagagtagaaataaatgtcagtactgtcggtttcagaagtgccttgctgtggggatgtctcacaatgccatcaggtttgggcgaatgccacaggccgagaaggagaagctgttggcggagatctccagtgatatcgaccagctgaacccagagtctgctgatctgcgagccctggcaaagcatttgtatgactcatacataaagtccttcccgctgaccaaagccaaggcgagggcgatcttgacaggaaagacaacagacaaatcaccatttgtcatctacgacatgaattccttaatgatgggagaagacaaaatcaagttcaaacatatcacccccctgcaggagcagagcaaagaggtggccatccgcatttttcaagggtgccagtttcgatccgtggaagctgtgcaagagatcacagagtatgccaaaaatatccctggtttcattaaccttgacttgaatgaccaagtgactctgctcaagtatggtgtccatgagatcatctacaccatgctggcctccctgatgaataaagatggagtcctcatatcagagggacaaggattcatgaccagggagttcctcaaaagcctgcggaagccctttggtgactttatggagcctaagtttgagtttgctgtgaagttcaatgcactggaattagatgacagtgacttggccatatttatagctgtcattattctcagtggagaccgcccaggcttgctgaacgtgaagcccatcgaggacatccaagacaacctgctgcaggccctggaactccagctgaagctgaaccacccggagtcctcccagctgttcgccaaggtgctccagaagatgacagacctcaggcagattgtcacagagcacgtgcagctactgcatgtgatcaagaagacggagacagatatgagccttcaccctctgctccaggagatctacaaggacttgtattagcagaaaagtcccagtcgctgacaaagtgttccttctatcgattgcactattattttgagggaaaaaaatctgacacctaagaaatttactgtgaaaaaagcatttaaaaacaaaaagttttagaacatgatctattttatgcatattgtttataaagatacatttacaatttacttttaatattaaaaattaccacact

SEQ ID NO: 104 - DNA, 2775 bp, Rattus norvegicus
ctcttctgctcaagatggttgcgtcccgggcaattggcagtctcagtcgcttctctgccttcaggatcctgcgctccagaggctgcatttgcacagctttacaacttcttcctgctttgctgtctagaacccatattaattatggagtcaaaggggatgtggcagttattcggattaactcgcccaattcaaaggtaaatacattgaataaagaagtacaatcagagttcgtagaagtaatgaacgaaatctgggccaacgaccaaatcaggagcgccgtccttatttcgtcaaagcctggctgctttgttgcaggtgctgacatcaacatgctggcctcttgtacaacgccccaagaagcagcacgaatatcacaagaaggacagaaaatgtttgagaaacttgaaaagtcaccaaagcctgttgttgccgccatcagtggatcctgcttgggaggcggacttgagcttgccatagcatgtcaatacagaatagcaacaaaagacagaaaaacagtattaggtgtccctgaagtgttgctgggaatcttaccaggagccggaggtacccagaggctgcccaaaatggtgggtgtgcctgctgcttttgacatgatgctgactggtaggaacattcgtgcagacagagcaaagaaaatgggactggttgaccagttggtggacccgctaggaccaggaataaaatctccagaggaaaggacaattgaatacctagaagaagttgcagttaattttgccaaaggcctggctgacaggaaggtctctgcaaagcagagcaaaggcctgatggaaaagctgacatcgtatgccatgactatcccactttgtctgactacaacattcaaaacagtggaagaaaaagtgaagaagcagaccaaaggcctttaccctgcacctttgaagataattgacgctgtgaagactggacttgagcaaggaaatgatgctggctatcttgccgaatcagagaaatttggagagcttgcattgaccaaagaatcaaaagccctgatggggctttataatggccaggtcctgtgcaagaaaaataaatttggagcgccacagaagactgttcagcagctagccatccttggcgcagggctgatgggggctggcattgcccaggtctctgtggacaagggactgaaaactcttcttaaagacactacagtgacagggctgggccggggacagcaacaagtgttcaaaggactgaatgacaaggtaaagaagaaggcactcacatccttcgaaagggactccatcttcagcaacctgatcgggcagctcgactacaagggcttcgagaaggctgacatggtgattgaggctgtcttcgaggacctcgctgttaagcacaaagtgttaaaggaagtggaaagcgtgactccagaacactgtatcttcgccagcaacacatctgctctcccaatcaatcaaattgctgctgtgagccaaaggcctgagaaggtgatcggcatgcactacttctctcctgtggacaagatgcagcttctagagatcatcacaactgacaaaacctccaaggacaccacagcgtctgccgtggccgtgggtctcaagcaggggaaggtcatcattgtggtcaaggacggacctggcttctacaccaccaggtgtcttgctcccatgatgtcagaagtcataagaatcctccaggaaggagttgaccctaagaagctggacgccttgaccacaggcttcggcttccctgtgggtgctgccaccctggcagatgaagtagggatagatgtagcacagcacgtagcagaagatctaggcaaagccttcggggagcggtttggaggtggcagcgtagaactgctgaaactgatggtctccaagggcttcttgggtcgcaagtctgggaagggcttctacatctatcagtcgggctcaaagaataagaatttgaattctgaaatagataatatcttggtaaacctgaggctgcctgccaagcccgaggtctcctctgatgaagacatccagtaccgtgtgataacaaggtttgtgaatgaggcagtcctgtgcctacaggaagggatcctagccacgcctgaagagggagacatcggagcagtctttgggcttggctttcccccttgtctcggagggcccttccgctttgtggatctgtatggtgctcagaaggtagtggaccggctccggaagtatgagtctgcctatgggacacagtttaccccgtgtcagctactccgcgaccttgctaacaactctagcaagaagttctaccagtgagcaggccgtcccgccctgcccctccacccacgtactaacccagacccggcagtgctgcttctcagccgcgctgtctaaattatcaggaagcaggagaaagaccgaggctagccttggatttgctcctccatgatagtgccttcagccctgtcccgctcttcctcctggtgaagtctgactgtgaattaaatgtttgtacttcatgttggggggtgagccccactgtgcttcttttgcaagccctgcctgagaccccgatcagcagcctagagtaacccagaacacctgctgcctgtgccttccgggaggccagtggggcctggggtgccgagggcattttcgcaccaagccaaacacaggataacattaaaatccagactgtcggcctctgccagcctggtctgttttcctctgcctgcccttgtgtttgagcacccccatcagtaataaagccctgtgctctgagcat

SEQ ID NO: 105 - DNA, 1866 bp, Rattus norvegicus
agagccaacagagcaggaaggcatcatggcagcagcgctccgcagaggctacaaggtcctgagaagtgtctctcattttgagtgtcgagcacaacacacaaaaccatctctcaagcaggagccgggactagggtttagcttcgagttgacggagcagcagaaagagtttcaaacaattgctcggaagtttgccagagaggaaataatcccggtcgccccagactacgataaaagcggggaatacccgttccctctcatcaagagagcctgggaacttgggttgatcaacacacacattccggagagttgtggtggtcttggcctgggaacttttgatgcgtgtttaattacggaagagttggcatatgggtgtacaggggtgcagactgctattgaagcaaattctttggggcaaatgcctgtgattattgctggaaatgatcaacagaagaagaagtatttggggaggatgacggagcagccgatgatgtgtgcctactgcgtgacagaaccctcagcaggctctgatgtggcgggcattaagaccaaagcagagaagaagggtgatgaatatgtcatcaatggccagaagatgtggataaccaacgggggaaaggccaactggtattttgtattgacgcgatctaacccagatcctaaagtacctgctagtaaagccttcaccggattcatcgtggaggccgacaccccgggaatacacatcggaaaaaaggaactaaacatgggtcagcggtgctctgacaccagaggaatcaccttcgaagatgtcagagtgcctaaggaaaatgtgttaattggtgaaggagcaggtttcaagattgcaatgggggcttttgatagaaccaggccgacggtcgcagctggtgctgtcgggctagcccagagagccctggacgaagctactaagtatgccctggacaggaaaacatttggaaagctgctagtggagcaccaaggagtttcatttctgctcgcagaaatggcgatgaaagttgaactggccagactcagttaccagcgagcagcctgggaggttgactccggccgccggaacacgtactttgcctctattgcgaaggcctttgctggagatattgccaaccagctcgctaccgatgctgtgcagattttcggaggctatggattcaacactgagtacccagtagaaaagctgatgcgggacgccaagatctatcagatttacgaaggtactgcacaaattcagaggctgatcatagctcgtgagcacattgaaaagtataaaaattaacagaaattactatcgaacgatgcttcaccctcatgtaactacgctcagagcactgttgctgcttcagggggaaagggctttacttgtcttcccacagaaatgagataaaagacgcgtgtcacagatctgtgcaatggggtcccacggcggagggtgcctctgttgagttccacagtgaccctttctagataggtttggttttggacagtgagtggtcagtccttggccccgaattgtgttaatttgctccttgatcacttgagatggagaaataccctggagttctaatgctcattcaagtgacaagaaaggtagcctgtcacgaaagaactcaggattctacacagacactgaggaatgtggcggattggacccatcacactgtgaagagagagcatttctgtgctgagctgtttcataattttgattatatttcccttgtattgcagaagagtaaaaaagtttatatgcattttctcccattataaaactaaaaactttctggaaaatcttaattctgaactggcattttatttgtcttgattacaatgattcaataaagctagccttaactt

SEQ ID NO: 106 - DNA, 1711 bp, Rattus norvegicus
cgggcctacggctcagtctaaggactgcaaataggcagctggccactagaggatctctaacttttcctacgaaactgagggctgaagtcaaagatacaaaatggtggcctcgtctttcgctgtcctgagagcaagcaggttgtgccaatggggttggaagagctggacgcagctgtcaggtcctccgccgctcagcaccggtggccggaccacttttgcgcggacaaatgctacgctgagcctggagcccgggagccgcagctgctgggacgagccgttgagcatcaccgtgcgcggcctggcccccgagcagcccgtcacgctgcgcgcggccctgcgtgacgagaagggcgcgctcttccgagcccacgcgcgctaccgcgccgacgccggtggtgagctggacctggcgcgcgctcccgcgctgggcggcagcttcacggggctcgagcccatggggctgatctgggccatggagcccgaacggcctctctggcgcctggtcaagcgcgacgtgcagaagccttatgtggtggagctggaggtgctggacggacacgagcccgacggcggtcagcggctggcacaggcagtgcacgagcgtcacttcatggctccaggggtgcggcgcgtgcccgtgcgcgacgggcgggtgcgcgccacgctcttcctgcccccagaacctgggccctttcctgaaatcatagacctttttggagttggaggcggccttctggagtaccgggcgagtctgctggctgggaagggttttgccgtcatggctctggcttattacaactacgacgacctccccaagaccatggaaaccatgcgcattgagtactttgaagaagccgtgaactacctgcgtggccaccctgaggtaaaaggaccaggaattgggctgcttgggatttccaaagggggtgaacttggccttgctatggcctccttcctgaagggcatcacggctgctgttgtcatcaatggctccgtggctgctgttgggaacaccgtatgctacaaggatgagactataccccctgtgtcccttctgagagacaaagtcaaaatgaccaaagatggtctcttggatgtcgtggaagctctgcaaagccctttggtagacaagaagagcttcatccctgtggaaaggtctgacacgaccttcctgttcctcgttggtcaggatgaccacaactggaagagcgagttctatgccagagaggcctccaaacgcttgcaggcccacgggaaagagaagccccagatcatctgctacccagaagcagggcactatatcgagcctccttacttcccactgtgcagcgctggcatgcacctcttggtgggtgctaacatcacctttggaggggagcctaagcctcactctgtggcccagttggatgcatggcagcaactccagactttcttccacaaacagttgagtggtaagagttaggaggtgccccctaaaatataacctgttatgtggtggtttggggaaaaacccaaatatcagaatgccacttcagtttagttcatttgaacacatactaatttttttaagtttctttcttccttcctttctttctttctgttttttttttttgttgttgttgttgttgtttgtttgtttgtttgagacagggtttgtctgtttacccctggctggcctggaacttgctttgtagaccagaggctaggcctg

SEQ ID NO: 107 - DNA, 720 bp, Rattus norvegicus
ctggacaacgcgtacttctggtttccatctgtgaacagaagctgcagcacttcaagtgggagcagagacaagcaaggttttgaggtcccaattagtgctgactccctgcccgtcctctgcttgggaatggcctcagctgctccatctcctgatccaagtttggataccgagtgggaggaatggaagaagaaatttggaaaaacctacagcccggatgaagaacgacacagaagagcagtgtgggaggagagtaagaagacaattgaggcgcacaatgcagactataagcagggcaagaccagcttctacatgggcctaaatcaatttagtgacttgactacagaagaattcaggaggaattgctgtggaagcttaatgtgtagaggaaaaacgactcatgatttgcccatacctgaggatttgggaaagaacagctctctgacacctgagagggatcagccagagtaagagtcgtggcttgattgtaacatcagaatagcctaagagtgaagcaagcactctgccattaccttgggaatcttctgcctcccgatgtgagaggatgatgtcggagaggttcaacagcaggaggtagcccatcacagttgtccagcattggctgtgtatagcgcaacattgaactcatgtaggatcaacactgtggtgtgaactctgaggcacactcatactaataaaacattgccaatattttttcagttc

SEQ ID NO: 108 - DNA, 512 bp, Rattus norvegicus
ggtccaaaatgatccaatttttattttttgtcttaataagaatgtttatacttaaggttcccctttaattcatgatacaaaagaactctatttttggataggcactatttttaaattacatgttatttgtgtgtgcatgtgcaggtgtgtgcgtgtgttggaggacaacttgtcagagttggttctctcctaccatgtagatcctgggggaaagacaatctcaagctgtcaggctgggcagaaagcaccactatcactgagccatctcaccaggtcaataggcacagttttataaggaagttttaatttctttgttgtcttatagcactggagaatgaattcagggcactatagaagaaagtcaaatgcattgccactaagctatatcctcagtctctcacaggcacttaattcattatattaagaaaaaaaagggggggttggggatttagctcagtggtagagcgtttgcctagcaagcgcaaggccctgggttcagtccccagctccga

SEQ ID NO: 109 - DNA, 459 bp, Rattus norvegicus
ccatgtggtgtagtgttacctgccagcccatcgtgaagacagtggacagcacccaaatgacccagacctgttgccagtccacactctgcaatattccaccctggcagagcccccaaatccacaaccctctgggtggccgggcagacagccccttgaagggtgggaccagacatcctcaaggtgacaggtttagccacccccaggttgtcaaggttactcatcctcagagtgatggggctcacttgtctaagggtggcaaggctaaccagccccagggaaatggggccggattccctgcaggctggagcaaatttggtaacgtagttctcctgctcaccttcctcaccagtctgtgggcatcaggggcctaaagactcgtcctcccccaaccaggacccttcagcctttcctccctgacaaccagcttcagagaataaacttgaatgtcttttgccatct

SEQ ID NO: 110 - DNA, 594 bp, Rattus norvegicus
cggccgcaaaggtttttttggagagatggttcaatgttagcaggtaacttttaaggtgtctaaaaaaagacaaatcacagaaaacatttagattggcctatttgtatcaaaaatacagagctttaaaaacgtgtcataatgggaactgggtaacttgttagaaataaagccaaaatataattttctgtcatggatataatcctgtgcgtaaagagtctggaagtgaggtggaacacctggtgtgtctgagggtggtttacatgttgctgttctcatatatttaaagcatgtctgccatgtttgttctaaaagaaacatttcaactaaacgtaccatgtgtttgtttcagatgcgctggggcaatagcagcaattctgactggaccgtcaggagtgctaattgtaacttctgttgcagaattcttgtgggctgctacatagttttgtatctgcctaaagttgtaatttctctgtagatcttccccatagcggtgtcgtcaaggaattcaaagcaggtgccattattttttaaataattgatgtttgctttggtgttaaataaaagaactagatttcttaaaaaaaaaaaaaaaaa

SEQ ID NO: 111 - DNA, 471 bp, Rattus norvegicus
  misc_feature 69: n = A,T,C or G
atcacgtgacggcaaggcagtgaccggcttttctgcttacttctattcgagtgtgctctgggctttgtntgctagaaaagatggccaaggggtttgaagaattgatgtagtgtgggtgtttaaaattctgttcttttgtgatctaactggaccgctgtgcctgacatccccagggtgggtaatggagggctcagggacatgagtgggtcggcctcagcgacctttacgggcacatgggcttgctgtgttatatccatgatgacattgacagagtagttatttgggagacccagagcagcccaaagcttcttgctggaaaaggtggcttgccatagcccccaccatttccaggctctctcattacacaggagtcagccccctgattctgtgatagaaggttccagaacttttcattttgctgggagaaactgtccttcaacaaaatcgagtaggcaaaaaaaaaaaaaacaa

SEQ ID NO: 112 - DNA, 311 bp, Rattus norvegicus
gatatttccagcaagagccctgtggttgagcagggatcaaaaatcaatccaatgtattccagggaccgtcctgtggacgagcgccttgactctatggccacttgggacttgagcatgtagcagacccaggacatatttaagtcagtccaggcagccatggagaagaatgatccaaaaagcatcacattagccatgctatgagtgccttcctgacgttggtcccttcagtgcctcatcccggtggataagatgatgacttagttcttcagttcccggggcgttatcgccattgtgaacaataaagggtgtac

SEQ ID NO: 113 - DNA, 379 bp, Rattus norvegicus
tcaacacaatgacaataccggttgccatgcctgactggattggggaaatcataaaaggctcctcaccagatgaagaactatagacaaacaatggctgctaagagggcagaactagtcttcttcagggacatcaatcccaagaagtcaacacatatacataggaccaatactaaatgcatagcagattatttctttatacacatgtgtatgtaaataaatatatatgtaacaatcagaattaaagacattgtgaatttgagtgggacttggaaggatgtggggaggaattgagggaaagagaggggtaaaaatgatgtaaatacagtactcatgtatgaaatctcaaaaaaacaccaaaataataaaaagtatgtaaacc

SEQ ID NO: 114 - DNA, 430 bp, Rattus norvegicus
agaattctcaggagacaatacgactgtcttttaaagtgatattgacattgcctggtaggcagcatgttattcaagactttacaaaggatgaatggggctgaggtcatgagggtctgattatatgtacattaataaattaaaatgaatgtattaacaatcaataattaacaagttaaatcaatgtattaataattaaaagtaattaataattaaaaaatccataggcttaggaagacagtactgcttgcttatcagcgaattctgatacctatttgtaggtaaagagatttttatttgtatatgcacgcattgctggacttcttatcaacttcacaaaagcctagacttacatggtaagaaggataaagaatcacaattaataaaaaaaaaagtctccataaaattggcctattaaaaaaaaaaaaaaaaa

SEQ ID NO: 115 - DNA, 563 bp, Rattus norvegicus
aaagcgacgctttgaaaagctccaagcttcaactgtaacctgcagcaaacaaataacattcctggcaagaaaagacaagtcttttttaaagtttactgatgcttagatctgtgggcttctagtcctctgaaagtggttgttttcctatgcacagcgagctcagaaataaaaaccccattttgaaacatccaggatgtcccaatattaccatgattttttcccccctttttgctaatccagtccaggttggaaagaagtctcctctgtgtcagattaagccctgtctcttaatgatatggacaaatgagtgtgcctaaggccatgagatgtttcctaatgcagaaggaatctgttgtacgtttttttgattgtactcttctatgctggaccgaattcatatgcagatcgaagtgagtcctgttctttacagatggtattttgatagatactggagtttgtctgtgttatatctgtgccccttctttaagaacaatgttgcattatgttcctttggataaattgtgatttgacaactgatttaaataaacatatttgcctcactt

SEQ ID NO: 116 - DNA, 459 bp, Rattus norvegicus
gcacgaggcttcagagcccctccaaggcttgtcacctctggcagccatcctggctatcagtcttgggccatggtgctgtccctgctaaccagggcctttggaaggcccctcatcttgaggaaggcccacctctccccaggctggatacccctggggagccagagatgccccactctcaggacagaaggccggtaccccaaggccctgctcccaggccgggataggaatatgccccagaaggccacggcagagagctgcatgggtcacgtgacagcccgcagctcagcctcagctgctcccagtggaagagacgtttcctcattctttttggagcaggtatggcagacaagaggtcagaccacagccaccaaccacctgccccttccctgtctccaaaccatccccatgtctaacctcatagttggcaaataaagttaaacagaaaaaaaaaaaaaaaaa

SEQ ID NO: 117 - DNA, 118 bp, Rattus norvegicus
tgtgtatattttgcttcacccacgcaatgttgggttacttcattttgcccggctaaagccaattgggagttatttgtaaatttgctctatgttcataataaaaatttatatatcactg

SEQ ID NO: 118 - DNA, 180 bp, Rattus norvegicus
agcaagcaatttgccattaccttgggaattttttgcctcccaatgtgaaaggatgatgtcggaaaggttccacagcaggaggtagcccatcccagttgtccagcattggctgtgaaaagcgcaacattgaactcatgtaggatcaaccctgtggtgtgaacttttaggccccctcatact

SEQ ID NO: 119 - DNA, 608 bp, Rattus norvegicus
cacttttaataagagctgtatgataaaatgttgaaatacaagtgtaaatattttttatgtttatccagtttcctatttgaaagtgtgtctttgctttttcctctgtaagagaatagaatgtcccagagagctgatgaaggatttgcacacttgtcttgcccaggaagtgcattctccttgtgtctgcagcacatgggcagcctttgatatcataaaaatacctcccgaagaagagcaggtacctgctgtccctagtccatgggaagacagatgcactcaagaacctgcaagcatctgcaaactctgcatgtgtgtttgtgagacctgtagtgaagtagacatggccatccctgcacagtgaggtcagatgtgaataagtgttgcaagaacacattgaatagtgtgtattactgtggggaaatacccaaactgctgtttccatttctactgtatttcagttgcagcctatttttaataaactttgtatctatttaagtgtatttgctattgttttcaaagtgctgacaaagtttatatttgtaatgccagcattcctttttcccatttccatctttcactccttcattaaactgctgagtcattccttc

SEQ ID NO: 120 - DNA, 514 bp, Rattus norvegicus
aggattgtgtcggtatagtttccttcttgtgctctgaagatgccagttacatcaatggcgagacagtagtggttggggaaggaaccccttatcgcctctgaggacctagagacagcctaccagggcaagtgtgtggggagggtgcactccaccttgtctctgtcgcccttccttgccaccgccaacatcttgttcacctcacaaaatcagctctgcccagtgttaagttcctgctttccgtgtggtcaaagtgtggtcagatgagcatcctcgctgttgctatggccctgaaaagggctttggggagggggcggggagctaggggataggtagtggaaacggggcttgctgagaagactgtggctactttagtgaagatcaaatccctctcattctcgtctctggagactttaaagggagatagaaggaacggacctgaacagagatggaaattaacaatttacaaatacggtacaaataaaatgaagatgatcgcgaaaaaaaaaaaaaaaaa

SEQ ID NO: 121 - DNA, 651 bp, Rattus norvegicus
tacaaaacattgtgcgcgaatttgaaattatagctaaagctaggaagtcaagtgtaaaactcaagtagtaagaatttctagaggcgaaaactgtctttgttctacgcagccaacaaaatttcatcgagcccttgagcacagccgtgatatcaaatctgggcaagtgtcccacacacaacagatgcctggcttctaaagccacacatgacaaagcctccggagtcttctgaggcttgcatcaccaagctccaggcttggtgctgccgtctggctgctggtgagctagactttcagcagctgcattttgagtcacccttgagcccctgcacaaagtgtgtctcagagatccgtacaaatggtctgggggttccaccagggttggagaccaccagggttggcttccagaaccttccatgtagctttttgagaccatggaatttcatcattaattcgatcccatgttcaaggcttattccacatttgcctcttaaataaaactcccctagacggttgtggatgtagcttagtggcagaatacttggtgtttgcacggacctaacccttgaaagaacatttcctggcttctcaaattcccttaaatctatctcgcttgccgctcagcatttcagagtaaacacgtcactgttatct

SEQ ID NO: 122 - DNA, 731 bp, Rattus norvegicus
  misc_feature 86: n = A,T,C or G
ccgaagagccagccttttccttacttgtcccattggtcaccacagaccaaccatgtccctagggcaactgaaattccaggcagtgngcgaggaggatgaggaggacgaggaggagagcttagactctgtgaaggccctgactgccaaacttcagctacagacccgacggccttcatatctggagtggactgccagagtccagagccgggcctggtgcagagcccaagctagacctgagccggtgggacctggggccatctgtggcttcgactccatggattcagcgcttgagtggctcagacgggagctgcaggagatgcgggctcaggaccggcagctggcggggcagctgctcaggctgcgggcccagctgcaccgactgaaagtggaccaagtctgtcacctgcaccaggagcttctggatgaggccgagctggagatggagttggagtctgggatgggcctggctctggccccaccgctgcggcatctgggactcacgcgcatgaacatcagtgccagacgcttcaccctctgctgagaagcacttgggtgtttctgcaagatctggggagaaggaaggaagagggaccccagaggttctggcgcctgctggggaggatgggcacggctaggtttctgaatgctgaattcaaagagcacagcgctccaggaagagggagagagggaactcgggccccaaatttcttaataaaaaagcattgaatccc

SEQ ID NO: 123 - DNA, 341 bp, Rattus norvegicus
  misc_feature 48: n = A,T,C or G
gtcttgtctcctggcgttcattcacatactctgtagctcttgactttntttaagcatctttaagaagtgcctggccacttctctaacacagggtggagctgtggtgagggagcttgtcctcccggcccccctccctgccacccagcaactaattactcggttcttttgggttgaattttaaataccaaattacttttgtgttgaatggcaatgttatcgtggtggtgttgttaatgttttgttcagctgtccaatccagacctaattgtctgggtttttgaagaaacacatgtactcactgataaggaggtgtatgattaaacaacacattttgcatgttt

SEQ ID NO: 124 - DNA, 627 bp, Rattus norvegicus
acgagaaactgcctcaaggctatcgcatggagcagcctggaaactgtgatgatgaagtgtacgagctgatgcggcagtgctggcgggaccgtccctatgagcgccccccttttgcccagattgcactacagttgggccgcatgctggaagccaggaaggcctacgtgaacatgtcactgtttgagaactttacctatgcaggcatcgatgccacagctgaggaggcttagggtgccccccaccagaacctggctgtgctggccggagcaaactgcttccacctgtgactgtgaacccttccaacctctgacccaagctgtctcaagaaagtcttttaatttaaaggagaaaggaaaggatccaggaaacatggggtggagggaaacggggatccccatttttggcagctgctcctatagctaccccttcatattcttccttctacaaatgtgttccccactctgatgctgcccaaacccaaaccccacttctgatcctctaccaaaagcagcatgcatgttactaacaccccgtttagctaccctactctctgctcgtactcaaaaaataaatgcttggaacagcaaaaaaaaaaaaaaaaaaaaaaaaaaaaaatggaagcggccg

SEQ ID NO: 125 - DNA, 526 bp, Rattus norvegicus
  misc_feature 507: n = A,T,C or G
caccagcactcttccctttattgatcgcctggcagaatcacattatgcaaccatgactgcagcaagaaccacactgaatggaagcaggaagtctggggctcaagagtcaccagagagtggcagctgggagatggcacctcgaggtgcagggtggaggctaggcctcaggtgtcccttaacccttactatggagaggctgaggcccctcatcgatagatagtcctctgactcctggtccctgggtatttcctcatgaagacagattctggcttggctgtggagatgaaagagactggccagggcggaggaaagggactcttcacagctcctgctgaggaggggtgggctggacgggttcccttccccatgattcacatcgatggatgatatgctggggacccgggccttagtcttgttcagcctctgggctcagccctatacatactacagcaggtgctgaggacaaggcctggaaggcacttggcttggacctccgggccctgctanagaatgcttatctggctca

SEQ ID NO: 126 - DNA, 421 bp, Rattus norvegicus
ttcgagcggacgaccgggcatgatcatgccataccaaaggaaactgccaggcagaacgatgtggactcgtatccagtttgagttcctcatctgaagcctcgatccatggtaaatggttggagctgatgggaaagcccagtgagtccaaagggcatcctgttaacgtctgaaggtggcatcacaaagatcacgttcaatcggtcctccaaaaagaacgccataaccttccagatgtatcaggatattatactcgcgcttaagaatgtccaggtacggagtgacacagtcatcagcgttttcacaggagctggtgactactacagcagtgggaatgacctgactaatttcagctagcgcctctggggggatggacggtaggcggttaccaaaggtgctgtagtacctcgtgcgcgaccacgct

SEQ ID NO: 127 - DNA, 437 bp, Rattus norvegicus
agttttgtaaacagctaattttattccttgataccaattggttgttcatgatacatacttttctgcaagaaggcaatgaatgaaataaaggcatagaggggaaattggggaaaaaccacaatgtagtaggatgtcacttaattaaactcgtacttgattggctagttgttttagttacaatttcaagtcttatagatacagaattctactttttttccagaacaaacatatatgtccttaaagacagtgggggagacaacagatttttaactgctgagcttcttacttctaaggagaacagtcaacattgttacttcttgtcccttcacagtctggaattcatgtgggtcattagcttctccaatttgattactagggctatgtttcctttaatcttcaactttcctgacataaatacctgcccgggcgccgctcga

SEQ ID NO: 128 - DNA, 667 bp, Rattus norvegicus
ttcgaagccggccgccccgggcaaggtcaaagccttttttttttttttttttttttttattttttgtttaagaacatcaacatttatttaacatgataaaaaagaaatgagctatgaacatttgcatcagactatagtccgcagccttattacatgtgctcactgtgtgacgtccgcacaatgaacatattacatctgtacacagaccaagcacgggctctagaagcccgcttattgctggacacgtctagccccgtgacgtaatgtccagtacttcaaaatacccacacttggaattgtttggctctccacggaaaagctgagcagcagcacttgtggagcagacggagcgcggcagaactgctgacggtgcagtctcactgaggaggcccgagccgagaacaggacagacttcacttagcagtgataaaatggcacattttaaatatatttatataaaatttttacaaatcaagtgtcaaacgaagcactgcagaagccaaaaagggaagaaaaaaaaaaaaagcaaataagcctcacaggaaagggtaggctcactgagaagcaaaagaaagccaagttcactgagacttaagcatccaaatgtggggactgcaaccaagcaagctctgcatggagcggcgcgggggagaaagcagctgactga

SEQ ID NO: 129 - DNA, 366 bp, Rattus norvegicus
gaaaaggcttatgttagcaacctcagagacttgagccctgctaagtgactgaccactgtttagaatgtccagaatctaatgtccatctgtccccgtgtcctctgtcctctttcagctagtttaggcttatgcctagagtcaccccaaagaactgagactggctgcaccagcccagctgttttcctcattgatcagaacagtacgctctgctgccctctcctccccgtccagtagcagttaagttccatccaagtacgatgggactgaaagactcctcgtcggccgtagttctggaggctctgaatgtctaactttagcatcaaagtgtctgtctcaaattcccagtaaacacctctgtaggagatg

SEQ ID NO: 130 - DNA, 368 bp, Rattus norvegicus
cggcacgaggggacgtggccaagctcatgaaagcctacatcagcatgattgtgaagaagcgctacagcaccacgcggtctctgagcagccagggcagctccaggtgaacacgagcaagcccgtgtgtctttcccgtctgaacgtgccgctctttgcctgggccagcgccaagtcctgacccagcttcggaaacacagctgtctaggctctggaaaccagtggtcagagggaggagtctccggggctcccttcaccccgatcagcctcagtgatcgcatattaagctgtcaaccctaacagtctgcacaatttcttaagctttagtactcgtagatgatacttgccttaaagaaaaaaaaaaaaaaaaa

SEQ ID NO: 131 - DNA, 715 bp, Rattus norvegicus
  misc_feature 69, 205: n = A,T,C or G
cagcactgcctctggtgggtggtgtttgcagccaggattagatgccagtcctcgggttccctggccttnttggaaaggtgtgcttccttgaggtctgagaatggaaggctctgcctcactctagctaggaggcgcaatgggaaagtatgagttcagggcgtcagggcagtggctcctgaagagccagctgtggacagagggagtnaggctttatttaaagtgacaggaagaaacatggcgttttggtatattgggagcaatgccaagattccctcctgccctacataggtcacagacaccttcccaaccatcccctcctccacttcccataaatgaagacagccctgatgaccctcaccccttttgcataggtcactggatcccactgtccttcctcggtgcttacacactttacagaccctttaggcgagcccttgcatagagcgttatctcagtgctccattccagtcctgactccctgtggccattgagactttggatttaagaactcacattgctagggagaggggctttgctgggaaaggtgactcctctgtaacctagcctcttgtgctcctccatgacagaaatgctgggtggagttttacatttgccaatggccagcttgtgaatatcttcatatacactttctattcatgttactgtagtttctgttttgaaataaaacttctgaatgtaaaaaaaaaaaaaaaaa

SEQ ID NO: 132 - DNA, 429 bp, Rattus norvegicus
gagaagaatttgtggaggacaacaaaggactggtaaacaggaaaatgcatgagcacagttacctgggagaacgacaaactcacttgtgtacagaaaggagagaagaaaaacagaggctggagccactggattgaaggggaccagctccacctggaaatgttctgcgaaggccaggtgtgcaaacaaaccttccagagagcctgatctatgtccagccatagagcccacttggggcaactgctcgatgccaaattatcttgcagaaggaatgagtgtttgtctgttttgggttgataaagagccttatattggagagatgtcacacagcctgtactagtaactatttgattgcagcacggtttcagctccaataaacctattcaaatgacgctgattttttctttcaacacttaaaaaaaaaaaaaaaaa

SEQ ID NO: 133 - DNA, 677 bp, Rattus norvegicus
tttacccatgtactcttttgctgtatagaagtagtttgaaactcattgtttccttgtggtaagtgactgagacgctgccacagggcttgagacactgatgaatggtgctattttggactttcaacatgctccttggcgaggtagctctgacggagttgtttttaatttccatgttctaagaaggtgttggtactctgtttcccggaatgttcttctctagactggactgacttgttttccttgtgtcttgagtgtggctttcttcttcagtgttgtaggctgagcggatgctaccaagagtgtgagaggctgtcctctcgtgactggccctgggtggatgtgcagtcacggtagcgggagcaatcacaaaactgtaattgacctaccagaactcttcctttctgcagcctcacccgcctgacttagaaaaagaaaagcaataatttttttccaggcgtttcgaggttatttctttggaatctttttgtttgactagatatatcagctatgtaaatagagcaaggaaacggtattgtgcatttgtggcatttacgtagagttgcagttgtacgctgctgaaaacgcaggcttttgtaacatgtggtccttccataagtacccaatgtattttagctattttagtcgtatttgttcaataaatatgcaagctataaggt

SEQ ID NO: 134 - DNA, 653 bp, Rattus norvegicus
tttgacttcaatcaggaaatgtataagttaactgatgttgaagtatcttagtacatgtgtatacgtctgtgagcacacacttggacgtgtatatgtgtgtgtgtgcacgcacgtgtggaacaaccaataagaaagtggttaaaaaatattgccaaggattcttagttttaatcagcgagacttaaaattaaaaaacctgtgatttggtttactactcctcatagaaaagtttttctcccctgtccctggacaggggctgtgttaagccccaggtcagtttctacgaacacttctggccaatgtgctgctggctcacaggagttcttagccatggatttcaaggctctgtttcactgtaccttcggaatgcttcttctgtactctcgttcctcgatcaacttcatggcatcacttgctgctatgtggttcactaaatcctatcatctgttcaatattcttggctgccctaaggcaaattaaggcttcctaaattcatatagtttctaccagagacctgacagcaggttaaataacagctccagtattattcagttcctcttaaatagccatgatttaaatgacaaggaaggatattaacttctgagaataattaagattgcctctcccccttaaatcaataaatgtatttgatg

SEQ ID NO: 135 - DNA, 489 bp, Rattus norvegicus
aattcggcacgaggggcttagtgatccaagacactcgttctcatctgtgtcatgttctagtttgtggcactgtaactgggatgggcatttattatggtctcagagccccactttactggggttaccccacaatctaaggccaaggtaaagatgtagcaaagtgttcagagttctgtcactcaaggttaccagctttattcttaagaataagattggccgggataacgtttactgtggatggaccactaaagtctacaaattctaatcagggtggcagaggccctgaggagctgggctgtggctcagtgcagagctcttgtctaaggccataggctctagcccagcaccttgacaaacacttagaatgcacgtaaatggaagatctcattcttaaaaggcacaggatagattctttgttgttggcatagtctcctttccaaatcatataacgtttgtaatttaaagataaagattaaaaaattttatatg

SEQ ID NO: 136 - DNA, 681 bp, Rattus norvegicus
  misc_feature 25: n = A,T,C or G
gacttgttccgagacagcacgctgnagtcgatgcgccccaaggatatgtttggcaggacaaaattgagcagtttggcagcaaggaccttcaaagtcgatgcagattccggattggcaaggatcagaggtgaaattaggatcatgccagaaaagtgggttggtctctctgcagctgctaggatggagatggcaccgcccatggagtggcccaggaggaagacggggacctcggggtagtccttctggacggtgttcacgtgctgcaacaaatctctgacaaaaacttggaagtccgataccaccatcctctctccctcgctctgcccatggccaacatggtcatgggcaaacaccagcatgtccagcctcttcaacatctgagccagctcgtcataacggccacagtgttccccagctccatgggacacgaagatgagggccttgggtgtgccactgggcttccagtacctacaaaagaggtactgtccatccgcattgaccaggtgaggaaggtcctggtaggggacgttctgtggagttcgcctgggtgaacttgcctcaggcatcctgcaggggtctttgggccttgtttccattagtcttggcttttgcattccactaccgccacagcctcgagtatcagcgccaggcaaacgagggctgttccctcatttcggccgc

SEQ ID NO: 137 - DNA, 587 bp, Rattus norvegicus
ggctaccctgaagcagtgaagtctgagcccctgtcctctcaggtgcccgcccaaaggcttacgccaggcctcacttagcgccagcaataactggggctcactgctcccttggagcactttcatctttacagagggccttgctgttacctcaggatcatgtcactgcacatagaaccctggggaggggctctgctgccaaggagaactgcctggctgctggaagggggggggggctccaggaaggtgggatccaggtatcccggagttggtggaatttattctagatcttgggagggccctctgccccctctggtggccctgaccatgcatagcagtcagaggctggccacttactataggtcataaggtcactgtgcccctcagcagggcccaagcactgcatgtagggaaggaagggtccaggagctgtccagagcgccatttagctctccttctgtttaggaaataaagacagagtgtgcaaagagaggcagtcagcactccctcctgctcagggaaccctggacagctgtggacaggcatggggtattactactcttcattaagtttaaaaaaaaaaaaaaaaa

SEQ ID NO: 138 - DNA, 595 bp, Rattus norvegicus
atttgaacatgagattctcctgacagttggccatatcggctttttgcacggatgatggggatttgaacatgagattctcctgacagttggccatatcggctttttgcacggatgatggggatttggacacagtttttcatgcttgagccatagctgctcttaccactgaaccatcttcccagcacaatcgctgctacttttttttctttcttggcaaatcagttcatctctgtagttttctattattttagacatttactatagtttggcataaaatccattattgatgtcagatattttctttaaccagcttttttatatatatattcttgaaataaagggctaaatatatatattttttcatctgtgagtcatgaaaatcttaaggagaatttttctttttctctcttttcttctttccttccaagttgaaagcagtgaagccagaaagaaaattaactgtgatggggattatttcagatgtatcgatatcatttcccccggctgggaaatgttaaactttgtaaactctgaagcacacaaagtgttccttcccattttactttaataaaaataaaagcaaatgcatccagta

SEQ ID NO: 139 - DNA, 436 bp, Rattus norvegicus
ggaaggtggccctgaatagctcttcttccccacgcaacttccccctcccaccctgctggttacccacagcatgttgtatgtatttagagaggcaccttttctcaggtcactgagttctccatgctgaggaaggtggctttgaagataatcgtttaatatatatggtatattctaaattaaagattatatgggtgggtgggtgaaacctgagcagctttggaagaactggtgcccacacacagggccagtactgccaaggacccaggccccaattgaggacttagctggctctccttgcagaaaaagacacagggtggaggactgtggccctgggcagtccctctgtccagagccactaggagttgctttgccagtagcacagctacctctggtggcaggagactcccatggagccatggtgctggctgcctgccca

SEQ ID NO: 140 - DNA, 437 bp, Rattus norvegicus
tgtccctggtcccgtcccaacacctcctgtggccctgccctgtttcttctagccttgccctccctggcctcatgctcacactccaaatggtgtacctcccagtccacggtgtgaactgatttagtggttctaagcagttaaagggaccctcggatagttcccagtgatatgcaacacaccacagactcctacggtccttcatgacttgccatcggggccaagagatgagccaggcttcacaaggctcagcggacaggggcaagcacaccgcccacgtctactctgctcctgctacaatatctcttccgggggtttcgcaatgtgtctgctccccccaccctctgtcttgcctgctggtgggaagacaggagtgtggcttgtagtacttatgttttgctccactcaggaaaaggttggataaagcagagctcggtctt

SEQ ID NO: 141 - DNA, 2389 bp, Rattus norvegicus
gtctcaggcagaggtccagactcagtggaagcagaggagagagcctgaaacctggcgagcaccatgagcaacaaatgcgatgtgatcgtggtggggggcggcatctcaggtatggcagcagccaaacttttgcatgactgtggcctcagtgtggtggttctggaagcacgagactgtgtgggaggcaggacttacacaattaggaataaaaatgttaaatatgtggaccttggaggatcttatgttgggccgacccagaatcgtatcttacgattggccaaagagctaggattggagacctataaagtgaatgaagttgagcggctgatccactttgtaaagggaaaatcatatgccttcaggggcccattcccaccagtgtggaatccaatcacttacctagattataacaacctctggagaacaatggatgagatgggccaagagattcccagtgatgctccatggaaggcaccccttgctgaagagtgggactacatgacaatgaaagagttgctagataagatctgctggaccaactctacaaagcagattgccacactctttgtgaacctatgtgtaactgcggagacccatgaggtttctgcactgtggttcctgtggtatgtgaagcagtgtgggggtacaaccagaatcatatcaacaaccaatggaggacaggagaggaaatttattggtggatctggtcaagtgagtgagcggataaaggatatccttggggacagagtgaagctggagaggccggtgatccacattgaccagacaggagaaaatgttgttgtgaaaaccctaaaccatgaaatatatgaggctaaatatgtgattagtgccatcccacctgttttgggcatgaagattcaccatagtcctcctctgcccattctaagaaaccagctgattactcgtgtgcctttgggttcagttattaagtgcatggtttattataaagaacccttctggaggaaaaaggatttctgtggaaccatggttattgaaggagaggaagctccaattgcgtacacattggatgataccaagccagatgcaggctgtgctgctataatgggatttatccttgctcacaaagctagaaaactggtacgccttactaaagaagaaagactgaggaagctctgtgagctatacgcgaaagttctgaactctcaagaagctctgcagccagtccattatgaagagaagaactggtgtgaggagcagtactccgggggctgctacacagcctacttccctcctggcatcttgacccagtatggaagggttctacgccagccagtgggcaagattttctttgcaggcaccgagacagcttcacattggagtggctacatggagggggctgtagaggctggagagagagctgccagagagattcttcatgccattgggaagattccagaggatgaaatttggcagccagaaccagaatctgtggatgtcccagcaagacccattaccaacaccttcctggagagacacttgccttctgtaccaggtctactaaagctgcttggattgaccaccatcttgtcagcaacagctcttggtttcctggcccacaaaaagggtctgtttgtacgtttctaaagatgggctttaggaccatatccacaggtttctcattcagtgtgtcacaaaagcttttggaaggagttgggataaaaatctgacaaaggtgcagagattatggagtgagaaagcacagtaacttggtctccattttggctatcttttagcatcgctgtggtccactcattttcaactttcctgcactctgaatattgagaacagatacacaggctctctcacaacctacctgccctatgcacatagttgtttttcaaaaccctatgcctttgtgcttgtctttcttctggtgtgttaggtcctcacctatatcaagttcttcatcattgtacctagaatcctgtcttgttagaaccagaaggcattagacactgtagcttattgtctactttagagttaaataaaccaaatgcaacagaagtgaaatctaaccacacaaggcctacacaaagctactggtatttgggtgactggaacacaagctgatgcttttctcacctcccaaggttcattcccctgtgatcctcctccaccttatgtcatagtcattcacggatcattgttcttgtggatttactctgtattaactggtattgtgttactcagtagattcttctaggcttgctattttgtgtagtgttgccagctgattctaatttttcttgagaatgggagtcttgtctttgtcatttcttttttgcatcttccagtatgcttccactcatagatttaagacatgcttaaataattaaaaataaagctg

SEQ ID NO: 142 - DNA, 2567 bp, Mus musculus
aattcagggtaggggttttctactgaggactttttcttcttcacagctgccttctgaaatgtgtggagcaactggtggatggtttcctagcctttcaaaggtagtttacaaatgatttgaagtgctgatcctttcagagtctcaacagattatttcttaaacagctcatacattgctgtttatgcatgaattagaaccgggccacgtagaaaacactgtgattgtacctgggagttggcgagaaaaccagtgctctcccttgattctgctgcacgaggagaatgggctgtgatcggaactgtgggctcattgctggagctgttattggtgcagtcctggctgtgtttggaggcattctcatgccagtcggagacatgcttattgagaagacaatcaaaagggaagttgtccttgaagaaggaaccactgctttcaaaaactgggttaaaacaggcaccactgtgtacagacagttttggatctttgatgtgcaaaacccagatgacgtggcaaagaacagcagcaaaatcaaggttaaacaaagaggtccttacacatacagagttcgttatctagccaaggaaaatataactcaggaccccgaggaccacactgtgtcttttgtacagcccaatggagccatctttgagccttcactgtctgttggaacagaggatgacaacttcacagttctgaatctggctgtagcagctgcaccacatatctaccaaaattcatttgttcaagttgtgctcaactctcttataaaaaagtccaagtcttctatgttccaaacaagatctttgaaagaactcttgtggggttacaaagatccattcctcagtttggttccatatcctataagtaccacagttggtgtgttttatccttacaatgacactgtagatggagtttataaagttttcaatggaaaggataacataagcaaagttgccataattgagtcctataaagggaaaaggaatttgtcctattggccaagctattgcgacatgattaatggcacagacgcagcctcctttccaccttttgttgaaaagtctcggacattgagattcttttcctctgacatttgcaggtctatctacgctgtgttcggatctgaaatcgaccttaaaggaatccccgtgtacagatttgttcttccagccaatgcctttgcatcacccctccagaatccagacaaccattgtttctgcactgaaaaagtaatctccaataactgtacatcttatggtgtgctagacattggcaaatgcaaagaaggaaagcctgtgtatatttcgcttccacatttcctacatgcaagtccagatgtttcagaacctattgaaggcttacatccaaatgaagatgagcataggacatacttagatgtggaacccataactggattcactctacaatttgcaaaacgactgcaggtcaacatattggtcaagccagctagaaaaatagaagcattaaagaatctgaagagaccttacattgtacctatactgtggctaaatgagactgggaccattggtgatgaaaaagcagaaatgttcaaaacacaagtgactgggaaaatcaagctccttggcatggtagagatggccttacttgggattggagtggtgatgtttgttgcttttatgatttcatattgtgcttgcaaatccaagaatggaaaataagtagtggatgagcctacatatacactggctacatctttggtaaagccgatcacaaaatgaaaacttaatatatgcttcgtttttacaaaacacacctatctttaggagaagaaatggtggtgtgtgctctctctctctttctctttctctcttattgcagatatatatttatttgtaaatatatatatatgcaataagtcacagcatatttcaaaagattaatatgtcactataggcaatattttttaataaaatcttgcacttttattaaaagtccatcatttgcaactgagtggacttcaatttctgtagacccaattatcctgtttggttctgatttactgatttgttccatgttggcaaatttcaagaatgtacattctgagaaatttttgttttccctcactggaggaaactgctatcatgactggggtggcccctttgtttatagcaaatttggcttgcaactgtcagcacatggcataagtataacatcttgaaagacttaagaatgaaaaatgaacaattcacatgtgagccactgcttatatattaagtctctccctctctggagttcttggctacagcaaggccagatatcacattggttttggttttgttgtttttgttttgtttttgttttttactctctgacacagagcttatgaaatggacttttttttttttttttttttagcataccttagctctttgtattttaagtatgtcgtcatgttccatgctgcatagctctttaaaaaacctgagtaggtttttctctttctgctcagctgcaactaataacaaccttggagagctgttatagtgttaaaagatgtaaatgataataaaagaattattaaatgg

SEQ ID NO: 143 - DNA, 399 bp, Rattus norvegicus
atgtgtgatgcctttgtggggacctggaaactcgtctccagtgagaacttcgatgattacatgaaagaagtgggagttggcttcgccaccaggaaagtggccggtatggccaagcccaacttgatcatcagcgtagaaggggacttggtcgtcatccggtcagagagtacttttaaaaacaccgagatttccttcaaactgggtgtggaattcgatgaaatcaccccagatgacaggaaagtgaagagcatcataaccctggatggtggggtcctggtacatgtgcagaagtgggatggaaagtcgaccaccataaagaagagacgagatggtgacaagctggtggtggaatgtgtcatgaaaggcgtgacttctacaagagtttatgaaagagcataa

SEQ ID NO: 144 - DNA, 2623 bp, Rattus norvegicus
gagctcttggagggagttgagcaccaggcatccagcggttatgtcaaggcccctgccaacatggccagcgaaatcaagaagaagctcttctggagggctgtggtggctgagttcctggccatgaccctcttcgtcttcatcagcatcggttctgccctaggcttcaattacccactggagagaaaccagacgctggtccaggacaatgtgaaggtgtcactggcctttggtctgagcatcgctactctggcccaaagtgtgggtcacatcagtggtgctcacctcaacccagcggtcacactggggcttctgctcagctgtcagatcagcatcctccgggctgtcatgtatatcatcgcccagtgtgtgggagccatcgttgcctccgccatcctctccggcatcacctcctccctgctcgagaactcacttggccgaaatgacctggctcgaggtgtgaactccggccagggcctgggcattgagatcattggcaccctgcagctggtgctgtgcgttctggctaccactgaccggaggcgccgagacttaggtggctcagccccacttgccattggcttgtctgtggctcttggacacctgctggccattgactacactggctgtgggatcaaccctgcccggtcatttggctctgctgtgctcacccgcaacttctcaaaccactggattttctgggtgggaccattcattgggagtgccctggcagtgctgatctatgacttcatcctggccccacgcagcagcgactttacagaccgcatgaaggtgtggaccagtggccaagtggaggagtatgacctggatgctgatgatatcaactccagggtggagatgaagcccaaatagaggaggcttggcctgggcatccgtatgggggtggggcagggatgggcggagggaggggagggctgaactcatattatagacactctgacaagctgaccaaagtcactccccaagacctggctgtcccacatggtctagccttgtctggggcagtaatatcactgtctttctttctgtttcctggtctcagagcttcctggggcccaagacttatcaactcagcacctcactcctttgacatcatggaggagtgaaagggagggacccacctgctagttgtcccctcagagtgtgctagaaagtccccctcactccaaagttgcccagcaagacacccaccttaggtgcctgggattctgccattgttactttgtgcctttgatcatggccttccttaggtaggcaccttagccccaaaggcactttgagggagaggaagtcccttagctttcccctttggtctgacttacctccaggacccttccccttaaactcactctaagaccttggaattttccctatgctgaggcctcagtgatcacgtctgtaaagtggcaaggaagggacagctttggggactctgtaagtgtggacaagccacaggttctagaagggagagtctagacagcactgcatagtgcacctggctgagctctttcccaacatccacagcccatgagcacgtgtggatgagctacagagcggagaagcagtccaggatgctgggagtgcctgttcacacagagagccttcctttaggcaggtctgttgcagcagagtaaaggtcatttcatggtggaggaagagctcacgaaatctctcctagctctagtgggtctgctcatgtaccatggcaccaactggctgtttccctctagtctcccttgcagtgtagatgtgacgtgtgtgtttattaaagagcactgggctattgcagcgtcatgtctgaggaaagaagcagctagacatgcaacagaccccagacagatgcccatgccgggcacacaggggtttggatgcccctagttcatcatgatcaaggaggccactcttgtcctggcttatgagctgctggctggatgaatttgaccagagcctggacaatctgaaggggctcactatgtgactccaggcacagtctccttattgcaaggacctgatgctgtggcttctgctatagcccaagaacatctcagagtgcattcagctcagggcttgcatttagctctctgggttattctattcaatcccaccaagccagagcagctctaccactgtgccgttaaccatgtcgtgaaccgagagccacattcttcaggtgcttagaagcagcagaatagtcaggaggccattgaccactggcatagtacagctgcatactcttctccattccctagcaggcactatactcacttcacaggtcaggacactgaggacccatatgctcaactatatcatattgggtcaagctcagcagtcaaagccatgtttggccacttcatagtcaatgaagtggactcctctcatttccagcttctccgtttctgcctggacaatggctaagggccagggatgggggtaggggtgggagtggaggtggtgagagctgtgctggaggggggcaggcaggcccatcccacctggctctggccactgtgaaccaggaccctgcatctgtctgcctgtgtatgtttctttgcaattggaattccatcttatggtaagaaaataaaggacaatgacttgtaaggtc

SEQ ID NO: 145 - DNA, 5236 bp, Rattus norvegicus
cgggccggcgggagtagaagagccactgagccatgggcgcaggcagttccaccgagcagcggagccccgagcagccggcggggagcgacacgccgagcgagctggtgctcagtggccatgggcccgcagctgaagcctcgggagcagctggagaccccgccgacgcggaccccgccaccaagctcccacagaagaatggccagctgtcttctgtcaacggcgtagctgaacaaggagatgtccatgtccaagaggaaaaccaggaggggcaggaggaagaagtcgttgatgaggatgttggacagcgagagtcagaagatgtgagagaaaaagaccgagttgaagaaatggcggccaactccacagctgttgaagatatcacaaaggatgggcaggaggagacatcagaaataattgaacagatccctgcttcagaaaacaatgtggaagaaatggtacagcctgctgagtcccaggctaatgatgttggcttcaagaaagtatttaaatttgttggttttaaattcacggtgaagaaggataaaaatgaaaagtcagatactgtccaactactcactgtcaagaaggatgaaggcgaaggggcagaagcctctgtcggagctggagaccaccaggagcccagtgtggagactgccgtcggagagtcagcatccaaagaaagtgagctgaagcaatccacagagaagcaagaaggcaccctgaagcaagaacagagcagcacagaaatcccccttcaagccgaatctgatcaagcggctgaggaagaagccaaagatgaaggagaagaaaaacaagagaaagagcccaccaagtccccagaatccccgagcagcccagtcaacagtgagacaacatcttccttcaagaagttcttcactcacggttgggccggctggcgcaagaagaccagcttcaagaaatcaaaagaggatgatctggaaactgccgagaagagaaaggagcaagaggcagaaaaagtagacgaggaagaaaaggaaaagacagagccagcctcggaggagcaggagccggcagaagacacagaccaggccaggttgtcagcagactacgagaaggtggagctgcctttggaagaccaggttggtgacctggaggcatcgtcagaggagaagtgtgctcctttggcaacggaagtgtttgatgagaagatggaagcccaccaagaagttgttgcagaggtccacgtgagcaccgtggagaagacagaggaggagcagggaggaggaggagaggctgaagggggcgtggtggtagaaggaacaggagaatccttgccccctgagaaactggctgagccccaggaggtcccccaggaagctgagcctgctgaggagctgatgaagagcagagagatgtgtgtctctggaggagaccacactcaactgacagacctaagtcctgaagagaagacgctgcccaaacacccagaaggcattgtcagtgaggtggagatgctgtcctctcaggaaagaatcaaggtacagggaagtcccttgaagaaactcttcagtagctcaggcttaaagaagctgtctgggaagaagcagaaggggaaacgaggaggtgggggagacgaagagcctggagaataccaacacattcacaccgaatccccagagagtgctgatgagcagaagggagagagctctgcgtcgtcccccgaggagcctgaggagaccacgtgtctggagaaagggccgctggaagcaccccaggatggggaagctgaggaaggaactacttccgatggagagaagaagagagaagggatcactccctgggcatccttcaaaaagatggtgacacccaagaaacgggtccgaagaccttctgagagtgacaaggaggaagagctggagaaggtcaagagcgccaccttgtcctccactgatagcacagtgtcagaaatgcaagatgaagtcaaaactgttggtgaggaacaaaagccagaggaaccaaagcgtagggtggatacttcagtgtcttgggaagcactgatttgtgtcggatcatccaagaagagagcaaggaaggcatcctcttcagatgatgaaggagggccaaggacactgggaggggacagtcacagagcagaggaggccagcaaagacaaagaagccggaacagacgctgttcctgccagcacccaggagcaggaccaagcgcaaggaagttcctcacccgagccagcgggaagcccttccgaaggggaaggtgtctccacttgggagtcatttaaaagattagtcactccaagaaaaaaatccaagtcaaaactggaagagaaagccgaagactctagtgtagagcagttgtccactgagatcgaaccgagtagagaagaatcttgggtttccattaagaaattcatccccggacggcggaagaaaagggcagatgggaagcaagaacaagccactgtggaagactcagggccagtggagataaatgaggacgaccctgatgtcccagccgtcgtgcctctgtctgagtatgatgcagtggagagggagaagatggaagcccaggggaatgcggagctgccccagctgctgggggctgtgtacgtgtccgaggagctcagtaagactctggtccacactgtgagtgtcgcagtcattgatgggaccagggcagtcaccagtgtcgaagagcggtctccttcgtggatatccgcttccgtaacagaacctcttgaacacacagcgggagaagccatgccacctgttgaagaggtcactgaaaaagacatcattgcagaagaaactcctgtgctcacccagacgttaccagagggtaaagatgcccatgacgacatggtcaccagtgaagtggatttcacctcagaagctgtgacagccacagagacctcagaggctctccgtactgaagaagttaccgaagcatcgggggccgaagagaccacagacatggtgtccgcagtttcccagctgactgactccccagacaccacagaggaagccaccccagttcaggaggtagagagtggtgtgctagatacagaagaagaggagcgccagacgcaggccatcctccaagccgttgcagacaaggtgaaagaggagtcccaggtgcctgcaacccagactgtgcagagaacggggtcaaaagcactggagaaggttgaggaggtagaggaggactccgaagtgctggcttcggagaaagagaaggacgttatgccgaaaggacccgtgcaggaagctggagctgagcatcttgcacagggctctgagactggacaggctactccagagagccttgaagttcctgaagtcacggcagatgtagaccatgtcgccacgtgccaggttatcaagctccagcagctgatggaacaggccgtggcccctgagtcatccgaaaccttgacagacagtgagacaaatggaagcactcccttagcagattcagacactgcagatgggacacagcaagatgaaaccattgacagccaggacagtaaagccactgcagctgtcaggcagtcacaggtcacagaagaagaggcggctactgctcagaaagaggagccttcgacactacctaataatgttccagcccaggaagaacatggggaagaaccaggaagagatgttcttgaacctacacagcaagagcttactgctgcagccgtgcccgttctggcaaagactgaggtgggtcaagagggtgaggttgactggttggatggagaaaaagtcaaagaagaacaggaggtgtttgtacactctggacccaacagtcaaaaggctgctgatgtgacatatgacagtgaagtgatgggagtggccgggtgtcaggaaaaggagagtactgaagtgcagagtcttagcctggaggagggagagatggaaactgacgttgaaaaggagaaaagggagacaaagccagagcaagtgagtgaagaaggtgagcaggaaacagccgctcctgagcatgaaggaacctacgggaagccagtcctgacacttgacatgcccagctcagagagggggaaggcactgggaagccttggaggaagcccttctctcccagaccaagacaaagcaggttgcatagaggttcaagttcaaagcctggacacaacagtcactcaaacagcagaagctgtggaaaaggtcatagaaacggttgtgatttcagagacaggtgaaagtccagagtgtgtaggtgcacacttattaccagctgagaagtcctctgcaacgggtggccactggactcttcagcatgcagaggacacggtacccctggggcctgagtctcaggcagaatccatcccaatcatagtaactcctgctcctgaaagcaccctacatcctgacctacaaggagaaataagcgcatcccagagagagcgatcagaggaagaggacaagccagatgctggtcctgatgctgacggcaaggagagtacagcaatcgaaaaagtcctcaaggctgaacctgagatcctggaacttgagagtaagagcaacaagattgtgctgaacgtcattcagacagccgttgaccagttcgcacgtacagaaacagcccccgaaactcatgcttatgattcacagacccaggttcctgcaatgcaggctgacagcagggagcccaacagatgctggacaaaaatgaaagttgccaagatgaaacacccagtgccgcagcccagagaggacttgcaagtcctgaccgttctggaggcatgggctcagcctcggaaatgcttgccgcgcttgcagttgaaagcgccggtgtcaaagtaagcattgagaagctgcctcctcaacccaaagatcaaaaggagcatgctgctgatggccctcagctccaaagcttagcccaggcagaggccagtgcctctggaaacctaaccaaagaatccccagacaccaacggaccaaagctaaccgaggagggcgatcgcccaaaagttgaggtccaggaagaagaaatgtctaccaagtcagtcaaagagaacaaggcccaggcagaagaggacctgcaggagccaaagggagacctggcagaatcctaagatgttagttgctcattgtacatctgtaagaccagaatgtgaaaacaagtcacagaacaagatgctgctgttgggaccttgagaccaagatttcagagcccatgagatccagagagcagggccgtccaatgatttccaccc

SEQ ID NO: 146 - DNA, 1640 bp, Rattus norvegicus
cccgggggagccactagttctagatgcatgctcgagcggccgccagtgtgatggatatctgcagaattcggcttctactactactagaccacgcgtcgactagtacgggggggggggggaggattcgaatccagctgctgcaggaagatgaactccacccaccaccatggcatgtatacttccctccacctctggaaccgcagcagccacgggctgcacggcaatgccagcgagtctctggggaaggggcactcagacggaggatgctatgagcaactttttgtctcccccgaggtgtttgtgactctgggtgtcataagcctgttggagaacattctagtgatcgtggcgatagccaagaacaagaacctgcactcacccatgtactttttcatctgtagtctggctgtggcggacatgctggtgagcgtttcgaacgggtcagaaaccatcgtcatcaccctgctaaacagtacggacacggacgcccagagcttcaccgtgaatattgataatgtcattgactctgtgatctgtagctccttgctcgcatccatttgcagcctgctttccattgcagtggacaggtatttcactatcttttacgcgctccagtaccataacattatgacggttaggcgggtcgggatcatcatcagttgtatctgggcagcttgcacagtatcgggcgttctttttatcatttactcggacagcagcgctgtcatcatctgcctcattaccatgttcttcaccatgctggttctcatggcctctctctatgtccacatgttcctgatggcgaggcttcacattaagaggatcgctgtcctcccgggcacgggtaccatccgacagggtgccaacatgaagggcgcaattaccttgaccattctgattggagtgtttgttgtctgctgggccccgtttttcctccatttactgttctacatctcttgtcctcagaatccatactgcgtgtgcttcatgtctcattttaacttgtatctcatactgatcatgtgtaacgctgtcatcgaccctctcatttatgccctgcggagtcaagaactgaggaaaaccttcaaagagatcatctgtttctaccccctgggaggcatctgtgagttacctggcaggtattaagtggggacagagtgcatactaggtagagacctgcagaatttgtcactcaggcacaacctgagcagtgtacttcccaacagctgcctctactgtatagtgctttggttggaaaatatctactgtataaaatgtaagtttatgacttttgacgtggggaaaaagtctcaacgtgttatgtttattgaccttactttttttgtgtgtaaactgcttatttatgttctacagcgtgggcgctatggagttccataaaagaaaaagacacccttattaaaactttgacagtgtttctttccatgttatttatcaagagtcaacccttgttctttctgtggtagcagaaatcagagccttctgaaaagctgtttccattgcatcacccccacagcacagcagaagcctgattccactgtttatggggaaatatttaaacactggatgctcgatcatttaatgagtcagctctactcgtgaaatttcactcgtgccgaatt

SEQ ID NO: 147 - DNA, 1591 bp, Rattus norvegicus
cggctcgaaatggaggcgactctgagcctggggcccgccggccgcagctgctgggatgagccgctgagcatcaccgtgcgcggcctggtccccgagcagcccgtcacgctgcgcgcggccctgcgcgacgagaagggcgcgctcttccgagcccgcgcgctctaccgcgccgatgcccacggagagctggacctggcgcgcgcgcccgctctggggggcagcttcacggggctcgagcccatggggctgctctgggccatggagcccgaacggcctttctggcgcttggtcaagcgcgacgtgcagacgcccttcgtggtggagctggaggtgctggacggacacaaacccgacggcgggcggctgctggcgcgggcggtgcacgagcgtcacttcatggctcccggggtgcggcgggtgcccgtgcgcgagggcagggtgcgcgccacgctcttcctgcccccagaacctgggccctttcctggaatcataaacctttttggagttggaggcggccttctggagtaccgggcgagtctgctggctgggaagggttttgccgtcatggctctggcttattacaactacgacgacctccccaagaccatggaaaccatgcgcattgagtactttgaagaagccgtgaactacctgcgtggccaccctgaggtaaaaggaccaggaattgggctgcttgggatttccaaagggggtgaacttggccttgctatggcctccttcctgaagggcatcacggctgctgttgtcatcaatggctccgtggctgctgttgggaacaccatatgctacaaggatgagactataccccctgtgactatcctgagaaaccaggtcaaaatgaccaaggatggcctcaaggatgttgtagatgctttgcaaagccctctggtagaacagaagagcttcatccctgtggaaaggtctgacacgaccttcctgttcctcgttggtcaggatgaccacaactggaagagcgagttctatgccaatgagatctccaaacgcttgcaggcccacgggaaagagaagccccagatcatttgctacccagaagcagggcactatatcgagcctccttacttcccactgtgcagcgctggcatgcacctcctggtgggtgctaacatcacctttggaggggagcctaagcctcactctgtggcccagttggatgcatggcagcaactccagactttcttccacaaacagttgggtggtaagagtcatggggtgtcccctaaaatataacctgttatgtgatggttttggcaggaaaagtacaaatactttgtaggaatatcagttcagattacttcatctgaacatataaccgcttttggtttacatttttaaaaattaattttagtatcaaaatagtgctgattcaaaggctggaaatatagttcagttgtagagtccttgactgactcatgcaagttcctgggttcaatctccgtgctgtaagggaaaagagcacattttatggaaactgtagctattcaagaaatagtgcctagaatttaaaggaaccatgagtaaacactcttatgtaacttaaaaaaaaaaaaaa

SEQ ID NO: 148 - DNA, 2156 bp, Rattus norvegicus
gagggtccacagtgtgggaccatgccaggcaccaaacgatatcagcatgtgatcgagacccctgagcctggtgaatgggagttgtcagggtatgaagcggctgtgccaatcacagagaaatccaacccactgacccgaaacctggacaaagcagatgcagagaaaattgtcaaactgctggggcagtgtgatgctgagatattccaggaggaggggcagattgtgcccacctaccagcgactatacagcgaatcagttctgaccaccatgttgcaagtggctggaaaagtccaggaagttctgaaggagccagatgggggtctggtagtgctgagtggagggggaacctctggtcgtatggcatttctcatgtctgtgtctttcaaccagctgatgaaaggcctgggacaaaagcctctttacacctacctcattgcaggaggtgacaggtctgttgtggcctctcgtgaacagacagaagatagcgccctacacgggatcgaggagctgaagaaggtggctgctgggaagaagagagtggtcgtcataggcatctctgtgggactctctgcgccctttgtggcaggtcagatggactactgcatggataacacagccgtcttcttgccggttctggttggcttcaatccagtgagcatggccagaaatgaccccattgaagactggagatcaacattccggcaagtggcagagcggatgcaaaagatgcaggagaaacaggaagcttttgtgctcaatcctgccatcgggcccgaggggctcagcggctcttcccgaatgaaaggtggaggtgccaccaagattctactggaaaccctgctactagcagcccataagactgtggaccagggtgttgtgtcctctcaaagatgccttctggaaatcctgaggacatttgagcgggctcatcaggtgacctacagtcaaagttccaaaattgccacgctgatgaaacaagtcggcatcagcctggagaagaaaggccgagtgcacttggttggctggcagactctcggcatcattgccattatggacggagtagagtgcatccacacttttggtgctgatttccaagatatccgtggctttcttattggtgaccacagtgacatgtttaaccagaaggatgaactcaccaaccagggtccccagttcaccttctcccaggatgacttcctgacttccatcctgccatccctcacggagactgacaccgtggtcttcatttttaccctggatgataacctcacagaagtacaggccctggcagaaagagtgagagagaagtgccagaacatccaggccctggtgcacagcactgtggggcagtccttgccggcccctctaaagaaactctttccctcactcatcagtatcacgtggccacttcttttcttcgattatgaagggacctatgttcagaagttccagcgtgagttaagcaccaagtgggtgttgaatacagtgagtactggggcccatgtactgctggggaagatcctacagaaccacatgctggacctccgcatcgccaactccaagctcttctggagggcgctggccatgttgcagaggttctctggacagtccaaggctcgctgcattgagagcctccttcaagcaatccactttcctcaaccactgtcggatgatgtccgcgccgctcccatctcctgccacgtccaggttgcccacgagaaggaaaaggtgatccccacagccttgctgagcctcctactccggtgctccatctctgaggctaaggcacgcctgtctgcagcttcttcagtctgtgaggttgttaggagcgccctctctgggccgggtcagaagcgcagcacgcaagcccttgaagaccctcccgcctgtgggaccctgaattgatatttctagaaccatggaggggcagagtctccgtccacttccaaggggacatgtgccagcagtacacgctgtgggaagaactcagtttcgggtgggtggggcctaactgcccagaattggggaagagccctgttctcaaccggattatttccatttttactggtgtcttctgaactcagaaataaaactaaatgtcttgttttggaaaaaaaaaaaaaaaaaaaaaaaaaaaaaaaaaaaaaaaaaaaaaa

SEQ ID NO: 149 - DNA, 972 bp, Rattus norvegicus
cccaccgatatccaaaatggcgctggctgctgcgcgtcgcgttctgctgcaggccggatcccgcctcggccgcaggggggccgtggacggcgcgcgtcgcttctctaacaagcgggtgttggtggagaaggagggcgaggcaggaatcgcagtgatgaagttcaagaaccctccagtgaattccctcagcttggagtttctgacagagttcgtcatcagcctggagaagctggaaaatgacaagagcatccgaggtgtcatcctcacttcggagcgcccgggtatcttctcggctggcctggacttgatggagatgtatggccggaacccagcccactatgctgagtactggaaggctgtgcaggagctgtggctgaggctctacttgtccaacctgaccttgatatctgccatcaatggcgcctctccagctggaggctgcctcatggctctcacctgtgactacaggataatggcggacaactccaagtataccataggattgaatgagagcctgctgggcattgttgcccccttctggttaaaagacaactacgtgaacaccatcgggcaccgagcagccgagcgtgcccttcaactggggacgcttttcccaccagcagaggccctcaaggtgggtttggtggatgaggtggtacctgaggatcaggtacacagcaaggctcgctcagtgatggccaagtggttcaccattccggaccattctcggcagctgacgaagagcatgatgcggaaggccacggcggacaacctgatcaagcagcgagaggctgacatccagaacttcaccagtttcatctccagagactccatccagaagtccctgcacgtgtacttggaaaagctcaagcaaaagaagggctgacctaagggtgccacacgggtgtttagttacacgtgccttctaggacccatggtcccaaggattatcaataaggtatttttcaattt

SEQ ID NO: 150 - DNA, 1097 bp, Rattus norvegicus
agctccagagatggctaccgcgatgacagtttccagcaaactcctcggcctgctgatgcagcagctgagaggtacccgccagctgtacttcaacgtcagccttcgatctctgagctcctctgcacaagaggcgtccaaaagaatccctgaggaagtctcagaccacaactacgagtctattcaagtaacatctgcccagaagcatgttctgcatgtacaactaaaccggccggagaagaggaatgccatgaacagggctttctggagggagttggtggaatgcttccaaaagatatctaaagactccgactgtcgggctgttgtggtctctggtgcaggaaagatgttcacttcaggtattgacctcatggacatggcatcagacatcctgcagcccccaggagacgatgtggcccgcatagcctggtacctccgagacctcatcagccgataccaaaagactttcactgtcattgagaagtgccccaagccggtgatcaccgcaattcacggaggctgcattggtggaggcgtggatcttatttctgcctgtgacattcgctactgcactcaggatgctttcttccaagtcaaggaggtggatgtgggcctggctgctgatgtaggaacgctgcagcgactgcccaaggtcattgggaaccggagcctggtcaacgagctgaccttcaccgcccgcaagatgatggctgacgaggccctggacagtgggctggtcagccgcgtgttcccagataaggacgtcatgctgaatgcagcctttgccctggcggccgatatttccagcaagagtcctgtggctgtgcaggggtcaaaaatcaatttaatctactcccgagaccattctgtggacgagagccttgactatatggccacttggaacatgagcatgctgcagacccaggacatcatcaagtcagtccaggcagccatggagaagaaggactcaaaaagcatcaccttctccaagctctgagtgccttcctgaccctggtcccctcagtgcctcctcccggtgtataactttatgacttagttcttcagttcccggggccttatctccactgtgaacaataaag

SEQ ID NO: 151 - DNA, 1083 bp, Rattus norvegicus
acacaactctcaatcatccagtgaactgggctgactgtggcaggacctgggcggtgaggaaacccttggggacaccgatgtggcttgagcctgctcctcttcttggcgctggcctctcccgtcgcgttctgctgcaggccggatcccgcctcgccgcaggggggcctggacgagcccgtcgcttctctaacaaggcggtgttggtggagaaggagggcgaggcaggaatcgcagtgatgaagttcaagaaccctccagtgaattcctcagcttggagtttccgacagagttttcgtcatcagcctgagaagctggaaaatgaaaagagcatccgaggtgtcatcctcacttcggagcgcccgggaacctccccgccgccccacgacatgaagaagaaggacgaccagcccactatgctgagtactggaaggctcgtgccaggagctgtggctgaggctctacttgtccaacctgacttgatatctgccatcaatggcgcctttccagctggaggctgcctcatggctctcacctgtgactacaggataatggcggacaactccaagtataccataggattgaatgagagcctgctgggcattgttgcccccttctggttaaaagacaactacgtgaacacatcgggcaccgagcagccgagcgtgcccttcaactggggacgttttcccactaacatgacagcagctgctctactgacgcttcacagaagcctcaatgaggtggtacctgaggatcaggtacacagcaaggctcgctcagtgatggccaagtggtttaccattccggaccattctcggttgctgacgaagagcatgatgcgcaaggccacggcggacaacctgatcaagcagcgagaggctgacatccagaacttcaccagtttcacctccagagactccatccagaagtccctgcacgtgtacttggaaaagctcaagcaaaagaagggctgacctaagggtgccacacggtgtttagttacacgtgccttctagggacccatggtcccaaggattatcaataaggtatttttcaatttaaaaaaaaaaaaaaaggaattcc

SEQ ID NO: 152 - DNA, 3679 bp, Rattus norvegicus
gttccgagacccggaggagagctggacgggagcgagatgttactttgagtgaatgacctccttggagaccattcttctgctccccttcttaccagccaggaggcagaagattccacaggtccaggaaagacataattcccttgagcttccagaaagtaccttatgcctgggggatcaggccaactatggctctcgtattcagtgtcctgctgctactggggctgtgtggaaagatggcttcaggaggtcagcctgcattcgataacactcccggggctttgaattatgaattgcctaccacagaatatgagacccaagacaccttcaatgctgggattattgaccctctctaccaaatggtgcacatcttcctcaacgtggtccagccgaatgacttccctcaagatttggtcaaaaaactcatacagaagaggtttgacatctcggttgataccaaggaggtcgccatctatgaaattggagttcttatctgcgtcatcctgggcctgctgttcattttcctcatgcccctggtgggcttcttcttttgtatgtgccgttgctgtaacaaatgcggcggagaaatgcaccagcggcagaagcagaacgagtcgtgccggaggaagtgcttagccatctccctcttgctgatttgtctgctcatgagtcttggcatcgcgtttggctttgtggccaaccagcagacaaggacccggatccaaaggacccagaagctggcagagagcaattacagagacttgcgggctctcctgactgaagccccaaagcaaatcgactatattctggggcaatacaacacaaccaagaacaaggcattctcagacctggacagtatcgattccgtgctgggaggcagaataaagggccaactaaaacccaaagttactcctgttctcgaagagattaaggccatggcaacagccattagacagaccaaggatgccctgcagaacatgagcagcagtctgaaaagtctacgtgacgcaagcacccagctcagtaccaacctgacgtctgtgagaaacagcatcgagaattcactcaacagcaacgactgtgcttcagacccagccagcaagatctgtgatagcctcagaccacagctgagcaatctggggagcaaccacaacggaagtcagctcccatcagtggacagggaactcaacaccgttaatgatgtcgacagaaccgatctggagagcctcgtcaaaagggggtatatgtcgattgatgaaatacccaatatgatacaaaaccaaactggggatgtcatcaaagatgtcaaaaagaccttggattctgttagcttcaaggttaagaacatgagccaaagtattcctgtcgaggaggtgctgcttcagttctcccactaccttaatgcagcaccaggtacatccacgaagtcgctgcccagagtggaagaatatgactcatactggtggctgggtggcttaatagtctgcttcctgctgaccctcattgtgactttcttttacctgggcttgctgtgtggtgtgtttggctatgacaagcgtgccaccccaaccagaagaggctgcgtgtccaacactggaggcatcttcctcatggctggggttggattcagcttccttttttgctggatattgatgatccttgtggttcttacttttgttgttggtgcaaatgtggaaaagttgctctgtgaaccttatgaaaacaagaaattactacaggttttggatactccctacctgctcaacgatcaatggcaattctatctctctggcatactactcaaaaacccagacattaacatgacctttgagcaagtctacagggattgcaaaagaggtcgaggagtgtatgccacttttcagcttgagaatgtcttcaacatcactgagaatttcaacattgagaggctttctgaagacatagtgaaggagttggaaagctgaatgtgaacattgacagcatcgaactgttggacaaaacaggaaggaagagcctcgaggactttgcacaatctgggatagatagaatcaattattccatgtacttacaggaggctgagaaaccccctaccaaagtggacctgctgacatttgcctcttttctggaaacagaagcaaaccagttgcctgacggaaatctgaaacaggccttcttaatggatgcacagaacattcgagccatccaccagcagcacgtccctcctgtgcagcagtcactgaattcattaaaacaaagtgtctgggcccttaagcaaacaagcagcaagttgccggaggaagtgaagaaggtccttgcctctttggattctgctcagcatttcctcaccagtaacctctcctccatcgttattggagaaacaaagaagtttgggagaacaataataggctactttgaacattatctgcaatgggtcttgtacgccatcacagagaagatgacatcctgcaaacccatgattacagcaatggactctgctgttaatggcattctgtgtagctatgttgctgaccctctgaatctgttctggttcggcatagggaaagccaccatgctcttacttccggctgtaatcatcgctatcaagttggccaagtactatcgcaggatggattcagaggatgtatatgatgatgttgagactgtacccatgaaaaatttggaaaacggtagtaatggttatcataaagatcatttatatggtgttcacaatcctgttatgacaagcccgtctcgatactgacaactgaagtggaaattgcttgaacatcaagatagctaactcggaaagaatcccagactttggatagtttctgagtcttctagaattttccaagaagaaaccatggtggcaaatgcggagactcgggcgggcactgggaacacagcacagtggtcttagggaggtgctttgtcaggaatgaacagtcatggttataatccacgtttccattgctactcacgaatgattctcttctgttttgtttttaaaatttttttacactgaatttctatttagacactaaaacatataggggtgcttgtcacccggatacatttatctgtgagccagctattcggatgtcatggctgggtacctaacttacttccatatgtgaagtgtgctaaactcaaaccagtttacagaaacgatgtattttgtgtatagtaaattgtatattcacccttttaccacggccggttttttaaacaaatgaatactctagatttttcttccaaatgaggttactgttggggtggggttgacttagtgatgctgtagaagggaatccgcatgcactaaaaagtgtgtctgcctaaaagtgtgtacagcaggcacaaccttccttgtggatttccgtctgctcactgcagatctgcctgtggtttagaaatagaattcaagagccatcaaggagtgaccagcttgacaccactgccaaattcagaatgaggaaccttgagagaaggaactgtcgctcagccagaagcagatgaagccactggtcctggttcacagtttagtgtcatgctctggtttataaggatgggcattacgttcggtgttatctggttatctgcgagattctaaaccgaggtgcaagagctcctatcctgattctgagatttgaaataaagcatgaatgaacaataaaaaaaaaaa

SEQ ID NO: 153 - DNA, 60 bp, Artificial Sequence
  oligonucleotide probe
gtcccagtcgctgacaaagtgttccttctatcgattgcactattattttgagggaaaaaa

SEQ ID NO: 154 - DNA, 60 bp, Artificial Sequence
  oligonucleotide probe
tagatgacagtgacttggccatatttatagctgtcattattctcagtggagaccgcccag

SEQ ID NO: 155 - DNA, 60 bp, Artificial Sequence
  oligonucleotide probe
tgaattaaatgtttgtacttcatgttggggggtgagccccactgtgcttcttttgcaagc

SEQ ID NO: 156 - DNA, 60 bp, Artificial Sequence
  oligonucleotide probe
tggtcagtccttggccccgaattgtgttaatttgctccttgatcacttgagatggagaaa

SEQ ID NO: 157 - DNA, 60 bp, Artificial Sequence
  oligonucleotide probe
aattactatcgaacgatgcttcaccctcatgtaactacgctcagagcactgttgctgctt

SEQ ID NO: 158 - DNA, 60 bp, Artificial Sequence
  oligonucleotide probe
ggggaaaaacccaaatatcagaatgccacttcagtttagttcatttgaacacatactaat

SEQ ID NO: 159 - DNA, 60 bp, Artificial Sequence
  oligonucleotide probe
ccagcttctacatgggcctaaatcaatttagtgacttgactacagaagaattcaggagga

SEQ ID NO: 160 - DNA, 60 bp, Artificial Sequence
  oligonucleotide probe
agcactggagaatgaattcagggcactatagaagaaagtcaaatgcattgccactaagct

SEQ ID NO: 161 - DNA, 60 bp, Artificial Sequence
  oligonucleotide probe
tcagcctttcctccctgacaaccagcttcagagaataaacttgaatgtcttttgccatct

SEQ ID NO: 162 - DNA, 60 bp, Artificial Sequence
  oligonucleotide probe
gccatgtttgttctaaaagaaacatttcaactaaacgtaccatgtgtttgtttcagatgc

SEQ ID NO: 163 - DNA, 60 bp, Artificial Sequence
  oligonucleotide probe
ggcacatgggcttgctgtgttatatccatgatgacattgacagagtagttatttgggaga

SEQ ID NO: 164 - DNA, 60 bp, Artificial Sequence
  oligonucleotide probe
ggagaagaatgatccaaaaagcatcacattagccatgctatgagtgccttcctgacgttg

SEQ ID NO: 165 - DNA, 60 bp, Artificial Sequence
  oligonucleotide probe
gggacatcaatcccaagaagtcaacacatatacataggaccaatactaaatgcatagcag

SEQ ID NO: 166 - DNA, 60 bp, Artificial Sequence
  oligonucleotide probe
gctggacttcttatcaacttcacaaaagcctagacttacatggtaagaaggataaagaat

SEQ ID NO: 167 - DNA, 60 bp, Artificial Sequence
  oligonucleotide probe
tggacaaatgagtgtgcctaaggccatgagatgtttcctaatgcagaaggaatctgttgt

SEQ ID NO: 168 - DNA, 60 bp, Artificial Sequence
  oligonucleotide probe
gtctccaaaccatccccatgtctaacctcatagttggcaaataaagttaaacagaaaaaa

SEQ ID NO: 169 - DNA, 60 bp, Artificial Sequence
  oligonucleotide probe
acgcaatgttgggttacttcattttgcccggctaaagccaattgggagttatttgtaaat

SEQ ID NO: 170 - DNA, 60 bp, Artificial Sequence
  oligonucleotide probe
attaccttgggaattttttgcctcccaatgtgaaaggatgatgtcggaaaggttccacag

SEQ ID NO: 171 - DNA, 60 bp, Artificial Sequence
  oligonucleotide probe
cagtgaggtcagatgtgaataagtgttgcaagaacacattgaatagtgtgtattactgtg

SEQ ID NO: 172 - DNA, 60 bp, Artificial Sequence
  oligonucleotide probe
tctcattctcgtctctggagactttaaagggagatagaaggaacggacctgaacagagat

SEQ ID NO: 173 - DNA, 60 bp, Artificial Sequence
  oligonucleotide probe
agcttagtggcagaatacttggtgtttgcacggacctaacccttgaaagaacatttcctg

SEQ ID NO: 174 - DNA, 60 bp, Artificial Sequence
  oligonucleotide probe
tcaccctctgctgagaagcacttgggtgtttctgcaagatctggggagaaggaaggaaga

SEQ ID NO: 175 - DNA, 60 bp, Artificial Sequence
  oligonucleotide probe
tgaagaaacacatgtactcactgataaggaggtgtatgattaaacaacacattttgcatg

SEQ ID NO: 176 - DNA, 60 bp, Artificial Sequence
  oligonucleotide probe
ccccgtttagctaccctactctctgctcgtactcaaaaaataaatgcttggaacagcaaa

SEQ ID NO: 177 - DNA, 60 bp, Artificial Sequence
  oligonucleotide probe
aatcacattatgcaaccatgactgcagcaagaaccacactgaatggaagcaggaagtctg

SEQ ID NO: 178 - DNA, 60 bp, Artificial Sequence
  oligonucleotide probe
ggatattatactcgcgcttaagaatgtccaggtacggagtgacacagtcatcagcgtttt

SEQ ID NO: 179 - DNA, 60 bp, Artificial Sequence
  oligonucleotide probe
gtttaattaagtgacatcctactacattgtggtttttccccaatttcccctctatgcctt

SEQ ID NO: 180 - DNA, 60 bp, Artificial Sequence
  oligonucleotide probe
aacaattccaagtgtgggtattttgaagtactggacattacgtcacggggctagacgtgt

SEQ ID NO: 181 - DNA, 60 bp, Artificial Sequence
  oligonucleotide probe
atgtctaactttagcatcaaagtgtctgtctcaaattcccagtaaacacctctgtaggag

SEQ ID NO: 182 - DNA, 60 bp, Artificial Sequence
  oligonucleotide probe
accctaacagtctgcacaatttcttaagctttagtactcgtagatgatacttgccttaaa

SEQ ID NO: 183 - DNA, 60 bp, Artificial Sequence
  oligonucleotide probe
taaagtgacaggaagaaacatggcgttttggtatattgggagcaatgccaagattccctc

SEQ ID NO: 184 - DNA, 60 bp, Artificial Sequence
  oligonucleotide probe
gaatgagtgtttgtctgttttgggttgataaagagccttatattggagagatgtcacaca

SEQ ID NO: 185 - DNA, 60 bp, Artificial Sequence
  oligonucleotide probe
ctatgtaaatagagcaaggaaacggtattgtgcatttgtggcatttacgtagagttgcag

SEQ ID NO: 186 - DNA, 60 bp, Artificial Sequence
  oligonucleotide probe
taacagctccagtattattcagttcctcttaaatagccatgatttaaatgacaaggaagg

SEQ ID NO: 187 - DNA, 60 bp, Artificial Sequence
  oligonucleotide probe
cttaaaaggcacaggatagattctttgttgttggcatagtctcctttccaaatcatataa

SEQ ID NO: 188 - DNA, 60 bp, Artificial Sequence
  oligonucleotide probe
tcgatgcagattccggattggcaaggatcagaggtgaaattaggatcatgccagaaaagt

SEQ ID NO: 189 - DNA, 60 bp, Artificial Sequence
  oligonucleotide probe
gcgccatttagctctccttctgtttaggaaataaagacagagtgtgcaaagagaggcagt

SEQ ID NO: 190 - DNA, 60 bp, Artificial Sequence
  oligonucleotide probe
gctgggaaatgttaaactttgtaaactctgaagcacacaaagtgttccttcccattttac

SEQ ID NO: 191 - DNA, 60 bp, Artificial Sequence
  oligonucleotide probe
ccacagcatgttgtatgtatttagagaggcaccttttctcaggtcactgagttctccatg

SEQ ID NO: 192 - DNA, 60 bp, Artificial Sequence
  oligonucleotide probe
agtgtggcttgtagtacttatgttttgctccactcaggaaaaggttggataaagcagagc

SEQ ID NO: 193 - DNA, 60 bp, Artificial Sequence
  oligonucleotide probe
gggagtcttgtctttgtcatttcttttttgcatcttccagtatgcttccactcatagatt

SEQ ID NO: 194 - DNA, 60 bp, Artificial Sequence
  oligonucleotide probe
ctttctgctcagctgcaactaataacaaccttggagagctgttatagtgttaaaagatgt

SEQ ID NO: 195 - DNA, 60 bp, Artificial Sequence
  oligonucleotide probe
tggaaactcgtctccagtgagaacttcgatgattacatgaaagaagtgggagttggcttc

SEQ ID NO: 196 - DNA, 60 bp, Artificial Sequence
  oligonucleotide probe
aattcgatgaaatcaccccagatgacaggaaagtgaagagcatcataaccctggatggtg

SEQ ID NO: 197 - DNA, 60 bp, Artificial Sequence
  oligonucleotide probe
gtcgtcatccggtcagagagtacttttaaaaacaccgagatttccttcaaactgggtgtg

SEQ ID NO: 198 - DNA, 60 bp, Artificial Sequence
  oligonucleotide probe
tcaaagccatgtttggccacttcatagtcaatgaagtggactcctctcatttccagcttc

SEQ ID NO: 199 - DNA, 60 bp, Artificial Sequence
  oligonucleotide probe
agatgttagttgctcattgtacatctgtaagaccagaatgtgaaaacaagtcacagaaca

SEQ ID NO: 200 - DNA, 60 bp, Artificial Sequence
  oligonucleotide probe
ctggatgctcgatcatttaatgagtcagctctactcgtgaaatttcactcgtgccgaatt

SEQ ID NO: 201 - DNA, 60 bp, Artificial Sequence
  oligonucleotide probe
gtgctttggttggaaaatatctactgtataaaatgtaagtttatgacttttgacgtgggg

SEQ ID NO: 202 - DNA, 60 bp, Artificial Sequence
  oligonucleotide probe
gaaactgtagctattcaagaaatagtgcctagaatttaaaggaaccatgagtaaacactc

SEQ ID NO: 203 - DNA, 60 bp, Artificial Sequence
  oligonucleotide probe
ctgttctcaaccggattatttccatttttactggtgtcttctgaactcagaaataaaact

SEQ ID NO: 204 - DNA, 60 bp, Artificial Sequence
  oligonucleotide probe
gggtgtttagttacacgtgccttctaggacccatggtcccaaggattatcaataaggtat

SEQ ID NO: 205 - DNA, 60 bp, Artificial Sequence
  oligonucleotide probe
ggggtcaaaaatcaatttaatctactcccgagaccattctgtggacgagagccttgacta

SEQ ID NO: 206 - DNA, 60 bp, Artificial Sequence
  oligonucleotide probe
cacggtgtttagttacacgtgccttctagggacccatggtcccaaggattatcaataagg

SEQ ID NO: 207 - DNA, 60 bp, Artificial Sequence
  oligonucleotide probe
ctggtttataaggatgggcattacgttcggtgttatctggttatctgcgagattctaaac

SEQ ID NO: 208 - DNA, 812 bp, Mus musculus
gaggactgcgccagtagacagaacagcctgagccaggatgaaggctctcagggctgtcctcctgatcttgctactaagtggacagccagggagtggctgggcacaagaagatggtgatgcggacccggagccagagaactacaactacgatgatgacgatgatgaagaggaagaggaggagaccaacatgatccctggaagcagggacagagcacctctacaatgctacttctgtcaagtgcttcacagcggggagagctgcaatcagacacagagctgctccagcagcaaacccttctgcatcacgctcgtctcccacagcggaaccgacaaaggttacctgactacctactccatgtggtgtactgatacctgccagcccatcatcaagacagtgggaggcacccagatgactcagacctgttgccagtccacactgtgcaatattccaccctggcagaacccccaagtccagaaccctctgggtggccgggcagacagccccctggaaagtgggactagacatcctcagggtggcaagtttagccacccccaggttgtcaaggctgctcatcctcagagcgatggggctaacttgcctaagagtggcaaggctaaccagccccagggaagtggggcaggatacccttcaggctggaccaaatttggtaatatagccctcctgctcagcttcttcacttgtctgtgggcgtcaggggcctgaagacccgttctcctccaaccaggacgccctggcctctccttcctgacaaccagcttcagagaataaacttgaatgtcgtttgccatct

SEQ ID NO: 209 - DNA, 912 bp, Mus musculus
atgcctgaggcaagttcacccaggcgaactccacagaatgttccctaccaggacctgcctcacctggtcaatgcagacggacagtacctcttttgtagatactggaagcccagtggcacacccaaggccctcatctttgtgtcccatggagctggggaacactgtggccgttatgatgagctggctcatatgttgaaggggctggacatgctggtatttgcccatgaccatgttggccatgggcagagtgagggagagaggatggtggtgtcggacttccaagtttttgtcagagatgtgctgcaacacgtggacaccatccagaaggactaccccgacgtccccatcttcctcctgggccactccatgggcggtgccatctccatcctagtggctgcagagaggccaacctacttttctggcatggtcctgatttcacctctggtccttgccaatccggaatctgcatcgactttgaaggtccttgctgccaaactgctcaattttgtcctgccaaatatgaccttggggcgcattgactccagcgtgctgtctcggaacaagtcggaggttgacctgtacaactctgacccactcgtctgccgagcagggctgaaggtgtgctttggcatacagctgctgaatgccgtcgcaagagtggagcgagcaatgcccaggctgacactgccattcctgctgctgcagggttctgctgaccggctttgcgacagcaaaggtgcctacctgctcatggaatcatcccggagtcaggacaaaacactcaagatgtatgaaggtgcctatcacgtcctccacagggagcttccggaagtgaccaactccgtcctccatgaagtaaactcgtgggtgtctcacaggatagcagcagcaggagctgggtgtccaccctga

SEQ ID NO: 210 - DNA, 399 bp, Mus musculus
atgtgtgatgcctttgtgggaacctggaagcttgtctccagtgaaaacttcgatgattacatgaaagaagtgggagtgggctttgccacaaggaaagtggcaggcatggccaagcccaccatgatcatcagcgtaaatggggatttggtcaccatccggtcagagagtacttttaaaaacaccgagatttccttcaaactgggcgtggaattcgatgaaatcaccgcagacgacaggaaggtgaagagcatcataaccctagatggcggggccctggtgcaggtgcagaagtgggatggaaagtcgaccacaataaagagaaaacgagatggtgacaagctggtggtggaatgtgttatgaaaggcgtgacttccacaagagtttatgaaagggcatga

SEQ ID NO: 211 - DNA, 2627 bp, Mus musculus
agctcttggagggagttgagcaccaggcatccagcggttaagtcgaggtccctgccagcatggccagtgaaatcaagaagaagctcttctggagggctgtggtggctgagttcctggccatgaccctcttcgtcttcatcagcattggttctgccctaggcttcaattacccactggagagaaaccagacgctggtccaggacaacgtgaaggtgtcgctggcctttggtttgagcatcgctactctggcccaaagtgtgggtcacatcagcggtgctcacctcaaccctgcggtcacactggggctcctgctcagctgtcagatcagcatcctccgggctgtcatgtacatcatcgcccagtgtgtgggagccatcgtcgccacggccattctctcgggcatcacctcctccctagtcgacaattcacttggccgcaatgacctggctcacggtgtgaactctggccagggcctgggcattgagatcattggcactctgcagctggtactgtgcgttctggccaccactgaccggaggcgccgagacttaggtggctcagccccgcttgccattggcttgtctgtggcccttggacacctgctggcgattgactacactggctgcggtatcaaccctgcccggtcatttggctctgctgtgctcacccgcaacttctcaaaccactggattttctgggtggggccgttcattgggggtgccctggcagtgctcatctatgacttcatcctggccccacgcagcagcgacttcacagaccgcatgaaggtgtggaccagtggccaggtggaggagtatgacctggatgctgacgacatcaactccagggtggagatgaagcccaaatagaggaggcttggcctgggcatctatatgggggtggggcagggatgggcggagggaggggagggccgaaatcatattgtagacactctgacaagctgaccaaagtcactccccaagacctgcctgacccacatggtctagccttgtctggggcagtaatatcactgtctttctttctgtttcctggtctcagagcttcctggggaccaagatttatcaactcagcaccccactcctttgacatcatggaggagtgaaagtgagggacccacctgctagttgtcccctcagagtgtgctaggaagtccccctcattccaaagctgcccagcaagtcccccaccttaggtgcctgggattctgccaatgtcgctttgtgcctttgaccgcagccttccttggggtaggcaccttatctccaaaggcactttgagggagaggaggtcccctaactttcccctttggtctgacttacctccaggacccttccccttgaactcactctaagaccttggaattgtccctgtgctgaggcctcagtgatcacatctgtaaagtggcaaggaagggatagctttggggattctgtaagtgtggacatgccacaggttctagaagggacagtcttgacagcactgctttgtgtacccggcctgtactctttcccagcgtccacagcccacgagcacacgtggatgggccacggatcagagaatcagtgtgggatgcaagacgtgcctgttcacacacacagccttcctggaggcgggttagctgtagcagaacgaaggtcattttgtggtagaagaagagctcacactatcttacctagctctagtgggtctgcccgtgtaacatggccccgactggatgtttatttcggtcctccagtctcccttgcagtatagatctggtgtgtgtgtgtttgttaaagagcattgggctatgtgcagtgtcatgtctgaggagagaagcagctagctatgcaacagaccctggacagatgcccatgctgggcacacaagggtttggatgcccttagttcatcatgagcaaggaggtcactctggccctggcttgtgagctcctggctggatgagtgtgaccggagcctggacaatctgcagaggctcactctgtgcctccaggcacagtcttctctctgcattggcccaatgctacagcttgtgttgcagcccaaggacagctcagagtgcagtcagctcaggggttgcatttagctctaggtcattccattggatcccatcaatccagagtggctctaccactgtgcccttaaccacattgtgaaccgagagccacattcttcaggtgcttagaagcagcagaagagtcaggaggccactgaccactggcatatcacagctgcacactcgtctccgttccctagcagacactgtacccacttaacagataagggcactgaggacccatatgctcaactgtatcatattggatcaagcttagcagtcaaggccatgtttggccaccccatggtcaatgacgtggactcctctcacctccagcttctcagtttctgcctgggcaatggctaagggccaggggtgagggtgggggtggaggtggtgagagctttgctggagaggggcagggcaggcccatcccacctggttctggccattgtgaaccaggaccttgtatctgtctgctctgtgtatgtttctttgcaattgaatttcatcttatggtaagaaaataaaggacaatgacttgtaaggtc

SEQ ID NO: 212 - DNA, 2130 bp, Mus musculus
ggcctcaccctgggcaccgcccccggtccggccgggtggctcggctcggctcctccggtccgcggccggccaggcggggcccgtcgcactcagagcggcagccgcctggggcgctcgggtcgggtcggccgcaccgacgcacagcacccgccaagccgccgcctcaggtcagagtcgccccgggccacgcggcccgccggagggacgcggaagaagagacctggggcgctgcctggggtattgggtcgcgcgcagcctgaggggaccgagtgtgacgacaaggtgaccgggctgaggggacgggctgaggagaagtcacactctgacaggagcctgtgagaccaacagcctgacgggtctcggttgaggggacgcggctgagaaatcacgttctgacaggactgtgtgacagacaagatttgaaagaagcggtgaaccactgatattcaggacatttttaaaaacaagactaccctttactgaaattaccatggttgacacagagatgccattctggcccaccaacttcggaatcagctctgtggacctctccgtgatggaagaccactcgcattcctttgacatcaagccctttaccacagttgatttctccagcatttctgctccacactatgaagacattccattcacaagagctgacccaatggttgctgattacaaatatgacctgaagctccaagaataccaaagtgcgatcaaagtagaacctgcatctccaccttattattctgaaaagacccagctctacaacaggcctcatgaagaaccttctaactccctcatggccattgagtgccgagtctgtggggataaagcatcaggcttccactatggagttcatgcttgtgaaggatgcaagggttttttccgaagaaccatccgattgaagcttatttatgataggtgtgatcttaactgccggatccacaaaaaaagtagaaataaatgtcagtactgtcggtttcagaagtgccttgctgtggggatgtctcacaatgccatcaggtttgggcggatgccacaggccgagaaggagaagctgttggcggagatctccagtgatatcgaccagctgaacccagagtctgctgatctgcgagccctggcaaagcatttgtatgactcatacataaagtccttcccgctgaccaaagccaaggcgagggcgatcttgacaggaaagacaacggacaaatcaccatttgtcatctacgacatgaattccttaatgatgggagaagataaaatcaagttcaaacatatcacccccctgcaggagcagagcaaagaggtggccatccgaatttttcaagggtgccagtttcgatccgtagaagccgtgcaagagatcacagagtatgccaaaaatatccctggtttcattaaccttgatttgaatgaccaagtgactctgctcaagtatggtgtccatgagatcatctacacgatgctggcctccctgatgaataaagatggagtcctcatctcagagggccaaggattcatgaccagggagttcctcaaaaacctgcggaagccctttggtgactttatggagcctaagtttgagtttgctgtgaagttcaatgcactggaattagatgacagtgacttggctatatttatagctgtcattattctcagtggagaccgcccaggcttgctgaacgtgaagcccatcgaggacatccaagacaacctgctgcaggccctggaactgcagctcaagctgaatcacccagagtcctctcagctgttcgccaaggtgctccagaagatgacagacctcaggcagatcgtcacagagcacgtgcagctactgcatgtgatcaagaagacagagacagacatgagccttcaccccctgctccaggagatctacaaggacttgtattagcaggaaagtcccacccgctgacaacgtgttccttctattgattgcactattattttgagggaaaaaaatctgacacctaagaaatttactgtgaaaaagcatttaaaaacaaaagttttagaagatgatctattttatgcatattgtttataaagatacatttacaatttacttttaatattaaaaattaccacattaaaaaaaaaaaaaaa

SEQ ID NO: 213 - DNA, 60 bp, Artificial Sequence
  oligonucleotide probe
gaagtggggcaggatacccttcaggctggaccaaatttggtaatatagccctcctgctca

SEQ ID NO: 214 - DNA, 60 bp, Artificial Sequence
  oligonucleotide probe
tgctcatggaatcatcccggagtcaggacaaaacactcaagatgtatgaaggtgcctatc

SEQ ID NO: 215 - DNA, 60 bp, Artificial Sequence
  oligonucleotide probe
cctttgtgggaacctggaagcttgtctccagtgaaaacttcgatgattacatgaaagaag

SEQ ID NO: 216 - DNA, 60 bp, Artificial Sequence
  oligonucleotide probe
taaaaacaccgagatttccttcaaactgggcgtggaattcgatgaaatcaccgcagacga

SEQ ID NO: 217 - DNA, 60 bp, Artificial Sequence
  oligonucleotide probe
ccttgtatctgtctgctctgtgtatgtttctttgcaattgaatttcatcttatggtaaga

SEQ ID NO: 218 - DNA, 60 bp, Artificial Sequence
  oligonucleotide probe
gtcccacccgctgacaacgtgttccttctattgattgcactattattttgagggaaaaaa

SEQ ID NO: 219 - DNA, 354 bp, Rattus norvegicus
atttgtgtctaagatgttccaccctaacgtctatgcagatggtagtatatgtctggatatacttcagaaccgttggagtccaacctatgatgtgtcttccattttaacatccatacagtctctattggatgaacctaatcccaatagtccagcaaacagccaggctgcccagctgtaccaggagaacaagcgggaatatgaaaagcgtgtttctgcaatagtagaacaaagctggcgtgactgttgactcagggtagagcagaagaggctggccataagaaaaatgtatattgatgcatttatcaccttattcctaattcattacatttactttattaaaaaaaaaaaaaaaaa

SEQ ID NO: 220 - DNA, 2513 bp, Rattus norvegicus
gaattcctgacggatctggagaagcccaatctcgcaggccacatgttcgacgtaggtctgattggaggcggcatctcaggattggctgctgccaaactgttgtctgaatacaaaattaatgtcttggttttggaagcccgggatagagttggaggaagaacatatactgtgaggaatgagcatgtcaaatgggtagatgttggtggagcctatgtgggaccaacccagaacagaatcttacgcttgtctaaggagctaggcatagagacctataaagtgaatgtcaatgagcgtctagttcaatatgtcaaggggaaaacttacccattccgtggtgcattcccacctgtgtggaaccccttggcatatttggattacaacaacctatggagaacaatggatgaaatgggaaaagagatccccgttgatgcaccgtggcaagcaagacacgctcaggaatgggacaagatgaccatgaaagatctcattgataaaatctgttggacaaaaactgctcgggaatttgcgtatctttttgtgaacattaatgtgacttctgagcctcatgaggtatctgccctgtggttcctgtggtatgtgaggcagtgtgggggcactgctcggatattctcagttaccaatggcggccaggaacggaaatttgtaggtggatctggccaagtaagtgaacagataatgggtctccttggagataaagtgaagctgagctctcctgttacttatattgaccaaacagatgacaacatcattgtagaaacactgaatcatgaacactatgagtgcaaatacgtaattagtgccatcccaccgattttgactgccaagatccactttaaaccagagcttccacctgagagaaaccaattaattcagcgtcttccaatgggggctgttatcaagtgcatggtgtattacaaggaagccttctggaagaaaaaggactattgtggctgcatgatcattgaagatgaggaggctccaatcgccatcactctggatgacactaaaccagatgggtcactgcctgccatcatgggcttcatacttgcccggaaagctgatcgacaagctaaactacataaagacataaggaagaggaaaatctgtgagctgtatgccaaagttctgggatctcaagaagcattatatccagtccattatgaagagaagaactggtgtgaggagcagtactccgggggctgctacacagcctacttccctcctggtatcatgacccagtatggaagggtgattcgccagccagtaggtaggatttactttgcaggcacagagacagcaacacagtggagtggctacatggaaggagcagttgaagctggagaacgagcagctagagaggtgttgaatgctctaggaaaagtcgcgaagaaggatatatgggttgaagaacccgagtccaaggatgttccagccattgaaattacccacaccttcttagagaggaacctgccttccgtgcctggtctgctcaagatcactggtgtttccacttctgtggctcttctctgctttgtattgtacaagattaagaagctcccatgctgaagtttcaccctcaggcctcctgcacgatcatcgcatgtgaaagaaagtgtggataaattacagcctatggtttgggccatttaagtgcacttgatttaaccctcatcagtttaatttcagtctttgtaaagtgataacaatccaaagaatcacctagctaatttccataagaacaagtttcatcctgtttgttagactaatttgtgtgggttgagagaataaaatgttgagtgcttaatttcaaaaagtgaagtgcttctgaggaataatttctgggttcttttgttttctttttgcctttaatgcaaaatagctaattcagaaataaaacacttgacttactgtgacttttgtgtagcgtccaaggtgtacagaggaaaatagtggctgaagtgttccctaggtatcctcactgactagctccatgtgatacacactacccttggcactttcttttctggactgtatctagacatgcattgacccttgtcagtaacattctgtgctgatttaaggaaattagcattattttaatatagtccatagttatctgatcagaggattagatctctaagtctacctgtgtcttcaagatggttatatttttctgttggttgatagtataccattttttctcaattaccaaaggacatatgaaatgttctctattgttatttgttgatacagtcaaatacagaaattaaatttgggctctgtgtgataacatgacttgcttgaattattaggttttatagcagacattaaattggatgattttatatacccaaactatggtctctatcttaggagtgttgtgggtccagaatgatgtctgtcttttctctttcccatctgaaaaattgtcaattaaaaaaacttttcaaaggtttcaaccacaaagcacttctttttctaaaaaaaaaaaa

SEQ ID NO: 221 - DNA, 1440 bp, Rattus norvegicus
cggccgtccgtcccgccatggctgcgcgcctgctcctccgctcccttcgtgtcctgagcgcccgctcggcgacactcccgccgccctccgcccgatgttctcattctggagcagaagcacgtctagaaactccttctgctaaaaaattaactgatattggaatcagaagaatcttttcctcagagcatgacattttccgggagagtgtaaggaagttttttcaagaagaagtgattccctaccacgaagaatgggagaaagccggagaagtgagtagagagctctgggaaaaagctggcaagcaaggcctgcttggcatcaacattgcagagaaacatggcggcatcggtggggacttgttgtcaacagcagttacttgggaagagcaagcatactcaaattgcacaggccctggtttcagcctccattcagatattgtcatgccctatattgcaaattacggcacaaaagaacagatcgagcagtttatcccccagatgacggcgggcaagtgtattggtgccatagccatgacagagcctggggctggaagtgacttacaaggagtaagaacaaatgccaaaaggtctgggagtgattggattctcaatggaagcaaggtgttcatcactaatggctggttaagtgatctcgtgatcgtagtggccgtcaccaatcgtgaagctcgatcgcccgctcatggcattagcctctttttggtggagaatggaatgaaaggatttattaagggcaagaagctacataagatgggaatgaaagcccaggacacagcagaactattctttgaagatgttcgattgccagctagtgccctacttggggaagagaataaaggcttctactacctcatgcaagagctcccacaggaaaggcttttaattgctgatttggcaatttctgcctgtgagttcatgtttgaagaaaccaggaactacgtgagacaaagaaaggcttttggaaaaacagtcgcacacatccagactgtgcagcacaaactagcagaattgaagacgaacatatgtgttaccagagcttttgtggacagctgcctacagctgcatgaaaccaaacgtctggactccgcctccgcttccatggcgaaatattgggcatctgaattacaaaacactgtagcttatcagtgtgttcaactccatggaggctggggttacatgtgggaatacccgattgcaaaagcctacgtggatgctcgagttcagccgatctacggtggtaccaacgaaatcatgaaagagctgatcgcaagacagatcgtcagtgacagctagacatctgcctacatcctgaaatcctactacatcacagctaatccggattcaaatatacttgagataaagtggaacctggaagggggggggggtagtaaagctggttttatgtatgattgttacagagaaa

SEQ ID NO: 222 - DNA, 3097 bp, Rattus norvegicus
ggtgcaggataccttgagaaaatggctgagtatctgaggctgccccactccctggcgatgatccgcctctgcaacccgccagtcaacgccgtcagtccaactgtaatcagggaagtaagaaatggactccagaaagctggatcagaccacacggttaaagccattgtgatctgtggcgcaaacggaaacttctgtgcaggtgctgatatccatggctttagtgcttttacccctggccttgcattaggaagcttggtagatgaaatacagagataccagaagccggtgttggccgctatccaaggtgtggctctcggaggaggactggagctggccttgggctgtcactatcggattgccaatgcaaaggctcgtgtcggcttgccagaagtcacactggggattcttcctggtgcaagaggaacccagcttctccccagggtcgttggagttcctgttgctcttgacctaattacctcaggaaaatatctttcagcagatgaagcactcaggcttggaattctggatgcagtcgtgaagtcagacccagttgaagaagccatcaaatttgctcagaagattatagataaacccatagaaccccgcaggatctttaacaagccagttccaagcttgcccaacatggacagtgtttttgcagaagccatcgccaaggtacgaaaacagtaccctggtgtcctggctccggagacgtgtgtccgctcaatccaggcctctgtgaagcatccctacgaagtaggcatcaaggaagaggaaaagctgtttatgtacctccgggcatccgggcaggctaaagccctacagtatgccttctttgctgaaaagtctgcaaataagtggtcaactccctcaggagcgtcttggaaaacagcctctgctcaacccgtctcctcagttggcgttcttggcttgggaacgatgggccgaggcatcgccatttcttttgcgagagtggggatctctgtggttgctgtggagtcagacccaaagcagctagatgctgcaaagaagataatcactttcaccttggagaaggaagcatccagagcgcatcagaacggccaagcttcggcaaaaccaaaactcaggttctcctcatccacaaaggaactttcaactgtggatttggtggttgaagcagtgttcgaagacatgaacctgaagaaaaaggtctttgctgagctgtcagccctgtgcaagccaggagcctttctgtgcaccaatacctcggcgctgaacgtggacgacattgcttcttccacagatcgccctcagctggtgattggcacccacttcttctcaccagcccatgtcatgaggttgctagaggtcattcctagccgatactcttcccctactaccatcgccacggttatgagcttgtccaaaaagatcggaaagattggagtagtggttggcaactgctatggatttgttgggaatcggatgttggctccctattacaaccaggggtttttcttgttagaggaaggtagcaagccagaggatgtagacggggtcttggaagagtttggttttaaaatgggacccttcagagtgtcagacctcgcagggctagatgtgggttggaaaattcgcaaggggcaaggccttactggaccatcattgccaccagggacccccgtccgaaagaggggcaacagcaggtactccccacttggcgatatgctctgtgaagctgggcggtttggtcagaagacaggtaaaggctggtatcagtatgacaagccactgggtcgcatccacaaacctgatccctggctttctacgttcctgtcacaatatagagaggttcaccacatcgagcagcgcaccatcagcaaggaggagatcctggagcgttgcttatattccctcatcaatgaggcgttccgcatcttggaggaggggatggctgctcgcccagagcacattgatgtcatctacttgcacgggtacgggtggccaaggcacaagggcgggcccatgttctatgctgcctcagttgggttgcccacagttctagagaaactgcagaaatattacaggcagaaccctgacatcccccagctggagcccagtgactacctcagaaggctggtagcccagggaagccctcctctgaaggaatggcaaagcttggcagggccccacggcagcaaactgtgattcagccttctgcgttttgccacgtatgttggcacctaatttcagtatgattccttcctaaaatccaaacagatcgctctgaagtacaaatcatgattgctgctgctgctgctgctgatagctggtcagtaaaagctcctctccgtatctttctacctcataattccaatggtcagacttcaggaatgtctacagttagtctatacctctgactgcacttctatcggaaaaattcaacgaatgtatgtttactactacaagcattcttctcttttgactgtttgcccactctaacaaaaacgtatacaaaatgttgctaatagaataattcacacctccagttgacaacccaaatggccttagcagatcaacacaggtggcatatacacgcacttgacacattccagctgtgtgaagttactgccacctgttgtaacatggtgctgggttagagcactgttctgagtgaggggaggcaggcagagaaggcaggcagataaggccacacatcatatggatgtggatataaaattccaggatatgcaggtctgtggacaacatagatgagtagcccaaggctgtaactgttcatacatgcatatattttttggtccttttttttttcggagctggggaccgaacccagggccttgcgcttcctaggtaagcgctctaaccactgagctaaatccccagccccgaggctgtaactgttagaggttaaaaatcactactgattagtacagagtatctttgggagctgataaaattttctaaaattactctagtggtggatctgtaacacattgagttcaatggttcaaagtgaattatattttatatatatatatatatatatatatatatacatatatatatagtctatctcaataaagttaataaaatt

SEQ ID NO: 223 - DNA, 771 bp, Rattus norvegicus
gccagggcgtccggcctcaccgctcagtggggaagacatgcaaggaatttgcataagacagcagtgcaaaatggtgctggaggagccttatttgtgcatagagatactcctgagaataacccagatactccatttgatttcacaccagaaaactacgagaggatagaggcaatagtcagaaactacccggaagggcacagagcagcagctgtgcttccagtgctggacctggcccaaaggcagaatgggtggctgcctatctctgccatgaacaaggtggcagaagttttacaagtgcctccaatgagagtctatgaagtggcgactttttacacaatgtacaatcgaaagccagttgggaagtaccacattcaggtctgcactactacaccttgcatgcttcgagactctgacagcatcctggagacccttcagagaaagctgggaataaaagttggagagactacgcctgacaagcttttcactcttatagaagtagaatgtttaggggcctgtgtaaacgcaccgatggttcaaataaacgacgactactacgaggatctgacacccaaggatattgaagagattattgatgaactcagagctgggaaagttccaaaaccagggccaaggagtggccgcttctgttgtgagccagccggaggccttacttctttgactgaaccacccaaaggacctggctttggtgtgccagcaggcctttaacttacattcaactgtaaaaatgtcactggagaaataaaatatgaa

SEQ ID NO: 224 - DNA, 1920 bp, Rattus norvegicus
ccatggtcctcaatttcctctccccgagcctttcccggctcggcttgtgggcttctgtagtgatcctgatggtaatcgttctcaagctcttcagcctgctgcttcggaggcagaagctggccagggctatggacagtttcccagggccccccacacactggctttttggtcatgcccttgagatccagaagttagggagcctggacaaggtggtatcctgggcccaacagttcccccatgcccacccactttggtttggacaattcgttggtttcctgaacatctatgagcccgactatgcgaaagctgtatacagccgcggggatccgaaggctgcagatgtgtatgacttcttcctccagtggatcgggaaaggcctactagttctggatgggccaaaatggttccagcaccgcaagctgctcacacctggcttccattatgatgtgctgaagccctatgtggccatatttgctgagtccacacgtatgatgctggacaagtgggagaaaaaggctagtgaaaataagagctttgacatcttctgtgacgtaggccacatggccctggacaccctcatgaagtgcaccttcggcaaaggagacagcggcctaggccacagagacaacagctactacctggcggtcagtgacctcacactgctgatgcagcagcgcatcgactccttccagtaccataatgacttcatttactggctcactccacatggccgccgcttcctgcgggcctgcaagatagcccatgaccatacagatgaggtcatcaggcagcggaaggcagcactgcaggatgagaaagagcggaaaaagattcagcagcggaggcacctggacttcctggacattctcctgggtgtccgggatgaaagtgggatcaagctgtcagatgcagagctccgggctgaagtggacacattcatgtttgaaggccatgacaccaccactagtggtatctcttggtttctctactgcatggccctttaccctgagcaccagcagctatgtagggaggaggtccgtgggatcctaggagaccaagactccttccaatgggatgatctggccaagatgacctacctgaccatgtgcatgaaggagtgcttccgcctctacccacctgtaccccaagtataccgccagctcaacaagccagtcaccttcgtggatggccgctctctacctgcaggcagcctgatctctctgcacatctacgccctccacaggaacagtactgtgtggcctgatccagaggtctttgacccactgcgcttttctcctgagaatgctgcaggacggcatccctttgccttcatgcctttttctgcagggcccaggaattgcatcgggcagcagtttgccatgaacgagatgaaggtggtcacagccctttgtttactgcgctttgagttctccctggatccctcaaagatgcccattaaggtcccccagctgatcttgcgctccaaaaatggtatccacctctacctgaagccgctggcttctaggtctggaaagtaggtcttcagagaactaggcctgggcagcacaagccgtgactcttcctgggatgttgccctcctagatagaatgtggagtcatcatggatccctgcctgtgggaggctttggaggcaaaagcatggacactgacagtctcctggaagacattctcttgtaaacatgtgtgtggaatgattcaacgcccaggctccagaacttatttcttcactccacaacatttgctgaacgttttgctgccttgagaaactccattgatttcacatagctacatttatttaaccatcttggtgtgtatttggaatacgatggacatgaggaaaattgctcaaactaaaactgtacaaaataaataatactttaaaaagcaaactcccaccacc

SEQ ID NO: 225 - DNA, 660 bp, Rattus norvegicus
tctccttctccggcccttgggagaagactagaaatctttccctattcagagtcttttcaaaatgtgagataagtactattatatgatcaataactgaccaagaaaatatcccattatccaagccaagctcctacaatagatgcagaacagaggtcaatgagatcattgcccaaaaatcctgtcttccctactttaagtacaagagaagcaggctataggtaccatcagtgatgaagcggaatccactgtgtcttttctgtaagactgtgagtaagaattctacctcttagatacagctagtactgtactgtacttaactgcttacttaacactgtatcggttacatcatcttgtgtgtatgtaatttgtgccactgatttttttaactcttattcagttactcactgccatttaaaatggtaacagttgctttattggaaaaacaaataacaggaatgattaaagattttatttttatagacaaaagtaaaactaagactaagaaccatgttgcctgtattaatcataaaaaaagtaaaattgtaagcaaaaacaaaatgtttatttttaaatgtgtattttctgctttatttgagttttctgaccttactgtctcaattatagtaaaatcaagtaagccatcaaaaaaaaaaaaaaaaa

SEQ ID NO: 226 - DNA, 678 bp, Rattus norvegicus
ttgttacagtgtttctgaccgctttttcacccttcacagatttaatacaaagttacaagccttacttttataacatatcctacaagtttccttaagactgttgttacagtctggctgaacccagttccacctgcaaagtcttgcgttgtgtctgcaggccacacaaaatggcctcttgcttgtctggtaatgagattgtaaatccatttcctgcatgttctccccaggcttgcctgagtgtgtggggtgcgcaggtgcgtgcccgtctttttgtactgtaactacctcatggtttgaatggtgagcgtactgctggttgtattaacagagcacatttgtcgggtgagttgtgtatgtaaactttttttttaaccctgtttgttttatctgggggttcgttcattaaactgacagatatttttctaggagggactattattggtttccaaatgcaatactctattctggtttttcctgagtgagcctggttttgttactgtttttttcatctatgagggtaaaagcataccctgaaaaatccctgtggccagtttgaacacccctgctgtaaccttccctctgtctcatggtctttgtgaacctgcttagaggtatagttttgataaccacagttttaattcttttatctgtgcataataaagatatatatcaattatt

SEQ ID NO: 227 - DNA, 327 bp, Rattus norvegicus
gtaatcttacaaatattaacgtctagttgttctatattataaccatatttgcgctctatgcaagccctcggaacagaacatactcatcttcatgtaggacctatgaaaattgtctatttttatctatatatttaaagttttctaaaaatgaaaaaaggttattacgaattttgttgtacaaaatctgtacaaaaatctgtttttacatcataatgcaagaattggaaatttttctatggtagcctagttatttgagcctggtttcaatgtgagaaccacgtttactgttattgtatttaattttctttttcttttcaacaatctcct

SEQ ID NO: 228 - DNA, 658 bp, Rattus norvegicus
gtgtccctagtaaccctgacacctgtaatgcgcacggaggcccaatcccaaggctcctatctgctttcccgctccggttaagttaggagacccctaatggcaatcgaaggcagttcctctgtcatcgtcaggtcaagctcgaggttactatgtagactggagaatgttgcgtgatgtgaagagacgaaaaatggcttatgaatatgcagatgagcggcttcggatcaattcgctcagaaagaataccattttgccaaaagaccttcaggaaatggctggtgatgaaattgctgcccttccacgggatagctgtcctgttagaatcagaaatcggtgtgtcatgacatctcgcccccgcggtgttaagcgtcgctggagacttagtcgcattgttttccgacacttagctgaccatgggctactttctggagtccagcgagcaatatggtgacagtttccaaacctgcccagctgccagggaagccagtcctggcaaaagacttaagactaaaccctagggttcataggggtctagtatgtttagtctacttgactctgagtgaaactacccttttgatttaaataaataaaagtggttatttgtcattgaattgtcttttaactttaaggcatatattactcccatacatggtgtaag

SEQ ID NO: 229 - DNA, 505 bp, Rattus norvegicus
  misc_feature 41, 46: n = A,T,C or G
caaaggcacagagaccaggccaatggaaagtaacacagtgngaccntagggctgattgtagcctaggctgattcactacccaaacagttcagctggcatcctgggcatggtgcccaggactggcctccttcctggtgctgatacagagaaatctgaccagagccaaggcacagagcattccaggatagcctgacccaaatttattgacttgtctaataacttattcttcaatcaacatatgtatatgattaaccccttctctctggccttatattcttcccacttttcttctcatagtagaagcatttgaagtattgtgccattaaaaaggcagctttagggctgaagagatggttaagaaccctgactgctcttccagaggccctgagttcaattcctagcaagcacatggtggctcacaaccatctgtaatgggatctgatgccctcatctagtctgtctgaagacagtacaatactcatgtatttaaaaaaaaaaaaaaaaa

SEQ ID NO: 230 - DNA, 784 bp, Rattus norvegicus
attgggcagtctgagaaagccaaaggggaattgaaggagacgggcgacactgccgagggcacctggtcagggtcgcggctgccgccgtcatgccggggatagtggagctgccaactctggaagagctgaaagtagaggaggtgaaagtcagctcagccgtgcttaaagctgccgcccatcactatggggctcagtgcgataagaccaataaggagttcatgctgtgccgctgggaagagaaggaccctaggcgctgcctgaaggagggcaagctggtcaacggctgcgcactgaacttcttccggcagatcaagagtcactgtgcggagcctttcacagagtactggacttgccttgattattccagcatgcagctgtttcgtcactgccgcaaacagcaggcaaagtttgacgaatgtgtgttggacaaactgggctgggtgaggcctgaccttggggagttgtctaaggtcaccaaagtgaaaacagatcgccctttgccagagaatccttatcactcaagaccaaggccagagcccagccccgtgatcgaaggggatctgaagcctgccaagcacggcagccgctttttcttctggaacgtgtaaagatggatccacggcccatactcggttacctcggtcatgcacccagacaacagacaacgaaaacacccatgccgacctagtgttctttcctggatcacagacgttaacgaaaaagttaatttatgtggcttggcagttactctgtacgtttcctgtccattaaaaatgttaaagga

SEQ ID NO: 231 - DNA, 317 bp, Rattus norvegicus
tgtcagtgaggagtcactgtcacttggtggttctgagggaaggagaattagttttcttcaggggtattctcgtttcccctgtggctgcccctacatgcatccacttggacagtcctaattggactcagcgagttctgaaaaaaagatatgaagttgggaagaagatcaagcgccctgtggtataggagatggagggacgtgcagaatggagatgatggaaattcattgagtacatgtgcaaaactactaaagaataaaaaaaaaagttttgaaaatgtagaaagaatgaataaagttaccactctgcttggagacca

SEQ ID NO: 232 - DNA, 626 bp, Rattus norvegicus
gggctgtgtactagaaagggcattcaaagatgactacgtggtcagcttggtcagagtacctgacgttcctgtgattgctggggccttctgctatgatgtcgctttggataagagactggatgagtggatgccaaccaaagagaacctacgttctttcacaaaagatgcccatactttaatatatagggaccttccctttgaaactctggaagttgatgcaaaagtggcattagaaatatttcaacataacaagtacaaagtggacttcatagaggagaaggcatctcagaatcctgagagaatagtcaagttacacagaatcggtgacttcattgatgtgagtgaaggccctcttattccgagaacaagtgtttgtttccagtatgaagtgtcagcggtccacaatcttccccgcagccagcccagcctggtgcgcagatttcagggcctctcgctacccattcacttgagagcacagtttacaatctgggacaagctattggaaagatcacggaaaatggtaaccgaagatgaaatcacacagacggagagcaccgcacccacccagtagtgtccgaaaatttaaatatgtatagtaaattaaaataaaagcttttaatacaaaa

SEQ ID NO: 233 - DNA, 632 bp, Rattus norvegicus
gagagaagagcccactttgcaggtcctggccctcacatgcccagtggaccattttaccataattccccctccaaagaccagccctgtctaaagttatgtgcaactcaacctggatacctcagcaaggctgtaggctggtctgtggtaagatgtaaagaaggatagctgggtctgactaacttagccaggggacactttggcgcatttgttatctccatccgaaggtaggctagctggcccatctccttgaattgttccttttgggaaacttaattcacagtattgatctccctttttgccttgtactgaatgacacattacctccacgctctcctggactaagcggtccacagggccacagggttgctttctctcttttgtgaggatggggagttgacaggaatgagggtccaaggaatgagcatgaatgacaagaaaacaaggggaacactaagcttttccagggtgtgcggttaaaggtatttgaccatttgctggctaggccagatcacgggaactcgagagcttttactgtgattcttcaatgtaaaaaataaaacaatgtcagactgtgtttatatgatttgtataaagcctttttaagattactatttaaataaacattataccag

SEQ ID NO: 234 - DNA, 967 bp, Rattus norvegicus
tcagtctatagcaaaggcggcccacggtcctttcggagcgtgtcgccggcttgtttgcttgcagcgattctccagggcagccatggcagagccacagccagcgtccagtggtcttactgatgaggccgccctcagttgctgctctgacccggatccaagcaccaaggattttctactgcagcaaacgatgctgagaattaaggaccctaagaagtccctggatttttatacgagggttcttggactgacgcttctccagaagcttgacttcccttctatgaagttctcgctctatttcttagcgtacgaggataagaacgatatccccaaggacaagacggagaggacagcgtgggctttttccagaaaggctaccctggagctcacacacaactggggcactgaagatgacgagacgcagagttaccacaacggcaactcggaccctcggggatttggccacattgggattgctgttcctgatgtctacgaggcctgtaagagatttgaagaactaggtgtcaagtttgtgaagaagcctgatgatgggaaaatgaaaggtctggcgttcgttcaagatcctgatggctactggattgaaattctgaatcctaacaaaatggcaacaattatttagttccgtgatggagacagcggggacaagaaacatcgtgattcgagatgctgagatgctgaagcaccagaagtgttgggggactgatgggtctttgctccagttcaagccattctgaaatccttttcattgtcctgattcagtgggtttaaaaaatctcccctctgttaagccaacctagttttcaagtagcaatttatcttacgaccttgacaaagttgtgtgagtttacttttaagataataattagaactgttctcctgagagaccacatgtgctgctgcctgcctcttaaagactactccagtctgaaaaaaaaaaaaaaaaaaactt

SEQ ID NO: 235 - DNA, 487 bp, Rattus norvegicus
ggtcttggtaacccatgacctcagatttactgccttaaggccatttaagatctatgtccctcttgcctcctctctatctaaaggttgtcatttaccctgggtgtagttatagtatgacctgttaccattcttagactctttggctgtatccccctatgagaggttcccataggcctgtttaacctttctctagatgcccatctcacagtgtacctgcctctggatatccctagtacatttttaatgagccgggaacttcaaactagagacgaccatacctgtgttcagtccttgcctctttcagactttccagtagaggtgaagaccctccattcagtagaaattctgggccatttgtaagcatttgtacttcctaaataaatcttcatagcacaaatatgtatattatcaaaatgtagtttgtaagcaattctgtatctattttctctaaatagaagtatgccctaagtaaaaaaaaaaaaaaaaa

SEQ ID NO: 236 - DNA, 908 bp, Rattus norvegicus
tctcgatacttctgccgctcgcctgcgccccggaagctgcccctactcgggggtcatgatgggcagcaagatggcttccgccaccagggtcgtgcaggtagtgaagccacatgctccgttaataaagttccctaacagaagagacaaacctaagctcagtgcttcagacactttgagatctgctgcgctaccctcccactcctctgtaatttcccagcattctaaaggaaatttgtccccaaatttactgatgcatcaggggccaccagacactgcagaattaataaaatcattacctcagaaatacaggaggaaacctatgtctcaggaggaaatggaatttatccagcgtgggggtccagagtgatcgtcgttgtggctgctgcttgtgaccaggcagaaggattagctttacaataaaggacttccacaatgtcaaatgaaaagtcacatattaaacaaccttaataaatgttctgtaagcagaatgaagtatagaaactccaggcggtcacttgaatctcctaccttatgtatcttggtcacttccccacaagctggcctatacacttacgaaagtctacatttttaaatgctagcttgttaacttactcttgattatgaagtgttaccggtgatgagctattaaaagcacatggtatctaataaacgtccctttttctgtttgtgtagatgtagagataatttatgaaacataatctctgctataaggaagtctttttttccctgaaattaagtgaggatcagtgagatatttccactcttaactccctgattttattttcatttacaaggttatctgggtgtaatgatgtaaccatactctgttctaagtaataataatgcaatttaaataaaacttggcagtgaggattaaaaaaaaaaaa

SEQ ID NO: 237 - DNA, 173 bp, Rattus norvegicus
tgctcgcaggaggggggaaaaacaatgcatgggcggtcagatcctgctccaaattctctgttggctgcgctttttaatccaatgcttttcagagtgtattcactcacctacagaaatagagcccttgctttaggggtgactgtcatatgccttattcttaataaaacgtttgg

SEQ ID NO: 238 - DNA, 269 bp, Rattus norvegicus
  misc_feature 54, 209: n = A,T,C or G
gaaagagctttcagagtatgtccgcaaccagcagaccattggggctcggaaggngctccagaaggagcttcaggagcagatgtcccgcggtgaccccttcaaagacataattttatatgtcaaggaggagatgaagaaaaacaacatcccagaaccagtggtcattgggattgtgtggtcaagtgtgatgagcaccgtggagtggaacnagaaggaggagcttgtagcagaacaagccatcaagcacttgaagcaatacagccctctat

SEQ ID NO: 239 - DNA, 651 bp, Rattus norvegicus
  misc_feature 194: n = A,T,C or G
gcggccgcaaaggtttttattattcaggatattgccagagtctggcctggaactaaaatgcccgggcaaatgggaaaccaaaacaggacagtgtatgggctgaaggtgtggagagtgaacaccaagcacaatataatctatgtcaatggctctgtgcctggacatagaaattgcttagtgaagatcaaggactntacgctgcctgcatacaaggatttctgtaagagcctgccgttccctacctactttcctgatggagacgaagaagaacttccagaagatctgtacgatgagagcgtgtggcagcccagcgaaccttccatcacctttgcctgatgcgctggtgctgcaggcctctgtgctccgcgtactttggtgaccagatcagtaatagaaccaggagtgggatgtcgttccctgtgcttagtcatgagagcaagctcctgtgtccaccaagggcacaagtgagccacttggcccctcttcagtctgattagcaaggttactgcattaacagtcacatagactgggtttgttaacattgacagtttgtaaagaacaagctgcctgccgtttgtggtgtcattctttagacacatttcccagtcttgttttggtttatagttttattaaagatttatctctcttaat

SEQ ID NO: 240 - DNA, 397 bp, Rattus norvegicus
tgccccttagtaacgcagacatacggcacagcagctgccaaaggtgcctatgtgccctcgtccccaacaagacttggtaaaggacaggacgccaacttggaagcctacaccgatgacctgggtgctgtgggtggcgcatgcctagaggatgaaagccagcgctctacgcctggatgaagatagtgaacatcctcccatgattctccggactgactgatcctgacctgtgaactctggcccaggagcagacaacactggcctggctgaggacttgagcattgctgctatgaactttgacctgaattgagggagaggatggcagagactttaaagcaaagagattgtagttatagcctatccatactgttgagaaaatacaggtttcacttcagtgact

SEQ ID NO: 241 - DNA, 603 bp, Rattus norvegicus
  misc_feature 122: n = A,T,C or G
acatcttgtttgctgacattgatacatccatgtatgattttgacccctgcacatctgcatcagggacagcttcaaagatggcccctgtgtcagctgatgacctcctcaagaccctggctccntacagcaatcagcctgttgccccaagtcagcctttcaaaatggatctcacagagctggaccacatcatggaggtacttgttggctcctgagatctggggccccttgacctgcgcccaggcaggccctgcacccttgtagccccaacagtttctccgcactgtgcatggacccttgcttgcctttttcagagaaaaagaaaattttacaaaaggatcacactagtattttcttcaagcagagttggagtgccttcattcgagtatgaccactttaacacactcttctgagtgggttcctcagagacctgctgccctggcgtaggagagaagactttggaagactgttgctaatgttgaaaggtgaacatgagtggttcaagtgaagcacaaggattaagttggaaaagctgtaaattgcatgtgcatatttgtctattttttctataagttttattgcaagaggtaaaaaaaaaaaaaaaaa

SEQ ID NO: 242 - DNA, 438 bp, Rattus norvegicus
  misc_feature 80: n = A,T,C or G
ggcagtctttcctggtaaaaacatgtaggaatcagggtacatcttcctgttgtgggcagcaggctctgggttttctcccntagtaaacctaggggtcctctgctttttcttgaacagaagttagaagggaaagcagcactgtttgtgttcatgtaaagtttcagatctgcttcctaagttattgaaaacatacccgctctctttcaagattgctttaaaattaactccatggggaaaatcttaaagggcgtttgttgttgttattgttttgctttttaaaaataagatattaatttactttactttgacaaatttccgccacatataagaagcgtctcagcttccaggcccctcatctcaaaggttggattctccagaagtcaccagaaacgatttctggtgggattcgtgtattgtctctaaaaaaaaaaaaaaaaa

SEQ ID NO: 243 - DNA, 640 bp, Rattus norvegicus
atggcggcggctttggctcggctcggactacggccggtcaagctggttcgagttcagttctgcccgtttgagaagaacgtggagtcaacaaggacctttctccaggcggtgagcagcgagaaagtccgcgccaccaacctcaactgctctgtgatcgccgacgtgaggcatgacggctctgagccctgcgtggacgtgttattcggagatgggtatcggctgattatgcgaggagcccacctcaccactcaggaaatgttaagtgccttggcctcccacattcgggctaggaacgctgccgcagcagcatctgcacccagcgcagacaaggtcgccccaggtacgggtacccgccgatgacattgtagaagaatcccaacaaccgacgttggcttgaaactaaagacagtggtttaagaagagctgggcttaatcactctaaatgctgcatggaggtcatgatactgagcaagaaccctaacaacagtgctgctggggcaagataagattgggtggtgaagggtccgtacaaatttgaatttttctttctcactgcttaaccatatttgaatctgtcacccacgtacattttaattaaatatttattgccaaaaaaaaaaaaaaaaaaaaaaaaacttgc

SEQ ID NO: 244 - DNA, 547 bp, Rattus norvegicus
agtgtggtatcctggatggctgcgcccacggccgctgtgtacgtgttccagaaggcttcacctgtgattgtttcgacggttaccgcctggacatcacccgcatgtcctgcgtcgacatcaacgagtgtgacgaggctgaggcaacctccccactctgcatcaatgcgcgctgtgtcaacactgatggttccttccgctgtatttgccgtccgggatttgcacccacgcaccaaccacatcactgtgcgcctgctcgacctcgggcctgagcagctgcgtgcgcctagcctcccattataactgagcactaggagcttccagagtgcacctagccttcctctagtctgcatgtgtgtgaggatgtcagacagtctcgatgtaggatggacggacacagaggggtgccttctatggcaccagttcatcatgcctagcccctcccaccagtgccctgggcctgtcctgggttccctgacacatttcttgcccttttatacaattttcaattaaaccacctattttgtactttcaaaaaaaaaaaaaaaaa

SEQ ID NO: 245 - DNA, 467 bp, Rattus norvegicus
  misc_feature 26, 45: n = A,T,C or G
actgctgatgggcccccagatatggnagccccctagacaagaacnacaagccccagggccggaaccgctgtggaggtggcccccaggatatcctttgatgctgtggggaagaagaaaaaagatgttctcttgactgactttctgccaaccatggctgtctacatcagaactctggctcctagacttttcttcagaatcatggcctctagggccaggaaagagcgaaaatccaagaactcctgataatgatagagctgctagcttgggccagcctgatcagactgagtaccacaccttcctggactggaattgcagtgcaaggggtccacagctgagacctggtggagggctgtcttctgtttgttccccagggagtggattagcccttagggagtgaaatatggagttgtgcggggactctaaaagatgcgaaataaatgactgaacagtgggtcagagttcacagt

SEQ ID NO: 246 - DNA, 447 bp, Rattus norvegicus
gaaagtagaggcatttgattgtcggggtcacccaaaggctacaacctctagccatgggggatttcgtagatgtccatctttaaaagcagctcaggtaaggggtgactccaggtttcccgtaggcatcttaatgtgggacttccctgtagagggagagctacagtgttcattctatatcagagggcaggagaggaaaccagcaggaaatgggagggttacagatcaatactcctttggaaactggatgtcttaactgggtgctagaacgcaaacttatgtatttattgtctggtcattgaattcattgcctttcaaaaccattgttcaaatgtcactatccattggactcacttgcgtgccagccgaattggttgaaaccaaaccagagagtggtttgtccatttgccataccttttgtatttcttacaataaaaacatgttggtagc

SEQ ID NO: 247 - DNA, 546 bp, Rattus norvegicus
agtttgcactgggtgaatgacctccctagagcacttgaacagattcattatgtcttaaaaccagatggagtgtttgttggtgcaatgtttggaggtgacacgctctatgaactccggtgttcactacagttagcagagacagaaagggaaggaggcttttccccacacatttctcctttcactgctgtcaatgacctagggcatctgctgggaagagctggcttcaacactctgactgtggatactgatgaaattcaagttaactatcctggaatgtttgaattgatggaagatttaaaagggatgggtgagagcaactgttcttggaacagaaaagccctgctgcaccgagacacaatgctggcagctgcggcggtgtacagagaaatgtacagcaatgaggatggttccattcctgccacatatcagatctaccatatgataggatggaaataccatgactctcaggcaaggctagctgaaagaggttcagcaaccgtgtcatttggagatctagcaagactaaatgataccatgtcacagggg

SEQ ID NO: 248 - DNA, 279 bp, Rattus norvegicus
aaaaaacgtcactggcacagccccaggggccagcagtctaaaagttttaacaaaacgttgcttcttaaggttctgggcgggcactttcacatctctcctggcttctaccaaggaagcatccagctttccttggtttttagacacagcataattcctaattgcatctcttttgtcatcttctctcggttgtatccacatttccctttgtgaatgtttatttatttgtctgggtgggtgtgtgtgttcaggtgctaaaataaattgggagattagtgttct

SEQ ID NO: 249 - DNA, 392 bp, Rattus norvegicus
gacagttagagtacatttcccagcttttaacccgatcaggccctcaagcccttgggagccttctttctcttgctctcttgctggccttctggctgacctggccttgacaaaccacatggctgtccaggcatctatgtcctgtctgccttgctgggagagcttgggtctgccttttgcagaacagatcagctttttaatgcttttaaatctctttttcatttctaaagaagcaaaatgggaactgggttgggtgtcctacatctctcccatgggcccccaagtccccctgggatttttaggtcaggaattcccataaatcagtttgttgaaattctgagggggtcagaatgatttgatcttccttttgatattgaaataaatgtttcagcccg

SEQ ID NO: 250 - DNA, 8269 bp, Rattus norvegicus
ggcgggtcagggagcgcaggggcgtggggcgcagggccgggtgcagcgcagtgaaggaacgagcctgggttgccctgtagtgccggggagaccctgagagcccagcccgcccacccgccaggaaagagggcagcagcgggtggaacgcccgcgggaccgcccgtggtgcgcgtgaacgtccgatcccggccggccaccgcaagaggccgccgcccggcagcgggcagctggcgagcaggcatgccgcggctcctggcgcccttgctctgcctaacgctgctgcccgcgctcgccgcaagaggcttgagatgctcccagccaagtgggacctgcctgaatggagggaggtgcgaagtggccaacggcactgaagcctgtgtctgcagcggagcgttcgtgggccagcgatgccaggaccccagcccttgcctcagcacaccatgtaagaatgctggaacgtgctatgttgtggaccatggcggcatcgtggactatgcctgcagttgccccctgggtttctctgggcccctctgcctgacacctctggccaatgcctgcctggccaacccctgccgcaacggggggacctgtgacctgctcactctcacagaatacaagtgccggtgcccgccagggtggtcaggaaagtcatgtcagcaagccgacccctgtgcctccaacccctgtgccaatggtggccagtgcctgccctttgagtcttcatacatctgtggctgcccgcccggcttccatggccccacctgcagacaagatgttaacgagtgcagccagaaccctgggttgtgccgtcatgggggcacgtgccacaatgagattggctcctatcgctgtgcctgccgtgccacccacactggtccccactgcgagctgccctacgtgccctgcagcccctcaccctgccagaacggaggcacctgccgccctacgggggacaccacccacgagtgtgcctgcctgccaggctttgctggacagaactgtgaagaaaatgtggatgactgcccaggaaacaactgcaagaacgggggtgcctgtgtggacggtgtgaatacctacaattgccgctgcccaccggagtggacaggtcagtactgcacagaggatgtggacgagtgtcagctcatgcccaacgcctgccagaatgcgggaacctgccacaactcccacggtggctacaactgcgtgtgtgtcaatggctggactggtgaggactgcagtgacaacattgatgactgtgccagtgccgcctgttttcagggtgccacctgccatgaccgtgtggcttccttctactgcgagtgtccacatgggcgcacaggcctgctgtgccacctgaacgatgcgtgtatcagcaacccctgcaacgagggctccaactgcgacaccaaccctgtcaacggcaaggccatctgcacttgccctcgggggtacacggggccagcctgcagccaggacgtggatgagtgcgctctaggtgccaacccgtgtgagcacgcgggcaagtgcctcaacacactgggctctttcgagtgtcagtgtctacagggctacactgggccccgctgtgagattgatgtcaacgagtgcatctccaacccatgtcagaatgatgccacgtgcctggaccagattggggagtttcagtgtatatgtatgccaggttatgagggtgtatactgtgagatcaacacggacgagtgtgccagcagcccctgtctacacaatggccgctgcgtggacaagatcaacgagttcctgtgtcagtgtcccaaaggcttcagcgggcacctgtgccagtatgacgtggatgagtgcgccagcacaccatgcaagaacggcgccaagtgcctggatgggcccaacacctacacctgcgtgtgcacagaaggttacacggggacccactgcgaggtggacattgacgagtgtgaccctgacccctgtcacattggtttgtgcaaggatggtgtggccacctttacctgcctctgccagccaggctacacaggccatcactgtgagaccaacattaatgagtgtcacagccagccgtgccgccatggcggcacctgccaggaccgtgacaactactacctctgcttatgcctcaaggggaccacaggacccaactgtgagatcaatctggatgactgtgcgagcaacccctgtgactctggcacgtgtctggacaagatcgatggctacgagtgtgcgtgcgagccaggctacacagggagcatgtgtaatgtcaacattgacgaatgtgcgggcagcccctgccacaacgggggcacctgtgaggatggcatcgccggcttcacttgccgctgccccgagggctaccacgaccctacgtgcctgtctgaggtcaacgagtgcaacagtaacccctgcatccatggagcttgccgggatggcctcaatggatacaaatgtgactgtgcccctgggtggagtgggacaaactgtgacatcaacaacaatgagtgtgagtccaacccttgtgtcaacggtggcacctgcaaagacatgaccagtggctacgtatgcacctgccgagaaggcttcagtggccctaactgccagaccaacattaacgaatgtgcttccaacccctgcctgaaccagggcacctgcattgatgatgtcgctgggtacaaatgcaactgccctctgccctatacaggagccacatgtgaggtggtgttggccccatgtgccaccagcccctgcaaaaacagtggggtatgcaaggagtctgaggactatgagagcttttcctgtgtctgtcccacaggctggcaaggtcaaacctgcgagatcgacatcaatgagtgtgtgaaaagcccgtgtcgccatggtgcctcttgccagaacaccaatggcagctaccgctgcctctgccaggctggctacacgggtcgcaactgcgagagtgacatcgatgactgccgacccaacccatgtcacaacgggggttcctgcactgacggggtcaacgcggccttctgcgactgcctgcccggcttccagggtgccttctgtgaggaggacatcaacgaatgcgccacgaatccatgccaaaatggcgccaactgcactgactgcgtggacagctacacgtgcacctgccccaccgggttcaatggcatccattgcgagaacaacacacctgactgtaccgagagctcctgtttcaatggtggcacctgtgtggatggtatcaactccttcacctgtctgtgcccacctggcttcacgggcagctactgccagtatgacgtcaatgagtgtgactcacggccctgtctgcatggtggcacctgccaagacagctatggtacctataagtgtacctgcccacagggctacactggtctcaactgccagaaccttgtgcgctggtgtgactcagctccctgcaagaatggcggcaagtgctggcagaccaacacacagtaccactgcgagtgccgcagcggctggactggcttcaactgcgacgtgctcagtgtgtcctgcgaggtggctgcacagaagcgaggcatcgatgtcactctcctatgccagcacggagggctctgtgtggatgaggaagacaagcattactgccactgccaggcaggatacacgggcagctactgtgaggacgaggtggacgagtgctcacctaatccctgccagaacggagccacctgcactgactatctcggtggcttttcctgcaagtgtgtggctgggtaccatggctctaactgctctgaggagatcaacgagtgcctatcccaaccctgccagaatgggggtacctgcattgatctgaccaacacctacaagtgctcctgccccaggggcacacagggtgtacactgtgagatcaacgtcgatgactgccatcctcccctagaccctgcttcccgaagccccaaatgcttcaataatggcacctgcgtggaccaggtgggtggctatacctgcacctgcccgccaggcttcgtcggggagcggtgcgagggcgatgtcaatgagtgtctctccaacccctgtgacccacgtggcacccagaactgcgtgcagcgtgttaatgacttccactgcgagtgccgggctggccacactggacgccgctgtgagtcggtcattaatggctgcaggggcaaaccatgcaggaatggaggtgtctgtgctgtggcctccaacaccgcccgtggattcatctgtaggtgccctgcccgcttcgagggtgccacttgtgaaaatgacgcccgcacttgtggcagtttgcgctgcctcaacggtggtacgtgcatctcaggcccacgcagtcccacctgcctatgcctgggctccttcactggccctgaatgccagttcccagccagcagcccctgtgtgggtagcaacccctgctacaatcagggcacctgtgagcccacatccgagagccctttctaccgctgtctatgccctgccaaattcaacgggctgctgtgccacatcctggactacagcttcacaggtgcggccgggcgcgacattcccccgccacagattgaggaggcctgcgaactgcctgagtgccaggaggatgcaggcaataaggtctgcaaccttcagtgtaataatcacgcgtgtggctgggacggcggcgactgctccctcaacttcaatgacccttggaagaactgcactcagtccctgcagtgctggaagtattttagtgacggccactgtgacagccagtgcaactcagctggctgcctttttgatggcttcgactgccagctcaccgagggacagtgcaaccccctgtatgaccagtactgcaaggaccacttcagtgatggccactgcgaccagggctgcaacagtgccgagtgtgagtgggatggactggactgtgcagagcatgtccccgagcgactggcagccggcacactggtgctggtggtgctgcttccgcccgatcagctacgcaacaactccttccacttcctgcgggacgtcagccacgtgctgcacaccaacgtggtcttcaagcgtgacgcgcagggccagcagatgatcttcccctactatggccgcgaggaagagctacgcaagcacccgatcaagcgttctgcagtgggctgggccacaacgtcactgcttcctggcaccaatggtgggcgccagcgcagggagctggaccccatggacatccatggctccatcgtctacctggagatcgacaaccggcagtgtgtacagtcatcctcgcaatgcttccagagcgccaccgatgtggctgccttcctaggtgctcttgcctccctcggcagcctcaatatcccctacaagatcgaagccgtaaagagtgagacggtggagcctccgctgccctcacagctgcacctcatgtacgtggcggcagctgccttcgtgctcctgttctttgtgggctgtggggtgctgctgtcccgcaagcgcaggcggcagcatggccagctctggttccctgagggtttcaaagtgtcagaggccagcaagaagaagcggagagaacccctcggcgaggactcagtcggcctcaagcccctgaagaacgcctcagatggtgccctgatggacgacaatcagaacgagtggggggacgaagacctggagaccaagaagttccggtttgaggaaccagtggttctccctgacctggatgatcagactgaccaccggcagtggacccagcagcacctggatgccgctgacctacgtgtgtctgccatggccccaacgccgcctcagggggaggtagatgctgactgcatggacgtcaatgttcgaggaccagatggcttcactcccctaatgattgcctcctgcagcggagggggcctggagacaggcaacagtgaggaagaagaagatgcacctgctgtcatctccgacttcatctatcagggtgccagcttgcacaaccagacggaccgcacaggggagactgccctgcacctggctgcccgatactctcgttcagatgctgccaagcgcttgctggaggccagcgcagatgccaacatccaagacaacatggggcgtaccccattacatgccgctgtttctgcagacgctcagggtgtcttccagatcctgctccggaacagagccacagatctggatgcccgaatgcatgatggcacaacccctctgatcctggcggcacgcctggccgtggaaggcatgctagaggacctcatcaactctcacgctgatgtcaatgctgtggatgacctaggcaagtcagctctgcactgggcagccgctgtgaacaatgtggacgctgctgttgtgctcctgaagaacggagccaacaaagacatgcagaacaacaaggaggagactcccctgttcctggccgcccgtgagggcagctatgagactgccaaagtgttgctggaccactttgccaaccgggacatcacggatcacatggaccgattgccacgggacattgcacaggagcgcatgcaccacgatatcgtgcggcttttggatgaatacaacctggtgcgcagcccacagctgcatggcactgccttgggtggcacacccactctgtctcccacactctgctcgcccaacggctacctgggcaacctcaagtctgccacacagggcaagaaggcccgaaagcccagcaccaaagggctggcttgcagtagcaaggaagctaaggacctcaaggcccggaggaagaagtcccaggatggcaagggctgcctgttggacagctcaagcatgctgtcacccgtggactccctcgagtcaccccatggctacttgtcagatgtggcctcaccacccctccttccctccccgttccagcagtctccatccatgcctctcagccacctgccaggtatgcctgacacccacctgggcatcagccacttgaatgtggcagccaagcccgagatggcagctctggccggaggcagccggttggcctttgagccacccccaccacgcctctcccacctgcctgtagcctccagtgccagcacagtgctgagtaccaatggcacaggggctatgaatttcaccgtgggtgcaccggcaagcttgaatggccagtgtgagtggcttccccggctccagaatggcatggtgcccagccagtacaacccgctaaggccaggtgtgactccgggcacactaagcacacaggcagctggcctccagcatggcatgatgggcccgatacacagcagcctctccaccaataccttgtccccgattatctaccagggcctgcccaacacaaggctggccacacagccccacctggtgcagacccagcaggtgcagccacagaacttacaaatccagcctcagaacctgcagccaccatcgcagccacacctcagtgtgagctcagcagccaatgggcacctgggtcggagcttcctgagcggggagcccagccaggcagacgtacagccgctgggccccagcagtctgcctgtgcacaccattctgccccaggaaagccaggctctgccgacatcactgccatcctccatggtcccacccatgaccactacccagttcctgacccctccttctcagcacagctactcatcctcacctgtggacaacacccccagccaccagctgcaggtgccagagcaccccttcctcaccccatcccctgagtcccctgaccagtggtccagctcctccacgcattccaacatctctgattggtccgagggcatctctagcccgcccacgagcatgccgtcccagatcacccacattccagaggcatttaagtaaacagagatgtgggatgaaggaccccagcttccgttcccaagctctgttgggagtcctttccagtgctccaggatgctggggcgaccaaaggagccttttaaaaaaaaatgtttttatacaaaataagaggacaagaatttccatttttttttttagtatttatttatgtacttttattttccacagaaacactgcctttttatttatatgtattgttttctatggcactaggggaaaacatctgttccaagaaaataaactagttctgagagcctcgattttcctggtcagggtgaagttccctgtgtgtttgtaaaatacgaacaaggattcatgatttgtaaatgccgtttatttattgattgcttctttccaaaatcgtcgagaaagaaagaaagaaaaagaaagaaagaaagaaaaaaaaaaaaaaaaa

SEQ ID NO: 251 - DNA, 347 bp, Rattus norvegicus
  misc_feature 316: n = A,T,C or G
gcagctcggactagtcagaggactctggctagggtggcatcgggatgccgtccgaagtcaaccacagtgacggaagcccgggtgcgagggtctgcgcgcaacgtcaggcacttagctccctgtggtatactgatgaacagaacccttgcaccgtgggcctcagttttgcctaaagagatctgtgcaagaaccttcttcagaatcactacaccattagtaaataagcgaaaggagtattcagagagaagaattatagggtactccatgcaggaaatgtatgatgtagtatcaggaatggaagattataaacattttnttccttggtgtaaaaagtccagatattattt

SEQ ID NO: 252 - DNA, 818 bp, Rattus norvegicus
ctgctggtgtatacaggttttctgtgttcttctcttagtgttccgctgttattcctgccagtattgtacatgcgtgattgacttgcctgtcaaatctatcaagtattggaaagtatttgtgtaaatctttgtgccaacaagaattctcccagtgttgtgtatctttacctcataccattcattgatatggttcttgtgagattgtagctcgtctgacagaagccaaggtggaatccgatgaaacctgccggggcaggaggttcaactgagaaacctaagacagcttcagcctagcatgtggacctcagcggcatagtctctaaagttttgtgtaaactgtgatgttcacctgtggctttgacccatttctgatgtggtttaattttatttctttctggacagctttgtagaaatggaatttttatactaaagacactgttcacttgtaagtcaatacattataaaatggtgtatttattttttgtaatagtgtggattgtttagcccagtgtatttattttcctttacctgtgtattctgtgctctcaaatagatgtgtagcaattgaaatgagaactcagtgcatcatttcaagcactacattgcctgcattgcaaattctctgagcacaggattgtacagaaccctgagcctgtgtactgccatttgattgtcagttccatttgtgtcaaaacctaaaggtggtgatgaccaagtgaaacagagtgctgtactgctttttcatatgaatattttcacataaaagcatttgtgaaagcagttgaaaatattactttgtttaaaaaaaaaaaaaaaaa

SEQ ID NO: 253 - DNA, 544 bp, Rattus norvegicus
  misc_feature 47: n = A,T,C or G
acgaggggtgtgtccgggagagctacagcataccaggtttaacggcnagtgaagactgtgccgcgctggaacagctcctggagggctatgaccagcaagaccaagatcaagtgtccgaggtctgcaactcgcccctgttcaaatacatggacaatgactatgctaagctgggcctaagcttggtggtcccaggaggaggaatcaagaagaaatccccagcgacaccccaggccaagcctgagggtgctgcgggtgctgctgctgaagaggaggaagacgagtattcgggaggcctgtgctagtgccctgcctgcagggatgagaagacgggatgctgacgagcctttctcatggaactaggactcgtcctgtggacgcctctgcttcaccgaagttctgatgttgaatgttaattatctgaagttttagttttccatttcccacaccagccattgtatctactgcctgtgaggcattctttcctttctcttgtaagcagaaaataaatcgtcatattttaacaattgaaaaaaaaaaaaaaaaa

SEQ ID NO: 254 - DNA, 422 bp, Rattus norvegicus
ggcacgaggctttaaaaaagcatgagcaacctaccacatgcatttcataaaatgtcattgaaaaacggagcaggatgcagagtgagactctgtagcttaataatagttcattttgccacttggaatagcttttccattcaggctaggtgtcattctgcttattttaagctgttattttatccctggccgattacagattttatattctagagttcccactagggaaggtacctcttttttttttttttttttccgctcaaagttaaaaatctctttggtgcaaagaaaaaaaaaaccattatgggtaccgaggtttgaaagttactctttctaaggggcaaagtgattcttcctcaaactcatccgaggctgacatttcattctggggaagtctacggaagttggtaaggttttctgttaat

SEQ ID NO: 255 - DNA, 722 bp, Rattus norvegicus
ccccaaattatttactcctggagaggttgtgtcacacaggtgctgtcctctctcactgatgtcctaatatggcggtgctagtgttttattccagggtaaggtgcaaccccccatggtttgttgagtaggtgcttagacttgttcttcagagatcccaagaaacatgactgagagattttgtctggtgcattgcctctggtttgcattgacaagttaacatggctactgaggtcgtgtcaaccacagcaccgttagccctccccgtcacctcttcccgtggctcactttctcactgggagccttccaagttccacaagccggtaatgctttctgaacaggtccaagggacttggccgtttagctcaatagaggcagggttggagtttctgatgtagaagaacacctaaaatgctcttaggtccattttttcatgatccatttcctgtttggtcatgtaactgcacagcagaagaagaaaggggaaagtaattgagaagttcacacttaggtgccaataagacattgcactggtggaagaagttatccaaagtactgtagaacatcttgtttattatttaatgttttctaaagtgaaaaatgtttgtggttttcaaaatggacgaacaaaagcaatctttgtaaataaaacactgttaatagtgaaaaaaaaaaaaaaaaaaaaaaaaaaaaaaaaaaaaaaaaaaaagtgagcggctgcaagc

SEQ ID NO: 256 - DNA, 517 bp, Rattus norvegicus
ctaaagcacatcaagctacctatatgttactcaaggggaatgatctaaattttcagaatccatcatgcccccctaaagaaggtgtgtgaaggacatcacgaaacacctcaagaagtctcagagagtgcaatcctgcctgctttttctcgtaagacgcaatggatgcattcagatgacatactttctccatgaacagtaaaacttcttgtgtgaagaatgttcgtggagtttaaaaaacaaaatctcaagtatcatcagagtcactggactgctgaacagttgaaaacggagcagtaatctttgaaaccggtaactccagttccagtgggtttctctgtgtagagatctctggctgtcctggaacttactctacagaccaggttggcctcaaactcaagagatccacctgcctctgcctcccaggtgctgggattacaggctttaaaggaaggctgtgtggaagatacggaaggctggccaggatggatggaaacctggcctctctaatcagcttatg

SEQ ID NO: 257 - DNA, 115 bp, Rattus norvegicus
gccatattacaggccaactaatttgcaattttttacgtggaaataatggccaagccttagaactcctcatttttatatccctatttatggaaataattaaagtccagattccccc

SEQ ID NO: 258 - DNA, 440 bp, Rattus norvegicus
tccttggttttgttactccatctagtatactgaagtgcattttcaaggctctctacagacacctcaaaatgatttgaatgcagttaccaaaatgagacatgtgaaggtggcttcgatcttgagctgccaagcagaaaactagcattatgtagttattattcccattaccctttgtgctgctggcctgccttaggttcctaatctgcttcaactggcctccatgtagagtggtaatgctcctctatctgtgccattaaagctggtgcattctgtgcagtggttaagagcactgactgctcttccagaggttccaagttcaattctcagcaaccacatggtgactcacaaccgtctgtaatgggatctgatgtcctcttcttctggtgtgtctgaagacagttacagtgtactcatataaataaaatacaaaaataaccctt

SEQ ID NO: 259 - DNA, 891 bp, Rattus norvegicus
gccgcggctgccagcgacatgttcaaggtaattcagagatctgtggggccagccagcctgagcctgctcaccttcagagtttatgcagcacccaaaaaggactcgcctcacaaaagttacatgaagatcgatgagctctcactctactcagttcctgagggtcaatctaaatatgtggaggagccaaggactcaacttgaagaaaacatctcagaactccgacatcgttgtgagccatatacaaatttgtgtcaggaaatatactcccatactaaacccaaggtggaacactttgtccagtggggagtagacaactataactatcttcaaaatgcacctcctggattttacccaagactcggagttattggttttgctggttttgttggactcctttttgctagaggttcaaaaataaagaagctggtgtatcctcctttcttcatggggttaggtgcctctgtctattacccacaacaagccatcactattgcccagatcactggggagaagttatatgactggggattacgagggtacatagttgtagaagatttgtggaagcaacattttcagaagccaggaaatgtgaagagttcacctggaaataaatagaaaactctacgctctacccattataatcagttataggtaaacattggaaactccagacagtaactcagtatttctacagacaaatggcagaatcagtattggatatagtaaactggctttcatcaggaaaaacattaagcctttttgctggtttgggtgatgccatattacaggccaactaatctgcaatctttcacgtggaaataatgtacaagccttagaactcctcattcttatatcactatttatgtatataattaaagtccagattccaac

SEQ ID NO: 260 - DNA, 456 bp, Rattus norvegicus
ataaaaaaaaaaaaaatcactccatcttataataatagagaaattcagctttgtttgaacttttttccagatagtttttaaaaaagaagtgtgtgtgtgcgtgtgtgtgcacgcgcgtgtgcatgcgtgttctggttagttgatgcagtttccccaaagtctcaagttgatgagaaaatagaaagagaagcagaacaaatggacagtggtatcgggcaggctgaggtgagcgcgtcctccattttctgatgaacaaagtgggaaaatctctgggatggagagggtgagctcagaaagttcagccgtgcctatgttaatcgctaggggggtggggagcgcattaacctgcgatgcccacatgggctcagtctgatctgggccactttttgtttctgcttctgtttgtttttcctgataacccaaactcttagatttatccaaaaaaaaaaaaaaaaa

SEQ ID NO: 261 - DNA, 714 bp, Rattus norvegicus
ctgtgggaccctgtgtgcctgtgaggagcgaccagcgtgttttaaacggctaaggctgcggaaaccgtgtctgacctcaagtcggaaagggagaagagtcttgagggccgaactctagagccaccagcccagagctgatttatccggaacccagcatgggtttcctgactgccgtgactcaaggcctggtgcggggagcggacaggatgagcaagtggacaagcaagcggggaccacgcaccttcactaagagtcggggtgccaagaaaacaggcttctatacaaacaggaagtttgtgcaaataaaagaaatggttccagaatttgtggtcccggacttgaccggcttcaagctcaagccctacgttaattaccgagctcctgcaggcatagacacacctctgaccgccaaagcgctcttcctggaaacagttgcacccgctatcgaaaaagactttaaagaagggacttttgatgctaacaacctggagaaatatggctttgagcccacacaggaaggcaaactgttccaattgtatcccaagaatttcccacgctagaagaccgtgacagtggctaaggtttgtctacaaagtggaaacaatactgaccatgccttggattctgagtgtctcaaagagtaggggcagcttccttgtgcacttctattaaatgcctttagtatcttgtacaatatatgttctggatcaagtc

SEQ ID NO: 262 - DNA, 283 bp, Rattus norvegicus
  misc_feature 13, 104, 110, 131, 148, 169, 178, 211, 230, 231, 242, 245,246, 256, 258, 272: n = A,T,C or G
ggaacgagttcantgtacaacaatctggggcttcttatcaatcattatcccaatggggttgtcactgtgatctgtgctcgagtaatccacgggaaccagattgncacaantggtgttgtccatgtcatcgnccgtgtcctgacacaanttggcacctccatccattganttcattgangcagaagatgagtttttcatcattcagagcggntgccatcacttctgacccnnttggagtcccntgnnagagacggtnanttcacactctttgntccccaccaat

SEQ ID NO: 263 - DNA, 496 bp, Rattus norvegicus
gtaaaatcaagtaagccatcacttgctctgatctttgtcttgttcttaactgtgtaaattactatggtacttgtataaattactacggtagtttaacagaaggtttagaggtcaccattctgagttgcatttggactatgtgctcttttacgtgaatgtcaataaacaggctaaataagtgtaagaaaacattgttgaaatattataaatcaaaatgtacttagtaatatttaccattaaacattataatgtcttaaagttagtaaaaaccaaaacaaaaactagtacctgtaatttggtacctacagtggaaaatctttatctgaaattttaaaatacattgatttagcatgtcatttttttcttctggagtgtaattcagtgtggctcaaattgccccatgtgctatatttgtcaacagtcatcctaaatgagcaatagactgaatgagctttgtacaactaataaaagttactatcaaagaaaaaaaaaaaaa

SEQ ID NO: 264 - DNA, 327 bp, Rattus norvegicus
gaggacgatcagagcaactacaccaccaactgctttggcgacagtgagtccagcgtgagcgagggcgacttcgtgggtgagagcaccaccaccagcgactctgaggagagcgggggtttaatctggtcccagtttgtccagactctccctattcaaacggttacggccccagaccttcacacccgccccacaaaaacctttgtcaaaattaaggcctcgcacaacctcaagaagaagatcctccgcttccggtcaggctctttgaaactgatgactactgtttgagtagctgatgtagcgagtgtcttcccctcccccagtctctgg

SEQ ID NO: 265 - DNA, 567 bp, Rattus norvegicus
gttattttacttattgagattcatttccattatcttgggtaccgatctgatctatgtttcatcctggttcatagtgtttaaattggtgagagaagaaacagaaggaaggagagaaaggagtgagaggagggaaggagaaggcaggaaaggaagaaggaggaagggaggagagataaggaaggaaggtgataaggaagggagctactactactacagcactgctactcagccctccaggcctgtctggacagtcttccttccatgttagggtctgtcaaaatcccccaggattttatcagttttgtttctgtaaagagctgtgttgcgtaggtaactgatgcatatctggtaggttgcttcttgtgctgttataatttcttactataactgcaattcaaaattacatgtctggctttaatatactgggtttatcctattttaattttcttcttttaatgtcactttgtttcatcacaaagctacctttactttgtgtgggttcctcttttttcttccttttataaaaaaaatccaataaaaagtcaaaagtaaaaaaaaaaaaaaaaa

SEQ ID NO: 266 - DNA, 595 bp, Rattus norvegicus
  misc_feature 2: n = A,T,C or G
cngcagctgcggcagctgcgatagcgggtagccatggtgggtggcgaggccacctccgcggtggagaagctagtttccggcgtgcggcaggctgccgacttcgccgagcagttccgttcctactcggagagcgagaagcaatggaaagcgcgcatggagtttatcctgcgccacctgcctgactaccgagacccaccggacggcggcggtcgcctggaccagctactgtccttatccatggtctgggccaaccacctcttcctgggttgcagttacaataaagaccttctggacaaggtgatggaaatggctgatgggattgaagtggaagacctgccacagtttacaagcagaagcgaactaatgaaaaagcatcaaagctaaggcagatttccacatctccaccctggggacagacttaggcggcctgggtgaacgcgactgagcactggcagctctcagactcctggaatttgcagcatagaggcagctggaacggaaggggatgaggcccaagggcttcaaagacgtcttccttcttccaggactgctgtaaaaatgcatatttatgtatttataaatgtgaacactcaga

SEQ ID NO: 267 - DNA, 586 bp, Rattus norvegicus
ggcacgagggggtgactttggacgtccgctcagccaggttgcagaagcggtttagtgtgtgtcctaatcttctctctcggtgtaggtaggcctgtgccgcaaacatgctccgccagatcctcgggcaagccaagaaacatcccagcttgatccctctcttcgtgtttattggagcagggggtactggagcagcactgtatgtgatgcgcttggcattgttcaatccagatgtcagctgggacaggaagaataacccagagccttggaacaaactgggtcccaatgaacaatataagttctattctgtgaacgtggactacagcaaactgaaaaaagaaggcccagacttctaaactgtgaagttcactgcaaagctgcttacaatgaaggtctttcagaagccatccgcacaattttccacttaagcaggaactatgtctccgaatgcatgaaatcatgttgatttttttttgagtttattacactgatgaataaatctctgaaacttgatatgtgtcactatttaatgctgaaaattcatatgggatttgatagctaggatataagaaataaagtatcaggattt

SEQ ID NO: 268 - DNA, 385 bp, Rattus norvegicus
  misc_feature 10: n = A,T,C or G
caatcctgtntgtgatgggatccccatgttctccccagacccctgtgtcttgtgtagacccttatgacaccctcaccccaccccccagtgtctgcaacaggaagttctgttgactgcatgcagtggcacatcctttaatctcaggacttgagaggcagatgcagacagagatctgtgagttccaggccagcctggtctatgtaacgagttctaggacagcctgggacacagagtgaaacacttttaaaaaactttttccctgcacagagcagatcatggaaaaccagagacctgtaagaatctgactataaacaatgtccttttttattttttttttgaacctcttaaatatttacatgaaataaaagatggtaaaataaatttt

SEQ ID NO: 269 - DNA, 481 bp, Rattus norvegicus
cagtttttagacagaatctgttaggttggtttctatgtgatccacgctggcctggaactcagttatccacctgcctgcctgcctccagagtgccaatgttaaaggcctgtattaccatgctggtacctcggagagctaatagacataaccttcactaaggaatcaatcactggttaaagtgagttgaggataggtcagggcacactgacctctaggagcctttaggctaatccctaactgcacctccccccaacaagcaccaagtaaacaagcttcagaaaatggtaggactaagtaaattaactaatggtcatagacgtgactattccagatatattgatgtatcgcattcgttttattaattgtaactcaacctttagaaaaataaaactggagctgttttctgagtatgacttatggccacttttttacagtcaatgtattttagaggcaaaacttgtaataaatgtattcaaattgt

SEQ ID NO: 270 - DNA, 363 bp, Rattus norvegicus
taaaaggtctttggctacatctgtgctgcacagtctacctctgagtgccaaggcgctggtgtcactcaggcggtggtcctccctggaagccgggaagggccagaatgggaacacttgttgccagcaaagctaagacgttcaagagcacattccttccaaatactgggctttctatgcctgcccttgctctgaaatgacagagtcctggtgtatttattaatgagctccttgcattacagctgggcggggttcatcaaaacagggttctattttgactgtaaaactgcgtggctggcatgctttagacatttccactcaggaggttgtggttaagggaattaaaaggctcatcttttatcttcc

SEQ ID NO: 271 - DNA, 497 bp, Rattus norvegicus
ccacgctcagagtcttatacactcctggccacactgatgatcacatggctttactcctggaagaggaaaatgccatcttttctggggactgcatcctaggagaagggacaacgatatttgaagacctctctgattacatgaactccctaaaagacttactaaaagtcaaagccaacattatatatccaggacatggcccagtgatccataatgccgaagctaaaattctggaatatatttctcaccgaaataaccgagaagaacaaattatcaccgtattccgtgataaccttgaggaatcattctcagtgagcgaacttaggaaaatgatttacaagaacgttccagagaatttacataagatggcggagcataatctcttgcttcacttgaggaaactagagaaagatgggaaaatattttccatcgcaagtcctgccaagaaatggagagcctccctttagtttcagatcaataaagttctcattttgctttta

SEQ ID NO: 272 - DNA, 1307 bp, Rattus norvegicus
  misc_feature 796: n = A,T,C or G
tcgatgcagagccatgccgccgtgtcccgtgtgggaagtgtgctgcaagaaggctgtgaaaaagtcagccagctctatggagacctacagcatctgaagacgtttgacaggggaatggtctggaacacagacctggtggagacgctggagctgcagaatctgatgctgtgcgcactgcagaccatatatggtgcggaagcacggaaggagtcacggggagctcatgccagggaagattacaaggtgcggattgatgagtatgattactccaagcccatcgagggccagcagaagaagccatttgcggaacactggaggaagcacaccctctcatatgtggacaccaagactgggaaggttactttggattacagacctgttattgacaagaccttgaatgaggctgactgtgctactgtacctcctgctatccgttcctactgaaaaacctgacagctacaggaccagcttatgtgattatacatcatagcttacctaggtttcctttcatactcgtcttgttaaaaatctgctctcatgaacaaggagtcacttcacagattatgatcaacagcttggcagtacttgatgtgagggactcgagttgcaccattgtctctcattcttgtgcagtgataaactggtataattcttaaatgatgtacaaacgaacaatcttttatttctaaataaaaccacatagtatttgagtttagtcctatctattggtctgaaatatcaaatacaattttcttcccctgtctagctgaagcagttgtggttttcaagtattgtnttgtatattctctgtgccatatactaaactagactttaaggaatgttaaaatgtaaatggaaaatagagaagtagggcaggtccttaataatttgaagcaaagtttggatatggtaagtatcaagccagtgccttgtttaggggagaggtatttgcatatgtctacgtatatttgatggagtatgtgctggctagctttgtcaacttgacacaatctagcatcacctaggaagagggtctcagtgcaggattgtgtcagttagcttggtccctgggcatgtcttagagggattggcttgattatgttaattgtgaagggaagaccgcccactgtgggcaccaccattctctacacaaaggaatctggaatgtataagaacaagctgagcactctccatgcatgcatttattcataagtataactagttgcttcaagttcctgccctgacttccttgaaatgaaggactttaaccagtaattgtaagtcaaataaaccctttctgaaacttg

SEQ ID NO: 273 - DNA, 351 bp, Rattus norvegicus
gacaacaggtggagcccatacgctgggcatagggagcctgggaagggctcaggagctcaggaccactccaggctctctagcaccaccgcttaaaatacaggaaaaaggttctttctgcccttcctggcgtacacagaacagattccaagtggttcaatttgtcccctacagctcatgtacctgcttgccttcctcagctgtccctgcctctcttggcatttgtacacccacagtgaggggcacctggacttgcacttccattctgcccacctgtttgtcacctaacctggccgtagactgagcatttatttaagaataaaatctcggtggtggtaaaaaaaaaaaaaaaaa

SEQ ID NO: 274 - DNA, 717 bp, Rattus norvegicus
  misc_feature 71, 82: n = A,T,C or G
aagtgagcctgaaggctgggctaattaacttcatggtagtattcggatttgaagcattttaattttccctnaaggacctttncttccttggcctttctggctaatctgtgcatagaaatttaagtttggggctggagaaatgactcattgattaaaagtatggtggctgctcttcccagcaaccacacgatggctcataaccatctgtaatgagatttggtgccctcttctggcatgcaggcagaatactataaatataagtaaatcttgaaagagaaagaaatttaagtttaaggggttggagaaaaggctcagtggttaaaagaattggctgttcttccagaagacccaggttgattcctagcagccacatggagccaaattgtctgtaactctagttccagggtctccaacatctacccttgaccatggctggcactgtgtgtatgtggtgcacaaacacacgaaggcagaacacctaaaaggggtatatgtgttatcatttaagtgtctcttaaatgaaaagccttcaaccaggatttcatcattagaaatagaattgatgtccaccctgtgtcatgggaactgagaggaagggcagtataaatctgagaggttcctttgtgtggtgggccccgaagaagaaagccccatggctgaacagctgttgtctcctcctaccccacagctttccctaataaagggattgttattttg

SEQ ID NO: 275 - DNA, 330 bp, Rattus norvegicus
  misc_feature 189: n = A,T,C or G
ccttttcttgccatggcttctgctgtattccggctgctgcagcagggccctcgccgcctcttggctccggccgcccctacgttggttcctccagttcggggagtgaagaagggattccgtgccgccttccgcttccagaaggagctggagcgatggcgcctgctacgcagcccgccaccgccggtgcgnacgctcagagaaggcaaactgggattaccatgcggagatacaagcctttgggtcccggttacaagaggccttttcgttggaccttctcaaaacagcatttgtcaatagctgctacatcaaaagtgaagaggcggaacgtca

SEQ ID NO: 276 - DNA, 379 bp, Rattus norvegicus
gagtgttgctgtcgtaggagctgaagtgtctcttgcaggacgccgcagagctgctgagctctcacgcctgtcacagttcacgctaacaccagccgctttcacggtctgcctccccagcaccttggagacccgttttgctaagagccatgatttatttaaaaatgtgaggaattgagtaaatggaatttcctaaacgcgagattggactcagtgttcctactacgtttgttcagcgtttggctgagtgtctaagtggttggctgtttttgcataatcaaaagttagccatattattggtcttccatgattgttttaatgctcattacagtgtctttttacaacatataaaaatgcttaaaaacacaaaaaaaaaaaaaaa

SEQ ID NO: 277 - DNA, 542 bp, Rattus norvegicus
aaagcaggctgacttcttggacaagcagatgagcagagatgagcacagagcccgagccatgaagatcccatttaccaatgacaaaatcatcaacctgcctgtagaagaattcaatgagctgctgtccaaataccagttgagcgaggcccagctgagcctcatcagggatatccggcgccggggcaaaaacatgatggctgcacagaactgctgcatgtgcaagttggacaccatcttgaacctagaacgtgatgtggaggacttgcagcgagataagtcccgattgctccgagaaaagcaggaaatttacaggaccgtgactgattaaaggcgacggagaactttaaagcaactggataaagatgtagtgcctcacagaacctgccagtggtattagacttgacaagtgacatcttggcactttaagctcctgtcagatttactgtgtacaacaccaacctgatagttgtgtgcagctaggtccttctgtcagtgataaaatacactcttcagcttacgtgtgtaccaggttggaccatcca

SEQ ID NO: 278 - DNA, 487 bp, Rattus norvegicus
gctgctacacctgtgcagactgcgggctgaacctgaagatgcggggtcacttctgggtgggaaacgagttgtactgtgagaagcacgcccgccagcgctactcaatgcctggaactctcagctctcaagcctgagccaaaaggtgtctgcactctcagactctgcagacatgaccatactgagcaagcagggaaggggtgataatagcagttgatagaactaaggctgggagtcccctttgtccttgctgggtgaggccaagggttgggactagtggcagattgctagtgctgagaaaattccactctctctggcctttctcctgcaggccaggttctatactacagtctgaagtggccgccatatttgacaagtttgcatatagggttgggcacaggtagaagtatctagaagggaaaggtgggcctgaggttaatatattcatggtatgaagtttctaacatatgaactatatatacatgtggct

SEQ ID NO: 279 - DNA, 680 bp, Rattus norvegicus
aaccaatttatagacacatagcatctttcctgtcagtcttcaaactagtattaataggcttaataattgttggcaaagatccttttgcttttttcggcatgcaagctcctagcatctggcagtggggccaagaaaataaggtttatgcatgtatgatggtcttcttcttgagcaacatgattgagaaccagtgtatgtcaacaggtgcatttgagataactttaaatgatgtaccggtatggtctaagctggaatctggacatcttccatccatgcaacaacttgttcaaattcttgacaatgaaatgaaactcaatgtgcatatggattcaatcccacatcatcgatcatagccctacctatcagcactgaaaactcttttacactaagggattttgcaagagcagcgtgactgacattatgaaggcctgtactgaagacagcaagctgttagtacagaccagatgtttcttggcaggctcgttgtacctcttggaaaacctcagtgcaagacagttttccatgctggcacgtgctgaactctgcacacacatgcagtgcagtgatactgtgtagcttccccgagcccactgttaatagtttcttcttgacatggcattactacttgtaattcttttcttggtcatgtttaagaaagtacagaattgagttgcaacttg

SEQ ID NO: 280 - DNA, 378 bp, Rattus norvegicus
gaccacacaggggatgcaggaccagctgggacctgctgtgccagtcctgggttgccttggcctgcatgcccagagagaaatgttttgcggtttagcacagggacctgtttgtcgccgggacatctgtgtgtaatataaacagacatgggactaggaacatactcgagtcaaaagcttaatcctcagtcagtttatacgcagtcgagccacatgaaattgccaagtttagcccgagttttgtcagctaagatgacggttttacatggttgaatctaacagtcatggaagtcctcagaagtcttaggcgtggtcttaagtatgaaggttttgtaatttggcctcctctttctcaaataataaagtatttggtttatgccc

SEQ ID NO: 281 - DNA, 1016 bp, Rattus norvegicus
  misc_feature 20, 23, 28, 36, 39, 41, 50, 51, 56, 58, 66, 78, 79, 157, 246: n = A,T,C or G
gatttcctccctcctccatnctnctctnccagccancananagaattgtnngatcncntcttcctnactgaagtcccnncctttgcggctacccccaatggagaataagctgttagctgaaaaggagcggacaaaagcgtcaacgttgaggcgagangagcggaagtagtcagatttcgcatagggccgtaaagcggatagtgttttcgccttccggattaacgacagcagctcagactgtcagtnccggccttccttgtgccggacccttcctaattcaatttccttcccattccgggcccttccctatcgtcgcccctttcaccttggatcatgttcaagaaatttgatgaaaaagaaaatgtgtccaactgcatccagttgaaaacctcggttattaagggtattaaaaatcaattgctagagcaatttccaggtattgaaccatggcttaatcaaatcatgcctaagaaagatcctgtgaaaattgtccgatgccatgaacacatagaaatccttacagtaaatggagagttactgttttttagacaaagagaagggcctttttatccaaccttaagattacttcataaatatccttttatcttgccacatcagcaggttgataaaggagccatcaaatttgtactcagtggagcaaatatcatgtgtcccggcttaacgtctcctggagctaagctttatcctgctgcagtagatactattgttgcaatcatggcagaaggaaaacaacatgctttatgtgtgggcgtcatgaagatgtctgcagaagatattgagaaagtcaacaaaggaattggcattgaaaatatccattatctaaatgatgggctgtggcatatgaagacatataaatgagcttccaaaggaatgtgcttgggctaactatagatactgtgctgtatctgtctctgtgtctgtatgacagcatgaagacaatgcctctatggttatgctgaataaaaattctgtgaatgctaaaaaacaacaaaaaa

SEQ ID NO: 282 - DNA, 360 bp, Rattus norvegicus
cggcacgaggggcttttagtagaggtgaacaggtttggagcccgagctgtttgctaagctgaagtcataggttgtgaagtaatttttaacttctggaatcatgttgcctactgttactctaaatagaaatataggaaggttttttttttttaaatgtgaatttttgcctatctttaaaactttggatgtcaactttcattaaccttaaatacactgaatggaatctacagaagtgagacatctcagaactttcctgatgctacggcttttgtttttccagtggccagaataccaaaatgcctgttgtatttatggattaaaaactgctgattgagctattgttaaaaaaaaaaaaaaaaa

SEQ ID NO: 283 - DNA, 524 bp, Rattus norvegicus
tcaaagtggaacagtgtttcgaactggacagaaagtaacgttagcataaaatacacttctgatttttctagatgtgtctgctctgatggtctgtccctaagttgtaactataagaacgatgtatagattttaatttaataaatctggttaatctataaaatcacagaatggtaagtgctgtgattgcacaatgctcaggactatctgagatcaatagtgcaggctaaatggggttatttgtaagagatggtgttttgtccctcagtctgtattaagtcctcaatggtcttatgtcagtggcagagctcatttgctctccttcagagggatgcatttcttggcactcacagacccagagtcactgtttttctagctcctggcagattgtatgccttgcaacttcttgactgttttggaaaaagatatattctattatcttctttttttttgtttttaatcagaacataacatttacacataattcaaataaatttaatcccttcaaccaaaaaaaaaaaaaaaaa

SEQ ID NO: 284 - DNA, 263 bp, Rattus norvegicus
  misc_feature 42, 71, 108, 131, 161, 191: n = A,T,C or G
gcccgaccttcaaggctccaccatgttctcgcgggcgagcgntgtcgggctgtcggcctgcgccgtgcagncgcaatggatccaagttcgaaacatggcaactctggnagatattaccaggagactgaagnccatcaaaaacatccagaaaattaccaagnctatgaagatggtggcagctgcaaagtatnccgggctgagcgggagctgaagcctgcccgagtgtatgggacaggttctttggctctgtatgagaaggctgg

SEQ ID NO: 285 - DNA, 162 bp, Rattus norvegicus
gggggcgggcaaaaaggggacccatagggggaatacccatttgaggaagggggaggggagggaacggcccccataaagacaggccccgccctgttcatgcttgcaagtgagagttacagaacccattcccccttgccctaataaaagtaactaaagccagtc

SEQ ID NO: 286 - DNA, 862 bp, Rattus norvegicus
agaagctgtacacttataggcagagttattttcctgtttacattctgtgttgtttgggggattggtaggtgtctgattactgtttacttcactgttgtgttgcagtaaaagacttaaaacaaccattgcatgtttgctttcggtgtatccctttgtgaaattagcacttttggggccaatgaagaaactttgctgcatttactccctttccctcccctttcctcagtagaaatgtgtttgatcagcaagttgtgagtcaaactgctgcctttaaaaacaccacaaaagctgattcagttcaaaatgaacgcacatctttcaaaactgggtttctgatacttgtggatgtttttctttattagatgagaatgtattgccattaaatccattagtattacattgctttcaaagaaaaggtgcgtggaactataatccagcatcttttactgcattcaaagatgggagcaaacttttgtatggttgggagatgtggctggaaagtactttggaaaatatacaatcaagctatttcgtcgcatattaaaagaaaaatctcaatcacagtgttggcttttatttggaatttgctcatcttgctttttctttggaaactccgtcattggcattgttatttgattgtaaagaggggcccagtatcagcttgttgaatttgtcgaatcttttactgaacataaatgttcaatagacgtgacgcttcccaccatctgatgatgatggctttgcagaccccctggacagtttcttgtcccgtgctcacccccgcttggtgatgactcttaagctttctcattgtgggctcataacccgttcatgaaaataaatgaaaccgtgattttccttc

SEQ ID NO: 287 - DNA, 460 bp, Rattus norvegicus
gaacacttcagctttgcaactaaaattattacagtttagtaatcaattaaaccaacccacaataagcagtacacatctgccacccaccacgttgttcgcattctccttaccaatattaatcccagcgtggtaactctgtgtgacgcccctcccctgataacattttgtaacattgtgctgccttagagtttgtactgtgagttctatcagtatttatgttgaaatttctaacatggattctagtctctattctgttaatttaattttaaatgctttatccatttgtgcaaaggtaaacacagattgtatcttttttaatggtacggcataaaaaaaaataaccctgaagtgaagtggctctatactgttttatagagtcctttaacgtgtatagatatcttgtaaacttgtattgtggatgtgtaaataatatgtactttgggtttttaacaccgcatgt

SEQ ID NO: 288 - DNA, 858 bp, Rattus norvegicus
  misc_feature 825: n = A,T,C or G
cacaccccgtatcgcgtgttggaatcccttcccacctttgcaagtttttaaccggtattcacctaggagcaatcatttgcccgtttacagattcccgggaacggggttggatcgaggggtgctcttttctttgactggaaggcccgcatgcggcgacaatggcaaccccttaaccccttgtgtgaacgtttcccggacggaatgacagtctggattccacagcggtaatgacccttcttggggagatgccctgtcattgatcactcagttttgttccatcggatttttgagctgaggatgaaccccccacttgatgagattggagactatactcatgtggagagagtgacgctcccattggatcacgggacgttgctaatcctggaaggagccacgcaagctgactggcagcaccgagtgcccaaggaataccagtccagagaacggagagtaaacctaacctttcggaccgtttatccagacccaagaggagcccccggtgatacttctgcagagctgccactgaggtgagggctgtgcacccagcagcccctccccatctcccagaagcacttccagaagctgctgcgtgtacctccgtgatgtggctgtttggaaattgtgtttgcttctcaggtcctattcctcctgaatgagagctaccaacacttcatgctgtccgcatgtctactatagggacagttacttgagacaactctctaaatcaagggttgtccttaggcaaattaaaaactgctctggctgtgcctacagaaaaaaaaaaaaaaaaaaaaaaaaagttgtgcggccgcaagcctattcctnctcgtgaggcttaattatcgcttgatgcccgcg

SEQ ID NO: 289 - DNA, 471 bp, Rattus norvegicus
tagaagtcgacacacacagcaaccacaccacaggccgtttgccagagaccttggctgattctccagcgcttttgcaccttgggagcccgcccaagtttgaagctgcctggccagagccccctgcctaccgaggatgtctgaggaagctgctgttcaacggggcccctgtcaacatgactgcttctgcacgcatccagggagcagtggggatgagcggatgcccctcaggaaccctagcaatttccaagcagggaaaggcactgacccagaggcaggccaaccccagtgtcttcccgctacgctggcattgaggttcccagacctagtgtttgcgtacactttttgtgattaacaagtcatttctggtttacactgcggaacagacatatttatactttgtccctcttgcccgacagctttcagtactgagatctgtaaaattgtgggtatggaattaaagtgacttgtttg

SEQ ID NO: 290 - DNA, 600 bp, Rattus norvegicus
gtagaccccatctctgatgaagactggcacctattcttttggagacatggtggaaatcttagaaggcaaggatgctgggaagcagggcaaagtagtccaagttgttcggcagcggaactgggttgtcctggagggattgaacacgcattaccgctacattggcagaaccaaggatcaccgagggaccatgatccctagcgaagcccccttgcttcatcaccaagtcaagctagtggatcctgtggacaggaaacctactgagatccagtggagatttactgaggcaggagagcgtgttcgtgtctctacaagatctgggagaattatccccaaacctgaatttcctagagcagatggcattgtccctgaaacatggactgatggccccaaggacacatcagtggaagatgctttagaaagaacttacgtgccccggctaaagacattagaagaagatgtgatggaggccatggggatccaggagactcgaagattcaagaaaatctattggtattgagccttaagagtactgcttcaccctgaagtccaccctttctttctaaaacaccaataaagaagccttgggtgctgctgctgtcc

SEQ ID NO: 291 - DNA, 187 bp, Rattus norvegicus
tgcaacagtgaacagtgaagatactcctaagacgttttcactgttggcctggatgtgggtaggtggtgtctctggaagtaatgacaggagccgtaacaaactctcaatctgtctgtctgagatgaagatgccttttgaaaacaaaattaaagatcttttagaagcaaatcaaaaaaaaaaaaaaaaa

SEQ ID NO: 292 - DNA, 532 bp, Rattus norvegicus
agatagcttgtattacttaatcatgtgtaatcatggttgtgagcaaaaacagtgtgttaacaagcagtcccaattttaaacaataacttagcttccagttttagcctcatacttgtaggtccaatacttgaaagatggaggcaagaagacttccgtgagtttgagtccagctggggctagagagaccctgtttcaaaagaaaagaatctggggtctggagaagtcaactctactcaggaaacccattcacagcatctgaaaactcatggcaatgtgtggccagaatagtaacaatgtaactgcattttaaaaagtataactaatgtgagaataaatatcccaacaggttttgattgtagagagcaaagtaacctggaagaggccaggaaattttgtgggatactagagatgttctgtggcatgacagaagtgtcaagagtgtgtgtcaaaaacttatcaaggcaaacataaaaatgtgtctttacaagtcatagacctcatttcaaaactaataaaatattgtcccagtgtg

SEQ ID NO: 293 - DNA, 503 bp, Rattus norvegicus
cccctgtcctttttcaggagcagtggcgtctctgtatctctcccttggagggagctgagtaactttccactgggtcacagctggaggaagggacatatagacaaaaagaagtccaggtgaggcagaaacatgccgtcagctcaccctcctttgtggacccttcccccaacaaggcctctctgcaggggactatagatagcactgacatttgtctaatcaataattagtttctcttaatttttttttactaacgacacttataagtctctagttctcacaaacatagaataaggcttgttgcataataagcagtttgctatttaggctaacaattttttgattcaggtttcttagttagatgaacaattcccgaaagtttcgatttccttttgtagtaattgctgtaaggataatgactatctattagtcaccctggtgcatgagatgtactgtacctttttttttatatctaaataaagacctcttgaaattcttccctttct

SEQ ID NO: 294 - DNA, 244 bp, Rattus norvegicus
cggcacgaggggagcacctgtacctgatgccgttctcggacaagacccaagccacaggaagagtaagacgtacaacccaagaaccagggagcctcctggactggactctgcagttttccatatttaaaccaattagtgccttctagaagaatggctttcctttttcctgcacaaaattcccaatatcccagcctctctcaatttaatagtagccttaaataaaggttgtccttctgatgtactg

SEQ ID NO: 295 - DNA, 414 bp, Rattus norvegicus
  misc_feature 159: n = A,T,C or G
ggttcccctttgcgtactgctggatggagttgagtccctcaagatatttcccccgttttcgactatggtaaacagccgggaatttgggagttaggagattggagggattgcagcaaaaggaaagtcttttgggatcgtttcacggccgaaggcagaccntaccaagcgcgcggggcttcctcgggtccccggtcctgttcttcaaattccatggtctagacgtccttccggaactgctgacagcaccgggccaaggagcaaagagggcattgttacataggccattaaaaatcagttcacccggaggagctctggttggggagttggaccatgttgaacctgtattatgtatcacaagcacatttaattggaagataaagataaatcgatctttatgaaaaaaaaaaaaaaaaa

SEQ ID NO: 296 - DNA, 407 bp, Rattus norvegicus
ggaaatctgggtggatgagccatgtgtggtaacgttttttttttaaccctttggccaccgttcccagggcaactgcatggcggcagcatcctgcgcccactgaggagcaggaaagccaggagtagctgtcagtttgtactcaggtacacatcagcttcatgtctcctaaaggtgcttagaggctcaggaacactgtctgtttcagtacaaaaagtcgctagacagtatggagaggatttctaacaacaggactttgctaactgtctgtggttgagcatagacatttttctacttactgttggagatactctgaaaatatattttttttcctgtgttggttaagtatagtaccttttgcaaaaattgcttggtgattaaaattattttagcaaaaaaaaaaaaaaaaa

SEQ ID NO: 297 - DNA, 421 bp, Rattus norvegicus
accagctggcccagaggaccttccacaccgttgatttgtacaagaaacaccaggaagccatgactccagctggtctggctttcttccagtgccgctgggatgactcggtcacccacaccttccaccagcttctagacatgcgggaacctgtgtttgaatttgtacggccacccccttaccaccccaagcagaagcgcttcccccaccagcagcccctacgctatctggaccgatacagggacagtcatgagcccacctatggaatctactgagtattcatcgcagagggtgagagggcacagctggaagctcacatctcaggagagaccatcggaagccaactgagactccctgcagcccccccccccccccagcagacccaggggcttcggttatatgtgaataaaatgcttttttcctg

SEQ ID NO: 298 - DNA, 591 bp, Rattus norvegicus
tgatgccaccgattcttgtatcatggacattgggtttgatcacttggtgggcctagagcatgttgaaagaataacactgtgcaggtgtcattatattgaagataactgtttgcagaggcttagtcaacttgaaaatttacgaaaaagcctattggagttggaaataatcgcctgtggaaatgtcacggacaacggcgtcattgctttgcgacactttaagaacctcaagtatttgttcttaagtgatcttcctggaataaaagataaagagtaccttgccgaagtctttactaaagcactgccttctctggaactaaaattaaacctgaagtaaaataagtgtctggtttcactattaaggatcccttgaaattgctgatactagatagctacaaatattacataatcagcagtagaactgtgaaaatgacttagaaatggagaatggatcaggaagagaataaataatcagaagtcactcactgaagtcacttagttgaaagtgagaaattatgtacactgaatcatttttaaactgtaacagcattttaatatatttctcatttatatataaatatatatgtaggtgtt

SEQ ID NO: 299 - DNA, 488 bp, Rattus norvegicus
aagtctagatgaatgctctatcattgaactacactccagcactggtgtgtatgcacacacaaacacacacacacacacacacacacacacacgtatatatgtatatacaactagataggtagatggggctaaagtaagatttagaaaactttggaatggaagctctacagttcaccagcttttctttagactaaaagatatcattgactggaaaaaatagacacataagggaagcctccaagtcagattagttactcaaaaaatagtccaggctgactgccttcaagttgagtggtcttgtgtagtgaaacactgcaggactcttgacagcattgccctcagagagggagctctgctaagatgtttgtatcctatttatttcaaagtatgaaagatatatttttaacttattgtttacctgtggcgtgatgcttctgttaagcgtttacactgtattgtatagctttatttagtaaagtggtcacata

SEQ ID NO: 300 - DNA, 542 bp, Rattus norvegicus
atcataccctagagcatccttttgtttctgtggctcccacagtgaaggacacctcatagcttgcatcctttacccctcaagagtccccttcagctgtttatgtcacctgtgctgcgacaatccctggcagcatcgagccagctagaaatctgcttcttaaatgtcgtcccgtgtcgccttacagattctgctcgatggcgctcacagaggttgtaatgttggtctacagaaggcgtttgtaccaaatcgtttcttaactctgctagagtgatcacggccctcaacacgctttgtatgctggggtgggggaatggaattatatatgtgaataggatatatttttcctaacagttcactctgggtcctacctgggatgttcgcatcacgacagggaaggactcacaaggtgcgcatcctgtctgcagcattccgacagctgccttaccaacccacaagctgcaggacttctgaatgaaggcagatggtgcgcaccacggccagtcccaggaagaacctaacttcgtgaccgataattcatcttt

SEQ ID NO: 301 - DNA, 604 bp, Rattus norvegicus
aaaaatctgctgtatcttggacgggactatccaaaaggagcagactattttaaaaggcgtttgaagaatgttttccttaaaaacaaggatgtgaaggacccagagaagatcaaagaactcattgcacgaggagaatttgtaatgaaggagctagaggccttatatttccttaggaaatacagagctatgaagcaacgttactattcagataccaaaaactgaccaatcactgccaccagcctagctgacaatcagtgccagctgtttgcctgtaccaattattatacaataattcagtttaaaagggcaagatacatgtttttttttaaagtttccctattgtactaatataggtttcaaccctattgatactgagagctttgcccataatcctttattattgaaatagtaacattagcacctttcaggagaatacaattttgaaagaaaatacatctaattttttaacatattatagccaagtattctatttcttcatttactgatgagattgtcattagcaaatggtgtctgataggcctgcctgccctttagtttgtggagtgtctttgtttttggttttgttactccatctagtatactg

SEQ ID NO: 302 - DNA, 121 bp, Rattus norvegicus
cggcacgagggaccccaagggtgtcacatgtagagaattgcttcctgaccaccacgtgttcacaaaatacgtgtgcccacacacaatagattgcctcaagtcctaaaaaaaaaaaaaaaaa

SEQ ID NO: 303 - DNA, 560 bp, Rattus norvegicus
tgtttatgctcgcgtacatgtgtgtatgtttaacagggatggcagtaatagttcccttaaatttgccaatttagagtaagctcttggattttcattgaattgagaacggtggccttcatggggagagactttttactgccaccaccaccccattcccaattgttctattccctacagagataaactttcattttccaattgtccctgtcttttacatttcagagggctcgccggtaggctatggagtgaatggtgaagttaatgggagctaaatgggttggttccgctggccgatgcttggccaacactatacacttttgtctccctacctgaagacaaacagcctgggctttcttttgtggagtgtagcattttgcatttttcctttgaagtcttgattttgttggcgaaatacttgacggtctgatcactttctcaggtctgctttacggtaagagttcctggagctttgtgaatccaaaaacgagttccagacattgtcatgaatagaataaattctgtttcctgcatgtgtgttttcaagtgtgtggacactgtta

SEQ ID NO: 304 - DNA, 556 bp, Rattus norvegicus
ggagtacagccagctaagcctatccgacaacttagtttttatggtgtttggttggatttgggggtagaggttaaactgatatgaaaatattgaaaccctaaaaatggaagtttgtgggtattcattaatttttctcaaggggaacggactttccatctaaggattctctctgctttgccacttgttttcgctctcctaatgctctcccaggttccagacgactcggtaaccattctcctcagatactcctctaggtcttaatcttggtaaagagtccctcactaagagtaacatcatgactgtgctgtgggcatgacttcatttctgtctgtctctctccctcctgcttaaagagagctatttaactgtgggggaaataaaaattattaacctaaatgattttcttaaaatttgtaaatgtcgattattcattagtgtttgacataggtttttttaaacacatatttatttcaaattgtcttttattacaaaagccttgatgttgtatgtccattcatgcaagctctgatcagataagcttcaataaattgtcagc

SEQ ID NO: 305 - DNA, 670 bp, Rattus norvegicus
  misc_feature 37: n = A,T,C or G
cccatcttctttgcaagtgtcacagcttgttcctttntgacgccttcaattatatcaacaggctcctttacaatggcttcaggattctcagcagcaacatcttcaatgttaaccccaccttgtgaacttcctatcagtacagggccttgaaatgacctctccattgttattgcaaagtagtattctctcctgggatattttcgctcacagaccaaaacttgattgcatattctgccctttgctccagtttgcttggtaatcaatttttgcccaatcatctgtgaggaaacagcttttgcttcttctggagagaaaacaatcttcactcctcctttgaggccacttgtaaacgttccttttcctctgccgccagctaaaacctgtgcctttatcacaacatcctttgaccctagctttttggcgattgcataagcttcatctgatgactttgcaacgaagcctttggggacagagacgcccgcttcttgcagtaattccatactcaagtattcatgcagtgagagactcctctgctgctgctgctgctgctgcatttggaatccatgcttgttaaacaatccagaacttcccagagcctgggccgtggctcgcactgtagtctgcgaccggtggctcctcagggcggccgcggccaactgccggccgaaag

SEQ ID NO: 306 - DNA, 335 bp, Rattus norvegicus
  misc_feature 241, 308, 323: n = A,T,C or G
cctggtcgggggttaggaggccctcgtgctcgtagatcaaacatgcactttactagcagttctactggtggactctcttcttctcagagttcatactctccaagcagtagggaagccatggttcctatagctgagctgttatctcagttatcaggagtgagacgttctgcaggaggacagcttaactcttcaggcccttccgcttctcagttgcaacaactgcagatgcagctgcagcttnagcggcagatgcgcaggcggcccggcaacaactggagactgctcgcaacgcaagttcggcgcactancacaagcagcgtcancactacggttca

SEQ ID NO: 307 - DNA, 587 bp, Rattus norvegicus
gtgtccatggagagaagctgaggtcccacgctccagcccgaggctgcgggcgctgcgacgtggacatgtcggcgtcgttggtccgcgccaccgtgcgggccgtgagcaagagaaaactgcaacccacgcgggcggcgctcacgctgaccccctctgctgtgaacaagataaaacaacttcttaaagacaagcctgagcatgtgggtctgaaagtgggtgtgcggaccaggggctgtaacggcctctcttacagcctggagtatacaaagacaaaaggagatgctgatgaagaagttattcaagacggagtccgagtgttcatcgagaagaaagcccagctaaccctgttaggcacagagatggactatgtggaagacaaactgtccagtgagtttgtgttcaacaaccccaacatcaagggaacctgtggctgcggtgaaagctttaacgtctgaaagctgaggactgcaaactccaggagagctgggtctgccttggagcacaccgaagaaatcatgtgatgtcccgtgtcggaagttagtgtgtggctgcctcgtggttgagaataaagtgaagcattgaaaatc

SEQ ID NO: 308 - DNA, 524 bp, Rattus norvegicus
cagtttcattaggtaaatgatggctcgatggctgcataggccaagtctgcacagaggaaaacactgctgctagcgtgcccgatgtggaatatcacctttaagcattgcttaaactttaaaagagtctcggcctgacactgtcgggaacagcggatggcggcatcgccacttgcagggtcaggttttagcaaagtataaactttccaggtaacacggtgttccttttgatcttcgcaagcacaagctttgggtttctacaacagacagacagtgtgaacagatcgatgcctggctcccattgcctgcttttatgagattccccagtgaatcttcctaagtgtggtttcatttacgtgccccacatagctggaatttcccatcctcattggcttgcagtttgttatcagctgaagcgctccggtgtcctctttctacgttgcctgtctatgacatggtgcttataaagatttaatgaaagcaagagtgaaataaagtttttataattgtaaaaaaaaaaaaaaaaa

SEQ ID NO: 309 - DNA, 357 bp, Rattus norvegicus
  misc_feature 73, 302, 352: n = A,T,C or G
ggggtggtgcttagccggcgccagaccgaccctcggcttcggagaggtagtgctgttcctctcggtgctcccnccggcttcggcttcctccgcttcctcagggaccgcggaccctggtatatgacctacctctgaccctgctaaagccatgtcgaccccggcccggagccgcctcatgagggacttcaagaggttacaagaggatcctccggctggagtgagtggagccccgtcggagaacaacataatggtttggaacgcggtcattttgggccccgaaggaccccatttgaggaggaacnttaaacttacaattgattcactgaagaatatccaataaaccacctatgtnagatt

SEQ ID NO: 310 - DNA, 446 bp, Rattus norvegicus
tagataaagttgtccaggagagggaagatgctttaaggctgcttcagaccggtcaagaaaagccaagacccggtgcttggagacaggacatctttggaagaatcgtctggcacaaattcaagcagtggcctataccttggtacctaaataagagatacaaccggaggcggttcttcgcaatgccttacgtggatagctttatcagactgagaattgagaaacatgcccgcactgaagcaagaaagagaagcttacagaaaaagaaagggaacattctccaggcaaagttcccacatctctctcaagaccggaaatcgagtactgtctaaaatgagatcccgaagtccagtttcgttgtcttaaagtctgtgtcctgatgtgaatatctgttaagcggtttataaagaaatgttcttgtaaaaacagaaaaaaaacacttgcggccg

SEQ ID NO: 311 - DNA, 406 bp, Rattus norvegicus
tgagacaggaacagtgttcttagcagagctagaagggctgctccgaggagccatgccaaaaagcagacctgcacactgctttcctcactctggaaggacaaagcatcaagactgtggcttggatccacagtttgtgcgttttgttgattcttatccttagggtctgggtgcctcaatgaagcttttcctgattaaagaggtcaagactggggaggcaagggcagtggacagaccttcccctttctggtttctgttctgcactagggtcatctcagggcggtactcctgaactcagatcatgatgaaataaatattggggaatctactgctacatgatgaattagggtgcacctttaactcctgtaaccatgaaataaatgtcaagggctaaaaaaaaaaaaaaaaa

SEQ ID NO: 312 - DNA, 606 bp, Rattus norvegicus
accaccagcttgtggacattattgagaaagtaaaacctgagattcggctgctgatcgagaaatgtaacacggtcaaaatgtgggttcagctcttgattcccaggatagaagatgggaacaacttcggggtgtcgattcaggaggaaacagttgcagagctaagaactgtcgagagtgaagctgcgtcttatctggaccagatttctagatattatattacaagagccaaattggtttctaaaatagctaaatacccccatgtggaggactatcgccgcactgtcacagagatcgatgagaaagagtacatcagcctccgcctcatcatctcagagctgaggaatcagtatgtcacgctccatgacatgatcctgaaaaacattgagaagatcaaacggccccgaagcagcaatgcagagacactgtactgaggccagggccagggccgggggactttgtgagtctggctcaagaccgacattgccttggtttgttatatgactatcgtgatggggaaactggctggaaatagtaatcacacctctctgtttttagttagagtctaatgaaactctcatctagttctgtgaaaaaaaaaaaaaaaaa

SEQ ID NO: 313 - DNA, 474 bp, Rattus norvegicus
  misc_feature 326: n = A,T,C or G
atcttgctttgctgtctgcagctttgaccgtaggaaagggcaactgctagagccatgaagctcctcagcagggccgggtccttctcgagattttattccctcaaagttgccccaaagcttaaaacttcagcccctggaggagtgcctctgcagcctcaggaacttgagtttaccaaattaccaaatggtttggtgattgcttctctggaaaactatgctccactatcaagaattggcttattcattaaagcaggcagtagatatgagaactacaactacttgggaacctctcatttactacgtcttgcatctactttgactaccanaggagcttcatctttcaagatcacccgtggaattgaagcagttggtggtaaattaagtgtgactgcaacaagggaaaacatggcatacactgtagaaggcattcgggatgatattgaaatcctgatggagttcctgctcaatgtcaca

SEQ ID NO: 314 - DNA, 270 bp, Rattus norvegicus
ctaaaagctggatatctaatgtctgtggagacgtcagagggcttcctgagtgaaattgggtcacaggctctagctgcaggttcttatatgccaccttctaccgtccttcaacagattgactccgtggctgatgctgatgttgtaaaggctgcaaaaaagtttgtttctggcaagaagtcaatggcagccgagtggaaacttgggacatacgccttttctcgacgagttataacacatgcgtgtatttaaagctcacccagaccacaagca

SEQ ID NO: 315 - DNA, 196 bp, Rattus norvegicus
tttggagtacctctgagagtagtctggaagcaaaatgttctcctctcaggatgatgtcatttgtgaagcagggaaacatggagaactagtgctatgcgtgagtcttgggaggttgacactgtaattgtcagcgggaggtcgtcgatgtagatcacgcttaagaaaggtgatccatggtagaaagatagatcacctt

SEQ ID NO: 316 - DNA, 567 bp, Rattus norvegicus
ggcacgaggacccgctgttcttccgaatccagctgctctgcccagtcggaggggacaagtgtagaaggtgtttcctccaaccagagtgctctccctcctcaggagggtgagcccagggcaggagtgagcccagtccacacacccccttcctgccgctatcgacacctgactggtgactcagggattgagctctgcccttgtcctgactccagcgaaggtgagctagtcaaggagctgagggctagtgccacccaaccagacctggaggaccattccccttgtgcactgcccccagagcctatgtcccaggtccctcccgtggggctggcttctagttatggggacatcccataagtagtttcaagaggaaaactgggtattacttggcaccaggattcagccctggttcaactgcagttctccatgtgggaccctctccaccctcctagaagatgcctgaaagggctgaagccctgaagaggggcaatactgaggactgtgctatctttactcactcccaaaacatacacaggagcctttaatctcattaaagagacatgacccagc

SEQ ID NO: 317 - DNA, 552 bp, Rattus norvegicus
  misc_feature 22: n = A,T,C or G
gcgagaagaggaggagcctgangcgcaacatggcgccgcccgtagtactgcgctcgttttcgcggctgctggcccccgccaggctgccgagctgctcttcaacacggtcaaagttctatgtccgggagccagtcaatgccaaacctaactgggtgaaagttgggctgaccttgggcacctcgattttcatgtggatttatctcatccaccaacacaacgaagatgttttggagtataaaagaagaaatggactggaataaactttggagatactagatactacagtctgcttcctgtgatgatctttgtcattcctctgatctatccagagttgtggatatgagaaaaaatttacatgtgaatatgtcctagtcaagtcaacgtgtatattttgcattgttaaagaaataaaaaaggggttggggatttagctcagtggtagagcgcttgcctagcaagcgcaaggccctgggtttggtccccagctccgaaaaaaaggaaaaaaaagaaaaaaaaagaaagaaataaaaatacttgtgctcttcaaaaaaa

SEQ ID NO: 318 - DNA, 516 bp, Rattus norvegicus
tggctgctactctatttggggaaataccatcttcaacagttcatgaagctttgcataacttccttaagactgaagaattgcaacctgggtattctgtgtccaactatatgtatgtggccaagtgttatgttgatcttggggaatctcgggaggcttggaaattctgtaacttggcattgttattgcctatcgtcaccaaagaggacaaggatgcacacaaggaagtgaagaaaataattggttctttgaagaggtaaataaagagcttattcttcagcaaattcaatacgtcttctagactttaacagattgtacttttataatgctttctccttaatgtaaagatcatgtattctcatttgatttgaaggtctagccttgccttctacagccactgcaccatgagacaaatcatgttctctgaagacagtgcttactctaatgttagcgtataatgatctctggatacttcgttttattcatgtcaataaactacagccttaagagtgtttgtgt

SEQ ID NO: 319 - DNA, 193 bp, Rattus norvegicus
ggagggcaagaacatcaaatggaggtgagtttggacttttgctcaggttgttgaggttaaaaatgccctggtcagcattcccccttgtggacccaagctgcatccaaccagaggacacctatggacatttttaatcctgctcacaaggagtgagtggcccccaaaaaaggttggcaaataaaactgttccgtg

SEQ ID NO: 320 - DNA, 425 bp, Rattus norvegicus
acagaacaagttgcagggcagcctgcgctacacagagaaccctgtctcagaaaaaaacaaaagaaaaaaatttaaaaaagacttctgagaggtgctcagggggtggggctgcaaactcacctcctcctggaaggcttcccctgcctcccctgccctgcctgggtcagcaaccccaacccctttcagtcatggctgatgtgtggcccaggtgggcgctgggcagccatgcagcagcatcttttttacagccatgtttagcttctgaggggaaatgagaagcatcaggagggagagcagatgtggcactgggctttccctgcaggcactgtgggatcagacaacagcttgcttttttctaaccataggccaggtcagcatttggaataaaatactgtcaaagagttgaataaaaaaaaaaaaaaaaa

SEQ ID NO: 321 - DNA, 643 bp, Rattus norvegicus
aaatgatgctgtgattccacttgagcaggtttctatactgatccagaagcttaaagaacactgcatagttaattaccaagttaagacattttctgggcaaactcatggctttgtgcatcggaagagagaagactgctcccctgcagacaaaccctacattgaggaagcgaggaggaatctcatcgaatggctgaacaagtatatttaacagcactcaagcacaaattttgaataattaaattgacccgaataattaaccatctcctaaaattctcctgaaacatacagtaggaactaaatgatcaatatctgtaagacttaaatgatagcataactaattattaggggaacctggggccattcagggaccagctagattctcagatatggccttaccttggtaatttgttaacatgtacaaacccaggaagatcttgagttgtctctatgtgtattcaatctcccctagtgaagttcaattctgcacttcagtgtaagcagtgttgacattcagttctcaccactctaactattcaacctaataaagtgatttttaaaacttgtgaatttgtagcttcacttttaaacaaacacttgtttctacatgccttaaatgtggaaatcagagtttaacttgtggcaa

SEQ ID NO: 322 - DNA, 541 bp, Rattus norvegicus
ctgggagcccaggccatatgtgcgatggacgatggcataaagtcactgccaagaagatcaaaaacccgccttgagctggtggtagatgggaaccaggtggatgcccagagcccaaatgcagcctccacatcagcagatacaaacgaccctgtttttgttggcggtttcccagatggcctcaatcagtttggcctgaccaccaacgttaggttccgaggctgcatccgatctctgaagctcaccaaagggacaggcaagccgctggaggttaattttgccaaggctctggaactgaggggtgttcaacctgtatcatgcccaactacctaataaagataagttcaatccggagaagaattcaccaagacaagtatatcaagttaaacagtatacactcccaccatattaataaaaactaatgtgcgcatatacacaaaattctctctgcattgtgtcagatggtgataattcagaccacagattgaattttaactcaagttctctttcaagcttatgattattaaaccaattatttcattct

SEQ ID NO: 323 - DNA, 546 bp, Rattus norvegicus
  misc_feature 52: n = A,T,C or G
taagcactatctgaagagtagcctgggctccggatacttgagatcagctttntcgtgcatttaccctgtcactcagtttcttctgccacacgtgaaaagaaatcagttgctaggtgacggagtgtctgctgttggagactccacgagatatactgggttgttcctgtgcttagtaactgattgctgttgggcccaggctacagggaagagggtgtcattgtcagtaaatgcagccaccttttactgtgctatagcagtgtggtagtttgtttcttcatctgtcccactgcccttctccacatattataaaagctaattttccccactctctgagcagttcagatgttccctaacttactaaatataagtacacctttaattcagtcttgttttcttgagttacttgaaattctttgcattatagaattattgactttatttttatcataatatttaaaatttgtagttattgccattaatattgtggagtctgcagaaatctcaactgtataaactaaacctttaaattaaaaaaaaaaaaaaaaa

SEQ ID NO: 324 - DNA, 358 bp, Rattus norvegicus
catgacagtagtgcttgccagtgcagtatgagcagagtactaagtcagagttgtctgaggtttgagcacggtggcagaaaccaggaaaaaagcaaatgatcaagaaattgccagaaaaaagtgatctaacaaaaagagtctgccctatgcctactcagagtttgaagaatcaacttccattgacaaggttctggaaccttctagcgtttggaatcatctgggggaaaacaaaacaaagctggtctgctgaaagcccagctcccactggaagccctgtgtcccagtgctgtttccttgagctcttccaacttgaagaaataaagccggctctgtagcccctcaaaaaaaaaaaaaaaaa

SEQ ID NO: 325 - DNA, 596 bp, Rattus norvegicus
  misc_feature 29, 31, 37, 56, 68, 70, 76: n = A,T,C or G
aagggatagattttaagtctagaaatttnanaggaanaatagttttgttgcttcangccgagccgcangnacgtcncatgctacagcagccagctttcctttaagagccaggagggccacaagtgtggttgaggggtgaactcctgcccctttttggatcaacttggcaatcccaatacctataggctaagttcaaggccagcctggctgtatgtgaggcccttatctcgaagcagttgcttgcattctaacccgcattggtgacctagctattggaaagtggtagctcctggagtgacctagctttcagataagttggtggagcgattagtctttagattagtgcgtggactcttggaggacggggagtaggtgctggtggagcacctcagtcagtgtggcattactctgcactgagccttactgagtcatatacaagaccagtaggtaaaatatttccactatttaaaaaaaaacaaccctcagtagggcatggtagcaatatctgttatctcagagagaggcaggaagatctctgagttcaaggccggccagccaaggctacctaaaccctgtctcaaaaaaaaaaaaaaaaa

SEQ ID NO: 326 - DNA, 557 bp, Rattus norvegicus
  misc_feature 25, 26, 70: n = A,T,C or G
ggataatttcaagagatgtatgtcnnatcgctgctgtgttttatgtcagataccgaactctgccaacacngcgaacactagctaagtacttcaatccttgctatgccactgctaggttaaaaccaacattcatcagcaaggtcaatacagcagtccagttaattttggtggcagcttctctggcagctccagttttcaattatgctgacagcatttatcttcagatactatggtgttgtacagcattcactacagctgcgtccgcatacagttattatcactatggtcggaaaactgttcaggtgataaagggcaaatgacaggcacccagatccagcagcaaggagcgactcgcgtcatcggcagcagcgccagcgaaagccacaggactttcccgatcttggtgttcagcttgtgaaaggtcttgtcagacaaaccatgtcttcaaaaccgaagaaatgtacgtccaaaataagctcgatcatgggcctatacagaatttccagtgtatttttaaatacaaataaaaatatagtgtcgaaaaaaaaaaaaaaaaa

SEQ ID NO: 327 - DNA, 662 bp, Rattus norvegicus
  misc_feature 341: n = A,T,C or G
tttttttttaaatatgcacatatatatgtatatatatatgtatatggagattcaggataaaagaacagtgcttctaactcataaactgtagtccctcagcgtagggaatcccacctccctaatcctgcctgtcagtatagcctccccaacctggagggcacagacacccagggttttatgaggcaaacgtttctgtttagcgtgaaaatgaccaacaacagtcatgttcaaagagaatttgaatattaaaacatatttcctataagacttcttcaaaatgtatgcaaggaagcctgaggcagtgggtgtcatgtgtaaacaggattttgaccattgttctntgcctgaagtacacaagcacagatccaagttcaggaggtgtccttaattcctcacatgcaagcccaagtgcagctgcttcacttttgctttccaaacacagattaacttaaataattgaatgtattttaaaaaaatataaaatcatctctgtagtatcaaatttaagcttctgccttttaatttggaccatgagtttagctgtttataattttcgcgtcctagatacacatgaaaggaatggttaagaggctgtctttaaacgtaagcataggcaaaaatagaggaaagatgaaaagaaaaagaaaaaaatcacaaaattt

SEQ ID NO: 328 - DNA, 443 bp, Rattus norvegicus
ctgatgttcagtagcgttaactcaaatttacagaggacaatcttgggcggaattgcttttgttgccataaaaggagcatttaaggtttacttcaaacagcagcaatatttacgtcaggcacaccgcaaaatccttaattatccagagcaagaagaagcataaaactgacttttggttgttttgaggcctctcatcctgacgagtctgttgtgttctgattccatcactaatgcgctagtggagactggtgataagctactgcttctatattctaagagatacaataaagcacgcagggcgggggaaagcctctcagtaatcacggaacctaaggacatgagtcagctctgtaatttgtatgtactacttttacggcagtcggctaaaccattattttagcatggtaaatctgggtttgttcatatttttccagaccagaatgt

SEQ ID NO: 329 - DNA, 423 bp, Rattus norvegicus
ttggataagacccacacagcatctgcatattacggaggaagctaccagggtctcctctatgcagtcacctcctgagggactggattagggcttcagtcttggagtttaggcttcctgtttgtgtacatccagagcagctcaggcctagagaagagggtgcctgtccacgtgggtcccagggcagagccattgcagggccaacgacagcctctggaccctctctccagtctgcagccgcactccaccacaggtacaggtgtgtacggcacccggtagcctttccactgtggaagcggacacacctactctttcttggtcaggcagcttcaaccaccttccccaaccacatcctaagtgggaaaaactactccggatggacactccaataaagttttatagtttgtataaaaaaaaaaaaaaaaa

SEQ ID NO: 330 - DNA, 407 bp, Rattus norvegicus
tcatataactgctgcagaggagaaactgcacagcatgatagtgaatctggatagcgtggtcaaaaaggtccaggctgctcagtcagaggctaaggtggtgtctcaatatcatgaacttgtggtccaagcaagggatgactttagaaaagagctggacagcatcactccagacatcactcctggatggaaagggatgagtatttctgacctaggtgagtaattatgtaaattttatgtttaatggcattcttttggatgttgaaatactgaactctttgtggtgtgtgtgagggtgtgtgtgtgtatgagggtgtgtgtgtgtgtgagggagagggagagggagggagagagagtgacaataaggtctttgttttacttgttatttcaaagagcttcaaacattagaa

SEQ ID NO: 331 - DNA, 737 bp, Rattus norvegicus
ttttttttttttccccatatgctaacccaaggaatcctctgtgcttttcctgggtaaggaagaggaagaattggtatctttgaaaggagtgtggcttcttcagtgggtctcactcttacaagataaggtgaaataattaattaatttgtgtcaaattaacgttgaaagtcttttctgcattgtaatgttatcagtcctgtgtatcagttgagtttgaaatgtgtatttagtttcctggtgacttagagctgaggtgcttctggttgtgacaacaggagccacaactatttgttttgcatttcagatgtgatccataaaagttgtggacaataactttgattgatcacacaaactctcggcatttgggttatctctcgtatcattgttttgttattgatgttttcactgaaatttcagctacacgtttgtgcacatgaatacttgtgtttaccaaagatctaaggcatttggttaattagcccaaataccacgagctatgtgtaaagtaatagagaaaagctttaagatctcaatagcatcaactgtgtaaattaaatcaaaataccttccctattatttatgaacccacaggagactttaaactctagtagatggatgctaaatgcctaggcccacttaacttattaatgtgtgaattacatttatgtttttagtttatatgcaaagaaatgtgattattttataataaatatttttattataataataaaaaaaaa

SEQ ID NO: 332 - DNA, 380 bp, Rattus norvegicus
tgccacgaggaatttgtccaaagggttggtgttttgggtgtcactggaaggatggcactgatcttcattccacaatggtcagttactgatgtggatttcttcctcattccggagacagcagccctaggaccaagaacaacgctgccttgggtacctttgtcataagtcatggctctggagcacagcccttgaagactgaatgaggaattggggggggggggcagagatcatgaccattgtgaggaacaacatataatttgcaaggtcaactctaagatgctgtgttgtatcctggagtttagaccatagcaaagtctcttaatttctgagccacagcttcctacttgggatgatgcctgccttacctacctcataagctt

SEQ ID NO: 333 - DNA, 514 bp, Rattus norvegicus
agattatatttggctaagtgttagaattcacaagaagtgcatttttctcagatgtgaaatgtttgcatcaattcaccatcgttttgatgtttgttttaagcaagtggtaagtttgaaaactgattgctgttgaaaactgattgttttgctgggcagtagtagtagcacaagcctttaaccccagcactccatagatgtctgagtttgaggccagcctgctctacaaaatgagttccacaacagccaggaaaatcctctctaaaaaccaaaagaaaaagaaaagaaaagaaaactgattgttttattttaattgtagcaatatgttagaaataacttttttcttaagtgttgataatatgaaaattttttgattaatcgtaaatactaacttagtggacagaattggtgtttttgaattatttgacatacatttctttgttttatgatgctttaaaaatccaacatgtgaaaatatttgtattttttaaataaagctgacagttaaaaggttctg

SEQ ID NO: 334 - DNA, 665 bp, Rattus norvegicus
aggcggcacgaggaagctctccgtgcagccgatgtggactgtttaactctcgggcagtatatgcagccgaccaagcgccaccttaaggttgaagagtacgttactcctgagaagttcaaatactgggaagaagtaggaaatgaacttggatttcactacactgcaagtggccctttggtgcgatcttcatataaagcaggtgaatttttcctgaaaaatctagtggctaaaagaaaaacaaaagtttctaaagtttagccaagaccttccagatcattggaatgttaagatttcacttccggttggtgtgagagcggtgccatcctgtcaggattcctgtgcatgcaaaccagcacctggtctgaaatgtctgatgtctggtccaggcataatggcatatacctgtaagtccacccaggccatcctgacttcctgcggaagacccgatctcaaaaaaaaggaaaagaaagagaaaggaagaaagaaaaccgtctgtaagctatacacacttagtgatgataattcatttgactttttaccaacctttgtcctcatccttgtcagtgatgtgatcatggaacatctttgaatggtttgctgtggccattgtaatttaaaagtgtattaacatttagaagattttataaatcccagtaacccatatg

SEQ ID NO: 335 - DNA, 391 bp, Rattus norvegicus
  misc_feature 16: n = A,T,C or G
gggtaaatgggccatncggttctcaatgcccggttcctccggtcatttgagctggccacggggagcatcttgcaccaggcccaccgggaccctgactgaactctctccttgtttttgtctcccgccccgccagaaggtgatgcttccgtcgggagctgccttccggtggtttcagtgatttcagtgacggccgggaacccaaagctgccctctccgtgcaatgtcacagcccgcgtggtctccggcaagggattcgggcgaagacaaacggatgcacccgtctttagaaccaaaaatattctctcacagatttcattcctgtttttatatatatatattttttgttgtcgttttaacatctccacgtccctagtataaaaaaaaaaaaaaa

SEQ ID NO: 336 - DNA, 395 bp, Rattus norvegicus
cgcgaggcagaaaatgacagacggacggaggcctgagaaggtgtgcgtaacgttcccgaaggcgtgtgctgctggtgcagacccaggaggcttctggaagaggttgcatgtgagcagaatcaggaaggatctgaggaatctgcaaattggaagggtgacagggcggagggaccggaagggaagttcagtgtactctcatttaagatgtcacctccctgccacttctctttttggccaatgtttttcaactttcccgacccattagaaatgtccccgaccagatgcaatcattcaaactgcctcactgtcaatggttaacaacttgggagattgaagggcttttgttattgttgttggatctttttgtttcccataaaagcacatcatttcaaccc

SEQ ID NO: 337 - DNA, 306 bp, Rattus norvegicus
gatagtggtgcggtgctggtgtccgatgccacagaaggaccctgcactatgcataaaccaggtgtgtttgactttgacaataaagccaagcacgatgcacggtaggaaactgccatggacctcaaatccagtttgagttcatctgaaacctcgagccagtgaaagggtggagctgatagaagagcccagtagtctaaggacatcctggtaacgtctgaagatggcatcacaacgatcacattcaatcggccctccaaaaagaacgccataagcttccagatgtttaacgatattatgctcgcactt

SEQ ID NO: 338 - DNA, 589 bp, Rattus norvegicus
ggcacgagggccaggtattggaagctggtgccccgcggccggggattctctcagaatgccgctgctaaggcgtccacctcgggcaccgaggtgagcgacctggaggtcgtggcgacgcctgtcgcgcggtacccgccgatcgtagcttccatgaccgccgacagcaaagcggcgcggcagcggcgggtgcagcgctggcaggcgaccgtgcacgcggctccgtcagtggacgagaagatacgaatcctcaccaaggtgcagttcaagaaatacttttcttttttctgctaccagttaaatactttggcactgactgtacaagctgatcaaaataacccacgtaaaaatatatgttgggggacacagagtaagcctctttatgagacagtagaagataatgaagtgaaaggctttgatgatgatgttctcctgcaaatagttcactttctactaaataaaccaaaagaagacagagcacagctgttgacaaaccaggagaaagaacttgatccaagaccttgatgatatttaaatttcgcctgaggaataataaagtcatttaaagattgtgtaaaaaaaaaaaaaaaaa

SEQ ID NO: 339 - DNA, 662 bp, Rattus norvegicus
tcctgataatatagcacttcaaagagagtcaagactcaattacaaaatacataaaccatatgccacggcagactcaaaagcagcaattaacttcaaatattagactcataccccttactattcatgtacagtactcttaaggtactatttaagaaccagtgttctcactgttcctaatgctgctaccctttaatacagtccctcatgttgtgaccccaaccataaaattacttttattgctacttcataactaattttttagctatgaattgtgatataaatattccaactgtcttagggagtccagttaaaggattgttaaatacttggggggggtcatgacccacaggttgagaaacagacttagctcttaggggtacctaccatacagagctatactgaattaatatgtaagtaaactacttagaaactgcctgacctatagtatgttattaccaaaggcttaaggaatcttatgctcaaatagatgtactttgaattctgtaatgttgggaggccatgatggcattggattgtctaccctaaccaagaatccataagaaacttcttgctgacttaacaggatcaaaaaggaatattctgtatatcataactaaaatacatgtcgaatacaatcctaaaaccaccaaaaaaaaaaaaaa

SEQ ID NO: 340 - DNA, 693 bp, Rattus norvegicus
ccgaaccagcccaggaggggatgggctcaactttggaatgaattaccagaatgaaaatagggcatagagaggaccgaaagcgaggcgtcaagacggttccccctttgtagggaataactcatcttctttaacgacaaacttaatcctaagggctatttctaagacagaagaatcagctttctttttatgttaaacgtttggggagcacgggatatgcacagcattaaataacacttgcttcaccttagaaagtacttaaggaatgatggacaaataatggacaggatgagaaccctggcaagtggtgttccagaaacgttccaccaaaaacctacataggcttggcattcccatgtacttaggaaattctgtgctatatatatatatatttttctaataagttgattctttaccaccccttaaagaattttcactctcagtaacaaacagcattagaggtactttattttgaagaatagactaatattttttatattttaacaatggacaattgtagatgattgtaatgatacgtcagaaggaaacagaaacgtagatgagaacacagatgacgcggggacagttaaattaataccgaaataatccaatacagcaccttcgatggcttttatacaaaagttcaatgtgcatttcactcaaaataataaatgctcatggctgctgaaacttctt

SEQ ID NO: 341 - DNA, 496 bp, Rattus norvegicus
tgctttactttcccatcttacaggacagagaacagttgatgttccctttccacttcctggaccggctagaaaagcacgatgttacctgcacagtctctgggggagggagatcagcgcaggcaggagccatacgcttggcaatggccaaagctttatgcagcttcatcactgaggacgaggttgagtggatgagacaagccggactacttactcctgatccacggatcagagaacggaagaagccaggccaggagggtgcccgaaggaagtttacctggaagaagcgctgaggcttcacgggagagcgaggagctccgtgtctttgtgcctggctcatggtagagcacagtcatattcattgaccaggggaggcggcatttacacattgtcttgagtttaagttatgacatgatttcgtttttagtgctattttgttatgattacgattgaaaataataaaaagaatattggtttcgttcaaaaaaaaaaaaaaaaa

SEQ ID NO: 342 - DNA, 415 bp, Rattus norvegicus
  misc_feature 37: n = A,T,C or G
actgctgggtcatttgacttgtgggggaaggcagggngaggaaaagaaccaccgaggtttggagagtctgcttttggggacgtggagagaacctgccgcagtgcctgaagcaaaggattgcagcgtggctagctgtgcagagcgccttcggtgttagggaagcggagccccgtagggaccacgggactgtggtgtggacctttgaatagcttggaggtggcaaataagagttggaattgtcatatccatgtctttggcggataacagaaacacttgtgtaaaattttactgcagttcttacaatagtattttacaataatgctagttgaatatgaataagcctctgaataattcaggttaaatggacactggatattgttcaccttgtattcttcaaaataaacactttacacgg

SEQ ID NO: 343 - DNA, 566 bp, Rattus norvegicus
cagtatgcacaagctccagagtggaattggccggctgattctgaaggaagaaatgaaggcacgatcaagctcctatgcggatccttggacccctccgcggagctcaaccagcagtcgggaggccctgcacaccactggctatgagatgtccttcaatggctccccccgttcacactacctggctgacagtgaccctctcatctccaagtctgcctcactgcctgcctacaggagaaatgggctgcacaggacacccagtgccgacctcttccactacgacagcatgaacgcagtcaactggggcatgcgagagtacaagatctacccatatgagctgctgctggtgaccacaagaggaaggaaccggctgccaaaggatgtggaccgaactcgcttagagcgccacctgtcccaggaggagttctaccaagtcttcggcatgaccatctcagagttcgagaggctagccctctggaagaggaatgaactgaagaagcaagcccggctgttctaggcggaggctgtatacatatagatgcgtttatataaagatgtatgtaaatctc

SEQ ID NO: 344 - DNA, 658 bp, Rattus norvegicus
taatatcgaatatgaaaattgccaaatccccttcgatgagagttagttcaagaccacagcaccagattcagtttgacgaagaagtggacagttcgcttagccaggagaagccagctgatttcagaaggaggaaatgtttgttcaaggggaaaagactttcgatttttgatgttaaggcgtttgacgacgaagcacctgaaccagaagcagcaccttctctctgggagatagaatttgctaagcaattagccacagtaagcgaacagccgtttgggaatgggtttgaggagatgatacagtggacaaaggaggggaaactgtgggagttcccagttaacaatgaagcaggtcttgacgatgatggctcagagttccatgagcatatatttttggagaagcacctggaggatttccccaagcaaggaccaattcgcctgttcatggagctggtgacctgtggcctctcgaaaaacccatatctgagcgttagacagaaggtcgagcatatagagtggttcagaaattattttaatgaaaaaagagatattctcaaagaaaataacattcacttaacatcatgaggaaaaatttttatttaaactgttgaaaatgtatattatagctaagtaaaaattttatctaaaaaaaaaaaaaaaaa

SEQ ID NO: 345 - DNA, 270 bp, Rattus norvegicus
  misc_feature 19, 34, 65, 76: n = A,T,C or G
ggccaagccactgtggctncccgcatacctgctngctggatgggcttggactgtggtcctgaaancagcaagaagnatgctgaggctgtcactcgggctaagcagattgtgtggaatggtcctgtgggggtatttgaatgggaagcttttgcccggggaaccaaagctctcatggatgaggtggtgaaagccacttctaggggctgcatcaccatcataggtggtggagacactgccacttgctgtgccaaatggaacacggaggataaa

SEQ ID NO: 346 - DNA, 411 bp, Rattus norvegicus
gtcctacgcccgggaggcgtgctcgccgtgctcagagtcctgtggcgcggagaggtgctccagcctcagcccaagaacaaggctgttgaatgtgtgcggaacctaaacgagcgcatcctgcgggacgccagggtctacattagcctcctgcccctggatgacgggctctccttggcctttaagatctagggtaacatcatgcttagggcttgggtgtgagaagctaagaaacccagccagtgacccgacgtttaaacctgaaagtaaaggtactggaacacgcgaccttctgagcatccatttccgacgttcatttaggcagtttttccagtaaagtggtctccctggcaccaaggctcgtggccctatctgaccggatagtttaataaatttcccctgctgtacgcattg

SEQ ID NO: 347 - DNA, 415 bp, Rattus norvegicus
ttcggcacgaggttcagatcaagatggaggaaaagaccctccttggtaaagcaaagaatgaagacaatttagcagtacttaacagttcctaacactggaaacgtcagcataaagaacttgctttgggagaaaaataacagaaaagtaaccaagtattacagcttccactgctgaactactgtagaatgcattagtgttagcaaggtgattgtaatggtatttcttgagaagcctacactgcttggtttctaagtttcagaacactttaggccatattctattgcttgtgcagcctactgttcttggtctaaagttttttcactttacatggatcatctcaaatatctcagaaactggagcatccctgaagacctacagtttatcatctaccttaaaataaatacattacaacctg

SEQ ID NO: 348 - DNA, 820 bp, Rattus norvegicus
gcggtttgaatatcacccagtttgtgcaaatttgcagaccaaaatccttcagtgtttccgtcagaacaccctgcggaccctcagttgctttgctttggccaaccaatacatgcattgtgtcaaccatgccaaacggaacatgttggagaagggagggtaaagttaccctgagaacatgcgaagctccttcaacgttaattccagaggtggaacattttttttttggtagtctgaaaatgacccaattaaagggaagaccactaaaaacagacaggcactggaatgtggactcaactgaatcataacgtgttttgatcaacagtttaaaaagccacggtttagatcagtcatcagagaacactgttaagtgttaatgaaactacaaaatgaataaaagagaaagaggtccaccccacctttttgttctctgtttccaacttctactgacataaagtgttctcttcactccaggctccagcatttagtgacttcaccctgagaaagctgggaggagggacattaaattatttcaaaatagagacagcaagaaagcactgggctagggcagcagtatcgggtggcctgggctgtgaggctgggtgtgagcctcttgctatgtaggagctaattccttgtaacttatgatgatcttccaagacagacagacaggagagaaaatgtacctctttactggaataatgtttatgattgcaggtaaaataaggtatttttgtcaatataaaggcaaccttggcttattcaaccaagtagtgaatactgacaacttcactcactatcaataataaatctattttctgac

SEQ ID NO: 349 - DNA, 752 bp, Rattus norvegicus
acacctcagtgatcatccgtcgagggtactctccactgaaagtggagacaagaacatcctttgcttctgaccaaatgagagcatggacccaaggacccttctgggcccacagagctcctgcccacaccccaaaaccaagggtgctcctgtctgcagagtgctgtctgctttcctccctgaggatgatttctagaaacttccaagtcagatctgcccctttaatttactcttggctttcaaggcaaattgatattcacatccaaagctggttgggacggcagcaccaagacctactgcttgggcaggttaggctgagctggaacccaggatgtgaaatagaatttattgtggctctgattatgtacactagatgtgcctgacctgctgaccaggctgacatggtttgtacaataaatacatcctccgggcctgctttccagtggttggaaatgcccaggggtctgggggtagggttgtcagtccagcttccgggctcccagcttcatgggccccttggtggcctttttctccgcccgcttggcttccatttctcttctcctttcctctcgcttttttcgggctagctctgccttcacctgcctgctttcagcctccaagccttcccagttgtcctcaccccaggagtctgggtctggcctgggctgggtgctgggacgaacagacagggcagcaaaggggtcacccttgtcactgggctctgcaccaccccagttatactcgctggctagccg

SEQ ID NO: 350 - DNA, 467 bp, Rattus norvegicus
tgaaaacagcatcatcctcaatggcactgtgatggtcagcccaacgcgtctgcccagctcctccggcggagaccgttcaggcagtggtgactgggtgcggtacaagctctgcatgtgtgcagacggcacactcttcaaagtacaagtaacaagccacaacatgggctgccaggtctctgacaacccttgtggaaacacgcattagaaggagcatccgcagggctcagcatgttcagatctaactcgaccctccccttttgaagaatgcatgtgagccatgtttctacagtttgcgtaacttgtaattattttaactgggaaacaccactgtatctattatgtgctctccatatttaaggggttttgagtgcctaaattctaatacaatttagtaagttgcactgatattcaaaggacagttctctaaaataattatgagaaattaataaaatcaaaattaatctttg

SEQ ID NO: 351 - DNA, 514 bp, Rattus norvegicus
ctcagagttgtgagttgggaggtggcctccctgacacgtgtgactgacagcctgcggtgtgctcaagtagggttaccactacttaacccatgatgaatcttagtctctttcacagcgcgactatacccttgacgtttcagggagtgagtggggtcttaagatctggctttgaaaagatgttttgaaaataaaacataatgaaaaattataaaatgaaccccttttggttcatttcagaaaagtttaactctgttattactctctagcttcagcagtaatttttgttttaattgctatagggtttctggcttgtcacatgcttgtatttcagttgtgcagattgttggggaactattctctactgtcagaacacactgccagtcagagctgtaaaaggcagaatatgctttcttggaaggagaagacaaaatatttgtaaattttcataatttttaataataccatttgtataatttttttaataaatacctactttgaaaaaaaaaaaaaaaaa

SEQ ID NO: 352 - DNA, 676 bp, Rattus norvegicus
aatgggtggcatcacttgccgaagtcttaaaaggttgcagggacttggtcaatctgttcaacctcatccccaaggagtcttggggaacttgagcagggggacagctgtcctttccaaagtacaggtgactcctgtagagccaatcaggtggcccaagaaaccatcagtccagagatgggactgaccgctgacccgtcccagggtttctctgaaaaggcaggcacctgtagtctacacttggcaatacttcagcaaaccacatactgtactggcagggccagggccagggccagggcactgcgctgccacagggggcagtggccccgcctccaggtcagttctcacacacacaggtgttggtaccaggactgaaaccttcagattctattgggcatattttcttgttaggaatgaaggacaattctcccatttttgagccattcttttgtcaattctacaaaattgcatgtaactttataaatatttttaaaagatatagttttgtaaatatttaatattctgctaatttgattttgaattgtaaatgtcaagtattgtttttggggtttttatgttttattatactttgttaaaaggaaaaattgtacatttttagactgtttttatgagtaaatttaatgtacggaaaataaaaatttaaaaaaaaaaaaaaaaa

SEQ ID NO: 353 - DNA, 625 bp, Rattus norvegicus
  misc_feature 11, 15, 17: n = A,T,C or G
ggttggcgtanatgngncgtctcgtgtcctttgcgcctgtgtccgccgcctgcctgcggcctttgcgccgctgccccggcttcccacgttggctttggcccggccgctcagcaccattctctgccctgagggaatctggagaagaaccgggactctgcagcccaccttggcgctcgcgcaggtgcctggaacggtcacacatttgtgccgccagtacagtgatgcacccccactgacgttagaaggaatcagggaccgagttctgtatgtcttgaaactctatgataagattgacccagaaaagctctcagtaaattctcattttatgaaggacctgggcttagacagtttggaccaagtggaaattattatggccatggaagacgaatttgggtttgaaattcctgatatagatgcagagaagttaatgtgtccacaagaaattgtagattacattgcagataagaaggatgtgtatgactaaagtatcagagccttcttcctcactgtgaggactccagaggacacatgatggcatcgtggccaactgacagcggttctgttcgacttgtatttaaattgtctgagtgttttgccctttaaaaataaatctattacaaaacta

SEQ ID NO: 354 - DNA, 529 bp, Rattus norvegicus
ctgtaaaatagcatagagctgttttgttggtttaagaataatatacttggtagtaatgcagaattattttcttgtatgtcaagtttagttttctgttgcttgcaatggacatgcaggtgtttctcttcttttcatcttcacataatgtcttagcatctcacttcctgaaaagaaaggaggaaacaccagtgggcagcaccatgcttgttgaagcacttgtttaatgaacagaaaatcatggcaatcgggggtccattcgtttgttgcctttatgttgtttttaaaagacaaaccatgatgcctttgtacttgctgtttgcacccctgactcaattctgtactgtgtctgaatgccatacgtttgcacttgtaccatacataggcgatgcagactgtatttttatatgtgtgtgcatttatcattggatcttttgtacatagtggcagtattgtagctgatcgggaaatgtttgatatcagcaattttgcatttttgtgtctcaaataaaaaacattttgatgtaccatg

SEQ ID NO: 355 - DNA, 556 bp, Rattus norvegicus
aaagcaagcagctagacacgcaaagcaacctgactgaaggcttgggaggtcatcgtttctaggagctggattacgcctcacggtacctcctatgctcctgtgaaacctacagtgagtctggccttgcgctctttgctcgcgctcgggcttgaataccacagagaaggaaggaagcacagaagtctgtagtacacggctgctctaggggacgcctgtgagtgagccccacattacctggagggagtcttcccccaccccaacgtcttcatgatgcttgtagtcacgtaggataagatacgttcattcagtgctgagtcagatgtagggagtcagctctgtggtcttccctgctgaccacagatgggtggtcagaggagatttgggaaactcaaccactggagcacaaaactacagggcagtttcctgcccgctgtcatgggagacgcggacgggcactttgtttcttcttgggatgaaatggatttatgggagcagtttaaacaaagcataggccaaaataaaactaaatgctgtttaatagaaaaaaaaaaaaaaa

SEQ ID NO: 356 - DNA, 425 bp, Rattus norvegicus
  misc_feature 55: n = A,T,C or G
ttattctcaagtgagctgttctgtgggctcagagcatctttctagctacccctcntgccctccatgcgccttgtatgagagtcacacagactctctcttcccaagtacactcagtacctaccttccattctgtctccctgcccttccagagtgttcttccttactctttacacgtgtgtgggaccctctgagggtcccagacaaatgcatgcttctgcccgagacttccctgagcccatctgccaagcggctttccaactcctctctctcggacttaatttatgaccagatcttaattaaaaatatctacgtgtttaaaaaaaagttagtgtttcttctaggctagcttattggctagatgttgagagacagagataagtgaaaacgcatgggtctatggccatcatgaattatttttaaatctc

SEQ ID NO: 357 - DNA, 751 bp, Rattus norvegicus
caaaaggaattttctccaagtatctgttcagttaattccctacctgcaggagctcctatttccccttccataactgcacacaacgggccgtttggagacttccgttaagcacaattgccaaccctggtaactggtcggaaaattcaaaagagtttgctctgcccagcatggaccggggagtcaggaatgtaccaccgtgttctgtggaacccatcccatctcctctctgaagcaaaaggaaactttcaggcactgacctagcttacgtggctattataaaactcccctgttaatgaaagcagagggcagttctaaatggaagcagctaccaggcttctgcagtctcccccatctctaaagttccattctacttactcattgcacacgcagctcttgctaaggatcagatgcagttacccagtagcccgttctgcctataccaccaagctcaatccctgcagaaggatttagtttgattaatttatactcttgggtgacatttctccttggagggagaaggaggaaggaaaaaagacagcttcctctaacatcgtgaagagaggcaaggggtgtgtttaagccatttaccacattacccaggggaatgtttgttctaagcttgggttttacatagtcctgtaacagctttatgggcatggtacttggagcatggtccagtgtgaacattctcttaagtctggtgggcctggtctctgccaaacatgaaacaccagaacatgggtttcacatg

SEQ ID NO: 358 - DNA, 266 bp, Rattus norvegicus
  misc_feature 107, 108, 208: n = A,T,C or G
gcccatggagctattctgctggtctgggggctggggattgccgtcggtggacctggatagtctggccgtgctgacctataccagatttacatgtgctccactgaagnnacacaagatcagcaatccttggcagagcccttcagggactctgcctgctcttcgaaccagtagtggaaaagtcatcacagaaccacacaagatcatcacncaccttcgtaaagagaagtataatgctgactacgatctgtcagctcgacaaggagcag

SEQ ID NO: 359 - DNA, 1270 bp, Rattus norvegicus
aagctctttcttaaactggttaagcaataagagtttaataaagtgtttcagctggggatttatcgtaggtgtgtttaattatataaatgttctttatagaccccatggcagtactgaggttgcaaaacagagctgttctgatgaaggtaaggtctggcattgttatagagttttcttcaacataaaagacttctgtggtactgtttatttaagacttcccagctaatgagttatttagtgttttctcgagtacaacacccagggacttgaaccctggtacctttgtgatccgaacttcaactcccacctactggatagtgtgtcacactttgttttttttttgcagtagacagcctcgaaagacgggtttgtttgcatggaaagcattcacatgtatccattctgaacagcagtcttgatatttattaggtcctacacataagaccaaacccagttaaaaccgtttctgaatctcagtttatttgctccatacctctcgctggaaatttcagtttttttctttgcatttttatgtaattctgccattggtgtgtgttagaatcatttgctccttttttggttaatggaaccttaaaaatatggctgtaaataaaaatgtgccctgtagttttgtttgttgcttgaatagtttctgcggattgtgtctgctttttccttaaggaattttttgtgtagattatactcttacaagtaggataaattatgaagtttttgagttgtttgggtttgtaataacatttcaacgtagatcttatttgccgacgctactttcgaaccgcaggacatgcactcgctatagtgatatgtacgtttttttctgatgctataatatatgatattgtcaagatatgcttaataatttccataagactgagttttatttacaaaacataagaccagataatttgtaaaccagtgttactaagatgtatcagtaattaaaatacaacctaggagctttggtttggtgtctggttgtgctttgtttgaagggatagaaagtgtcttttcggtactttcattaaacttttgaaatgtttgtatacttcgtgtgtgagccattttgaagtttatgcaagttctaagcaataacctgcatgttctacctggacagcacccttcgtcagtctccttcagtattcagagtgacacaaatgactattgtgtaactcccctctcccagtggacaccttgggagtctccctgttaaaacactactgtaatgtggtgcaaaactttgtattttgtg

SEQ ID NO: 360 - DNA, 507 bp, Rattus norvegicus
  misc_feature 75, 108: n = A,T,C or G
acccatctcttgcttctgtgacagggatacccctcctggaaattgatgcagtcttgttgctgtcctccagaaggngaggtgcaagggcaaagatgttcctcccgttcnagtgatgagcagtcgtgagcggggtggtggggtcagggtagaggtctccaaccagtgagctttgctcagcctgctcggagttcctaaagtctgctcaggactggacaggttctgggcattataacaatttagttcggggctggagagatggctcagcggttaagagcactgactgctctcccagaggtcctgactgcaattcccagcaaccacatagtggctcacaaccatctgtaatgaggtctgatgccctcttctggtgtgtctgaagacagctacagtgtactcatataaataaaataaataaatctttaaaaaattttaattcatccctttgactaccctctcctatgggcacctctgagtgaagaaataaagtttcatagtttcatagatatg

SEQ ID NO: 361 - DNA, 853 bp, Rattus norvegicus
cctccagagaggggctgcgctacgccgaatacctgcctccttctgcccaaaggccggacgccgacatcgaccacacagcgggaagaaggctgctggctgtaggactaggtgtcgcagctgttgcatttgcaggtcgctatgcatttcaaatctggaaacctctagaacaagtactcactgcaacagcaaggaagatttcctctccaagcttttcatcctactataaaggaggattcgagcagaaaatgagtaggcgagaagccagtctcattttaggagtaagcccatctgctggcaaggccaagattagaacagcacacaagagaattatgattttaaaccatcccgacaaaggtggatctccttacttagcatccaaaataaatgaagcaaaagatttgctcgaagcatccagcaaagctaactgatgctgaaggactgtgccaggggaaatgaaacgcaagactttaaaggtccttcagaagaatgtgggacgtggtcttgtctgaccaagtctgttctctgtcactaagcgtgcagcaataaaagccttgcagccttcctctggaagtttcctctgaaagggacttcacaccttctgtacccagtgcttttccacatcatttcatatgtaaggtgttccctgtgaagactgtggtgatgttagtctatccctctttttgcccttaacacacacacagaaaagtctgagcgtcatgacggcagtgggatttctcctgggcagagttaaagtgtcctctcaatgcttccacactgtctcttgctttacaagaatttgggactctgccaatgccaaggcctttaaatgttttgagattaaacagtgactact

SEQ ID NO: 362 - DNA, 578 bp, Rattus norvegicus
cggcagtgctggctcggccctatcgttctactcaagcgtactgtggcggtgggctcgcgctgggatgagcccgcggtgccgagccgcgaagtggagtcatggccagtacagtggtagcagtcggattgaccattgctgctgcaggatttgcaggccgttatgttttacaagccatgaagcatgtggagcctcaagtaaaacaagtttttcagagtctaccaaaatctgccttcagtggtgggtactatagaggtgggtttgaacccaaaatgacaaaacgggaagcagcattaatactaggtgtaagccctactgccaataaagggaagatcagggatgctcatcgacggattatgctcttaaaccacccagacaagggaggatctccttatatagcagccaaaatcaatgaagctaaagacttactagaaggacaagctaaaaaataaagtaatctgatgaattttaagtccattagtctacttatgagcatgtttttaaataaaatgcctcagagctgtaactcatgatgtaactcatgaaaatttcttggcaaaagctaaaaaaaaaaaaaaaaa

SEQ ID NO: 363 - DNA, 977 bp, Rattus norvegicus
gttactgtaaatatcatttacacctgttgagaattaacagcaaattggggctactttattgttgccaattattagtcagctgacttaccatagcaaaatacctgagacaatcaacttaaaaagaggaagggctggagaaagggttaatcttggtttgcagtttggaggcttcaacccttggtcagacctgttgttttataaggcagcacatcacttggggagttcatggtagagctgcaagcaaggaaagaagggtggtgacttgaggtcctgaggtctcttaagggtcacctccctgtccccgctgacctaagacttcacactggtccccacctttaaaggtgtctgcctgcaatagtgccatcctgagacctagcttctaactcgcaggtgcttagggacattgtactctgtggtatgcgcctctctgcccgtgtgtggcttgttcgtgattgacagtcactctggcctgctgtgttagtgtcccacagcgggggactctgccgggccacttcaggctttccttttaggaagataatttggtcacttgtgtctgtggccactcttagaactttctcttttgggggaacctgtggctggttgacttctggattcgatggagagagatgatattaaagactgtggcaacaaacaccctgcagaagcactggaaccagagactgtcagcacagtagggacaatgtcttttctagtagctgtggcagatttgagttcctgtaatttatacaaattgtttagaatggtttttaagacttagaagggaaatatacttacagcacaagacttttataattatactttaaattatgctttatgtgggacaggaaaaatgtatttttacattgcttatatcagatcacttttgtatttgttgatttaaagcctgtgggtctttttttatcactcttaatatcaacttttataatcttttaaaataaatcctcttaattccagtg

SEQ ID NO: 364 - DNA, 271 bp, Rattus norvegicus
ccaaaaaccaaaaaaaaaatttgatgctataaaatggtaaaaatgttttggtttgtttctactgacctgaatgtgttggatcttcacgtgttgttttgttttggctttattgatgcacggatgcttttgaacagtagagcgaaatgctagacatggagaacttgctctgtttgtcctttatacatttctgtagttaacagaacactgtaatgtgccttggagcttagtaacttgtaataaattcaattgatattaaaaaaaaaaaaaaaaa

SEQ ID NO: 365 - DNA, 503 bp, Rattus norvegicus
ggggaatctcgatttgtatgggtttatatctgaatttttttaggaagagctttatggcagaaaaattggcagtggggaaataccctggcactgatgaactgtgagccttctcacagtttgacttagagctgaaaaaaagtcctatggaggattcacataatccaccttcttagattgtccctctgccctatactgtgacttacttaaatgtcaaattgaaaatacggtctcaaggtagaacaggaagcgtgagaatccaaagggctttagtcatataggaacctagttcatgaacattattcttatcaccagacagccacaggaagaagttaacttacttcgtatatcaggatacaaaacattcacagatgtgcctaaagaaataacgacttaggccagtttaaaactaacaacagattcaggtagaggtgcatgcctgaatgttagtcataaattccattaactgcattcttttggtcacggaaataaaagctcgccagatc

SEQ ID NO: 366 - DNA, 155 bp, Rattus norvegicus
aatgatccgaagatcatgaagaagagagatccatgtggagcagaaaccagtttccaccccagcccaacttttatcattcaagcagtggagaggtttcagcagagatgcattggatgatggatgacagtgtggtttcttaaaaaaaaaaaaaaaaa

SEQ ID NO: 367 - DNA, 377 bp, Rattus norvegicus
cggcccgaggtccggacgcaatgcccgggggtttttccactgtgtcccgaagtgcttggaagaccttttcgatgctcttgaaggcaaagccctcaaaacttagcttcctagtcgctgaaaagcccccctttttcctcatgaacctggatgttcatgtagcttgaaggttccatcttgtgcccaacaaaacttatcccaaggtgcttccacagcccgttctgccggctgagcttgaagggcccaactgaaggttgtgggaggtcgcagctttaaagccctctttgttccggggattgggtttggaaaactaactccgctgtatttattgtttaaattgaaattaaacctggtgttgctttgaaaaaaaaaaaaaaaaa

SEQ ID NO: 368 - DNA, 260 bp, Rattus norvegicus
tgaccaaagaatcaaaagccctgatggggctttataatggccaggtcctgtgcaagaaaaataaatttggagcgccacagaagactgttcagcagctagccatccttggcgcagggctgatgggggctggcattgcccaggtctctgtggacaagggactgaaaactcttcttaaagacactacagtgacaggctggccggggacagcaacaagtgttcaaaggactgaatgacaaggtaaagaagaaggcctcacatcc

SEQ ID NO: 369 - DNA, 326 bp, Rattus norvegicus
cgcaaaggctgctggtcaatgtattttcgactgagaagcggtgctggcgcttaggacgagcggaggcaggcgcgcggcgggcaggcctggagggggcgggtccgtgtgggcctcagtgccacccgccaggcctgagaagaggcgagggaggtcacaacgagaaggtgtagccgctgtagccgcgcccgctccctctgcgaactgggaacgttgagaacaaccatgtcctactgccggcaggaagggaaggatcggatcatatttgtgaccaaagaagaccatgaaactcctagcagtgctgagctggtggctgatgaccccaatga

SEQ ID NO: 370 - DNA, 295 bp, Rattus norvegicus
gcgcttcgtgcgcggagtacagccatggcagccgctgtcgagggcgcccgcaggaaagagcgcatcctctgcctgtttgacgtggacgggaccctcacgccagctcgccagaaaattgatcctgaggtatcagccttcctgcagaagctacgaagcagggtgcagatcggcgtggtgggtggatctgactactccaagatcgctgagcagctgggtgatggggatgaagtcatgagaagtttgactatgtgtttgctgagaacgggacatgcagtataagcacggacggctactc

SEQ ID NO: 371 - DNA, 394 bp, Rattus norvegicus
  misc_feature 114, 126: n = A,T,C or G
gcgtcaccggccaccccaaccccagcgcgcgaccccttctctctgcagctcggggacactcagaggtgccagcagcggtgtcggcagcgtcaccctggcttgccccctgcgcancctgagccaganggcccctctgagtccccgaataacaaggccgtcctgatcaacgcttgtgagcggggctgtcggcttttctccatctgccgcttcgtggccaggagctctaggcccaatgccacagagacagaatgtgaagcagcctgcaccgaggcttacgtgaaggcaaaggagcagcaggcctgcagtgaagggtgttggggccagatccctgaacctgagacccagctggagcagaaggaattggctttggacccacctagtgggagcctctccc

SEQ ID NO: 372 - DNA, 243 bp, Rattus norvegicus
  misc_feature 132: n = A,T,C or G
aaattagcaggcaagatacctaaactttcatcccttattttgctagctcctggaatgaaaaccatgccaggttggtcctggaggcattggagtgaagaaaaataaacctttgtctttattcccttgattctngaagagaagctcaataaacagaaatcaggtacttgcagggttctgagtaggtttttcagggaagtctttagggagaagagtctggttctatttttgcatatgtaaaatgag

SEQ ID NO: 373 - DNA, 285 bp, Rattus norvegicus
  misc_feature 44, 157, 174, 185, 192, 194, 195, 196, 197, 272: n = A,T,C or G
gaacaatgagagttactggctccagacccatggaggtctccttnttgtcgccttagtttctcttaggaaactagaaaaagaaaggccttctcgtgtcattgtgttgattttgtgtatcttgtgtattcatgcagttcggtttccagaaaactcacantggccccaaaaggaaantcctaattcanactgtantnnnnccaaatgatgagagaggaggaccatggtggagcctttgagtaaggttacaaactgaaggagacactgtctgtgtngtaatccatcact

SEQ ID NO: 374 - DNA, 300 bp, Rattus norvegicus
  misc_feature 292: n = A,T,C or G
cccggctgggccagagcaaaggaaaggacgctgtaggttggggagcatgtctagcttctcaaaggcgccccagcaatgggccacttttgctcgaatgtggtatctcttggatggcaaaatgcagccccctggcaaacttgcggccatagcatccaataaacttcaggggttacataaaccagtgtaccatcagctgagtgattgtggagaccatgttgtcataataaacacaagacatattgcattttcttggaaacaaatgggaacaaaaagtgtacttcctcacatactngctacccg

SEQ ID NO: 375 - DNA, 389 bp, Rattus norvegicus
agcgtggtcgcggccgaggtacaggaaaaaggtcatgtatctgctggatctaatcagaccatggttgtcagcggggcggcaggcgcctgtggatctttggctgggcagattggccacctgcttggttgttccagagtggtgggaatttgtggaacgcatgagaaatgtctctttttgacctcagagctggggtttgatgctgcagtcaattacaaaacagggaacgttgcagaacagcttcgagaagcgtgcccggacggagtggatgtttactttgacaatgttggaggtgacatcagcaatgcggtgataagtcagatgaatcagaacagccacatcattctgtgttggtcagatttctcagtacctgcccgggcgggccgcttcga

SEQ ID NO: 376 - DNA, 722 bp, Rattus norvegicus
tcgagcggcgcccgggcaggtactacactcggataaccatgaaaaggatggcacaacttctggatctctctgtagatgagtcagaggccttcctctcgaatctagtcgttaacaagaccatctttgctaaagtggacaggttggctggggtcatcaacttccagagacccaaggatccaaataacttattaaatgactggtctcagaaactgaattcactgatgtctctggtgaacaaaacgacacacctcatagccaaagaggagatgatacataatctacagtgagggtctggatgcttctagaagacacaaaattggaggtcattaaaaaagaaagactgttttcgtggtgtatatgttgttttttcttactatccaatcttttttctaaaattttaagatagtaaatgtgtttaagcacctctgccttttccactccttggtttcatgttaacgctgcaaaacattttcccagtctgaagacggaaaggtttgtgtcccagccttccttcgagtgtattggtaccatttgtttctattcatctgaccactacatgacaataatgaaaacaggacatgtgtgttagctcctgaagttgcctcttcttggagagctggtgattaacaagtggttataaataatcgtgtcataaagttattgatgacttactagaattaaaaacaaaacatagaccatgcaaggaaaaaaaaaaaaaaaaa

SEQ ID NO: 377 - DNA, 372 bp, Rattus norvegicus
agcgtggtcgcgcccgaggtacaaggaatgctgcatgccacctccacttagcctggcagaaacctctgctgtgcgtgcggcagcctctgttcttaggagcgccaagcagcccccgctcatcatcgggaaaggcgctgcttattcccatgcagaggacagcatccggaagctggtggagctgtgcaatctgccatttttacctactcccatggggaagggtgtcgtccctgacaaccacccaaactgtgtgggtgcagccagatccagggcctttgcagtttgctgatgtgattgtgttatttggtgcgagactcaacgtggatattacattttggacgtgccgccaaggtacctgcccgggcggccgctcga

SEQ ID NO: 378 - DNA, 460 bp, Rattus norvegicus
  misc_feature 19, 70, 393, 395, 408, 454, 459: n = A,T,C or G
gccggcgcaggcagcgaanaatgggccttgaggttgctgagacttgtcccggcgtcggcgtccgcgcgcngcctcgcggccggagcccagcgcgtgggacgaattcataccagtgtgcactgcaagctgaggtacgggcttttggcttccattctcggtgataagacaaccaaaaagctgcatgagtacagccgagtgataacagtagatggcaacatatgctctgggaaaaacaagctcgcaagggacatcgcagagcagctaggcatgaagcactatccggaagcagggatacagtactcaagcagcaccacgggtgacggaaggcccctcgacatagagtttagtggcagctgtagtttagaggaaattttatggacaatcccaaaagcnangcaggcaacactnaccgcctacagtcctggctttctgccagccgcctctgcatattcantgccng

SEQ ID NO: 379 - DNA, 678 bp, Rattus norvegicus
tcgagcggcgcccgggcaggtacagaggcaccactgatcatcagacctgattctggaaatccgctcgacactgtcctgaaggtcttagatatattaggcaagaagttccctgtctctgagaactccaaaggctacaagttgctgccaccctaccttagagtcattcaaggggacggagtggatatcaatactctacaggagattgtcgagggaatgaaacagaaaaagtggagtattgagaatgtctcctttggttctggtggcgctttgctacagaagttaaccagagacctcttgaattgctccttcaagtgcagctatgttgtaaccaatggccttggggttaatgtctttaaggacccagttgctgatcccaacaaaaggtcgaaaaagggccggctgtctttacataggacaccagcagggacctttgtcacccttgaagaaggaaaaggagaccttgaagaatatggccatgatcttctccattacggcttttcaagaatgggaaggtgacaaaaaagctactcgtttgacgaagtcagaaaaaaatgcacagctgaacatggagcaggatgttggcgcctcactaggctttgtgttgagtgggtggttgtgtgtgcaggtgtgtggtgcatacgtgcgcgcatgtttgcgctgtggtgtgtactggcggaa

SEQ ID NO: 380 - DNA, 242 bp, Rattus norvegicus
agcgtggtcgcggccgaggtgaaggaggccgcctccatcctgcaggagttacaggtggaaacctatgggtctatggagaagaaggagcgggtggagtttattctggagcagatgaggctctgcctagccgtgaaggattacattcgcacacagatcatcagcaaaaaaattaacaccaaattcttccaggaagaaaacacagagaaattaaagttgaagtacctgcccgggcggccgctcga

SEQ ID NO: 381 - DNA, 629 bp, Rattus norvegicus
  misc_feature 544, 548, 559, 572, 578, 597, 600, 602, 606, 611, 614, 617: n = A,T,C or G
gagcagatgctgtgggactggaagaaaaaatcaagcagcatttagaaaatgaccctggaagcaatgaggacacagacattcccaagggctatatggatttaatgccttttattaacaaagctggctgcgaatgtctcaatgaaagtgatgagcacggctttgacaactgcttacgaaaagacctgtccttcttggagtctgactgcgacgagcagctgcttattactgtggcattcaatcaaccagttaaactttattccatgaagtttcaaggaccagataatggtcagggtcctaaatatgtaaaaatttttatcaacctaccccgatctatggactttgaggaggcagaaaggagtgagccaacccaagctgctggaactgacagaagatgacattaaagaagatggcattgttcctcttcgttatgttaaatttcagaatgtgaacagtgtaactttgtttgttcagtctaatcaaggagaagaagaaacaacaagaatttcctattttactttcattggtactcccgtccaggcaacanatangaatgacttcnaacgagtgattgngcaaanaaggggaaagccataggtncgnantacnctggnggnctnctgcagtcagtt

SEQ ID NO: 382 - DNA, 259 bp, Rattus norvegicus
  misc_feature 36, 152: n = A,T,C or G
ggacaaggtgtggtcttggagcgttccatctacagngactttgtcttcctggaggcaatgtacaaccagggcttcatccgaaagcagtgtgtggaccactataatgaaattaagcggcttactcttccagagtacctgccaccacatgcagncatctatatcgatgtgcctgtgtcagaaatacagagcaggatccagaagaaaggagatccacatgaaatgaaggtcacctctgcctatctccaagacatcgaggatg

SEQ ID NO: 383 - DNA, 654 bp, Rattus norvegicus
tcgagcggccgcccgggcaggtacagccaaagcgcagggcctgtatgagacaatcaatgtgacgatccctgctgggattcagacagaccagaagattcgcttgactgggaaaggcatcccccgtattaatagctatggctatggtgaccactacattcacattaagatcagagttccaaagaggctaagcagtaggcagcagaacctgatcctgagctatgctgaggatgagaccgatgtggaggggacagtgaatggagtcacccacacaagcactggaaaacggtcaactggaaactagatggagcagcagtccctctccgtgaccagggcatgagacacgggaggatcccagaacagcagcactgagcccctgcttacagatccctctgaacagcccagcaacagcaagcctatgtgacgacttctctgcataaaaggttacggtgtcctaggcagtgacgcacggccctcaggcctggacaccgagacaggtgggaagtgcctgtccactgataggtgactgctgcttctggttcaggcaggaaaacacttggactcttcttgcagcactaagatatctggaatcgcatgtcgtagagagctgaagattaaaccgtgctacagaaaaaaaaaaacaaaaaaaaaaccccg

SEQ ID NO: 384 - DNA, 684 bp, Rattus norvegicus
tcgagcgccgcccgggcaggtctgaaggtgagccgggcgctatggcgttctgtgctcccccggcctacttaacccaccggcagaaggtgctgcggctgtataagcgcgcgctgcgccacctcgagtcatggtgtgtccacagggacaaataccggtaccttgcttgcttgatgagagcccggtttgaagaacataagaatgagaaggacatgatgaaggccacccagctgctgaggcaggcggaagaagaattctggcaaaaccagcatcctcagccgtatatcttcccagactctcctgggggtacttcctatgagagatacgagtgctacaaggttccagaatggtgcttagattactggcatccttctgagaaagcagtgtatcctgattacttttccaagagagagcagtggaagaaactgaggatggagagctgggatcgggaggttaaacagctggaggaagaaacgtcacctgatggtattatgactgaagctttgcctcctgccagaaaggaaggcgacttgcccccattgtggtggcatattgtgaccagacctcgggaacggcccacatagagacaggcaccgcactgttcatgcttgcaagtgagagttacagaacacattcacacttgccctaataaaagtaactagagacagtcaaaaaaaaaaaaaaaaa

SEQ ID NO: 385 - DNA, 696 bp, Rattus norvegicus
tcgagcggcgcccgggcaggtccttattcaggaaagtgatagaggagcagatggagccagcgctcgaaaagttaagcatcatgtctgagaggttggccaatcagtttgcactttacaaacccgtcactgatctcttccttcagcttgtggattcaggcaaggtggatgaggccagagcccctcttggagagatgcggcgccattgccgagcagacctcaattctgtcggtgttctgtctcaggacgtctcagaaaccaaaaaaggccccggttctgaagaccttgttagagctgattcccgagttacgtgagaatgacagagtatactcctgcagcatgaaaagctatgtcgcagacaaagacgtggcctccgctaaagcgctgtatgagcatttgacagcaaagaacatgaagctggacgacctctttctgaagcgctacgcatctttgctcaaggatgtgggcgagccggtccccttcactgagccccctgaaagctttggattttacataaagcaactaaaggaagcgagagaaaacccctcatgaaagaagcagctgtgtgtgtctgtgtgtgtctgtgtgtctgtgtgtctgtgtctgtgtgcacgcgcctgtgtctcaatgttatttctaaaatgtacttaggaaaaataaacaactgaagattataaaaaaaaaaaatgtacgacaaca

SEQ ID NO: 386 - DNA, 565 bp, Rattus norvegicus
agcgtggtcgcgcccgaggtgttcactgaactgcgaaggtcatgctgcccaacaccgggaagctagcgggatgcacagtctttatcacaggggcgagccgaggcatcggcaaagctattgccctgaaagcagcaaaggatggagccaacatcgtcattgctgcaaagaccacccaaaggcacccgaaactccttggcactatctacacggctgccgaagaaattgaagcagctggagggaaggccttgccatgtgttgttgacgtgagggacgagcagcaaatcaacagtgcagtggagaaagctgtggagagatttggaggaattgatattttggtgaacaatgccagtgctattagcctgaccaacacattggaaactccgacaaagagagtggacttgatgatgagcgtgaacaccaggggcacctaccttacatccaaagcatgtattccctttttaaaaaagagcaaagtagctcacattctcaatctcagcccacccttgaacctgaatcccatgtggttcaaacagcactgcgcgtacctgcccgggcggccgctcga

SEQ ID NO: 387 - DNA, 821 bp, Rattus norvegicus
tcgagcggccgcccgggcaggtacttgattggaccagatggagaatttcttgattattttggacaaaacaagaagaaggcagaaatagctggctcaatagctgcacatatgaggtcacacatgaggaagaggtagccagagccatgtcacctgatgcaggattgtcttgctggcaaggaagctttgtctcccagaggaacctctatattatgtaacatacagcgtggactgcataccctgagagcatcattctacatgagatgttaccctggggctcagccagcccagtctgccacgaagctaccatgagtccaaaggatcagcgcaggcagaaccagtggagaacaggcacccagaagcatcagagaggcacacgaatgcacatctgtaggcacggcactcttggaatagtgttgctgcctcgccagtgtctgcttgctcaggcctgtggggccaaattctacaggaaagagtgtcacttccataatgctctcattgtttcaactcgtgtgctcgcgtgctcatagtcagcataggcgtctacgtcatcttcatactggagagtggacgctcagcttctttgaaaaggcatgtcaccatcaggtctgcatctcattcccacagcagctgctgctttgagggctggaagagaaaacttactgtttgcacataactgttggctcagtccccacctttttattttaatagctaagtgatttggtttggtagaccaaatggaaatgaaaatatttatcatgactataatctggtactttttatgtaccaggttacacagtgtatgaaataaaagatgtcagtct

SEQ ID NO: 388 - DNA, 961 bp, Rattus norvegicus
gtcaggagccaaaatggcggcggtggtcggggtctccttgaagcgcggcttttcggctacggctctcggcagagtcggcctgcagtttcaggcctgccgagaggcacagacagctgctgctgcagctcccagaatcaaaaccttcgccatttaccgatgggacccggacaaggctggagataaacctcgaatgcagacatacaaggtggatctgaataagtgtggaccgatggtgctggatgctctaatcaagattaagaatgaaatcgattctactttgaccttccgaagatcatgcagagaagggatctgtggctcttgtgccatgaacatcaacggaggcaacacactggcatgcacgcgcaggatcgacacagaccttggcaaagtctcgaaaatataccctcttccgcatatgtatgtgatcaaggatctagtccctgacttgagtaacttctatgcacaatacaaatccattgagccctatctgaagaagaaggatgagtcccaggagggcaagcaacagtatctgcaatccatcgaggaccgggagaagctggacggattgtatgagtgcatcctgtgtgcctgctgcagcaccagctgtcccagttactggtggaacggagacaagtacctggggcctgcagttctcatgcaggcttatcgctggatgatcgactccagagatgaattcacagaggagcgcctggccaagctgcaggaccccttctctctctaccgctgccacaccatcatgaactgtacacagacctgccccaagggtctgaatccaggaaaagcaattgcagaaatcaagaagatgatggcgacctacaaggagaagcgggcattggcttaaccctgtccatgctgagtgtggctgtcagctctggcgtgagtcccttcaagcccccggagtgtctctgagtacagcctatgtaataaacatttaggagat

SEQ ID NO: 389 - DNA, 657 bp, Rattus norvegicus
ttcctttcctacttacagtccctacttttgttcccgcctaagcaactgaagcctccggcagagctctaccctgaagatataaatacatttaaattgctctcatatgcctcctattgtattgagcatggtgacctggagctggccgcaaagtttgtcaatcagctaaaaggggagtccagaagagtggcacaggactggctgaaggaggcccgaatgaccttagaaactaagcagatagtggagatcctgactacatacgccagcgccgtaggaataggaaccactcaagtgcagcaagagtaaggcctaggaagagttgtgtaatgtcatatttcatatcaaagaaaatcagcattggtatctgcagggtttgcaacaagggtcccagaattgtccagaagtgagcaggttccaagtcctgtgtgagatgttaacacctgttgcatttaccgtccttacactgctatcatgccaatgaactccaggagactttatttgcaacttgtgtaacacttcctgttttttaggttttactgatcaggcttgtgagccactcaaaataatgtttgtgatccctactattgattctgcccttggagcaaactgaataaagctacacaaggaaaaaaaaaaaaaacctcgggcgggaccacgcta

SEQ ID NO: 390 - DNA, 802 bp, Rattus norvegicus
gttggtcgtgttcgttttgggcgggcccggtgcgggcaaggggacccagtgcgcgcgcattgttgagaaatatggctacacacacctttctgcaggagagcttcttcgtgatgaaaggaagaatccagattcacagtatggtgaacttattgaaaagtacattaaagaaggaaagattgtaccagttgagataaccatcagtttattaaagagggaaatggaccaaacaatggctgccaatgctcagaagaataaattcttgattgatggctttccaagaaatcaagacaaccttcagggttggaacaagaccatggatgggaaagcagatgtatcttttgttctgttttttgactgtaataatgagatctgtattgaccgatgtcttgaaaggggaaaaagtagtggtaggagtgatgacaacagagagagcttggaaaagagaattcagacttatcttgaatcaacaaaaccaattattgacctatatgaagaaatgggcaaagtcaagaaaatagacgcttctaagtctgttgatgaagtttttggtgacgttatgaagatttttgacaaagaaggctaactaaccctgggacatctttgaaatcatgcttgaacattgctttgatagctgctatcacagcccccttttaaggcagttttaagattacatctcaattaatgtctagaaatatatagtaagacaaattatgtggtcttttaatttgtggtcacagtgcacagtgaattcagtttaatcattttaggtattatcggggcccccaaagagaagggtcacgca

SEQ ID NO: 391 - DNA, 540 bp, Rattus norvegicus
aaaaaaaaaaaacaacacaaaaaaaaaaaaaaaaactctagcggccgcggccagcggcctgcgccaggctgcttctgcagccagtacctcggtgaagcccattttcagtcgggacctgaaagaggccaagcggagggtgcgcgagctctaccgcgcttggtaccgggaggtgccaaacactgtgcacttaatgcagctggatatcacggtgaaacaaggacgggataaagtccgagaaatgttcatgaagaatgcccatgtcaccgaccccagagtggttgacctcctggtcattaagggaaagatggagctccaggaaaccattaaagtgtggaagcagcggacacacattatgcggttcttccatgaaacagaaacaccaaggccaaaagatttcttgtccaagttctatattggccatgacccatgaggtcacctgatgggaaggtgcatgttaatatttaattatcttagagtacaaataaacccattatttgatggtcgtgaaaaaaaaaaaaaacctgcccgggcgccgctcga

SEQ ID NO: 392 - DNA, 594 bp, Rattus norvegicus
cgcggccgaatttctgcggacaacaggacttcaagatggcgtctatcgtgccattgaaggagaagaagctcatggaggttaaacttagagagctgccaagctggatattgatgcgggatttcacccccagtggtattgcaggagcctttcggagaggctatgaccggtattacaacaagtacatcaacgttcggaaaggcagcatctcagggattaacatggtgctggcagcctacgtggttttcagctactgcatttcttacaaggaactcaaacacgaacggcgacgcaagtaccactgaagaggggtcactgtggagaacactgcatggccgagtgtaaccgcctggcccgctccgatctgcttaaccttcacaccccaaccaagaactagtgtccaataaaaggtgacgggactggttcaaaaaaaaaaaaaaaaaaaaaaaaaaaaaaaaaaaaaaaaaaaaaaaacgcgcagagagcgaagggaatttaaattggatcgatttaggccaaggccaggcaaaacttggccctacattacggaaacgggaccggaaccttgccccctcccgattaacaccctgtgaaacg

SEQ ID NO: 393 - DNA, 567 bp, Rattus norvegicus
tcgagcggcgcccgggcaggtaccaagagcctatacatctacctggtgtccgagttgacagtggcatccaaccaggaagtgacatcagcatctattatgaccctatgatttcaaaactagtcacatatggatctgacagagcagaagccctgaagaggatggaagatgcattggacagttatgttatccggggtgttacacacaacatcccactgcttcgggaggtgataatcaacacgcgttttgtgaaaggggacatcagcactaagtttctctctgatgtgtatcctgatggcttcaaagggcacatgttaacacccagtgagagagaccagttattggctattgcatcatccttgtttgtggcatcccagctacgagcacagcgctttcaagaacattcaagagttccagttataaggccagatgtggctaagtgggagctctcagtaaaattacatgatgaagaccatactgttgtggcatccaacaacgggccaacatttaacgtggaagttgatggctcgaaactaaatgtgaccagtacctgcccgggcgccgtctcga

SEQ ID NO: 394 - DNA, 674 bp, Rattus norvegicus
tcgagcggccgcccgggcaggtggtgattcagagacgcctgaacggctctgtggacttcaatcagtcttgggaagcctacaaagatggcttcggagatccccaaggcgagttctggctgggcctagagaagatgcacagcatcacaggggaccgaggaagccagttggctgtgcagccccaggactgggatggcaatgccaaattgctccaatttcctatccatttggggggtgaggacacagcctacagcctgcagctcaccgagcccacggccaatgagctgggtgccaccaatgtttcccccaatggcctttccctgcccttctctacctgggaccaagaccacgacctccgaggggaccttaactgtgccaagagcctctctggtggctggtggtttggcacctgcagccattccaatctaaatggacaatacttccactctattccacggcaacggcagcagcgtaaaaaggggatcttctggaaaacatggaagggccgctactatccactacaggctaccaccctgttgatccagcccatggaggctacagcagctcctagctcctcactggagcctggttccaggctaagaagacagtgactttgggtgtgaacctaagatatgggtggtctgcgggaagcagagcctaaaaggaccgggcccggg

SEQ ID NO: 395 - DNA, 672 bp, Rattus norvegicus
aggccccggcatcgcccttcttgtgtcgcggcctagcagtggaggccaagaagacttacgtacgcgacaaaccccatgtgaatgtgggtaccatcgggcatgtggaccatggcaagaccaccctgaccgcagccatcacgaaaattctagccgagggaggtggagctaagttcaagaagtacgaggagatagacaatgccccagaggagcgagctcggggtatcaccatcaatgcagctcatgtggagtatagcactgctgcccgacactatgcccacacagactgccctggtcatgcagattatgttaagaatatgatcacaggcaccgcccctctggatggctgcatcctggtggtggcagctaatgatggccccatgccccagacccgagagcacttactgctagctaagcagattggggtagagcatgttgtggtgtatgtgaacaaggcagatgctgtccaggactcggagatggtggagctggtagagctggagatccgggagctgctcactgagtttggctataaaggagaggaaaccccagtcatcgtaggctcggccctctgtgctcttgagcaacgtgatcctgagctaggtgtgaagtcagtgcagaagcttctggatgctgtggacacttacatcccagtacctcggccgcgaccacgct

SEQ ID NO: 396 - DNA, 1085 bp, Rattus norvegicus
  misc_feature 1035, 1076: n = A,T,C or G
cacgaactcacacactgaggcgtctgagtgaaaagtgtagcaccatggcctctgtgttgtcctacgaaagtctggtacacgccgtggccggagctgtgggaagtgtgactgccatgacagtgttctttcccttggatactgctagacttcggcttcaggtcgatgaaaaaagaaagtcaaaaacgacacacgcagtgctcctggagataatcaaggaggaaggcctcctggcaccatatcgaggatggtttccagttatttccagtctctgctgctccaattttgtctatttttacacttttaatagtctcaaagcagtgtgggtcaaaggtcaacgttcttccacaggaaaagatctggcgattggatttgtagcaggcgtggtgaatgtgttgctaaccactccgctctgggtggtgaacaccaggctgaagctgcagggggcaaagtttcggaacgaagacatcataccaactaactacaaaggcatcatcgatgcaattccaccagatcattcgagatgaagggatcttggctctgtggaatggcacctttccctccttgctgttggtcttcaaccctgccatccaattcatgttctatgaaggcttaaaacggcagcttttaaagaagcggacgaagctctcttctctggacgtgttcatcattggcgcagtagccaaagcgattgccaccacagtcacctaccccatgcagacagtacagtcgattctgaggtttggacgtcatagactaaacccagaaaacaggacactggggagtcttcggaatgttctctctcttcttcaccaacgagtcaagcgctttggaataatgggactctacaaaggcctcgaggccaagctgctccagacagtgctcacagccgccctcatgttccttgtgtacgagaagctgacagctgctaccttcaccgtaatgggcctgaagagctcacataagcactgagaaccgcccacaggacagcgtggacgcaggtgctgcacacagagaagaggcacaatcctcctttcngccggttccatccacaccacagacattcctgcattggctgnaaggcatgg

SEQ ID NO: 397 - DNA, 390 bp, Rattus norvegicus
  misc_feature 9: n = A,T,C or G
tcgagcggncgcccgggcaggtaccaccacaggctgacgcaaaaagccggctgtttgcacagagcaggagaggccaggaagttctcactagggtgaagcagttcatgaagcagcatgtctttcctgctgaaaaggaagtagctgaatactatgctcaaaatggaaactcagcggaaaagtgggagcaccccttagtgattgaaaaactaaaggaaatggccaaagcagagggcctgtggaacctgttcttgcctgctgtgagcggtctcagccaggtggactatgccttgattgctgaagagacaggaaaatactttttcgctccagatgtttttaactgccaagcaccagacacaggcaacatggaggtacctcggccgcgaccacgct

SEQ ID NO: 398 - DNA, 1000 bp, Rattus norvegicus
tatacaacctgctactggacgttttccccaaggaggtcttccggccccgcaacgctatccagcgcatctttgtccactacccacggcagcaggagtgtggagtcgctgtcctggagcagatggaacgacatggagttatgcccgacacagagactgagttcctgctgatccaggtgttcgggcacaaaagttaccccatgctcaagttcctgcggatgaagctgtggttcacccgcttcaagaatatcaacccctacccagtgccccgagatcttccccaggaccctttggacctggccaaactaggcctgcgacacatggagcctgatctcagtgctaaagtcactgtctaccagatgtctttgcccagtgagtcgacaggcattgaagatcccacacagcctcacattgtaggaatccagagtccagatcagcaagctgccctggcccgacacaacccatccaggcctgtttttgttgagggccccttccctctctggcttcgtaataagtgcgtctattatcacatcctaagagctgacctgccaccccctgaggaagagacagtagaggagatcccagaagaatggaacctgtactacccaatgcagctggacctggaatattcaaggagtgcttgggacaactatgaatttgacatggatgaagtgacagaaggccccgtcttcgccatgtgcatgactggtgcccatgatcaggcaacgttggtcaagtggatccaaggcttgcaggagaccaacccaacgctggcacagatcccagtggtattccgcctggccaggtccacaggagagctcctggcaaccacaaggctggagggacagtcccctccccacagccctcccaagggtcctgaggaagatgatgaggccattcaggcacagcagcggcaaggtcaaagctgagtcagagctggcatgaggagaaaagactggactggtatgaaatattatggagaaaataaaaaagtcaaaacctc

SEQ ID NO: 399 - DNA, 751 bp, Rattus norvegicus
agcgtggtcgcggccgaggtcggcctccatcttcatgggcgccgtgagagctgcctcaggaatattacgtcccctcaatgtctcggtttcgtcaacctatcggaactgtgccaggaatgcctgtcttagttctgcgctgcgcaccattccttttagacatattcagacatcagttgtttcctctgctccaaggcttgtcaagtctgtcggacacctggcatatgggcacacggcatcagtccttaatagagtggccacattggttcccagtgtcttgaagcctccggtcagagctctgacgtactgcagtgcacggaaaggaaagagaaagacagtgaagtcggttgtgcatcgcttcctccgacttcactctggcctttggctaaggagaaaggctggctataagaaaaaattatggaaaaagtcaactgcaagaaagaagcgcttgagggaattcgtgttctgcaataagacccagagtaaactcctagataaaatgacgacatctttctggaagaggcgcaactggtacactggtgatccctaccagatgtaccatgatcggacaaacctgcgggtatagttcagagctcacacaagttcccaactctgggatgtggagctttatgcacagatgtccttgcaaaagtgagtgtgtgttaaactgtaaactgtaccggctgatagacaaacttaggtcaccaccattgtgcattaaacgttcccagagctggtcactgaactcaaagtt

SEQ ID NO: 400 - DNA, 281 bp, Rattus norvegicus
tcgagcgccgcccgggcaggtcgggaaggcaaacatggccggggttggcgcagtttcgagacttcttcgcgggcggcgcttggctctagctggggcgactcgtggctttcacttctctgttggtgagagcaagaaggcatccgctaaagtttcagacgcgatttctacccagtaccccgtggtggaccatgagtttgatgctgtggttgtaggtgcaggcggggcaggcttgcgagctgcattcggcctttctgaggcaggctttaacacggcatgcctta

SEQ ID NO: 401 - DNA, 589 bp, Rattus norvegicus
tcgagcgggcgcccgggcaggtacatgggagctcaccaaagaagggtttatgacgtcatttgccttgttcatggtcatttggatcatcttttacactgccatccactatgactgatggcatttgctcccgtcccttctgtccagtccaaaggacccttttattacagcacagatacatgcttattggggcactcctgctgtgtggaaccgagaagacccagtctcctggacttagaatcagcgtgttgggcatcagtgttttcctgcaagggttgtgaaactttttaaagaaccatccacctttggggaagcatttctgagtttgtccattgtcaacaatctgtccttggataccatcatgtaacagctgtttgccaagtggagctgctgttgaatctgatgcgcctctggatccggatgaaacattgtcttccttggttctccgtcaggtgtacagtttttaaacatcactgcatctcaagtcttctgaaaacaccatgtgcgtggtccatggtacaatacaagcagccatctactaagttccattgtaggatgttttcagatacttgaatgaacaaatctttaagtg

SEQ ID NO: 402 - DNA, 701 bp, Rattus norvegicus
cagatccccctggagtattagttcccgggcacggactatttaagattaattaagaaaccacaaaataccggccctgaggcccaagcttctccaaaggtcatcagcagtgctacagatacagaggaagtccacataatgcttgatggtctattacctgctgacacgtattttaggtttaatcctgtgatctgtgaaaacatacccctagatgaaagccgcaatgagaagctggaccagcttcagctggaagggatgaagtatctagaaagaaatgatgaaaagatgaaaaaacttgcaaaaatattaagtcgagaaaaaacaactcttcagaagattagtgattggataaaattaaaaagtgatatgtatgaaggccttccatttttttcaaaattgtgagtagggtatacatgtgttcctcaaggccatcaaaagatccataagtttatagaggagcagtgtgattcacatgaattttgtgtaggacacttagtgaaatccgggaatccttgaatcagataatgctttgagtagctcgaacctcacagaagatatgattggtaacaaaagttatatgggaattaggtatttaagatgtttataacctttagacgttttattactatgctatttggttttagtatctattagtcttaaattgtttgctgtttcaaaatgtacctgcccgggcggccgctcga

SEQ ID NO: 403 - DNA, 991 bp, Rattus norvegicus
atcgtggtcgcggccgaggtacttcagcatcttcttggtgcctggaccacatatcaaaaggggcaacaacaccaccagcctcctgagccagagtgttgccaaaggaagtcaacagccttttgatgtttctgcatttaatgccagttactcagattctgggctctttggaatttacactgtctcccaggctgctgcggctggagatgttatcaatgctgcctacaaccaagtaaaagcagttgctcaaggaaacctttccagtgcagatgtccaggctgccaagaacaagctgaaagctggatatctaatgtctgtggagacttcagagggcttcctgagtgagatcgggtcacaggctctagctacaggctcttacatgccaccgcctactgtccttcagcaaattgacgctgtggctgatgccgatgttgtaaaggctgcgaaaaagtttgtttctggcaagaagtcaatgacagcaagtggaaacttgggacatacgccttttcttgacgagttataacagatgcatgtatccaagtctcagcccagaccagcaaacacatcagagtcaggtttcctaattattaatgttaattcaacatttttctcaatgaagaaaaaaacttaaaagtatagtcctcctagctgccatagagccaataaaacattgtatgtaaatgtttttcttgtactcttcctaggcagtcaacaggtatttattaaatgctttaaagaaaacagtaatagagtaattaagttcactaattacatcaattaagaaatttcagaatctgttaaaattgaggctaagcagctttaaaagtaaaaaattccagattattactgatggctttttaaaataaaaacaactttaaaacttgctcagtttgggataataacaattgaacagtctggattttgccccgtttacagtaaaagtacatttctaaagaaaaaaaaaaaaaaaaaaaaaaaaagtgtggcggcttta

SEQ ID NO: 404 - DNA, 1010 bp, Rattus norvegicus
  misc_feature 1010: n = A,T,C or G
agcgtggtcgcggccgaggtactatgtccattcgacaaaacatccagaagattcttggccttgccccttcacgagctgccaccaagcaggctggtggatttcttggccccccacctccttctggaaagttttcctgagagaaagcagaattctgaatttccgatcattctttcagacattcagacttaacaaggcacctggccacattctcggtttgagctatttctcggctgtggatatgaacaaatgagaacactgcttaactaatgggatagtgcttatgatcatgatgattctttgtaagtgcactcactggttccatttgggtgatctatgtaaccacagcatcatctttcttgtctcagtatttcagtgtatgtgccgtgtacacaggagcagattgtccatgaacattagcaactaggagaaaacagtttacgtaacaacttcattggcattatttgtcctgttttttaaaaagccaaatatgtcactttgtgtttgacaatgagccaaatttttaggtgtttgatttagagagagagagagagagagagagagagagagagagagagagagatgtttgatttttttgcatattaaaaaaatattttctgtaatctgaacacaaggataagctattggtctaaaagagctaaaataaagttattactcgatgtaccaaaaaaaaaaaacaaaaacaaaaaaaacaaaaaagcggtgtgtgtggccccgccgggggcgcgggaacccgcggctaaggcgcagaatttgcgcggcgaggaatttccacacaacacaacgggtgggggcgcgccgcacagaagcctaggtgcctatcagagaggaggggcccaaatatggcgcccattaaagaggggaggtgcgtccatcaacacatccgaggggggcgcgcggcgtttacaacagccggccggggcgcgggaaaaaccggcggcgggttcccccactttaagccgccggggagcaaccgctttcgcacacaacgn

SEQ ID NO: 405 - DNA, 736 bp, Rattus norvegicus
aaactgatcacttcagataaaagggtgcaggctattctggtcaacatctttggaggaatcatgagatgtgatattattgcacaaggaatagtcatggcagtaaaagatctagaaattagaatacctgttgtggtacggttacaaggtacacgagttgatgatgctaaggcactaattgcagacagtggtcttaaaattcttgcttgcgatgatttggatgaagctgctaaaatggttgtaaagctctctgaaatcgtgaccttagccaaagaagcccacgtggatgtgaagtttcagttgccaatatgagcaaaaccttggtgaatggcttcgggtattaatgtgctgtaattctttattatactgtggtctctcctagtgtccctttcttttaaatgtgtggagaatgtaatcaccacataggcacacatacctttgaaagcattcgctctgcatttgattctgctgctcagactggactgtttatataaagaatgtctgatgtaaacttacagtggtctcgtttcttgcagccatctttcttgcttcctctgcagaatgtcacttggagtatgcctgttttctggtgttggatacgaagttcttcattgataagagtcctataaataaaattactacaaagagaaagctttattctttagtatgaaaatatatctaataacagcctcattaggataatggcgtgttatagcaatgttttatataagaaatattt

SEQ ID NO: 406 - DNA, 871 bp, Rattus norvegicus
cgtgacgtctacacacccggctcctgacctctgttcctgtgctcccgccgtcgtcctccagcgcaggcctccgggctccagctccggtgttgggtgcaggcctggtgtggtctccaaagtgactgaacaatgcagaaggacagtggcccactggttcctttacattattatggtttcggctatgcggccctggtggctactggtgggattattggctatgcaaaagcaggtagtgtgccgtccctggctgctggactcttctttgggggcctggcaggcctgggtgcctaccagctgtctcaggaccccaggaacgtgtgggttttcctagctacgtctgggactttggctggcattatggggatgagattctacaactctgggaaatttatgcctgcaggtttgatcgcgggagccagtttgctgatggttgccaaacttggacttagtatgttgagttcaccccatccgtagtagccatagtcctgcgtgggctcatgatgagttgacactctccagtcctccacattaccacgctgaagagataagaacagcaaagacctacactgagcacatggaggcgaagacgtggttactatagtgaccgttcagagacggcgagtgtctgacctcagagctcacactgccttcatgcggcttgttcttgtgtcatgatgtctcgactctctgtactactacataaaggggtaaaatgttgggtgtcaacactgggggcccagagctacacgtcctgccgggaagttgtgaaatctcttggtgacatttgtgatgtgggatcttttgcacaggtctgctatgaaattatgttacggcaacattatcggtgaaaataaagttttctattaagaac

SEQ ID NO: 407 - DNA, 814 bp, Rattus norvegicus
gggaatggagccatggactctaaaacttaaaggctcagattttgaacagctcaaaccagccaaggactgtacacccattgagtatccaaaacctgacggacagatcagttttgacctcttatcctctgtggctctgagtggtactaatcatgaacatgaccagccagcacatttaaccttgaaggatgacagcatacctgttaatagaaatctgtcaatatatgatgggcctgagcagcgattctgccctgcaggagtttatgaatttgttcctctggaacaaggtgatggatttcggttacagataaatgctcagaactgtgtgcattgtaaaacatgtgatatcaaagacccaagtcaaaatattaactgggtggtcccagaaggtggaggaggacctgcttacaatggcatgtaaagcccaagtgcctccacttactggcacacttgacagccagtttctagaatactgtaaatgtatgccaaactaacctcccatatgtttggataacttctgaacaagtgtccttcaaacactgaagtaaaaaactttgtatctaacgtcccataaaatcatgaaatatttgtcattaaataaaaacttttataaatgaaaaaaaaaaaaaaacaaaataaaaaaaaaaaaagggtgtggtcccttggggccgggagacaagggtaaaggccgagaaattttggaaggatttctccctacaacagttgggggggccggctagaagatttgttttaaaggggggccattttcgcccatatgaggagggtcgtgtttaaaactcaggggggggggttttac

SEQ ID NO: 408 - DNA, 526 bp, Rattus norvegicus
tcgagcggccgcccgggcaggtgccattttgtttttcaggactctgcaagggtagctggggtgaatttgcacccaggtagcagctgtagtcaccgcagttccatccttgtctccgcgatgttgcccttggccaaaaacgcactaagtcgtctccaagttcgaagcattcagcaagtggtggcaaggcagagccatcagaagaagacacctactttccatgacaaatatggaaatgctgtattagcaggtggaagcatcttctgtatttctgcatggacatatacagccacacaaattggaatagaatggaacctgtcccctgttggcagagtcaccccaaaggaatggagagatcagtagtcatgccagctgatacaataatcaaggaattgtttcaaaaaaccaactcataaatgaatgccaagtcaaagaatcatgtactcattaaaacatggcatattgaagaaaaaaaataaagaaataaagtacctttgaaaccttcaaaaaaaaaaaaaaaaaaaacttg

SEQ ID NO: 409 - DNA, 592 bp, Rattus norvegicus
aggacaggttcctcaaccactttgcaaattatcgttggtttcttgctgtgcctctcgtttctttgggctttaagacagtgaaacaaccagtatatgttgcagatgtttccaaagggattgctaacgcgactaaaaatccagatgccataggaaaaacctttgccttcaccgggccaaatcggtacctgctcttccacttggtgaagtacatctttggcatgacccacaggaccttcatcccttaccccttgccacggtttgtgtatagctggattggcagactcttcgggctgagtccatttgagccctggacaacaaaggacaaggtggagcggatacatatctcagatgtgatggcgaccgacctgcccggcctggaagatcttggcgttcagcccacaccactggagctcaagtccatcgaggtgctccggcgacatcgcacttaccgctggctgtcttctgagatcgaggaaaccaagcctgccaagacagtcaactattagtgccacccaggccacctgtgtcctctccagggttttgtactgaaggagggtgctctattaaatatccgaggattcggtctaccgca

SEQ ID NO: 410 - DNA, 1065 bp, Rattus norvegicus
agctttcgcagatcaaaaccccaccaaaggccggagaccacttccggcttactccctgtccatctgattgaattcccaggaagaatgtgcacagtgctaaccagaaaattcaggacaagctctctgtctcatgggtggagtggaagagaatcgtcggctacgacgacacggacgagtcccattgtgctgagcacatcgagtcacatactctgtctatggcccgcaacctgacccagcagctccacactacatgccagacgctcctgttcaacgtccaagggttaccacagaacattcaagaccaggccaaacacttgggggtgatggcaggtgacatctactcggcgttccgcaatgttacctccttcaaggaagtgtctgatggcgtcctcacttctagcaaggggcagctgcagaaaatgaaggagtccttagatgaagttatggattaccttgttaacaacacgcctctcaactggctggtaggtcccttttatcctcagtctaccgaggtggacaaggccagcctgaaggtccagcagtctgagctcacaactcagtaaacctgctcttgtcaccagtgtatgatgttgctgaccaggtggcaccttttattttttattttttatttttttgtattgaaattaacctgattagattagaaaagcagctagtttgaacaaaggtcctcattatggtcattcacagctcacttatggtcgtgcccccgctggccctgacacatgagttcttcttacccggctggtatgtggagtgtgttagttttgtgaggacctcaccagaaccttaaagctcaggtgcgcttacagtcttgtccatggcctttgtgttcttattggctgtaaacgtctgtctgttccgaataaagatttgttcatgcggcctctgctctgaatgggcatctgctcctgtgtggtccgagcaggcttcatcactgtttccctcaaggcatgttcttgtgtggcttgaatttagtttttttccatgtgaagaaatatcacctttggacccaataaaattcataacagggtaaacctcgtgccg

SEQ ID NO: 411 - DNA, 566 bp, Rattus norvegicus
attgctactgggggctatgggcgaacctacttcagctgtacttctgcccacaccagcacaggggacggcacagccatggtcactcgggctggtttaccttgccaggacttagaatttgttcagttccaccccacaggtatctatggtgctggctgcctcatcacagaagggtgccgtggagagggaggcattctcatcaacagccaaggcgaaaggttcatggagagatatgcccctgtttgccaaggacctagcatcaagagatgttgtgtctcgatccatgactctcgagatccgtgaaggaagaggctgtggccctgagaaggatcacgtctacctgcagttgcaccatctgccccctgagcagctgccacgcgtctgcctgggatctcagagacggccatgatcttcgccggcgtggatgtcaccaagaagcccattccagtaacttcccactgtgcattacaacatgggcgggattcccactaactacaagggacaggtgctgaagcacgtgaacgccaggatcagattgtgcctggtctgtacctcgccgcgaccacgct

SEQ ID NO: 412 - DNA, 1044 bp, Rattus norvegicus
agcgtggtcgcggccgaggacttagcaggaagtattggtttaacagcgttgtctgcctggcattagccagatcacctgccctcatgaacttcatgatgacaggctcttggatgacaattggtgcaaccttcgcagccatgattggagctggaatgctggtccagtcaatatcgtatgagcagagcccaggcccaaagcatctggcctggatgctgcattctggtgtgatgggtgcagtcgtggctcctctgacaatcttaggggggcctcttctcctgagagctgcatggtacaccgccggtattgtgggaggcctctctactgtggccatgtgtgcacctagtgagaagtttctgaacatgggagcacccctgggagtgggcctgggtcttgtctttgcatcttcactggggtctatgttccttccccctacctctgtggctggtgccactctgtactcagtggcaatgtatggtggattagttcttttcagcatgttccttctgtatgatactcagaaagtagtcaaacgtgcagaaataacacccgcgtacggagctcagaagtatgatcccatcaattcgatgctaacgatctacatggatacattaaatatatttatgcgagttgcaactatgctagcaactggaagcaacagaaagaaatgaatgacggctgtggtgcctctgctcgctggtgtccagcttggttagtaggagcagatagtcactacagttcgcaccatcagaattccttgaggtttagaagataacctgtcaccatgtttaaaatgtccagtaacgtgacccttcaggcctgctttttcttttagagaataaatgcaatagatgtcttccaaataagcacgcacactttcatctgtcatgctttcctacgttaaaaatgctttgatgaatgtgtgcgcaaagatgtattagaaggtttcaagtattgttttatttattgaataagtaaaatgtagcaaatgtgtgtatcttcatatcgtgggaccctgcagaatattaaaatgacgtcatgagtgcc

SEQ ID NO: 413 - DNA, 510 bp, Rattus norvegicus
cagcactctgtgctccccgatgcctggagtgttgttgccgtttccgtcaagcctggagacatggtagcagaaggtcaggaaatctgtgtgattgaagctatgaaaatgcagaacagtatgacagctggtaaaatgggcaaggtgaaactggtgcactgcaaagctggagacacagttggtgaaggagacctgctcgtggagctggaatgaagtacttgtagcccttcagtcaccactgctcactgctttaattagcatttccattattctctaaccctcaatttgctcaggcgtttacaggagcactctgcagcaggttctacagcatcgtatttattcctcagaagaggcaaaaccgacactctgccaaaaaaatcaccaatgggaatttttattgatataaatacttgtacatatgatttgtacttctgctgagatttcccagtgtcaaaattaaatcaataaaaccaagcatttgtctaaaaaaaaaaaaaaaaaaacttgctgccg

SEQ ID NO: 414 - DNA, 596 bp, Rattus norvegicus
ccaccccgcccccaccccctggactcctcagtacaagcggtcatggcggcccggctgttaagcttgtatgctcgccgcctgtcagtagcggcggcgatacgagaggtcccggctgcccgtgttcgctgggaatcttccagggctgtaatcgccccgtccggtgtggagagaaagcggcaaagagaaccgaccatggtatggcaggaggacccagaacccgaggacgaaaacctctacgcgaagaacccagactttcacggttatgacagtgaccctgtggtggacgtctggaatatgcgagctgtcttcttctttggtttttccatcgtcctggtttttggtaccacctttgtggcttacctgcctgattacaggatgcaagagtgggcccgccgggaagctgagagacttgtgaaataccgagaactcaacggcctccccatcatggaatccaactattttgatcccagcaagatccagttaccagaagatgactgacgaaatactgagcagggcttaagaagcattacttattcgcccctctctgttaatttcctggttcctcagaacaccttattaaagtaattgaaaatatg

SEQ ID NO: 415 - DNA, 621 bp, Rattus norvegicus
  misc_feature 248, 268: n = A,T,C or G
cctatttctgcccatgaacaaggtggccagaagttttacaagtgcctcccatagagagtctatagaaatggcgacatttttaacaccaaaggcaccaatcggaagacccagttgggaagtgacccacaaatccaggtcggccacatacataccaccttgcatagcttcgaggactctgacagcatcctggagaccctctcagagaaaagactggggaataaaaagattggagagaactacgccctcgnacaagacttttcacttcttnatagaaagatagaaatagttttaggggcctctgtgtaaacgcccccgcatggttcaaatataacgacgagctatctacgaggagtctgacaccccaggagtattgaagagattattgatgaaactcagagctgggaaagttcccaaaaccacgggccaaggaggtggccgcttctgttgtgagccacgccggagggccttacttctttgactgaaccacccccaaggacctggctttggtgtgcaagacaggcctttaacattaccattcaactgttaaaaagtcactggagaaattaaatatgaacctacttaaaaaaaaaaaaaaaaaaacctgcccgggcggccgctcga

SEQ ID NO: 416 - DNA, 577 bp, Rattus norvegicus
accaggctgaaaacatatgcgaaagctcccgccaaactccatgagaatttccaaagagttaatcaggaagaatgagaaagaaaagctccatgcagttaacgaggaggagtgcactactttacgagcaaggtggctgtcagaggagtgcatcaacgcaatcatgagctttgttaccagaaagccaaagctgtgaagtccacgacaatggcaagactcctcacaagaaggacagactgtgagttccagttccaaggacttgaatggcacatacttctctgagccttttcctggattaacttagcaactatgatgagattgcttcacagcactgataaatagaacttttcataaatcaagccttaagaattcatgtctggggctggaaagatggctcagtggttaagagcactaactgctcttctagaggtccagagttcaaatcccagcaaccacatggtggctcgcaaccacatggtggctcgcaaccatctgtaatgagatctgatgccttcttctggtgtgtctgaagacagctacagtgtacttacatataataaatattaaaaagattttaaac

SEQ ID NO: 417 - DNA, 513 bp, Rattus norvegicus
gaattcggctttcgagcggccgcccgggcaggtacaaaggatcagcacccgtatttgaggtcagtgtgtgagatggcagagaagggagtgaggaccgtgacctcagtggctgtgacaggcgcactgcccatcatcccagaagctggagccacagattgccagtcgccaatacctatgcctgcaaggggcttagacaggatggaggcaaggctgcctattctgaaccagccaacatctgagattgttgccaatgcccgaggtgccgtaactggggcaaaggatgtagtgacgactaccatggctggagccaaggattctgtagccagcacagtctcaggggtggtggataagaccaaaggagcagttactggcagcgtggaaaggaccgagtctgtggtcaatggcggcatcgatacggttttggggatggtgcagctcatgagcagtggagtggaaaatgcaattagcaagtcggagctgctggtagaccagtacctcggccgcgaccacgct

SEQ ID NO: 418 - DNA, 422 bp, Rattus norvegicus
tcgagcggccgcccgggcaggtacttaagggatcctaaccttcatgagaaatatcgagtggggctgaaccgaattgctgcccgagaggtgcctattgagatcaagctggtgaacccacccgccctgaaccagctgcagacactggagcccaaacagatgttctgggtgcgagcccggggctatattggggaaggcgacatcaagatgcactgctgtgtggctgcttacatctctgactacgccttcctggggacggcactgctgcctcaccagtccaagtataaagtgaacttcatggtctcgctggaccactccatgtggttccacgccccattccgtgctgaccactggatgctctacgagttgtgagagcccgtgggctggtggctctcgagggctggtacctcggccgcgaccacgct

SEQ ID NO: 419 - DNA, 901 bp, Rattus norvegicus
  misc_feature 28: n = A,T,C or G
cggccgctagagtttttttttttttttnctttttttttgttttaacgacaattaatttattggtggattgaggaatacaattttaatgggacaataaggcacaactgtggataaaaacagtttgctatacagccaaggggggcataatcttagaaactttaaataattaaatcaagatgcttctgaagtacttctcaaacagataagtatcagacaattattccctttatacaattcttatatcacatcatttgatcacaaagtctgacatatttcataaagaattccccagttcatgtagaccctagccatctgtcctagccacgcccccactgctcgcctttacccatctcgtctgcagtgtttttgtttgtttgggttaacagcaatttatttcctaaagaattgcttacatatcttggatagccttccaaagcaacaaagcaagcaagcaagcaggcaacaccagagaaagccagccaagagcagattcacaggaacacagggcggaagcagcttgattcagtgacatctaaatcaagctgacattggcagagaatgtcacctcagttggtgccaccagtcccaggtcccatgcttctgagggatctgcatagtatagtattcacaaggagctaggaaggtcgtgtcattaggaagctcatgagacaatacattcgatgcatacagtgcctggaccaggattatgaactgactatacatcttccagcattaaaatttgccaagtataaaattcattcagagttttgtgcaaaacttaagacactgaggacaatctaattctttaggactgaggtaagtcaggcacttctgtaacactagtctttctgtttggaaatgtgaagaatcttcaagtgtacctgcccgggcgccgcttcaa

SEQ ID NO: 420 - DNA, 634 bp, Rattus norvegicus
atcttatatttatttattttccagcttgtacaaactggatgtagaagcataaacatagtacatttctaccatcttcaacaaaaatagaaccaatatgtacaattattgtattaaaaatacaaaagggatacagactccaccaatgtctttctaaaagacatacaggtacaagtggtatcaaaagtatgaggaaatcaccagttaattttacattctgcacttgacatcacagagcgaactgagattagcagtcctatgttctacaattacttaatgtttagataacatctgtgcaatttgtggtagagctagagttttgtctttctatatgcacatgaggtccatagcctatagagtaaaactggcaataatgcatattacatgtaaaattacaaatgcggaagtgacaatgtgatacataagtagacgaacgccatgacatagaagagaattattaaataaagcactgacattgtttgacacagtgaaaaaacactgcaattcgacctttaaaatttgaagctatttacgtttatctactgatcaatatgatcagctgaatttaatggaaaaaaatccaagatcagcagcccctcacatctgagtactactcggattggcagccttcactttt

SEQ ID NO: 421 - DNA, 637 bp, Rattus norvegicus
tttttttttttttttttgggaagcaactgcttttatttgacagtggatgaggaggagatgggtgtcagaagagatggggagcattttctgtcctacgactaaatgacatgaatttactgtacaatgacagtgtacatggctagggtaagtagcgtcaccaaagattagttctctcgcttacactaagtaggcacgcacatcccaccccagcaccgacttcacagtcagctgtaaaggagtggcatttcactggatgcctcgagagacagttctgttggagtatttgagtttaaagactttgaaaggaaagagaatttggctgaaaagtatccttttctttagttaaatcgaaacaagtctccagtcagcacccagtcaaacacagtgctttgaactttgggtaatttgtcggacagtatactccacgccactgtggaactctggagaacggaaagggcttggcacagggaactgaggcccttcatctttatcctttatccttcacctcaggtagcagggaagagaagtcagtggcatagcaagcaccctaaggatcgtttggttcctttctgacaaaagaatggaattattgagagaagccaatgccttatgaagtacctgcccgggcggcgctcga

SEQ ID NO: 422 - DNA, 716 bp, Rattus norvegicus
tcgagcggcgcccgggcaggtacacccagtcccaataaaggcttgagcacaaaaaaaaaaaaaaaaaaaaaaaaaaaaaaaaaaaaaaaaaaaaaaaaaaaaaaaaaaaaaaaaaaaaaaaaaaaaaaaaaaaaaaaaaaaaaaaaaaaaaaaaaaaaaaaaaaaaaaaaaaaaaaaaaaaaaaaaaaaaaaaacagaggggcaacccgcccggcgggcggagcccccgcaaaagcgcgaggcgggagacctccacccactagggggggcgcacacacgcaacctatattaaggggacgacacgcacaccactagagggagaggctggacagtataaaaagcgggcgcgcgggcggcggtgcagtactaacgaggagacgaggggggaggcgaggcagacacgcccgcggagcggacaccccaacgctaagaacaggaggcaggggacaggaaaaacctcccccgctgacggacaaggggcggacgcagaaaacggcggaacggcgcccggcaacatagggaacacgaacaagaaaggggagagaacgaacgaagagcaaggagggggagagagagccagaggcaacaccgacgaaaaagcgaaagaaaacaaggaaggagggaggaaggaagaggaccacgcggagacgcagacgacacaagcgcgcaagggccccggccgagaccagcggctcaaaaagggcggcgaagccaga

SEQ ID NO: 423 - DNA, 620 bp, Rattus norvegicus
tttttttttttttttttcccaagtgtccctttatgggcacacactttattgcacatacatttttgtacatccaggtcccaaacgagacaacgctcgctcatctttcagaccctcacagcgcacaaaggccctggcaaagggtaggcactcgataagtacttcttcagagcatgaccattcatgcgcctacgatctttctactgtacagcaggctgacagacagcagctccagtcccgtctgctctgcagaacacgcaatcacacagtctttgtgaatcttgttcactttccagatcaaggtgtccagtgtttcacaggcctttgcccgcacactgttttttgccacttcttcactgtgtttatccttaacaaaggattaactttagttcacatcagtggtgagaacccggcttttaaccctaggggagcatcccttcagtttctgtcacatataaacgctgtgtgtcgagaccgaaggtcgtctacgatcttctcttctatcaccatgcctcttgctacctcgtcctcagacagcaaaaactttgtctctgagtctttggttacaataatcacaaaggactttattgactccaggatattggccaccactacttgatgct

SEQ ID NO: 424 - DNA, 1219 bp, Rattus norvegicus
ctttttttttgtttttttttttttttttttttttttttttttttttttttttttttttttttttttttttttttttttttgagatttgagtatattttattcaatccggtattcccaaaatgtaattcaaagtatgatcaatatgtaaaggtattatccagtagacatttttaattattttcagttttcaaaatctagtatgtattttacatttactgtgtttatttggatgccaaattttgatttacaacatttctctttgtgatgagatttcacacgtgtacttgaataagtagctgtacccacccatgcctttccaactatactcaaccgccttccccagcaactgaactgaaaatttgtatttaaactaaacgttttgttcctctgctacactagtgatgtttcgatgtagtcggtgtggtggcccacagtggcactgcaagggcagctctgacagaactggtgtcacccgatcagacccgctctcagggagctgcagagctctgatgtagcactgactactgacgatctcctcagccttttctacgtaatgtaagtggccttgacttctccttgatgttctcctcacatgctacatttccttgtgaactttcacctgcattcagatttcaccagaacttcctctgttgggttaggaagaggcttacctggcactccaaaatcctcaagttagagctttctctgaggtgctaaactaagccccacaaacactgctgaagggggtgggggtatagctacgtatgtttcaaagcaaggttgaataggcctggggtgtgtattctcggggcttaactcttgaaacacaaaataacacacttattatgctgacactccagaaatagctttgctattctcagtgtgacctcgtcacaggccacgtgtgtataaagcaactgctaaccccagacactagactcagtgacagttatggggtctcctatttacctcacgtttgtgtgatccttaacatagtaaaacccagtgatcaaaacagatgctacgttaccgcaggtgaataattagccttgtgctcaaactactcaagaaatggagacagaggttttgagctgatcaagagtgtgccccagggctgctcccatcacatccgggctttcaactgcctggcttggtcctgaagctccattttggcaattgctgagagatgaacttcgtcaggaccgtctgccaagcgcag

SEQ ID NO: 425 - DNA, 685 bp, Rattus norvegicus
  misc_feature 680: n = A,T,C or G
tttttttttttttttttgtttcaaacatatttattatttttacagactctaaatgtactaatgatcctgcaatgcacactggtgtctgtgatgccaggttcagcatgaccatccaaaaggcacctgtctaggggaggcagctttctgaggggatccagaggagcagtggccaatggcaaatacctctgtgagcacactgtctgccctgtgctggggaagagcccccactatgtgtcgcctttggaccttggttgtgagcccctaagaatatttctcaggggattttgatcgacaggatcacactctgtggctcaagcaggcttgtaattctctacatagacaagcctgcctctgaactctcaatcctgctctccagtcttctgcgtactgagaatacaggtatacgtcactatgccccactcctagagaacagttctaaggtcaagacatgatcaagatgcccgtgacaccatggcagagtcatgccaagtttctgtggtttgaaaccttggatgtgagtctcatttttcaaacacacagctgcaatgcaaaaggcaccagaaggccaggcctggtgttaggaactgaagaagaggcccaattccaggtcagaactgtagcaaatgcactgtgatttccagccttgtggccgccatgcgactccaagttcttcagtgtgntctca

SEQ ID NO: 426 - DNA, 504 bp, Rattus norvegicus
gttttttgcatgagatttttaatgtttacaaagtaattcttctgctacaatattgttttaaagtaggaaatgtttaaaaaaggaaaatttataaggcatcaatataccctctccaaatttcaaggtttggattctgataatctgtacataatttggttaattactgataaagtagaaattacagtcatcgttttaatgagaaatgacttgggattctctggagctcttaattttcttataaaccagggaccagcaaaccgtttctgacgaagatcacagtagatacttagatacttgaggtgctgtgggtcatgaagtctgtgccatggccactccaagccatagggaacaagttccgctccactgcaggaaggctccataaaacattggtgtttgaactttagctgtcacatcaggaaaagttataaacactggtgcttaaacttcaggcaaccactgtattatgaaacattagtcttttcacctgcccgggcggccgctcga

SEQ ID NO: 427 - DNA, 554 bp, Rattus norvegicus
atttgacaaatatttattaagtgcctactatgtgacagacacccataaaacaactaaaaatagcgacattttaatgggtaaaattagactaccctgctcgtgcttttttttccagttctgaaagacttatagtgttcaaggtgaaaaattggctactggaaaccaggtaaggccctcacaatcacggtgtacgaaatatattcacacctgtcagataccactcgctaatgctgctgttctgagcataagctcatgcaaaaacctcgtgtatgttcttttgggtttcggtgacttcacaatttgctggaagaacatctatgaagaaaggtcttctcacaagatggtatcaggtcatggagatcaaattcggtctcgaaggaaggacttttttcaaaaataattaaggcagccagcacagccaattttgaggtcattcccttgatgaggtacttcgagccagtctcaaggtctgtgtattcaaagcaatgcaaaacaaaatggtaaccagaatgtgtgaagtgactctggtagtagacttggggacagaggaaata

SEQ ID NO: 428 - DNA, 629 bp, Rattus norvegicus
tcgagcggccgcccgggcaggtactgatcagagaggtctggggcttgcccaaggccgcacagcacagcacagcatggaacagggaaacctggaactcaaacccatgtcaaatttctcctccactatacatcctagaaagtcagacactcaactctaaagatacatgtgatgaagcagtctcaaaccggcggccctgaaaactgctttattaggcttggggatgtgtctattcatttcatgtaatttcattgttttgaaacagagtttccctctgtaaaaaaaaaaaaaaaaaaaaaaaaaaaaaaaaaaaaaaaaaaaaagaaaaaacaacaaaaaacgaagaaaacaacacacagatgacccaagatcgcgcggcgaacacacactccctaaagacacacagggcgcgggcagaattcaatcaccaaccaacgagccggcagcgccgcacataacgcggcgctattatagaagggccgcataattacgccaatagggggcgcgcgcgataacacaccgctgcgggcgcggccaaacaacccgcgggtgtacccacggcgaaaaccccgggtgcgccccacccttaactcacatggggacacacctccgtcgcgacacgtgcaacacgg

SEQ ID NO: 429 - DNA, 489 bp, Rattus norvegicus
agcgtggtcgcggccgaggtacagaaggctttctcagcatccagctactacatggataatttcatagtttcaaatttcctttcattttaaaaactgtcagaaagttataaattcaatggtggtttccgccaaacagttcaaacaacattatagattttttcataattttacttcaagtatgtaagtgattagattaacataatattcaataaaaaataaacacaagttctatctcatttctggtgccatgagacgtaacagcaccacatatttttaatgttagtggcaaactgtaatctaattaagcaccatttaagttggctgtccgtgagaacacagtgtgactcagtttactgagaggcaacagtcggaataaccctgtaggtgaggagacctggttccttcactagatcctggttcctggggagcactggggaaggacagggacaggtttccgggttcagtaccttgcccgggcggccgctcgaa

SEQ ID NO: 430 - DNA, 189 bp, Rattus norvegicus
acgagtggtccggcccggacgtgttctcttgggcctgcagttctcatgcatgtgcttatctggctgtgtatgatcagactccagagatgaattcatcagaggagcgcctggccaagctagcatgaccccttctctctctagcggtgccacaccatcatgtaatctgtacctctgtgacgcgaccacgct

SEQ ID NO: 431 - DNA, 542 bp, Rattus norvegicus
gtaggattattagttttcacatttctattggagggcaacagggaagggacggattccatcaacagaagcattcacaggttcttgagccattccaagcttggacccagaggttcctgtgggtggctgggcacatcaggcatgttcccattatctctcacaggcactgggtagttgtagggtgtggccttgttgatcatgctagcatactgggtgtaggggctaatcatgggcataattatagcgaggccccagacagtgaaggacaccaccagcaccggctcctttgcccaggcattcttaaggaaggcggagattcctagaggtgagaaaaaagtcgcccttggggactgctgcggtgacctctaacactctcgtatcaccctgctctgcaccctattggctgctgcgcccctcttctgggacggatcctaccactccccaaggctctactgagcctcagccacgggtcaagccacggtttcctggaattacatggtccccgcgcgcccagaacgcgtacttactagccctcgtgccgaatt

SEQ ID NO: 432 - DNA, 617 bp, Rattus norvegicus
ggcacaaggggtcgctttgcggagcgggatcgcgcgtaagtgaccggccccaggttcgggtgcgcgctgtcactctctggtaagctcgccggcgacatgtcggggtacacgcccgatgagaagctgcggctgcagcagctgcgggagctgagaaggcgatggctgaaggaccaagagctgagcccccgggagcccgtgttgcccccgcgcaggatgtggcccctggagcgattctggaataactttttgcgggaccgggccctgtggaagtacatgatcttcaaggcgtaccgcaccagtctcttcactgtttcccatgtgatcatacctctctggttcgtccactattacgtcaaatatcatgtggctactaaaccatatgccattgttggcacgaagcccagaatatttccaggtgatacaattctggagactggagaagtaattccaccaatgagagattttcctgataaacatcattgaagagctcttaaaaatttaaaaaacttgtgtaacagcacatgtatgttccaaaagtgctgtatttactgaatctatttcctagaaaagtaattaataaaacttattcctgtccttgtcacaaaaaaaaaaaaaaa

SEQ ID NO: 433 - DNA, 685 bp, Rattus norvegicus
tggcgtttgcccacaggaagatggcggcggtctcaatgtcagtgtcgctgagacaggcgttgttgaggcaaagggcagtagctacagctgcggtttccgtctgcagagttccatccaggttgttgaacacatcgacatggaagctggcagacggccaaactcgggacacccagcttataacagttgatgagaaactggatgttactcctctaactggtgttccagaagagcacatcaaaaccagaaaggtcagaatctttgttcctgctcgcaataacatgcagtctggagtaaacaacacgaagaaatggaagatggagtttgataccagagagagatgggaaaatcctttgatgggttgggcatcaacggccgatcccctctccaacatggttctcaccttcagtgccaaagaagatgcggttgcctttgcagaaaagcatggatggagctatgacgtggaagggaggaaggttccgaaacccaagtccaagtcttacggtgcaaacttttcttggaacaaaagaacaagagtgtctacaaaataggttggagctggctacatttctgcttgactgtgactgaagtgtcagctgtgcactatttatagtccatggataatgcaccccttaatctcctaataaatgtgacctttaaactacaggtacaaaaaaaaaaaaaaaaa

SEQ ID NO: 434 - DNA, 789 bp, Rattus norvegicus
  misc_feature 772: n = A,T,C or G
cagtagagcttaggaaaatgaatgactccaccacattcaagaggctttcaaattgtatacttggcatttctgatttcagttctgaaatttctgtcccttagtcgtggggaaaataagaaatggagttacaccttgtcatttaaaaaaccattgaattaagagaaatggaaaatcatgcccacataaaacatgtatggaagtgttcatgttttgatcatggcgggggatatagctcagtcatggagtgcttgcatagcaatgtgcataatccgaggttcaagccccagcaccgaaaaagagaatcgggaggagtggaggcattcacagcagcgttttcagtataggcgcaaaggggaaggagtttaaacacctactgaggaatggataagcggagtgccttgtctatactcgggatgctagtcatcagtagaaaagtttgaaatgatagatacgatggatgatcccttaaacatctccctaagtaacgaggtcagcctaggaaggcgtatgttccatatttctgggatatatgggctcaccgatgcagaaaaaagtacagcctggtatcctggattggagacacggactggactttggaagacaacagaatggaacagaatttacttgagtggcgatgttcttgaatgaacggaagtcatgcttgcccacttgatgactgcatttacaaaccactgaattttacttttagtgggtgaattgcatggtaccttcattttaatctcaataaagctgcgagtatttttaagcgaanaaaaaaaaaaaaaaaaa

SEQ ID NO: 435 - DNA, 638 bp, Rattus norvegicus
  misc_feature 75, 574, 583: n = A,T,C or G
gtctgggctggagctaaaggacacacagaagcaagtccacagatccgtgatgactcccacgggggcaggcctganggccaccatcttctgcatcctgacctgggtcagcctgacagctggggaccgcgtatacatccacccctttcatctcctctactacagcaagagcacctgcgcccagctggagaaccccagtgtggagacgctcccagagccaacctttgagcctgtgcccattcaggccaagacctcccccgtggatgagaagaccctgcgagataagctcgtgctggccactgagaagctagaggctgaggatcggcagcgagctgcccaggtcgcgatgattgccaacttcatgggtttccgcatgtacaagatgctgagtgaggcaagaggtgtagccagtggggccgtcctctctccaccggccctctttggcaccctggtctctttctaccttggatcgttggatcccacggccagccagttgcaggtgctgctgggcgtccctgtgaaggagggagactgcacctcccggctggacggacataaggtcctcactgccctgcangctgttcanggcttgctggtcacccaaggtggaagcagcagccagacacccctgctacagtcca

SEQ ID NO: 436 - DNA, 613 bp, Rattus norvegicus
cggcacgagggcactgagccagtgcacttcggttaccatcggttactacagtgagtctccatacacagggatacgtacgtcatacctggtggttgcttaagaaagttatgaagttacgtccatgattcttagctcctttcttcaaacgtttttccccctcctggtttttctgtgttctcctagcctaaagagcatttgactgggttgtgaggtacgtttatggagtagaagccaggggcaatgctttcgggcttgattgtaaccaaaagtcaacccatcgcagtttaaaaaaaaaaacaaaacatctttggtcttttgtggaatttgaactaaatctatgagccttattcgatatctataattctatgattttttttaaattacgggaaatcaatggaagatgtttacatgagtaatgtttgcccttaactgtgttatgaatgaattttttgtagtgtgtctgggcgcatgtgcaagaaagtaggaaaaatgtttctgaaacaaaacttgacaaatatttgtaatgaaaagtaaacttaaagattgctataatcgcgctatagaaacaatgcaagtattaaacaaaatgtccactcaaaaaaaaaaaaaaaaa

SEQ ID NO: 437 - DNA, 850 bp, Rattus norvegicus
  misc_feature 252: n = A,T,C or G
gctcctgtcgcgagacttcctgctcctccgccgctccccttatcgtcgcctagccggggacccggacccagcctctcccccacttcggtcaccggcccggctcctccaaggccccggttcccccagccccgcttcgccgccgccatggcggaccctaaatacgccgatctccccggcattgccaggaacgagccagatgtttatgaaaccagcgacctacctgaggatgatcaagcagagtttgatgcggantggaggagctgagcagcacaagtgtggaacacatgcatcgtcaaccccaacgctgcctatgacaagttcaaggacaagagagtagggacaaaggggcttgatttctcagatcgcattggaaagaccaagaggacaggatatgagtctggagactatgaaatgcttggagaggttctgggagtaaaggagacaccacagcagaagtaccaacgactactgcatgaagtccaggagctgacaacggaggtggagaagatcaaggtcaccatccatatactggcttctgagtgcagggctatgagatttccagagctggggagtacaaatctgtatttaatgctgctaaactcagtgctgttctaaaatctatccgggggctgtggcagtggtagctgggaagattaagagcactggttgctcctctggaagatccaagttctattcccagcatctgtaactccagtcccatgggatctgatgtccccttcaggcccctatggtcactgcatgcatgtagtacacagactgcatacatgcagatatataaagtaaataaaattgcctggccatggctttctttgaaaaaaaaaaaaaaaaa

SEQ ID NO: 438 - DNA, 117 bp, Rattus norvegicus
ccccgcccccctgggataagtgggaaagccccaatgtagggaggctctttttgcccatttttcccccctgagggccctcagttttaacaggaacccataaaaattgtttttaatttt

SEQ ID NO: 439 - DNA, 616 bp, Rattus norvegicus
aagatccttaaaagcagttttatacattttagaaaaatcaggactttccattcagaacacatctctgtttcctatactgttacactttcttatcacggaagccatgctgtacgccctactcaacaaaacttttgcaaaagatggccagcatcgggtgctgagcataaatcgaaatgctgtgggcaagcactttgacctgatgatcggcgacacgatgactagtgggagggagctagtgaagcagttcctctctgagtctgtgctgaaggagcagcctcgggtgttcttccccagggagcttgcagtgcagtacagacagaagattgtgaagagctcacaccggattgaggagctgtacgattcgttactacaagctgttgctttttacgagttagtttttggcagtggctcagagctcaaatgttaatgcactcactctatgttacactaatttattaaagcaactgttctcatcttctatgttagtggagaagaaaacattttgaatatattttccatgtttataaaatctgatttttggcttgaaaaaaatgaccccccccccaatcaatccacactttgtgagattcaaaaaaaacacaaaaaaaaaacaaaa

SEQ ID NO: 440 - DNA, 483 bp, Rattus norvegicus
  misc_feature 212: n = A,T,C or G
agccacacccatcctttctggtgagaccaaaattagggatgcttttcctgtcactagcatggactaacttccaccgcccctttggtattctctggacacttgttttttattaacttatgggaacattctcaaggagaaggtgagaaagaatggctgcttggtccctccctgcattcatccccagtgtcttaatttccaggctgtcaccaccntaaggaccttacatgtttgctacctccactgtgttgcagcgagccacctgtaaccagcagtggctgcctttatttaggctgtgggtcagaacgcacaggtactaattactgcccagcccgggagaccagattgcattgagatagtgagttgggcttaactgttgtgtgtacatctatgtcctgtagttctgtaataacttgctgtaaatgcatgaagcactatctttaaacccaagtaaagactgcctgaacccaaaaaaaaaaaaaaaaa

SEQ ID NO: 441 - DNA, 208 bp, Rattus norvegicus
ccccccttgacccaagcatcatgtgatggattcttcggaatttgcttttttggattaaggaagattaaagaccaaccctttaagaggggttttcctcctttttgaattggctggaaagggggggggacagaagacagtgtgattttttcagtgatttcctgaagtgttgtccctttccctaaatggggggaaataacccccatgccag

SEQ ID NO: 442 - DNA, 286 bp, Rattus norvegicus
cttgtcaggaaatcctcaggaaagttgaacggctttgccagtctctgacccaaacatgttttctgcctcatcttttataacctttcttatgttttacagtgctgccatggttcacatttcctgaatacagagaatacaaactataactatacacatacagtttgactccaggctctcacgcatgctaggcaaatattctcccatgaagtcatgttcttcagttctggatgatacggtgaagtcggtgcaaatgcatccgatcacaatggaaaaaaaaaaaaaaaaa

SEQ ID NO: 443 - DNA, 403 bp, Rattus norvegicus
ttgcccctgtggcatgagaacggccatcggcaacgtgtgagcctatgtacctggcggcgtgccaagaaagcttcacttttgaaaacagccagatatggtccgatgtctatagcctgccaacccccgatcagatgacccaccctccccaagccccctgcaaatggaagaatgtggaggactttacggttgactgttcagtgtctatcacactccagctgatagtgtaagccaaacaaactgcatgcttcccacggacacacgccttcctagcggatctcataactactcttccaacgaggtttccaccagggatcctgttagctgaagtaacacatgacccaattccaagttaataaaggaagatggaagctttcctagttcacattaaaaaaaaaaaaaaaaa

SEQ ID NO: 444 - DNA, 641 bp, Rattus norvegicus
  misc_feature 1: n = A,T,C or G
nccgaagctgacaaaattggactacagctggctgcaaaggcatgtgtggacgtaagagctagttcagtgttttggcagcagatggagttctcagagagccttcatggctaccccaagttgccagagtggctatcaacacatccttctcacgggaaccgagctgagtacttggacagactcataccacaggctctcaaacttcgggaggtctgtaattgcccaccactctctggaccagaccctcggttactgttcagacttactgtgaaacatttacttgaagactccgagaaagaggacctaaacatcactgtcaaaaagcagaaaccggatgctctgcccattcagaagcaggagcagataccactgacatacgcacttgggaaaagaactgcaggttgaactgaaccgaatgaatcttgggttccgtgaggagcacagtgagccttttcattcttatgcaactctcaaaaacgatgttttcaaggaaaaaaatggatgttcaaagatcaaatcatgtatattacagataatatccggatttttctagatttttatctttcatgaaatattgatgtgttttaatctactttaaaatactgccaacgaggacaatgtcacagaataaatcgatgttatgc

SEQ ID NO: 445 - DNA, 439 bp, Rattus norvegicus
caaagaactggttagacaaattagttttaaggccgaagtcaattcatttggaaagactatcgctgaatcagacttaacccagtctttctcactaaatgattcacaagacgatttacctacccagccagttcctaagaatacctccatgagccctcggcaacgtagagcccagcaacagagtcagagaaggtcgtctgcttcccccgatgtactccaaggccagccaccaagagccaaccacacggagcacggcgggtcagccatgctgatcatcatcctgactttggcactggcagctctcatcttccgacggatatatttggccaacgagtacatatttgactttgagttataatgctggtctatgacttcagagctgtgactcagttgcgtcattaaacattctgcattgggtataacctaaaaaaaaaaaaaaaaa

SEQ ID NO: 446 - DNA, 372 bp, Rattus norvegicus
aattgaaggcttagccaggaaggcagcgtttctgatggcgcctaccatctctccccctctggggtggaccttggcaacatgcagccacatccgctcccaggtgtggctgtcgatagggaacccgctcttgttcacgtggaacagcaccccgccgtctttgtcctcctcctccgagcccccgctagtggcgaggctcaccggccgcgcgtggctgctccgggaccgggtgcctttgatgcttttggggtgggggcagcggtgagtgtcggcggcggagccggtcatgttgaggggcacgcggcgagggggcggaggacgcgggtacgccggggatcagggccccgcgggggtggcctttaactctcgcggccg

SEQ ID NO: 447 - DNA, 482 bp, Rattus norvegicus
aaattggctgaccaagggattatcaactatccttattctaccagagaagttgtcaacattgtcaaacacttagagaaattccctactgaaggcctctccagtgtggttcggaatgtatttgactttgattcctacaacaacgacatgagggagattttgatgaacactttgcacaaatatgggatccccattggagcaaagcctaccaatgtgcagctggcaaaggagtaaggaaacccccgttggtataacctcaagcattgttcttctgactcctagctcctaatctactgtagtcactactaggctgacttggtgtggggaaccctccaggagtggtggtcttcagatgctactgtttgctggctggttctcagttaagtggcatcatttatagtcctgtaaattaaagatttcagtttttatgactatcccatgagtagatgtaacacactcaaataaagggaaatatttgtttcctt

SEQ ID NO: 448 - DNA, 475 bp, Rattus norvegicus
ttcaaagaaccgcagctggttgtacgtgcagccccagagcccagagtgattgacagggagggtgtgtacgaaatcagcctgtcccgtacaggtgtgtctagggtgtgtttatatcctggctttgtggacttgaaggaagctgactggatcttggagcggctttgtcaagatgtcccctggaaacagaggatgggcatcagagaggatataacttatccgcaaccaagacttacagcatggtatggagagcttccttacacttactcaagagtcactatggaaccaaatcctcactggcttcctgtgctgtggactctgaagagccgcattgaggagaacactggccacaccttcaactccttgctgtgtaatttttaccgggacgagaaggacagtgtggactggcacagcgatgatgagccatccctggggagctgccctgtcattgcttcactcagttttggtgccactgggg

SEQ ID NO: 449 - DNA, 624 bp, Rattus norvegicus
aagcccatgagcaaatgtttggaaaagaagtggtaatgttaaacttagaaacttgaaattttgacctgtaactttttatacttctaggtaatgtatatccgaccaaaaaccattttgccaaggtcttaaggtcaatactaaccaacattctgtatgtaaatttcgtgtgtgccctaaccaccattccatatgttaatttcatgtgtgcccgtggctttttggtagaaaaagatttccacattctgtatttgtaattatttttctcattacatatgttggtttggtattcaataatttggagtttgtaaaatttaaagttctaatttcaaccatttgaactaaaaagtacaggaggaattatgcctgtggttgttttggaacatacagacatgatggggaagtggtttctttggcttctttaggggaaattgcctgaaggactataaacgaggtatcttacttattcttacaaatacttacagttgtgtttctgtaagccccaggaaccctctaaagatgcaaccagcccctacaagggaccaccagaagtatttccataattataaacacttatttcctttattaataaagaccctgaatgtgcatcaaaaaaaaaaaaaaaaa

SEQ ID NO: 450 - DNA, 603 bp, Rattus norvegicus
ttaaaagatttactgatgagctgctggcaggaagacaggctgagagccagatttgagatggccataaataaaagagggtggggggaaaggtttcccaaagggaaaaccatggggaggctcacggtatctatgcaagcaggcagactctggcctgttctgccaagattaagtgggtaaagcaactggaaacaatctgggtgtctgcacacgcaagttacagaagctgaaaacggcctccatagccaggagaagctcacagctgtgcgtttctggggacccctgagccagggctgttttctgggaccccgtctttctggaattttgagtctatggcgagcagtcatcagtactaagatggagggaggcctagaaaaaaatagtttctcgagttggcctttacaccacgaactgattaatacaggtttttcttttgccctttgggggcaaattagtctaattatgttaattaaaggaaagtgtgggttttgtgtgaactgtatacttctctaaataattggacagaaattcataaaatttatgtttactgaatttataattttaaatacatcctttattttgaaatgtcaaaaaaaaaaaaaaaaa

SEQ ID NO: 451 - DNA, 623 bp, Rattus norvegicus
taatgggagagctctatcttgggtgtcaatgtgattagaaggatggctgtttggagggttttaacattgaagacaaaaaatccatgtttccctattttacatatctagtgctcccctacccaacattaaacctaaaagttgtcaaatactggtttgtcgttcaccgagtagctttcaccctgagaatggttagagaaacaggcaacagtcacatccataccaaggacagaagcagcttgagcaggagtgtaggtggtgccctgcagttatcggatgtcagttggtagcccagtttgtaacttagccaactgctttattgatttctagggttcctaataaaggcagactcaagagggaaaggtcttcaactgagctgggtttcccgtagttggtctctgtgaagagacagtctgtgatgtcttgagtctttggatggtggctcttccgcagctgccttggacttgaatccatgcagtcttcagagtgtagagttggtaccttgttgacgtcttcttactgtatcagtgaaatatacacattgtcatgtcggttcttgccatgaatttctcaatgaaagtggatttttttccagtatttcaataaatattgatatgtccacctgg

SEQ ID NO: 452 - DNA, 330 bp, Rattus norvegicus
  misc_feature 32, 128, 138, 140, 251, 284: n = A,T,C or G
caaccatctctagagtaagagtctggcttctntcttctttaggtcaaagcaggttacagaaatgctgcagtcatgcagtgaagcttttgtttctactctgcaggcccctaaatcatctgggccagggncaggcccccntntttccatagaaaccatgttggatgtgagctatgtcaaacgctagggccttttcccgtgtacacaagcacctcctagctagcaaaatctattggttagctggagacgctttngtaactttattatgcttatcaggtgaccacaantggcaatggtattttatttatggaccagcaccccaaccattttgaa

SEQ ID NO: 453 - DNA, 831 bp, Rattus norvegicus
  misc_feature 214: n = A,T,C or G
gttttgggcctgtaaacctgattgaaatggaaagcaggggtgactcattgccaggagaaggaaatgccatggaaggtactgtagtttctggagtcctttctgaggacacacagaccgtctggctctctgggcagaaacagatctacccactgcagtgacctgactgactgtgctcagctcttcgcctctatgaaatgtgccctgcctgtttgtntcatcctgtcttctgagagcgtggttcacagactttgtgtctgagtgaagggaacccaggttcagattccgtttctctgcttctgtctttttctcagcagcagggttaggaacaggccttttgtgcacatacaacagatgaagcccatggatgagtctgtgggaaacaccaacactcatgcaccctgtgggtggaccctccttacacagcgcagagcagagagagcccgggaggtgctgcaggcttcactgagctttccttgcccagactggcaaccgactttgctctcttttgaaagactctagctaaagtcagcgttgtttaaatccaagtgcatcacaagtctgtgacctgaactgtcttatggctgctgctgctgctgctgcttcttcttcttcttcttcttcttcttcttcttcttcttcttcttcttcttcttcttcttcttcttcttcttcttcatagctaattaaataccaaaaaataaaataaaaataaaataataaagctttgtagtatacttgtacttagtttggggaaaaaatgaaattgtaatgcatttgtatttccatttcttgcaaataaatatttttcttagtcaaaaaaaaaaaaaaaaa

SEQ ID NO: 454 - DNA, 676 bp, Rattus norvegicus
  misc_feature 39, 41, 59, 74, 75, 137, 170: n = A,T,C or G
agcccatatcgttgaatctttgagagaagtttgatctantnaacgaccagatttaaatntacgtgaacttatcnnttgattagtagtagttgtctgcgtatgggcaaactagtattcagatacagtttcaaggttangtatgaagctttgaggacctatgcatccctgantacccttccatttgtggctaccgccgttacttacaagctctttgtgactgatgctctgcaatcaggtaatataagccaggaaagctgtgttctgagaagctcactgatcggcgtagcctgtggggtctcctatcccagtgctttggctttttataaaaatggacgcttagcagttaagtatcacactgttccagtgccgccaaagggaagagttatgctccattggttactcctttgtcaaactgggatgaaagcaatggccgttcctctgttgtttcagataatatttggagtgtttaatggcttatatcactatgctgtatgtgaaaaagcatatgcaagaattgtgcctgatgattaacccaagaatcagtggaggctagttcagtagaatgaacctctttataaaaggtctttggcactggtgtaaaagtgaaaaggaactctgctactttcacctagcattatgagatcctcagtaattataaatgttataaatgttaaac

SEQ ID NO: 455 - DNA, 695 bp, Rattus norvegicus
aattcggcacgagggaagaatctgagtcagcaggagagcttttttttgcggcatctcaattttgccttaaggagcggaagaaatactggaaacagatatatattatgcaaaaagaagctgaatagcgggaatgagaagactaaagaggtgcgaatttctcctaggaagtgggatacaatgtatatcaccacatttttaaatgaactgtgcgtaagaacctgagtcatgttgaatggttcgaaatctcgggttttcagcttgagaaaatgaatacccatcctccctcctttctggattgtaatgaactctgagtgtgacttggcatcacaccttctatgtagattaaagccttgtaggttaaataaataaataaatctaagactggattatcaggtcaattgtttactcagtccctttactactaattttgaggtgaattttgagcctactgtcctgaaagtttaactacgtaaaatcagaagtgaattttagaagtgtagtgccctccagatcttcaagtacaaacaaaaactccaggcctgtaaattgtgatcactctttttaaaaaatcagctaaaatgcaaacatgtctctcagtacttgggccttcatctcctttgtaattaaatttaaaacgtggtttttaaaaatatgttgtaacaatcgtctttaattaaaaataaggtcgtaaaacg

SEQ ID NO: 456 - DNA, 582 bp, Rattus norvegicus
agacaacatgtcagctttactgaatatgcaaacaacgggctaaagcgcatccgtgtgaagttctatatcgagggctctgagccagggaagcaaggaacggtacacgcagaagtggaagagaacccgaggagtggccagtttgattttcgatatatatttgtggacgtggctcctaaaagatctattgttgttgaagataaccgtttccaacaaagttaaaagcctcaagccagtgcagtgcttcctgccgagaatgaagggatccgttctcactgcgatcctcacaactctcttccagaatttgttcaaaaaaacaagaataaagtatgtcacatggaaaggaggtgcaatgtgagtgagtgttcatgagtttggagaagcagatctttcttgtgaaaaatcatgagatgtagcaaattctatattatccttgacttgccgatcatgaccgtatttcagctctacattcatggtaaacctttgttactaaaatttatacaccacataagtaaaaccttcaatattttatgctatttaatattgtatggcttttatataatcaacagaataaagattaaacta

SEQ ID NO: 457 - DNA, 432 bp, Rattus norvegicus
gcaggagtttctgagtttgtcagtgatgcctttgatgcctgtaacttaaatcaggaggatttaagaaaagaaatggaacagcttgtacttgataagaagcaagaggaagcaactgcattagaagaagattctactgactgggaaaaggagctacaacaggagctgcaggaatatgaagtggtagcggagtctgagaagcgagatgaaaactgggataaagaaattgaaaaaatgcttcaggagagttaattgtctccccaagccagttcttaacgttgtgctgacttcaaattctgatgattgctgagtcagaaggcacaaaagtgtgtaactttatgcaatatgaaattattctttttctagctaaaacttgcctcttaaatgaacagctattgtaataataaaaaacaacaggatattgtaaaaaaaaaa

SEQ ID NO: 458 - DNA, 173 bp, Rattus norvegicus
  misc_feature 27, 46, 53, 122, 131: n = A,T,C or G
ggaaaatgaaggctttaattgaaaatntttcagactcctaaatggncaatganttcagaaagactcctggtttacctgttggcttgcagagctgagtttggctagtagaaatcaccagtatntagtaaatncctgactgtagtgctcattggtctccttcttagcctaattag

SEQ ID NO: 459 - DNA, 318 bp, Rattus norvegicus
  misc_feature 34, 46, 283, 290: n = A,T,C or G
gcctccgagctcagtttgacctcagcatccagcnatggcggcagtncacctggagtcgggcgcggtgctggtgtccgagtctcctgcaggtcctcagattaccagtgactaaacttgcacctaggcagaccagccatgagagccactcagcaggacttcgaaaatgcaatgaaccaggtgaaactcttgaagaaggacccaggaaatgaagtgaagctgagactgtatgcgctgtataagcaggccacagaaggaccctgcactatgcctaaaccaggtgtgnttgactntgtcaataaagccaagtgggatgcatgg

SEQ ID NO: 460 - DNA, 367 bp, Rattus norvegicus
ggcacgagggtgacataaggcttcatgctctcagatgggctttgtgtctttggagacccacggaaggcttgagtggtgtggattctatgcaatgcaggaccgatagacctgtgttctgtccatggcacacagtatcctctgttctgaggtgatggtgatgaggcactaggggatgctctgttgatctctcactcagaaacactacaaatgtcaacacaagaactgacacaactttgccttaaagagcaccagactgggattggtcgcattgtgttaataaggaagacctagagtgttcactgatgtttacgattttaatatttctgaaggccatcacagtggcctgggtatgtgctgaaagccaaac

SEQ ID NO: 461 - DNA, 580 bp, Rattus norvegicus
attttaggtagtttttttgtttgtttgttttgtttttatgagctggggtaaagctgtgactttggatcaaaacaaaagatccagagtttctaaatcaaagggatcctctgaggctaggactgagaggactgactgggagaggctgtgttcatgtgaacagctaacgggtttgttgttctttaagtacttagaagaagtcggtgttgatctggagtctcttaaagctcctcatactggaacactacctggctgcggaccaagcagaacagagcccagccgccctcctgtccacacagctgcccgctgctgtgaaccagaaccgactgcatgaggaactcactttacaaacagaaattgtaaaattttaagtgacattaatttgtataaaataacctgccctgctggaaaccagtgtttggatttggttcttaaatgatatttttggagtgaaaattagcactaaggtgatatatgactccagcaaaaatagtattctattgtattaatgggtactatattgatttgccaaattttgtgactcagtaaaggcattcccttccttgaaaaaaaaaaaaaaaaa

SEQ ID NO: 462 - DNA, 366 bp, Rattus norvegicus
  misc_feature 317, 336: n = A,T,C or G
caaaagctagaagaaaagcgagcctttgactctgcggtggcaaaagcgttggagcaccatagaagtgaaattcaggctgagcaagacagaaaggtagaggaagtcagagatgccatggagaatgaaatgcggacccaacttcgacgacaggcagctgcccacactgatcatttgcgagatgtcctcaaggtgcaagaacaggaactgaagtttgaatttgaacaggacctgtctgagaaattgtctgagcaagaattagagtttcatcgtcgcagtcaagaacaaatggacaactttactctggacataaatactgnctatgcaaggttgagaggnattgagcaggctgttcagagtcatgcagtt

SEQ ID NO: 463 - DNA, 763 bp, Rattus norvegicus
cccctcaacagggagcccagacaagcctgtactgtgccgtgacagaaggtatcgagggcctaagtggaagtcatttcagtgactgccagttggcatgggtctctagccaagctggcaatgagacaatagccagacggctatgggatgtcagctgtgacctgctgggcctccctatggattggtaagtagtggcagtttggctcaaaagaagattggaagagctgatgattgtccttcaaagtggccaaaaccttgaagatgaagaaggcagaacttcaagcctcgcctgcttggcatccagttaaatcccagtatactgccaggttcctctaaaccctttcagtttgtcctgacttattctgttcctgctcctgccagcgtttctagtagtatcatggactgagacagaggaccttcctatgacccacacagatcccattttcctttggaagctactcctaaccaggagcagaaagcgatataaaggctggtgtgtggcaacgtggattagatggagctcttcccagccaaccatcctttccttgtgctccattggaacctcaggtgaacctcaggagtccagtgacctggcccaagagcaggtctttgtggtcccaacatctggatacttaacaaaagttttcactaaatctggcagtttgaagcttttgataccaaaacacttttctatacccagaccacagaagagcttccttctctaagaagtttgtgaaatttgaagaacagaaataaaaataaagcc

SEQ ID NO: 464 - DNA, 299 bp, Rattus norvegicus
  misc_feature 21, 56, 124, 204, 271: n = A,T,C or G
ctgaacattcaccctattatnaagccatgaagcagaaacagactgaggtgctcttntgctacgagcagttcgacgagctcactctgctgcacctgcgggagtttgacaagaagaagctgatctntgtggagacggacatcgtcgttgatcactacaaggaggaaaagtttgaggacacatctccagctggtgagcgcctctttnagaaagaaacagaagagctaatggcatggatgaggaaatgcactgggggtcccgtgtcaccaatgtnaaggtgacttttccgccttggacaacca

SEQ ID NO: 465 - DNA, 407 bp, Rattus norvegicus
ggcacgagggttttttttttttcagttccgtgcagtgaaggtctttgttctgacagtgaatctcagttttattattattctcaagcaactgcaatttcctagcaggcaacactgtacttttctcggtcccctctgttttctaggcactgttcgataattatgccttctgtttcaatggagtggatgggcattgtttccttttgcaggacagcaggttactgggagcccttaaggtctgtcaacatcagttccatttgtaatggctaaagaatccacttgagaagttaagagggcttgagttacttcatgtgaacatctcttattagttaccaagttatattcacagttgaaatgtgtcaaaataaagaatcattctgtattacagatttcacaaaaaaaaaaaaaaa

SEQ ID NO: 466 - DNA, 236 bp, Rattus norvegicus
  misc_feature 111, 141, 226: n = A,T,C or G
caccactccccctcctcaagtaggcaggaggggaactcattccatgcctccctttctcactcagctgtatttacactctgtgcaaagggccaagttatttagaatgatggntctcaacctccctaacactgcagccctggngaaccccatcataaaattacctttgttgcttctgtacaactgtaattttgctactgctatgaattataacataaatggggaatgngcaggatatc

SEQ ID NO: 467 - DNA, 284 bp, Rattus norvegicus
  misc_feature 3, 5, 52, 73, 134, 147, 167, 185, 186, 200, 221, 229, 248,254, 260, 263, 270, 278: n = A,T,C or G
tantnaaaggagcttctctgtctaccctcctagtcctcgggacacccgaagnccagagtagggattcccggcnggcaaaaaggtgaccaggagccttccgggatgtctgagctggagaaaggccatgggttgcnctcattgatggtnttcccatcagtattcaaggnagagaaggttgaacaggnnacaagctgaagaangtccagaactgaaggagctcntcaccaangagctctctcattcctggnaggaantccaangancaggaantggtggcncaaatg

SEQ ID NO: 468 - DNA, 376 bp, Rattus norvegicus
ggtaagtgtaaaggtcaaagggcaactagaggaaatctgctatctccatccagcatttgggaaggccatcagaattggccgcatgtgctttccctgttgaaccatctctccagccctgaatagtcctagttattactgaggcagggtctactaggtggccccgattggactggaacttattacacagaccaagctggcccctttctgcttcctgagtgctgggattaaaggtgtgcaccataatgccaagcactaaatttaaagtcacacacttctgtagtaccaagtgacattatgttaccttattttgaattattaaatatactgtttttcaacatcaaaaaaaaaaaaaaaaaaaaaaaaaactctagcggcc

SEQ ID NO: 469 - DNA, 464 bp, Rattus norvegicus
aggagagctccatggacggttggattctttgctccagtggggcactagctgcacatgggtccttgaccatacatgatctgtgtctctggctggtaatgttgcctgcagcccacacacctccagggtccacactgagatatgcaaggtgaagtgcaggcaggatcagagatacccaagtaggttcaatgagactccagactcttcctctggcctgccttccggctgtaggtgtctgagtataaggggtttcatttctgtggctcacccccaaaactacaacgtgtagggcagatatcaagcctgaacctagtggggcacacaatcttctacaaactgcctgtttgctagggtcttgggctctggcagtctgtcagctcccagcctctatggctttgagaacgtcagagctgggtctcaccactaataaacaggtctgcacctctgagtaaaaaaaaaaaaaaaaa

SEQ ID NO: 470 - DNA, 576 bp, Rattus norvegicus
gaaggaagcagctcgggacacctcagccagggaagagcctccagcacccaagtctcctcccaaggccaggcgacaacagatggacctcatctctgagctaaaacggaagcagctgaaagacccactcatctatgagagtgaccgagatggggccattgaagacatcatcacagatcttcggaaccagccctacatccgtgcagacacaggacgctgaagtgctcgccggcgcccccctggacccccactgccggtcactgctgacctctcgctgtagccactgtttctgctggtggattctatagggccataggcaggttggagctcaaaggtggtggtccttagctcggctggatcgggcatctgctccttctagactactagccttgaagacccccccccaaaaaaaagctggtcccagcaccctctccctccaatagccataattagcctgagcgggatcctggcctgtaacttataaagtgcacctcgccgccgccctaactcggaggactctccttggaccttatttttatacaagattaataaagatgtttgcaaaaaaaaaaaaaaaaa

SEQ ID NO: 471 - DNA, 774 bp, Rattus norvegicus
caaaggtttttttttttagtatgcatgtgtatcccttttgtaattgcagtgtgttgggatttgggatttccacttcctcttactgcacatttaaaatttccaacctgctaagtgaatttgtggaccaaatttaaaggaactttatgtgtagctggttcttgctcaaggtgtttagtaaacaaactcagaaaatggattcctagcaatgttctatttatcagatgactgaccatttcctgtcgaaagttaaaacgtagagattgatttactacagcttgtgcaaagtctttgttccaaggtttgagtcgggacaggagcttcagagcctggcaggattgtcagctgtcttctgacatcatctgtggggcaagggtcacaaggagtgacttgtgttcctgtgctctgggacacagagctagtcatcattcagccaatgttagcatagttcctagaagtagactcttgacacgcattcactagtttatgctaatttgttcttgttttaataataatttgttcaagtttttttttgtttgttttgtttcttagactaaatacagagttggaataaattagataaagcaatctagtggttaaaatcccatttgtattttattttctggaatatgtttttcatggttacttgttttaaaagattttaaaaaatcattgcactttggtcagaaagataataaatatatcttataaatgtttgattcccttcctgcttgctttttcaataaagtttgaaagtccaagtgattttctttctct

SEQ ID NO: 472 - DNA, 566 bp, Rattus norvegicus
ctccctttgactcctgcctgcctttgaagatatttttttaatttgtttttttttgtttttgtttttgtttttgttttaagcatcgttttcttaggcgatggtgggggggattgaaggaaagaaagactgtgttaaagattttaatgaaagccgacagcacgagttggttatatctttttgttaaacttggccacttgaagtcttgtatagaaaagaaccaaaggtgtaacgttctgttcgcatgcgatttcaggacccggactctaaccagcacgttgacttcgaggactgtttggaaggacacatgtccatgtcctgaggccccacccttgtctgtcgtggtactatggcaacgtccttgtgtacatttccctgaaaagtgactttgtatctgtttgtatgagaaactcagtaaccagaaaatgactgcatgttcctgactaaatgtagaaaggagtatgcacactgtttttactttttaaagtttcattctaaaagtagtttaagatgaaatttatatgaaaacatttttatcacaaaataaaaagggttccctgtcaaagctc

SEQ ID NO: 473 - DNA, 643 bp, Rattus norvegicus
acgtccaggctttggggggtccccaagagttgcgaacggcatcgtgcagccttggagcacggggaggggtaactgctctgtccatcttgccctggctgggtacacggctcaggaacactcagcctcccagtgtttaatattttagtgtatcactgtttcacccaagtccccaatggaactacccatatgacaatctgtctgtgccttatggaattgagtgtgtgtgtgtgtctgtgtctgtgtgtgtgcacttttatcctttaaagtgcaacccttcaatgtggacaagaagctagcatatgcggttgggctccagacatcatcagggagtccttgagaccgtcttgcggattgcggttggactgaaagtattcatccccacccatccccactagctgtgtacagaccctttgaaacatgtctgtcctttctggttcaatactgtggctctccaatactgtctactctttggggaactgtactaaaggcctgagagcttggggagtgagcttgggaagggtttgcgctggtctttgtgtgttgtgtgttctgatatttgtctgtttttatctgttttatattaacataactttcctgtttgaaaacaaataaaactttggcttggtacaaaaaaaaaaaaaaa

SEQ ID NO: 474 - DNA, 550 bp, Rattus norvegicus
ggtacagatgctaggcgagtttcaggtagaggaaggtcccgtagggcacacatgcttgccccacgcacatgctcctcacagagctagagagcttccgagtgggaatgcttgactcgagactcttccctccaggtgggaatccatgcttctgatttggggacccccctcttgagggccacccctattgtttgcatgcctttatcatgataattaaatgttccgggcagattcatctccgggtttccaagcatgattgtacacatcttaccttactgaatggaaagccattttgcatctgtcgagcccacactcgagctctgggttctgccacgtgctatttatttaccatatcacattttaaatttttatgtaattagccattatgcccttctggtcctttaaaagaaaaaaaaaagggtggacacacataaagaacctagggatgagacgtatgttttaaatctaatagttgtgggtccgaaccacggcgaagggaacaaataggcaatgtttattttgtgctataataaagaccaattttccacctgtt

SEQ ID NO: 475 - DNA, 446 bp, Rattus norvegicus
agtattgcacttgctctgggaaatgcacagaaattgccaaaaggtaaaaagccaagcctgaaagtgcacatcaataccaccagcgactccgtcctcttgaagttcctgcgtccaaatccgaacgtaaagctggaaggattcctcctgggatatggcagcaacgtgtctccaaaccagtatttccctcttcccacagaaggaaaattcacggaggctgtggttgatgcagagccgaagtatctgatagtcgtgcgacctgctcctcctcccagccagaagaagtcgtgctcaggtaaatctcgcactcgcaaacccctccagctggtggtgggcacgttgacaccgagctccgtcttcctgtcctgggggttcctcatcaacccccaccaagactggacattgccaagtcactgttccagtgacagattttatacaattcgatatag

SEQ ID NO: 476 - DNA, 541 bp, Rattus norvegicus
atgcagaagccacgcccatgctgaagactcttagcaacgccacaatgcactttgtctcagaaaataaaaccctgcccatagagaataccacagactgcctcagtacgatgacaagtgtctgtaaagtcatgctggagacaccggagtacaggagcaggtttacaagtgaggggacactgatgttctgcatgagggtgatggtgggggtcatcatcctctatgaccatgtgcaccccgtgggagctttttgcaagacatctaagattgatatgaaaggctgcataaaggtgctgaaggaacaggcgccagacagtgtggaagggctgctgaatgctctcaggttcactacaaagcacttgaatgatgaatcgacttccaaacagattcgagcgatgcttcagtagaaccctgctcagagaggaggatctgtgctgacctcagatgtatatgtttacataatttaatacagattgatgttaatacttgtgtatttacataaccatttccttcttgtcactgaaatatatggaccttaatttgt

SEQ ID NO: 477 - DNA, 371 bp, Rattus norvegicus
tgccagagtctctcttaccatgagtaaatatttggattatttaaatctagactagtggttcttcccaggagaatttagagatgggaagtatagataatattttaagttattgaaaatagatgttctaaatcataacaaagattgggctatttttcatagcttatttagtttaaattgtggtatgtttttgctgtatattgtttctaaatattttgtatggtttgaaaactgtcttttatgagattcagaaaattcacctgaccatattttgacctaagaagtttatatttatatcagtattgaatttggctagtattctcctatatgaaagttattattttaaaataaaccaagccgttgaattttctttc

SEQ ID NO: 478 - DNA, 871 bp, Rattus norvegicus
tgaaattcaccacacttgagaggaaaacgagagctgcctccatccatcttgactagtttgttcacttttaagaagccatttcaccagctattgagaagtcagacagcatttgttaaacctgccttgactccaagcctgctccattgaaaatttatacattgaatatggactcacttgtacatagaatcatttcttcaatcaagtgtaactctaagtaacgtgtacatttgcaggctctgcctgcctttgtaataatggatgtcatcactgttgctaggataccacattcctcatttgagtgcacagatgaacaagtcttttaattctcaccttacatgaaaggttagctgagatacaatgtctgttatattaaccatatcatgtctaagttattaggttgaatatttgtaacttattgttattaggcatgtcatacagtttagggtattcgagtaatcatatttaacattaaaactcagatttaaagtactgccaatgaggtcttagcactttgggtattttaaattgttcttatgggtcgcaggagatagttcagtgttgttgggaagttgtttgccagatgtactgagtggggtttttgttttgtttgtttttgctttttgttttatttggtgagtggtccagagctctgagctacttttctagacatttgaaacttcctcccaggtgctttgcactctttgctgattgcatccaaccttttgtgtcccatgtctgcagcacacgcaggccattcctatttattgtgcatagtcactttcaataatagtctgaactgatatttttttaaaaaacaaatccatgtaagggctgaagtcatgacttaataaagttaaattgtttatttttg

SEQ ID NO: 479 - DNA, 2900 bp, Rattus norvegicus
ctgaactcctgcttgccagtcgccggtcaggagcctcggagccgccacaatggggatgtccaagtctcggggttgctttggctacccattgagcatcttcttcatcgtggtcaatgaattctgtgaaagattctcctactatgggatgcgagctctcctggttctgtacttcaggaacttccttggctgggatgatgacctctccacggccatctaccatacgtttgttgccctctgctacctgactccaattcttggagctctgatcgcagactcgtggctggggaagttcaagacaattgtctcactatccatcgtctacacgatcggacaggccgtcatctcagtgagctcaattaatgaccttacagaccatgaccacgacggcagtcctaacaaccttcctttgcacgtagcactgtccatgatcggcctggccctgatagcccttggtacaggaggaatcaagccctgtgtgtctgcatttggtggcgatcagtttgaagagggtcaggaaaaacagcgaaaccggttcttttccatcttttatttggctatcaacgcaggaagcctgctctccacgatcatcactcccatactcagagttcagcagtgcggaatccacagccaacaagcttgttacccactggcctttggggttccggcagctctcatggctgttgccctaattgtgtttgtcctcggcagtggaatgtacaagaagtttcagccccagggcaacatcatgggcaaagtggccaagtgcattggctttgccatcaaaaacaggtttcggcaccgaagtaaggcatttcccaagagggaacactggctggactgggctaaagagaaatacgatgagaggctcatctcgcagattaagatggtgacgaaggtgatgttcctgtacattcccctccccatgttttgggccttgtttgaccagcagggttccaggtggacactgcaagcaacgaccatgactgggaaaattggaacaattgagattcagccggaccagatgcagacggtgaacgccatcttgattgtcatcatggtccccattgtggacgccgtggtgtatccgctcattgcaaaatgtggtttcaacttcacctccctgaagaagatgaccgttgggatgttcctggcatccatggcctttgtggtggctgcaattgtgcaggtggaaatcgataaaactcttccagtcttccccagcggaaatcaagttcaaattaaggtcttgaacattggaaacaatgacatggccgtgtattttcctggaaagaatgtgacagttgcccaaatgtctcagacagacacattcatgactttcgatgtagaccagctgacaagcataaacgtgtcttctcccggatctccaggcgtcaccacggtagctcatgagtttgagccgggtcaccggcacacccttctagtgtggggccccaatctataccgtgtggtaaaagacggtcttaaccaaaagccagagaaaggggagaacggaatcagattcgtcagcacccttaacgagatgatcaccatcaaaatgagtggaaaagtgtacgaaaatgtcaccagtcacagcgccagcaactatcagtttttcccttctggccaaaaagactacacaataaacaccacagagattgcaccaaactgttcatctgattttaaatcttccaaccttgacttcggcagcgcgtacacctacgtgatcagaagtagggcgagtgatggctgcctggaagtgaaggaattcgaagacatcccacccaacacggtgaacatggccctgcagatcccacagtacttcctcctcacctgcggcgaggtggtcttctctgtcacaggactggagttctcctattcccaggccccgtctaacatgaagtccgtgcttcaggcaggatggcttctaaccgtggccatcggtaatatcattgtcctcattgtggctgaggcaggccacttcgacaaacagtgggctgagtatgttctgttcgcctccttgctcctggtcgtctgcatcatatttgccattatggcccgattctacacctacatcaacccagcagagatcgaggcacagttcgatgaggatgagaagaaaaagggcgtagggaaggaaaacccgtattcctcgttggaacctgtctcacagacaaacatgtgaagatcagaaagcaagtggagaacataccaagtccagcattcaccatgacctctgcccaagggacaggaccctccaccacagagtccttgctggagaaagacttcagacatgtgagccaaaataataacaaagcaggttttcaggctgacggctgtgaatctgaaactctaggggagcctttttaatttgtttttcttgagacaaggtatctctgtgtaaccctggctatcctggaactcactctatagaccaggctggcctcgaactcacagatatctgtctgcctctgcctcctaagtactgggattcaaggcatgtacggcaactgcccagctaaaatattatttataacatgcactttctgggttttttgtttttaaaacatacttttttttttaacactgggccatttctaacatttctgccacagaagtggatttagctcagattaattttgaaaaggtaacagtactgttttttttccttaatgctcttatgaaaacaatgttgaatttacagagggcttttttagcagtgtgtagtgagtgtcagctgattcgagctaataaccttacctcggggtttttgtttctttgttttcctggtctcctttgcctgacctctttttaaattatgtgtaattcaaaagactattcaagtgatggttagtcatgagtcgtgacgtttgactggtgtgaagtaaattcttgttcttaag

SEQ ID NO: 480 - DNA, 882 bp, Rattus norvegicus
ggctcacggttggttctgtttgtgagacctgtagctcgactctgctgatagcaagatgtcttcaggaaatgcaaaaattgggcatcctgctcccagcttcaaagccacggctgttatgccggatggacaattcaaagatatcagcctaagtgattacaaaggaaaatatgttgtattctttttttaccctcttgactttacttttgtgtgtcccacggagatcattgctttcagtgatagagcagaagaatttaagaaactcaactgccaagtgattggagcttctgtggattctcacttctgtcatctggcatggattaacacacccaagaaacaaggaggattgggacccatgaacattcccttggtatcagatcccaagcgcaccattgctcaggattatggagtcttaaaagctgatgaaggtatctctttcaggggcctctttattattgatgataaaggtatccttcgccagataacaataaatgatcttcctgttggccgctctgtggatgagattctgagactagtccaggccttccagttcactgacaaacatggtgaagtgtgcccagctggctggaaacctggcagtgataccatcaagcctgatgtcaataagagtaaagagtatttctctaagcagaagtgagcactggaccagttttctggcagacagctttgagcagccagaagaaatttgtactctacacatgacgtggtgtgattccagataagcctttcctacaagggctaggggtggttagcctttcttccactattggtaaggggcagaccatcttatatcagtcacagaaaccaacctgttaattctctctctctcttttttttttttaagtatctattaaacgtgaattc

SEQ ID NO: 481 - DNA, 6264 bp, Rattus norvegicus
attccactgttggagcttgagggagtgaaacaaacagaggaactgtgggcgaggactggaggcttggggctcactttttcctccgggctatcggattttcttagcaaactgacgtaggaggagaagttctcaggagcgatggggacctcccaggcctttctggtcctcagctgtctcctcacagggccgagcctcatcgtctgccagctcttattaccctccatccttccaaatgagaatgagaagattgtgccgctgagttcgtccttctctctgagatgcttcggggagagcgaagtgagctggcagcaccccatgtctgaagaagaggaccccaacgtggaaatcagaaccgaggagaacaacagtagcctctttgtcacggtgctggaagtggtcaacgcctcagcggcccacaccggatggtacacttgctattacaaccacactcagacagaagagagtgagatcgaaggcaggcacatttatatctatgtaccagacccagacatggccttcgtgcctctcggcatgacggattctttagtcattgtggaagaggacgattctgccatcataccctgcctcaccacggatccagacactgaagtaaccttgcacaataacgggaggctggtgcctgcctcctacgacagcaggcagggcttcaacggaaccttcagtgtggggccttacatctgtgaggccaccgtcagagggaggacgttcaagaccagcgagtttaacgtttatgccttgaaagccacgtcagaactgaatctggagatggacacacgccagactgtgtataaggcaggagaaacgatcgtggtgacctgcgccgtctttaacaatgaggtggttgacctgcagtggacttaccctggagaggtgagaaacaaaggcatcaccatgctggaggagatcaaactcccgtccatcaaactggtgtacacgctgaccgtccccaaggccacggtgaaggacagtggagattatgaatgtgctgcccgccaggccacgaaagaggtcaaggaaatgaagacagtcaccatttctgttcacgagaaaggcttcgtccagatcaggcccacctttggccatctggaaactgtgaacctgcatcaggtcagagagttcgtggtggaggtgcaggcctacccgacccccaggatatcctggctgaaggacaacttgaccctgattgagaatctcactgagatcaccaccgatgtgcagaggagccaggagacgaggtatcaaagcaaattaaagctgatccgggctaaggaagaagacagcggccattataccattatagttcagaatgacgacgacatgaagagctacacgtttgagctgtcaactctagttcctgcctccattctggagcttgtggatgaccaccatggctctggcgggggacagactgtgaggtgcacggctgaaggcacccctcttccgaacatcgagtggatgatctgcaaggatattaagaaatgtaataatgacacttcatggacagttttggccagcaacgtctcgaatattatcacggagttccaccagcgaggcaggagtacagtggagggacgagtgtccttcgccaaggtggaagagaccatcgcagttcggtgcttggcaaagaacgaccttggcattgggaacagagagctgaagctggtggctccctccctgcgatctgagctcacggtggcggccgcggtgctggtgctgttggtgattgtcattgtctctctcattgtcctggttgtcatttggaagcagaaaccacggtatgaaattcgatggagggtcattgagtcaatcagccctgatggacatgagtatatttatgtggaccccatgcagctgccttacgactccagatgggagttcccgagagatggactagtgcttggtcggatcttgggatccggtgcatttgggaaagtggttgaaggcacagcttatggattaagccggtcccagcctgtaatgaaggtggctgtgaagatgctcaaacccacagccaggtctagtgagaagcaagctctcatgtctgagctgaagataatgactcacttgggaccgcatctgaacattgtgaatttgctgggagcctgcaccaagtcaggccccatttacatcatcacagaatactgcttctatggggatttggtcaattacctgcataagaacagagatagcttcatgagccgacacccagagaagccaaagaaagacctggacatctttggattgaatcctgcagatgagagtaccaggagttacgtgattttatcttttgaaaacaatggtgactacgtggacatgaagcaggctgacaccacacagtacgtgccaatgctggaaaggaaggaggtttccaaatactccgacatccagagatcgctgtacgatcggccggcctcctataagaagaaatccatgctagactcagaagccaaaaacctcctttcggatgatgactccgagggtctgactttgctggacctactaagcttcacctaccaagtggcccgagggatggaatttttggcttcgaaaaattgtgtccaccgggacctggctgcccgcaacgtccttctggcgcaggggaaaatcgtgaagatctgtgacttcgggctggccagagacatcatgcacgattctaactacgtgtcaaagggcagcactttcctgcctgtgaagtggatggcacctgagagcatttttgacaacctctacaccacgctgagtgacgtctggtcttatggcgttctgctctgggaaatattctcccttggtggcacaccctaccctggcatgatggttgattctactttctacaataagatcaagagcggatacaggatggccaaacccgaccatgccaccagtgaagtctatgagattatggtgcagtgctggaacagtgaacccgaaaagagaccctccttctaccacctcagcgagatagtggagaatctgctgcctggacagtacaaaaagagttatgaaaagattcacctggacttcctaaagagtgaccatccggctgtggcacgcatgcgtgtggactctgacaacgcgtacatcggtgtcacttacaaaaatgaagaggacaagctgaaggaatgggaaggaggcctggatgaacagagattgagcgcagatagtggctacatcattcccctgccagacattgaccctgttccagaggaggaagacctgggcaagaggaacagacacagctcgcagacttcggaagagagcgccatcgagacgggttccagtagttccactttcatcaagagagaggacgagaccattgaggacatcgacatgatggatgatattggcatagattcctcagacctggtggaggacagcttcctgtaactggcaggctcggagtgtctatcatcttctctgggagcctcctcgggatccccttaagaaaaccacttcattgcaatgcaaaggttgagacttgggtgatgtggagacagaagttcccggccaagggtcttgggaagcctctgtgaatgactgggatactcggatcgaacgttgtccatgctgccccttgcaatccgtcagtagcatctcagcggcgtgtgaggtttggaaatggacggacaagggagtgactggccacagaagacgggctttgtgtttccggggcattggtgagattcccacacccaacttgtactgcagacaactccagcattgtaattatgtaaataaccctagccgaggacgtgttagatctgtgttaaccctcctctctggacctctgaagagaccactcagtacatccgtgtgcttccttccctcttggaatctcgtgtaccagctgctgttgaatttttctcctgaagtacatgcaaaaccactttgaactttggaaggtactggaatgttgtgttttactgtcttattagtgttaaagagggcaaaagataaaagactaaccaaccttgtgtagtagatttgggtcccttaggagcccaagaacgaatgttctgtatcttgtaatctatacatataacaccactactgttaacaataatgctaaagatgtaatccctaacctgatttctttacagagaaagcacaattaattagaacaaaacccttactaagtagatgacgagtttggcagttttttttttaacatttatattaagtaacatgtttctcaataaaatataataggtttagtggtttaaagttagcaagccctagagagcagagtgtaagtagtgttgtccagaaggccaaccttttgttgtagtgttctaagctgtttccctaatccaaggccctaagaacagttaatcgcctctgagttactgggattagaaataagcaaaacagaacccccgggtgtcctaaatgttcttagtagaaaggcttaagtctgagcccagtgtgacttctcatgctgtgtgtgaccttgtggaaaagaaccgtccacaaaaaggactccggtgggcagaagtatcttttgtggccagtgatgacttggatggatcccacccatacttaccttttaaatctatgacctcttaaggatgcgtcaacatcagcgcctcacttttcctctcttgtctcaaagagaaagagctgggaaccctgaaaccacggtggagctgaagattcgaaggctatgtgggcgtgaactggctccttcattcccaccgtttgcaactagggtcacaagcctcagtggtttcagacctccgccccagagatctggaattacgaggtctgacgggagcaagaagctatattatgttttaattaactccttggcgctcttgaggagtcagtgttcagaaacgctggcttgggttacaggggtttgctgcgggtggggcagggcagccttgaaaattggaactgagctagaagtcgaccacgcaggaaggctactatttttaagtccttggcttcatgtcaatgccacgtatccagcaattcctgcccttgattaacttccagcttagccgaggctgagaaaacaagatcttggcttgggcacatcttccagttctagtcagcgtgggtaccacttcccaccggatggaggacctgagctcgctcacctcaaagagggcccacaaatggtgcaagcccgtgtgccaggtctgtgtctaaccagctccggaaccggtggggaagataaaaaggtttctggatttgggggctttaggtgggaggctatcacaagcatccaaactgccaaactggttagtgtgggttcattggcattctctgcaatgtgtctaattgctgactctgtatgaatgaaacatggggtatgattaactgcaatcactgtatgcacttccagcaggtgatgctttggaaggcgcagaagcaataacaaggtacttgactacctactggcataatctcaatgcaaaccccaactttccccctctcacagtcagtgtgaggactgagccagattggccaattgagaagcaaaaacctgactagattcttttgagccaattagacttgaaatacgcccatgtttctagactcgcagctcaagtggtctgtttaccacgcgtttgcacagccttggttttgttgcttccttttactctaatgtctgtcacttgggaccttgcatgacaatttgaggttggaggaagcttctcagaccgacagtttggccatccctaccagtacttgcctctgagattaaatgggattgcattcgttttgtttctgagacagggcctctctatgtagccctggctgccctggaactcactgtgtaaaccaggctggccttgaactcccagagatccattgtctctgtccccccagggctgggattgctggtgtgtaccaccacactcagcagggatacatttttattttcaaacagtgttttgactgtatcctggtttctttttggcctctgcagagtcctggaagaaatttaccaattttctctgctttctattcttatttttatgatgacaatcaaagctggcccgaagaacacaatttgtgacttttttttttttaaataatcagtgatgtccttaaaatgtggtctgccaacctgtacaaaatggtcctatatttttgaagagggacgtgagataaaatgatgttatacatcgatatgtatatatctgttgctatgtagacttggagaatactgccaaaacgtgtatgacaagctgtatcactgcctttgtttatatttttttaactgtgatattccgg

SEQ ID NO: 482 - DNA, 1580 bp, Rattus norvegicus
ctaatcggtgggacgcacctccgcgatgcatcggctgcaggtagtgctgggccacctggccggccggtccgagtcgagctccgcgctgcaagccgcgccctgctctgcgggcttcccgcaggcctcggcctccgacgtggtggtggtgcacggacagcgcacccccatcggccgcgccggccgcggcggcttcaaggacaccacccccgacgagcttctgtcggccgtgttgaccgcggttctccaggatgtgaagccaaagcctgagtgtctgggagacatctccgtgggcaatgtgcttcagcccggggccggagccgcaatggcacgcatcgcccagttcctgagtggcatcccagagaccgtgcctctgtcagcagtcaacagacagtgttcatcgggactgcaggcagtggccaacattgctggtggcatcagaaatgggtcttacgacattggcatggcctgtggggtggagtccatgaccctgtctgagagaggcaaccctgggaatatttcctcccgtcttctggagaacgagaaggccagagactgcctgattcctatggggataacctcggagaatgtggctgagcggtttggcatctcacggcagaagcaggatgccttcgcgctggcctctcagcagaaggcagcaagcgcccagagcaaaggctgcttccgtgctgagatcgtgcctgtgacaaccactgtcctcgatgacaagggtgacaggaaaaccatcaccgtgtctcaggatgagggtgtccgccccagcaccaccatggagggcctggccaagctgaagcctgccttcaaggatggaggctctaccacggctggaaactccagtcaggtgagtgatggagcagccgccgtcctgctggcccggaggtccaaggctgaagaactgggcctccccatccttggcgtcctgaggtcctatgcagtggtcggggtccctcctgacatcatgggcatcggacctgcctatgccatccctgcggccttgcagaaagcagggctgactgtgaatgacatagacatctttgagatcaatgaggcctttgcaagtcaggccctctactgtgtggagaagctgggaattcctgcagaaaaggtgaaccccctggggggtgcaatagccctgggccaccccctgggctgcaccggagcaaggcaggtggtcacgctgctcaatgagctgaagcgccgaggcagacgggcttatggcgtggtgtccatgtgcatcgggactgggatgggagccgctgctgtctttgaataccctgggaactgaggccctgactgcaggcactacccagagagtcctatagtagtgtctggagagggatggtacagaagccatcttcgtgggacactcagcagtggagggatttgtcacagcactttaatttagaaaatgtaatcgcaatacgggcacaagggcatccaatccactcctctcagttgaaccaaagacagcgcacgtcacacgtgaccacaggacaacatgtttctgagggacagtggcctcatgaatagtgggcatgaggggcatagtaaatgtatgttatctc

SEQ ID NO: 483 - DNA, 1619 bp, Rattus norvegicus
taaccttggccccggcggcgcgggggggggggggggcagggatggaaaagtaggggaaagggcaggggcgcggcctctcggggcgccgccacactattaaggctgggctagggctggtggccgagtgaagctgtgagagacccgtggaataactgagcttcgtcatggcgctgctacgaggtgtgtttatcgttgctgcgaagcgaacaccctttggagcttatgggggtcttctcaaggacttcactgccactgacttaactgaatttgctgccagggctgccctgtctgctggcaaagttccaccggaaaccatcgatagtgtcatcgtgggcaatgtcatgcagagctcttcagatgcggcgtacctggcaaggcatgtgggtttacgtgtgggagtcccgacggagactggggccctcaccctcaacagactctgtggctctggtttccagtccatcgtgagcggatgtcaggaaatctgctcgaaagacgctgaggtcgtcttatgtggaggaaccgagagcatgagccagtccccctactctgtcagaaatgtgcgcttcggaaccaaatttgggttagatctcaagctggaagatactttgtgggcaggattaacggatcaacacgtgaagctccccatggggatgactgcagagaacctggctgcaaaatacaacataagcagagaagactgcgacagatacgccctgcagtcccagcagaggtggaaagccgctaacgaggctggctactttaatgaggagatggcccccattgaggtgaagaccaagaagggcaaacagaccatgcaagtggatgagcacgcccggccccaaacgaccctggagcagctgcagaacctcccgccagtgttcaagaaagaggggacggtcacagcagggaacgcctcgggcatgtctgacggtgctggggtcgtcatcatagccagcgaagatgctgtcaaaaaacataacttcacaccactggccagagtcgtgggctactttgtgtctggatgtgaccctgctatcatggggatcggtccagtccctgccatcactggagcattgaagaaagctgggctgagccttaaggacatggatttgatagacgtgaatgaagcatttgctcctcagttcttggctgttcagaagagcttggatctcgaccccagtaaaaccaacgtgagtggaggtgccatagccctgggtcacccgctgggaggatctggatccagaatcaccgcacacctggttcacgagttaaggcgtcgaggtggaaaatacgcagtgggatcagcttgcattggaggtggccaaggcatctccctgatcatccagaacacagcctgaagggattgcaagcatcctacccaccctcacttggccaggctacggaacacaggcgacctttgagtcagccctgctgtgacagtaaatgcatttgaccaagccttgatgggttctgtctacttcatacctgcctagcgtgttagaataaaaagaccagccatcagaggcctttagagatacctactggtgtcattgtcagcagccaccactgtatgccttacatggtgaaattacaaactgaataaatgttgccttaactcc

SEQ ID NO: 484 - DNA, 3327 bp, Rattus norvegicus
aacggcgggatataacatgagctgtcttcggtatcgtcgtatcccactaccgagatatccgcaccaacgcgcagcccggactcggtaatggcgcattggccccagcgccatctgatcgttggcaaccagcatcgcagtgggaacgatgccctcattcagcaatttgcatggtttgttgaaaaccggacatggcactccagtcgccttcccgttccgctatcggctgaatttgattgcgagtgagatatttatgccagccagccagacgcagacgcgccgagacagaacttaatgggcccgctaacagcgcgatttgctggtgacccaatgcgaccagatgctccacgccccgtcgcgtaccgtcttcatgggagaaaataatactgttgatgggtgtctggtcagagacatcaagaaataacgccggaacattagtgcaggcagcttccacagcaatggcatcctggtcatccagcggatagttaatgatcagcccactgacgcgttgcgcgagaagattgtgcaccgccgctttacaggcttcgacgccgcttcgttctaccatcgacaccaccacgctggcacccagttgatcggcgcgagatttaatcgccgcgacaatttgcgacggcgcagtgcagggccagactggaggtggcaacgccaatcagcaacgactgtttgcccgccagttgttgtgccacgcggttgggaatgtaattcagctccgccatcgccgcttccactttttcccgcgttttcgcagaaacgtggctggcctggttcaccacgcgggaaacggtctgataagagacaccggcatactctgcgacatcgtataacgttactggtttcacattcaccaccctgaattgactctcttccgggcgctatcatgccataccgcgaaaggttttgcgccattcgatggtgtcggaattccgggcggtcctcccagcaactgctgtggacgctgaagcgtgctccagtctattcacagcaatgcctagtggtgtcccgaagtctcagttctgtggaatatgagcctaaagaaaaaacttttgataaaattcttattgctaacagaggagaaattgcttgtagggtcattaagacttgcaggaagatgggcatcaggacagttgccatccacagtgatgttgatgccagctcggttcatgtgaaaatggcggatgaggctgtctgtgttggcccagctcccaccagtaaaagctacctcaacatggatgccatcatggaggccattaagaaaaccggggcccaagctgtacacccaggttatggattcctgtcagaaaacaaagagtttgcaaagtgtttggcagcagaagatgtcactttcattggacctgatactcatgctattcaagccatgggtgacaagatagaaagcaaactgttagccaagagagcaaaggtcaacacaatccctggttttgatggggtactaaaggatgcagatgaagccgtcagaattgcaagggaaattggctaccctgtgatgatcaaggcctcagcaggcggtggtgggaaaggcatgcgcatcccgtgggatgacgaagagaccagggatggctttagattttcatcccaggaagctgcttctagttttggtgatgatagactactaatagaaaaatttatcgataaccctcgtcatatagaaatccaggttttaggggataaacatggcaatgctctgtggctcaatgagagggagtgctcgatccagagaagaaaccagaaggtggtagaggaggcgccgagcatttttctggatcctgagacgcgccgagccatgggagagcaggccgtggcttggccaaaagcggtgaagtattcttctgctggaactgtggaatttcttgtggactcccagaagaatttttacttcttggagatgaatacaagactccaggttgaacatcctgtcacagagtgcattactggcctggacttagtccaagaaatgatcctggttgctaagggttacccactcaggcacaagcaagaggatattcccatcagtggctgggcagttgaatgtcgggtttatgctgaggacccctacaagtctttcggtttaccgtctattgggagactgtctcagtaccaagagcctatacatctacctggtgtccgagttgacagtggcatccaaccaggaagtgacatcagcatctatcatgaccctatgatttcaaaactagtcacatatggatctgacagagcagaagccctgaagaggatggaagatgcattggacagttatgttatccggggtgttacacacaacatcccactgcttcgggaggtgataatcaacacgcgttttgtgaaaggggacatcagcactaagtttctctctgatgtgtatcctgatggcttcaaagggcacatgttaacacccagtgagagagaccagttattggctattgcatcatccttgtttgtggcatcccagctacgagcacagcgctttcaagaacattcaagagttccagttataaggccagatgtggctaagtgggagctctcagtaaaattacatgatgaagaccatactgttgtggcatccaacaacgggccaacatttaacgtggaagttgatggctcgaaactaaatgtgaccagtacgtggaacctggcctcacccttattgtctgtcaacgttgatggcactcagaggactgtgcagtgtctttctccggacgcaggtggaaacatgagcatccagtttcttggcacagtgtacaaagtgcacattttaaccaaacttgctgcagaactgaacaaattcatgcttgaaaaagtacccaaggacactagcagcgttctgcgttccccgaagcctggagtggtggtggccgtttccgtcaagcctggagacatggtagcagaaggtcaggaaatctgtgtgattgaagctatgaaaatgcagaacagtatgacagctggtaaaatgggcaaggtgaaactggtgcactgcaaagctggagacacagttggtgaaggagacctgctcgtggagctggaataagtacttgtagcccttcagtcaccactgctcactgctttaattagcatttccattattctctaaccctcaatttgctcaggcgtttacaggagcactctgcagcaggttctacagcatcgtatttattccttagaagagggcaaaaccgacactctgccaaaaaaatcaccaatgggaatttttattgatataaatacttgtacatatgatttgtacttctgctgagatttcccagtgtcaaaattaaatcaataaaaccaacggaa

SEQ ID NO: 485 - DNA, 1451 bp, Rattus norvegicus
ccggccatggctgcgcgcctgctcctccgctcccttcgtgtcctgagcgcccgctcggcgacactcccgccgccctccgcccgatgttctcattctggagcagaagcacgtctagaaactccttctgctaaaaaattaactgatattggaatcagaagaatcttttcctcagagcatgacattttccgggagagtgtaaggaagttttttcaagaagaagtgattccctaccacgaagaatgggagaaagccggagaagtgagtagagagctctgggaaaaagctggcaagcaaggcctgcttggcatcaacattgcagagaaacatggcggcatcggtggggacttgttgtcaacagcagttacttgggaagagcaagcatactcaaattgcacaggccctggtttcagcctccattcagatattgtcatgccctatattgcaaattacggcacaaaagaacagatcgagcagtttatcccccagatgacggcgggcaagtgtattggtgccatagccatgacagagcctggggctggaagtgacttacaaggagtaagaacaaatgccaaaaggtctgggagtgattggattctcaatggaagcaaggtgttcatcactaatggctggttaagtgatctcgtgatcgtagtggccgtcaccaatcgtgaagctcgatcgcccgctcatggcattagcctctttttggtggagaatggaatgaaaggatttattaagggcaagaagctacataagatgggaatgaaagcccaggacacagcagaactattctttgaagatgttcgattgccagctagtgccctacttggggaagagaataaaggcttctactacctcatgcaagagctcccacaggaaaggcttttaattgctgatttggcaatttctgcctgtgagttcatgtttgaagaaaccaggaactacgtgagacaaagaaaggcttttggaaaaacagtcgcacacatccagactgtgcagcacaaactagcagaattgaagacgaacatatgtgttaccagagcttttgtggacagctgcctacagctgcatgaaaccaaacgtctggactccgcctccgcttccatggcgaaatattgggcatctgaattacaaaacactgtagcttatcagtgtgttcaactccatggaggctggggttacatgtgggaatacccgattgcaaaagcctacgtggatgctcgagttcagccgatctacggtggtaccaacgaaatcatgaaagagctgatcgcaagacagatcgtcagtgacagctagacatctgcctacatcctgaaatcctactacatcacagctaatccggattcaaatatacttgagataaagtggaacctggaagggggggggtagtaaagctggttttatgtatggttgttacagagaaagaaataaaagaattataaagattg

SEQ ID NO: 486 - DNA, 1928 bp, Rattus norvegicus
cagtccagactctaagatttcagaatgactaccatcttgacttccacttttagaaacctttctactacatcaaaatgggccctcagattttctgtaagacctctgagctgttcttcacaagtacagtctgccccagctgtccagaccaagtcaaagaagactttagcaaaacctaatctaaagaacattgtggtggtggaaggtgtccgaattccatttctgctgtcaggcacttcgtataaagacctaatgccacatgatttggctagagccgcactttcgggtttgttgtatcggaccaatattccaaaggatgttgttgattatatcatttttggtacagttattcaggaagtaaaaacaagcaatgtggctagagaggctgccctgggagctggcttctctgataagactccagctcacactgtcaccatggcttgtatctcttcaaaccaagccatgaccacagctgttggtctgatagcttctggccagtgtgatgtcgtcgtggctggtggtgttgagttaatgtctgacgtccctattcgtcattcaagaaatatgaggaaaatgatgcttgatctcaataaagccaagactctggcccagcgcctgtccttactcactaaattcagattgaattttctgtcccctgagctccctgcagtggctgagttctccactaacgagacaatgggccactctgccgaccgtctggctgctgcctttgctgtttctcgaatggaacaggataaatatgcactgcgttctcacagtctggccaagaaggcacaggatgaaggacatctttctgatattgtacccttcaaagtaccaggaaaagacacagttagcaaagataacgggatccgtccttcctcactggagcaaatggccaaactaaagcctgcattcatcaaaccctatggcacagtgacagcagcgaattcttctttcctgactgatggcgcttctgcgatgctaatcatgtcagaggacagagctctggccatgggttataagccaaaggcatatttgagggattttatatatgtgtctcaggatccaaaagatcagcttttacttggaccaacatatgctactccaaaagttctagaaaaggcaggattaaccatgaatgatattgacgcttttgaatttcatgaagccttctcaggtcagattttggctaactttaaagctatggattctgattggtttgcacaaaactacatgggtaggaaaaccaaggttggagcacctcctctggagaagtttaatatctggggcggatcactctctctgggacacccttttggagccactggctgtcggttggtcatggcagctgccaacagactgaggaaggatggaggccagtatgctttagtggctgcctgtgcagctggaggacagggtcatgctatgattgtggaagcctacccaaaatgactgctctggaaggaggcaactgatctctgcagcactcgcactgggcaatgccatttcaatgcactaccaagtgatacctgcagttcctagctcttcttaggaaacaacatttgtggccttctcttaaatattttgcggtcaagccttgccagtgttcgagctttccgataatcacagcttctgctctctaagttccagactatcacagatgtgtacacagttcttgttatctcttgtctctaagactaatgactgccagctgcttggagagaggttagctgaggtttagaaccatctttgtaacatttgcagaatctcctccttcctgtcagtgtcctacagagaattattttttctaaaatacaatccaatgtgcctacattaagttactatagaaaaaaataatctaaacatctcctaaaactgacttgcttagagacatgtttgttgaccttaataaagtagacatgtattag

SEQ ID NO: 487 - DNA, 1589 bp, Rattus norvegicus
ctttccatccacgtacagcagcaccatgaaccgcgcattctgtctcctcgctcgctcgcgtcgcttcccgcgggtcccctccgccggtgctgtattgtcaggggaagcggccaccctcccacggtgtgctccgaacgtcgtgcgaatggcaagccaaaattccttccgtatagaatacgacacctttggtgaactgaaggtcccaaccgataagtattatggtgctcagactgtaagatctacgatgaactttaagattggaggtgcgacggagagaatgccaatcccagtcattaaagcatttggcatcttgaagcgagctgctgctgaagtgaaccaggagtatggtctcgatcccaagattgctagtgcaataatgaaggccgcagatgaggtagctgaaggtaaattaaacgatcactttcctctggtggtatggcagactgggtcaggaacccagacgaacatgaatgtaaatgaagtcattagcaacagggcaatcgaaatgctaggaggtgaacttggcagcaagaagcccgtgcaccccaatgatcacgttaacaaaagccagagctcgaatgacaccttccccacagcaatgcacattgctgctgcactggaagttcaccaggtcctgttgccaggattacagaagctgcacgatgccctcagtgcaaaatccaaagagttcgcgcaggtcataaaaattgggcggactcatacgcaggacgctgtccctcttactcttggacaggagttcagtggttatgttcagcaagtccagtatgcgatggagaggataaaagctgccatgcccagaatctacgagctcgctgctggcggcactgccgtcggcacgggactaaacaccaggatcggcttcgcagaaaaggtggctgcaaaagtcgcagcactcacaggtttgccttttgtcactgccccgaataagtttgaagctctggccgctcatgatgctctggtggagcttagtggagccatgaacactacggcctgcagtctgatgaagattgccaatgacattcgcttcctcggttctggtcctcggtccggtttgggggagctgatcttgcctgaaaatgagccagggagcagcataatgccaggaaaggtgaaccctactcagtgtgaggcgatgaccatggttgcagcccaagtcatggggaatcatgtcgctgttactgttggaggcagcaatggacatttcgaactgaatgtttttaaaccgatgatgattaagaatgtgttgcactcagccaggctactgggagatgcttcagtgtccttcacagagaactgtgtggtagggatccaggccaacacagagaggatcaacaagctaatgaacgagtctttaatgttggttacagctcttaatccgcatatagggtatgacaaagcagcgaagattgccaagactgcacacaagaacggatcaaccttaaagaaaacggctattgaacttggctatctcacagcagagcagtttgatgagtgggtgaaacccaaggacatgctgggtccaaagtgacttaaataaatttatattaaaataaacatgtatgaaattt

SEQ ID NO: 488 - DNA, 2117 bp, Rattus norvegicus
aattccgcggcggctttggagatgcagtcggcccggatgaccccgagtgtggggcgacaactgctgcggctgggggcccgaagctcgcggtctgctgcgcttcagggacaaccccggcctacctctgcccagcgactttatgccagtgaggccactcaggcagttctggaaaagccagagaccctctcctctgatgcttccaccagagaaaaacctgccagggcggaatctaagtcttttgctgtgggaatgttcaaaggccagcttaccaccgaccaggtgttcccatacccatctgtgctcaatgaaggacagacacaatttctcaaagagctggtgggaccagtggcccggttctttgaagaagtgaatgaccctgccaagaatgactccttggagaaggtggaggaggacactttgcagggactcaaagaactgggggcatttggtctgcaagtacccagcgagctgggtggtttgggcctctctaatacccagtacgctcgcttggcagagattgtgggcatgcatgaccttggtgttagcgttaccctgggagcccatcagagcatcggtttcaaaggcatcttgctctatggcacaaaggcccagaaggaaaaatacctccccagagtggcatccgggcaggctttggcggctttctgcctgactgagccctcgagcgggtccgatgtggcctctatccgaagctcagctgtacctagcccctgtggaaagtattatactctcaacggaagcaagatctggatcagtaatgggggtctggcagacattttcactgtctttgccaaaacgccaattaaagatgcagccacgggggccgtgaaagagaagatcacagctttcgtagtggaacggagctttggaggggttacccatgggctccccgaaaagaagatgggcatcaaggcatctaacacatcagaggtgtactttgatggagtcaaggtgccagcagagaatgtgctaggagaagtgggagatggcttcaaggttgctgtcaacatcctcaacaacggaagatttgggatggctgcaaccctagcaggcaccatgaaagccatcattgccaaggcggttgatcatgctactaaccgtacccagtttggggacaaaattcacaactttggggtgatccaggaaaagctggctcggatggctattctgcagtatgtgactgagtccatggcttacatgctgagtgccaacatggaccagggattcaaagacttccagatagaagctgccatcagcaaaatctttggctcggaggcggcctggaaagtgacagatgagtgcatccagataatggggggcatgggcttcatgaaggaaccaggggtagagcgtgtgctccgagatattcgaatcttccggatctttgaagggacaaatgacattcttcgactgtttgtggctctacaaggctgcatggacaaaggaaaggaactcacgggacttggtaatgccctaaagaatcctcttggaaatgttggcctcctcataggagaagcaagcaaacagctgaggcggcggacagggattggcagtggtctgagtctctcgggaattgtccacccagagttgagtcgcagtggtgaactggcagtgcaggctctggaacaatttgccactgtagtggaggcgaagctgatgaagcacaagaaagggattgtcaatgaacagttcctgctgcagcgactggcagatggagccattgacctctacgccatggtggtggttctctccagagcctcaagatccctgagtgagggctacccgacagcacagcatgagaaaatgctctgtgatagttggtgcattgaggctgcaacacggattcgagaaaacatggccagccttcagtccaaccctcagcagcaggagctctttcgtaacttcagaagtatctccaaggccatggtggagaatggtggcctggtcaccagtaacccccttagagtctgaagactcctaatcaggccctagcacagtcgtgtgccttcttctatgccaaacacaggcccccttcatgggggcactggagtacttactgccttaaggacaataaattttctaccaaaaaaaaaaaaaaa

SEQ ID NO: 489 - DNA, 4779 bp, Rattus norvegicus
aattccgttgctgtcgacgtgaaaagcctcgagtctttgtaaccttctgtatgccagagctgtggtagtgtgacagcggcagtgcagccctcagctcctttcagagcacagtctggtgccaagctccaaggttccagtggctgctgctgtcactgtgggggagtctaacctctcccagaaggagacatacagaagaatggtcacctcaactggtttgctcctgctgctggggcttctcggccagctctgggcaggggctgctgctgattcagaggctgtggtgtgcgagggaactgcctgctatacagcccactggggcaagctgagtgccgcggaagcccagcatcgctgtaatgagaatggaggcaatcttgccactgtgaagagcgaggaggaggctcggcatgtccaggaagctctggctcagcttctgaagaccaaggcaccctcggaaacaaagataggcaaattctggatcgggctccagcgagagaagggcaagtgtacgtatcatgatttgccaatgaagggcttcagctgggttggtggtggagaggacacaacttattcaaactggtacaaagcgagcaagagctcctgtatctctaaacgctgtgtgtccctgatactggatctgtccttgaaacctcaccccagccatctgcctaaatggcatgagagtccctgtgggactcccgatgctccaggcaacagcattgaaggcttcctgtgcaagttcaacttcaaaggcatgtgcagtccactggcgctgggtggaccagggcagctgacctataccacccctttccaggccaccacctcctctctgaaggccgtgccgtttgcctctgttgccaatgtagtttgtggggatgaagctgagagtaagaccaattattacctatgcaaggaaacgactgcaggagtattccattggggcagctcaggccctctctgtgtcagccccaagtttggttgcagtttcaacaatgggggctgccagcaggattgcttcgaaggtggggatggctccttccgctgtggctgccggcctggattccggctgctggatgacctagtaacttgtgcgtccaggaacccctgcagttcaaacccatgcacaggaggcggcatgtgtcattctgtgccactaagcgaaaactacacatgccattgtcccagaggctaccagctggactctagccaagtgcactgtgtggatatagatgagtgtgaggactccccctgtgaccaggaatgtatcaacactccagggggcttccattgtgaatgttgggtgggctaccaatccagtggttccaaggaggaggcctgtgaggatgtggatgagtgtaccgctgcctactcaccctgtgcccagggctgcactaacactgatggctctttttactgctcctgtaaagagggatatatcatgtctgggaaagacagtacccagtgtgaggatatagatgagtgtttgggcaatccatgtgataccctgtgtatcaacacagatggttctttcaggtgtggctgcccagcaggttttgagctggctcccaatggggtctcttgtaccaggggctctatgttttcagagttaccagccaggcctccccaaaaggaagacaaaggtgacggaaaggagagtactgtgcctcttactgaaatgcctggttctctcaatggctctaaggatgtctccaacagagcacagaccacagatctctccattcaatcggatagttccactgcctctgttccactagaaatagaagtctctagtgaggcatctgatgtctggttagatttgggcacatacctccccacgacctctggccacagccagccgactcatgaagattctgtgcctgcacacagtgacagtgacaccgatgggcagaagctacttctgttttacatcctgggtacggtggtggccatctcactcttgctggctctggcccttgggcttctcatttatcttaaacggaaagccaagaaagaggagatcaaagagaagaaggcccagaatgcagctgacagctattcctggattccagagcgagcagagagccgagccccagagaatcagtacagcccaacacctgggacggactgctgaagacaacgtggctttagaaacatagtcagctgccactaccttcagagttaccttcttagatgagggagaagccacatcactctgaaagactggactggactctcagcaataattgggcaccttcccctttaagaacctggtgacttgggttgggcagatattttcctggtgcctttgatatgcctggggagataaaatgaccattgtggggagttttggggatattgacagacctcactcacacacccttttcaaatccaaaagcaactggttcctctggttgccaatcagggcgtaggaagtcagagggggtggggtagggtgggggtagggggcttcaaagtcttttcttatgtattgatttatcagagaaggagctactggtgctaattacgatggaaacaattcctttccttcacaggctagaaagcaaaaccaactaactaataacctggtaagactgctctacccttcctacagggactttttcaggatggctgtctttgtgtacatttgccttctggcatttcccttcatcccgcttgctcggtattgttggaactgtcagaatgaaaggaagttcaaccaactgctcagggagcaagcaggcaggaagtttagaccttgtatccccttgctctttctgatagacttgagcttatgggcaaacaagttggaaagttgcttcaagtgagtgaggtcttggtaaaagcatagtctagagggaggcaggcaggaattgatttaacagatatttgaaaaaaaaaaaatctgaaggaactgatgctagcacacactcgactactgaggaacaataacaaaaccccaagatcaatttgtctttgagcttgcacgggtcctgactccactgcagggcaccctctccctttataccatcccaaccagggaagatgggacagcaggctcagaaagcctcaggatgctttcattctgaatgaaggaaaggatgtgtgagcctggtgatgggctattttaaatactcccatttaaatgaagcttagcccccttcatggttaaaagtacatctagaggacttgacccctattttgtggatgtgacacagactgaatcaaggattagtcatgaaggaggttctctttttttttgtttttgcttaaaaaaggagatacaggggagagggaaaagggaagagagaacagctaaaaaatttccaaccgttaaaacggcttagagccaccttatgattgacatgtttattttaaagggttcatatgcaaaagtgtcccttaaacttgctgcaggtaatgctgttccagctgcacaggactgtctggggcctggaaggcagccctggtgagtcacttcagtatctcaggaggcctgtctcagctgcctttgctgtttgaaatactgagacaaggaatgtgtctccaccacgagattccgagtctttgttctcagactagagtgtccttttgttactagtgtcaaaagcaactatccttcaagttgatagccagaaagtgaagattaataacaaccggactcaaggcctttgaaatatcttagagaactatattacagaagtgtctttttttttctttgtcaatttaaaatggagatactttcattagtcagactttctttctctctttgaaaacccatcgtggagagcaatggggaaccgattgagctcagtgggtgcctgaaatgtgtgcatttaaaagtcaacttactgtctggctttcagttgaaatttgaacatttggaacaggatctctggcaataactgagattggccactagtccattacaaggagaccagttgaatttagatccatggcagtatctgcatatacggacgtgaacctaaatgcatcacttttacctccagaccttcaactgctcacctttatggcttgagatgaggaaggtaactgagtctaggctccccacagccttgcttggtctatactcaggctgctgtgtaggacttaaagtgaccaaagtaacttagaaggtagacatgaagctccaactccaacactctctggggtacaggatcctctctgtggaacccacaacagagaagggaatgatgaggaacatattttctcaaagtgtgctttcagcatgagcccttcccatgaaggccgggctctctcgtctaatgacttgccaaagccttcagcaggaccatacctcatgtggcaaagccaatggagccagtcgctgttcctaaatgggtgctttattctccctatattcttgctgtcctcatgcttgaacctggtaaattctgggttagggtatctaagaggccaagcaataaataatcgaacttccactggaccaagggtgttaggctaggccttctctacccaagaaaccagtgaacagagacagaatactcccctgcctctgatgagcatagcttcaggccttcacccttctccttactcaattgcaggtggccatcattgccttttgtattttatatggttatggtgatggaagccagctataagtatgttagacacgagctttccaggacccctatactactagtagctcgcattatctttgttcattattaaagataaatgaaacaatacacccccactaacttgaggagttaaaaaagaaaaaaaaaaaaaaaaaaaaaaaaa

SEQ ID NO: 490 - DNA, 3397 bp, Rattus norvegicus
gctgcgggggctccgagggttccgggggccttcggctgctggtctgcctgctgttgttgagcggccgccccgggggctgcagcgccatcagtgcccacggctgtctctttgaccgcagactttgttcgcatctggaagtctgtattcaggatggcttgtttggacagtgccaggcaggagtggggcaggcacggcccctcttacaagtcacttccccagttctccagcgcttacaaggtgtgctccggcaactcatgtcccaaggcttgtcctggcatgatgacctcacccagtatgtgatctcccaggagatggaacgaatccccaggcttcgtcccccagaacctcatccaagggacagatctggatcggtgcccaggagagcaggcccagcaggggaattgctttctcagggcaatcccactggctcctctcctgctgtccaggggctctctcggcctccaggggatgggaatggagctggggtgggctccccactgtcctctctgcaggctgagctgttaccccctctcttggagcatctgctaatgcccccgcagcctccacacccgtctctgacctatgaacctgcattgctacaaccttacttgttccagcagtttggttcccgagatggctcccggggctcagagagcgcctctggggtagttggccatctggccaaggctgaagatcctgtactcttcagcagaagcctctccaaggccattttggggactcactctggacactcctttggtgaccttacaggtccctcacctgctcagcttttccaggattcagggctgctctacatggcccaagagttgccagtgcctggcagagcccgggcgccaaggttgccagaggaaggggggagcagccgggcagaggactcttcagagggccatgaggaggaagtactagggggtcatggggagaagtcccctccccaagcagtacaagcagatgtaagtctgcagagattggctgctgtgctggcaggctacggagtagagctgcgtcagctgaccccggaacagctttctaccctcttaaccctgctgcagttactgcccaagggcacaggaagacatcttggaggggctgtgaacggaggagccgatgtcaagaaaacaatagaagaacaaatgcagagaggggacacagcagacgctcggccccccacacccttgcttcctggacaccccactgccagctccacctccatcaaagttcggcaggtgctgagccctggtttccctgaacctcccaagacatccagtcctctgggcatctcggctgtcctgctggagaagaaaagtcccttgggccagagccagcccacagtggtgggacagacttcagctcgaccgtccgctgaggagtatggctatatagtcactgatcagaaacccctgagtctggtggctggagtgaagttgctggagatcctggctgaacatgtgcacatgacttcaggcaggttcatcaacatcagtgtggtaggaccagttgtcacctcccgaatccggcacaatgagcagaacctgtctttggcagatgtgacccagcaagctgggctggtgaagtctgaactggaagcgcagacagggctccagattttgcagacaggggtgggacagagggaggaagcagctgaagtccttccccgacaagcccatggcatatctcccatgcgctcagtgctgcttactctagtggccctggcaggcgtcgctgggctgctagtggctttggcagtggccttgtgtatgcgccatcattcgagacagcgggataaggagcgcctggcagcgctggggccggagggggcccatggtgacactacttttgagtaccaggacctgtgtcgccagcacatggccacaaagtccctgtttaaccgggcggagggtcagccagagccttctagggtgagcagtgtttcctccaagttcagtgacgcggcccaggccaaccccagttcccacagcagcaccccgtcctggtgcgaggagcctgcccaggccaacatggacatctccacaggacacatgattctggcatacatggaggatcacctccggaaccgggaccggttgcccaaggagtggcaggccctgtgcgcctaccaagcggagccaaacacctgttccaccgcacaaggtgaaggcaacatcaagaagaaccgccatcctgacttcttaccctatgaccatgcccgaatcaagctgaaagtggagagcagcccctctcggagtgattacatcaacgccagtcccatcatcgagcatgaccctcggatgccggcctacatagccacacagggacccctgtcccacaccatcgcagacttctggcagatggtgtgggagagtggctgcactgtcatcgttatgctgacccctttggtggaggatggtgtcaaacagtgtgaccgctactggccggatgaagggtcctccctctaccacgtctatgaggtgaacctggtgtctgagcacatctggtgcgaggacttcctggtgcggagcttctacctgaagaacgtgcagacccaggagacgcgcacgctcactcagttccacttcctcagctggccggcagagggcactccggcctccacccggccgctgctggacttccgcaggaaagtgaacaagtgctacagaggccgctcctgtcccatcatagtgcactgcagtgacggtgcagggaggacaggcacctacatccttattgacatggtcctgaatcgcatggccaaaggagtgaaggagattgatattgctgccaccctggagcatgtccgtgaccagccgacttgccttgtccgttctaaggacaagtttgagtttcccttgacacccgtgggggaggaggtgaatcctatcctcaaggccctcccccagtgagcccccctgggtacctcagtgggcatcctggcctctgctccttctgcctgtgtgtgagcatttgtgcacccactcttcagcccctacccatctgccaccttggtccgtccgacttgggcatgatagccctttccaacccagtgtggaaggaagtcgggagggaaggggcaggtccaccctgctttattcacgctagaaccaagatctcctgtgggaaacagacagcaggcaaggggaggagtggacaccagcagcaagtgtgcccgagccccatccttcctgagtctctgtctccctctgtgtgtgtacctccccactcccaccagcctatcgtgtatagacaaagcagaatgagaaggccccagctccccccagtcctgctaccactggcctgccaccttgaccctgctcaaccttctccctctagcacaacccaaacatttctagaaaaatctacttttgtatcaatgtgaataaag

SEQ ID NO: 491 - DNA, 157 bp, Rattus norvegicus
cgtataaggactgttttgatggcgacagcccagatgaaggagcatgagaaggaccccgagatgctggtggacctccagtatagccttgcaaactcctatgcaagtacccctgagctccggaggacctggctggaaagcatggccaagattcatgcaa

SEQ ID NO: 492 - DNA, 946 bp, Rattus norvegicus
  misc_feature 138: n = A,T,C or G
atggcggcgacggcgagtcccggggctggccggatggacgggaaaccccgtacctcccctaagtctgtcaagttcctgtttgggggcctggctgggatgggcgctaccgtttttgtgcagcccctggacctggtgaanaaccggatgcagttgagtggtgagggcgctaagactcgagagtacaaaaccagtttccatgccctcactagcatcctgaaggcagaagggctgaggggcatttacactgggttgtcagccggcctactgcgccaggccacctacaccactacacgtcttggtatatatacagtgttgtttgagcgcctgactggggctgacggtacaccccctggctttctcctgaaagccctgattggcatgactgcaggtgcaactggtgcatttgtgggaccaccagctgaggtggccctcatcaggatgactgctgatggccggcttccagctgaccagcgccgtggctacaaaaatgtgtttaatgccctaattagaattgcaagggaagaaggagtccccacactgtggcggggctgcatccctaccatggctcgagctgttgtcgtcaatgctgcccaacttgcttcttactcccaatccaagcaattcttgctggactcaggctacttctctgacaacattctgtgccacttctgcgccatcatgatcagtggcctggtcaccactgctgcttccatgcctgtggatattgtcaaaactaggatccaaaatatgcgaatgattgatgagaagccagagtacaagaatgggctggatgtattgctgaaagtcgtccgctatgagggtttcttcagcctgtggaagggcttcacaccatactatgcccgactgggcccccacactgtcctcaccttcatcttcttggaacagatgaacaaggcctacaagcgtctcttcctcagtggctgag

SEQ ID NO: 493 - DNA, 2742 bp, Rattus norvegicus
  misc_feature 2646, 2647, 2648, 2649: n = A,T,C or G
cagcagccttgccctctgacttgatatttaccagacccggccagcatggctgtcctgaatccaatgactttgggaatttatctccaactcttcttctgctccatcgtgtcgcagccaactttcatcaacagtgtcctcccaatctcagcagcccttcctggcctggatcagaagaaacgaggcaaccacaaagcatgctgcctactgatgcccccgccacccccactcttcccaccgccattcttcagaggcagccgaagcccgcttctctccccagacatgaagaatcttctggaacttgaggcctccccatcaccctgcatgcaaggctctctaggctctcctggcccccctgggccccagggtccacctgggcttcctggcaaggcaggaccaaagggagaaaagggggatcttggccgcccaggaaggaagggtagacctggacccccaggtgttcctggcgagcccgggcccgttggctggccaggccctgaaggacccaggggcgaaaaaggcgacgtgggtatgatgggtctgccagggtcaagaggaccgatgggctctaagggcttccctggatccagaggggaaaagggatccagaggtgaaagaggggacttgggtcccaaaggagaaaagggtttccctggatttcctggaatgctggggcagaaaggtgaaatgggtccaaagggagaatctgggatagcaggacatcggggccccacaggaagaccagggaaacgaggcaagcagggtcagaagggagacagtggaattatgggcccaccaggcaaacctgggccttctggtcaacctggccgtcaaggtcctcccgggcccccaggacccccatctgcaggacaacttgtaatgggactcaaaggggaaagaggatttccagggcccccgggaagatgcctttgcggaccccctgcgaatgtgaataacccctcctatggggaccccatgtatgggcgcggctcccctcgagttcctgcgatttttgtggtcaacaaccaggaggagcttgagaagctgaacactcaaaatgccattgcctttcgaagagaccagcgatctctgtacttcaaagatagccttggctggctccccatccagctaacccctttctacccagtgggtttacaccataaagcagcatggcacctgtgtggggatggggtcctgcagcctggggaggaatgtgacgatggtaacccggatgtgagtgacggctgcattgactgtcatcgggcctactgtggagacggttatcggcaccggggcgtggaggactgtgacggctctgactttggctacctgaagtgcgagacctatctccctggatcatacggagaacttcggtgcacccagtattgctccatcgactccacaccctgccgatacttcacgtgagaggctgcagggacaggtgggctgtggcccatggacccgttggctgtttctctacccttcacatcaagctggccttgccctctcctgggacagtgccctttgaccttcatgtgacaaaacaaggatatattcttgctgctacgacatgcttttgactccgtatgactggaagttttggaccactgaatcctgtcttaattctaagaaccagaatccttctataccccaccctggaaacttccccatcccctccaatctggctaaacagctggctgtaatgcctgatctcttctggaaagatgctggctgaagcgtggatttggcttagcactgttaagcatacaggcatctacaggcctggcgtggttcgttctggtctaccaggtttaggggtgctcgtgaacaggcttctgcacctccaagcacatctgttccgaccccaaagcgagccagctgctgggtctctcaagatttaagaaccacatcataggaggtgagaaattctcttggtgcagctcccagcttcagacctgctgaggggacccttcagctggctggagcctggatcaacttcatgttgatcagtcaggggtacgagagagccacaaggcccaagcttggtcccaggaagagggtgaaggctcagctgagtcactgccatgtgacccctaccagaacagaaaccttcttccttcccgaagttctctgaggcaccatctgaccttgtgcttctctctgcaccttgacctctgtcttgacagtgccctcttgcaacgtgcctgtgtgaaagtctcacccctcatgccctcccatggcccgtgctgctgtttcctcatgctggcttccctggcttgggctccactgccaagtccttggctgcaggacgcgccggtgactctcttccatgcccatcttgcataccccttgttccctcactgtgtgcccaacctcttcctttatcctgggattctttttcctaagccctgcatttctgagaactgccttcccatatttcatgaatggggtttggctctatttggggaaacatcgctttttgtccccctccccaatgcgcgcacctgccttgccccactacccaggctgcctctgggctgtgcaaagctcttcagtgagcccaagccttgggaattcagcaggtggcaccttctcacccagcaagtccgagctgtgaatggtatttcctgagagaaatcagcctgaggnnnncttcaggggcagacagctatctatttactattctgggacttctgggtgggcaaacaagaaataaaggtgattcttggctgtgaaaaaaaaaaa

SEQ ID NO: 494 - DNA, 1453 bp, Rattus norvegicus
gacggtatcgatcgaaccccttcgataacagcggaatcccccgtctacctctctccttggtcctggaatagcgctaccgatcacaaagtagccctaagacataataaaccctcaactgctccgtagtttttcttatgaaagccaagtaaaggggacgtaagcaaaaaaatatttttttttgcgtgaaggattccaaaaataaaattctctggggattgagaagaaagaaaaaaaggaaaatgccagctgatataatggagaaaaattcctcgtccccggtggctgctaccccagccagtgtcaacacgacaccggacaaaccaaagacagcctctgagcacagaaagtcatcaaagcctatcatggagaagaggcgccgggcaagaataaatgaaagtttgagccaactgaaaacactgattttggatgcacttaagaaagatagctcccggcattccaagctggagaaggcagacattctggaaatgacagtgaagcacctccggaacctgcagcgggcgcagatgaccgccgctctcagcacagacccgagcgtgttggggaagtaccgcgccggcttcagcgagtgcatgaacgaggtgacccgcttcctgtccacgtgtgagggcgttaacaccgaggtgcgcactcggctgctgggccacctggccaactgcatgacccagatcaacgccatgacctaccccgggcaggcgcaccccgccttgcaggcgccgccgccgccgcccccgtcaggacctggcggtccccagcacgcgccattcgcgccgccgccgccgcttgtgcccatccccgggggcgcggcgccccctcccggcagcgcaccctgcaagttgggcagccaggctggagaggctgccaaggtttttggcggcttccaagtggtgccggctcctgacggccaatttgctttcctcatccccaatggggccttcgcccacagcggcccggtcatcccggtctacaccagcaacagcgggacctcggtgggtcctaacgcagtgtcgccttccagcggctcctcgctcactgcggactccatgtggaggccgtggcggaactgaggggctcaggccactgctaatcataaactccctagcccacctctctcttctgacggacactaaatacgaacttggactttaggagagacttttataagtcggtggttactttgttgcttttttaaattctaaaaagttactttttgtagagagctgtattaagtgactgaccatgcactgcatttgtatatattttatatgttcatattggattgcgcctttgtattataaaagttgagatgacatttcgttttttacacgagatttctttttttatgtgatgccaaagatgtttgaaaaatgctcttaaaatatcttcctttggggaagtttatttgagaaaatataataaaagagtgaaggctttt

SEQ ID NO: 495 - DNA, 1435 bp, Rattus norvegicus
gaattccggcacagcgcacttgctctcgctcgaccgcgctcccgccccgcagtcctcaccaaccctacggatcctagccaccgccagcctaggagggcatcaggatgaaggcagcccgtttcgtgatgcgcagcgccagctcgctgggcaacgccggcctggtccccagggaggtcgagctgttctcccgctacagcccgtccccgctgtccatgaagcagctgctggacttcggttcagaaaatgcctgtgagagaacttctttttcttttcttcggcaagaattgcccgtcagacttgccaacatcctgaaggagattgacatcctccctgaacacttagtgaacaccccttccgtccagctggtgaagagctggtacatccagagcctgatggatttagtggagttccacgaaaagagcccagaagaccagaaagttctatcagactttgtagacacgctggtcaaagttcgaaacagacatcataatgtggtccctacgatggcacaagggatcctggagtacaaagacaactgcaccgttgaccccgttaccaatcaaaatcttcagtattttttggaccggttttatatgaaccgcatttctactcggatgctcatgaaccagcacatcctcatattcagtgactcaaagacaggaaacccaagccacattgggagtatcgaccccaactgcgatgtggtagcagtagtcgaagatgcctttgagtgtgcaaagatgctctgcgatcagtattatctaacgtcgccagaattaaagctcacacaagtcaatggaaaatttccaggccaaccaatccacatcgtgtacgttccttcacaccttcaccacatgctctttgaactattcaagaatgccatgagggccacggtcgagcatcaagaaaaccgccctttcctgacaccagtcgaggccaccgtcgtcttgggaaaagaagatcttacaatcaagatttctgaccgaggtggcggtgttcctctgaggattactgaccgcctctttagttacacatactccactgctccaacgcctgtgatggacaattcacggaatgcccctttggctggttttggttacggcttgccgatttcccgtctctacgccaagtattttcaaggagatctgaatctctattccatgtcaggctatgggacagatgccatcatctacttaaaggctttatcatctgagtctatagaaaaactccccgtctttaacaagtcagccttcaaacattatcagatgagttctgaggctgatgactggtgtatcccaagtaaggaaccaaagaatctgtcgaaggagaaactggcagtgtgacggggatctcgcctggcacttttacgggatcaaagtgggtctacggcagtgctgcttcgtgaatgtgtgtggactcttgtttccgcaaaaca

SEQ ID NO: 496 - DNA, 4349 bp, Rattus norvegicus
ttgacgcgtcccctcccttcctccccctttcctacccccagccccaacttcagccagcgcctccctccaccccaggacgtcactcatttcatctcatttaggggaaatatatatacatatatatttgaggaaactgaggacctcggaatctctagcaagggctaaggagaagggaagaagcactccccatcccgacccccgaaacgtattcctatttgaagcaagttgaacggacagagaagaaggggcaagaaggagcgaggaatggaaagaaagcattggagtagaggagaaggaaggacagatgggattacagagagaagagagaaacggcaaggcagacagggcttcacaaccaaggctggatctgccctttgctttcaactctagcctggggtcagagaaaggttgggacactcaaaaatgtggcattcagtgacacccagtttaatcgtggggagaaaaggaacaaggtgtgtcagtgcctctctggggtctgttgcttcctccggccagcagtgtggatggctagacccctcaccctcctctcctcttacccaagtgcagggtggtttcttccccaaatttataaagatgaaaatgcattccatccctctgaaaacaaaggaaacaagtgattgcagataggtttttccccctgagcagaagagtgaactcagaatgtgtacaaattttactcttgttggaatttttttttttttaagaaatcagtatgccccacccccaacactggaaagacttgatttccagcgtgacaagtattcagaagcatgtggctttggcccttgtattccactagtactcaaagctggcccggcagcctctgtggaggaggaggataggcggagaaaacgaaggggtttgtacttacctacaaggctccatgtagacttatataggcatataaatctattttctttacttttattcccccttccctttctttcaaagtttttgcattacctctttgaagtagttttttttttagggccctgaagatcttcctcgttctgagaaatccatatttcactactacaacccagaacgcctgctttggcctgcttctggcagcctttctcatgaactacagatgtggctctttagtggggcacatttggatcttctcctgattcccagcctgtgtttaaatgtacccaccaagccaggtagctgccagcacccaagggtgcatcaactgtgcagtccatttcagccttccaacctttggaaagtaactgtctcacaccacaccacataaacccaccagacccatcttcaacccactggcctgcccaggccttttactctatctgcatttttttgaattgcattttggaagtctccctcagatgccagactgacagatcagagagaaactgccatgagagatgacagaggaggaggaagttaaaggtggggagcgccttccacagagagacatagaagatatagcaagggatgaactcttgggggagaacccgaaagagacccgaaagagagaaatacccatagaattttccttggtgtctcccagctaatcagctctctggaatttgaaaggaaaatggggggaaaggggctctgaggtacaaatgagctcagctcaagtcacagagcccagatggtgggtaattgaggcaacatgcagactgcacacccatggttggaaacaacgatccataccctgaatgggtattgaagggtgaacacgacccctgtgaaacacagcacaatttccgtccaacttcacccctccaaggagggactgacgccaaacaatctttccagcgcttcattgattctgccccactcatccatcctccctgggacacaacgagccagacagccacgacagctcaggcctagatcttcagagaatttgatccaagagaaaaatctcattgaccactggcttcttcaccaaagaggtgtttcacaaagggcttaggactgtctttgaagactgaagattgcctgccaggagaggggactaggacattggtacaggaggcccccctttggctgtggacacagctctttcctcttttttgatggcatgccatagtagaggtcccctccaacacaggcacgtggagcaacaaaaagggacagcaaacaaacaaacgtatgtcaactcataggacatggatggctacggagctaggaggggttgtctcctattgcctggacaggacagttggctgggaataaaggaggcagttgatcttcacaagacaaagggcctgatggagttggcaatataaggacttaccacacctgcagggtcagttttaaccatcaccctgcacgacatccccagcccccaacctgaacttgtggaaacaaacgtatgtcaactcataggacatggatggctacggagctaggaggggttgtctcctattgcctggacaggacagttggctgggaataaaggaggcagttgatcttcacaagacaaagggcctgatggagttggcaatataaggacttaccagacctgcagggtcattttaaccatcacctgcacgactatccccagcccccaacctgaacttgtgtatcttaggccagtatcctaaaccttttccatgagtcttgttctttctgccatttttcctgtggatcttgagcagtcatcagactgagatttgccaagtggatactggggtactgttacccccaagaaaagactgagccaggaactgcctacctactacccctcccaggcctggagctaactcctgtgaggggtggtatcttcaccccactacttgctggaccttgaatgagcctctgccccttacatgggctctttgttttgagccacagatagaggacattgtatagacacttagccttccccagttcagcctacctcccccaagattgtgagtctccccgctgcttatacggagaggcatgtctaagacagcaatcttttcctagaggaagcttgcctttaacagtcagatgggactaagccttccaaacgggaggtctgactgaacccaggatatagagaccatggaaatggggtcatcgagagaagagggatgcccttgtccatgttatggggagagaaggcaggcttgcaatggtcccatcatgccctgcgtaagaagcttcttggatcaagactagcctttagctccactagaggcctctatgttgggtttatccacagccgtaggtctaagtgttgcctgtccccacctccacctcccatgaagggcttcttcccacccctttttgacaaatgcctcactcaagcagtggaaaagatagctctcttctccatctactgccagtaactgagagaggcctaaccaggacctgttctccaccccagccagtcttgaccagccagaacaaagcagggaacctggagaataaaagactctatgttcctctgacggccaggcctaagcagacaaggcttgggaacagctgccccacaggagactgaggaggccatctgtgctcactcctcttctccttccaagaccctcttcctaccatgagttatcaccatggtaacatcctcaccatccttctcccaccaccaagggttgccacagcaacctccaaaccacctgcccatacccaggcagggcagcagtccttctgctcagaacccttgaggatctaggtgaaaaattacagccagagagaggagtgagccaaggagaagagaccctgtagccctctggctttcaagagaatggaggttacgatttaaagcacagtagaagggaaagaggtttcatcagcctctaccaaggagcctaggggtcgtactgtctttatttttaaaccactaaagtgcagtgtttcctgcactcttgttactccaccctctcttccccgttcttatttctctgagcagactttcttggtgtttttttaatggagtatagactttcaccacttcacaggctctgacctcctctctaagtctttctggatggggaaaaggaaggtagagggtcagaggggagggggggatccctcgtcaccccgcatccattcaccccacttctctggtccctagtcaccagcctcagtccccatctccgaccgtcattgtcacacagatagcctgtcacacggatagcacattcagacaagatccttcgagattccgagacgcctaccggttgtttttggcttttgttttgtttgtttgtttttttacgacagcaatattcacagcacattattactattagctctttgtagtgttgcgttcaggcaccacagctctgttctcttttcttttttgttttcgactttaaaaaaaaaaaaaaaaaaaaaaaaaaaaaaaa

SEQ ID NO: 497 - DNA, 2449 bp, Rattus norvegicus
ccacgcgtccgggggatcggacgcgtgctgtcgccgcggtgagggaagtggacgcgatggccgggtccgcgtgggtgtccaaggtctctcggctgctgggtgccttccacaacacaaaacaggtgacaagaggttttgctggtggcgttcagacagtaactctaattcctggagatggaattggcccagaaatttcagcctcagttatgaagatttttgatgccgccaaagcacctattcagtgggaggagcggaacgtcacagcgattcaaggaccaggaggaaagtggatgatccctccagaagccaaagagtccatggataagaacaagatgggcttgaaaggcccactgaagaccccaatagcagctggccatccatctatgaatctgttgcttcgtaagacatttgatctttatgccaatgtccggccatgtgtctcaattgaaggttacaaaaccccttacacagatgtaaatattgtcaccatccgagagaacacagaaggagaatacagtggaattgagcatgtgatcgtcgatggggttgtgcagagcatcaagctcatcactgaaggagcaagcaagcgcattgccgagtttgcctttgagtacgcgaggaacaaccacaggagcaatgtcacagctgtgcacaaggccaacatcatgaggatgtcagatgggctctttctgcaaaaatgcagggaagttgcagagaactgtaaagacattaagtttaatgagatgtacctcgacactgtatgtttgaatatggtacaagacccgtcccagttcgatgttcttgtcatgccaaatttatatggagacatccttagtgatctgtgtgcaggactgattggaggtcttggtgtgactcaaagtggcaatattggagccaacggtgttgccatctttgaatcggttcacgggacagccccggacattgcaggcaaggacatggccaaccccacggccctgctgctcagtgctgtgatgatgctgcgtcacatgggcctctttgaccacgcagcaaaaatcgaggctgcgtgttttgctacaattaaggatgggaagagcttaacaaaagatctgggaggcaactcgaagtgctctgacttcacagaagaaatctgtcgtagagtaaaagacttagattagcacttctggggatttgctgcagtccgtccgtcactccagggggatgccctgtaatcctccttgagagcgcccaccattggtttgcttgcttcgtgacagagcacatttcaaatctggctttttcctaacaaaacccttgcaatggatgcacacaatgccctaggcctttgtgcaaaggttcccaagtgcttgtatttattgtctgtctggtaaacctgttttgtaaactataagtgaactgtatcatttatcattgttaacccattttacacctcaggcaaaataatttttcctcaactgtaaatattctgatacagaattaagagaagatatttaactttttaacaaaagccctggatttttggtttatgcaaaacagctgggagtaaaacagggtttcaacaatcgcacaagataatgttattctaaaaatagtgggcacaaaagaaatttactgggaaagttcacagcaaaaatgatatatttcttaaaaatatggaagtaaagatatttgtcctatacatgaattactactaataaaaatgtaagctccaagaaacccataagaacggaagtaattttatttaatatatagataatccttgtcaaagccccagatgctctgtgtatttgattattttgttacttgagatttactattttggggggaagagctctcagacagggagatcactcctcttcactagactaatcatcagcagttgtcagtcagaggagccagccactgcagattccctcccacatgaccacactccagccagggctgcaggtgaccctggaaaggcctggctgccccttcacttcctaaagcaagcgtcactgccctatgcctcagtagtacccgttaaagacttaattgcagaggtggggtttactcaatccaaactgacacaaatcaggccaagctggggcctgtgtagccagcttctgaccatcagtttctgcccctccctctcccacccctgtcccttcccacagcctctgcaccacagcatgaaaatacccttcggcccataccaaagccaagctgttttccctagccgacagttgcaacccatggcttgcataagtaccctggccacaggggatttcttaacaacagatacccatgtctgggtcattttttaaagcttttatttggactcacagtcgtctctgtattttactttaaaaccgctgctttccctgtcttactggattgttctggttaccagtggctttgggtccacagtaataaagaacttaagaactgtcaaaaaaaaaaaaaaaaa

SEQ ID NO: 498 - DNA, 460 bp, Rattus norvegicus
ggccgccgatttttggcgttcagtagtcgcggttggtgggtaacaactgagctaagatgctgcggaatgtgctggcccttcgtcagattgcccagaggaccatcagcaccacttcacgaaggcattttgaaaacaaagttccagagaagcaaaagctgtttcaggaggataatgggatgccagttcatctgaaaggcgggacatctgatgccctcctttacagagccacaatgcttctgacagttggtggaacagcgtatgccatctatatgttagctatggctgcattccccaagaagcagaactgacgtcgtcatcccagtctccacatggttcagtttcattcactgcgcgatggaccaggaacctgatgaataactgaactcttctatggggatcaatatttattgatgtgtattaactgccaccaataaagcagtccttaaccattaaaaaaaaa

SEQ ID NO: 499 - DNA, 2557 bp, Rattus norvegicus
aacctctttccctgagcgccacaggctctagaaagagaggctggttctagcaggatcagctccacctcctcagtgcccggaggctgctggaaagagattgccctgtcacttctggagaagatgcagacccaggagatcctgaggatcctgcggctgcccgagctatcggacttgggccagtttttccgcagcctctcagccaccacccttgtgagtatgggtgcactggctgccatccttgcatactggctcactcaccggccaaaggccttgcaaccaccatgcaacctcctgatgcagtcggaagaagtagaggacagtggtggagcccggcgatctgtgattggggattgcactcagttgcttacccactactatgacgatgcccggacgatgtaccaggtgttccgacgtgggcttagcatctcagggaatggaccctgtcttggcttccggaagccagagcaaccttaccagtggctgtcctatcaagaggtggccaaaagggctgaattcctggggtcaggacttctccagcatgactgtaaagtgggcacagagcagttcattggcgtttttgcacaaaatcggccagagtggatcattgctgagctggcctgctacacatattccatggtggtggtaccgctctatgacacactgggcccagggtctatccgctacatcatcaatacagcggacatctgcactgtaatcgtggataagccgcataaggctatactcctgctagaacacgtggagaggaaggagactccgggcctcaagctggtcatcctcatggagccatttgacgatgccctgagagagaggggaaagaagtgcggggtggacatcaagtccatgcaggctatagaggactccggccaagagaatcatcgtgtccccgtgcccccacggcccgatgacctctccattgtgtgtttcacgagcggtacaacagggaaccccaaaggtgcgatgctcacccacgggaacgtggtggccgatttctcgggctttctgaaagtcacagagagtcagtgggcccccacttgtgcggatgtacacttttcctatttgcctttagcacacatgtttgagcgaatggtgcagtctgttgtctactgccatggagggcgtgtgggcttcttccagggagacatccgcctcctctcagacgacatgaaagctctccgccccaccatcttccctgtggtcccacggctgctgaatcggatgtatgacaagatcttccaccaggcagacacctcactgaagcgctggctcctggagtttgcagcaaagcgcaagcaggctgaggtccggagcggaatcatcagaaacaatagtatctgggatgaactcttctttaataagattcaggccagtcttggagggcacgtgagaatgattgttaccggagcagcccccgcatcaccaacagtcctgggattcctacgagcagctctggggtgccaggtctatgaaggttatgggcaaactgaatgcacagctgggtgtaccttcacaacgccaggggactggacatcagggcacgtgggagcccctctgccctgcaaccacatcaagctggtcgacgcagaggaactcaactactggaccagcaaaggagaaggagagatctgtgtgaaaggaccaaatgtgttcaaaggctacttaaaagacgaggacaggacaaaggaggccctggacagtgacggctggcttcacacgggagacattggaaaatggctgccggagggaacgcttaaaatcatcgatcggaaaaagcacatatttaaacttgctcagggggaatacgttgcgcccgagaagattgagaacatctacatccgaagtgagcctgtggcgcaaatctacgtccatggggacagcttaaaggcctttctggttggcattgttgtgcctgaccctgaagtcatgccttgctgggctcagaagaaaggaatcgaagggaactaccaggaactctgcaaaagtaaggaattgaagaaagccattctggatgacatggtgatgttggggaaagaaagtggactgcattcttttgaacaggttaaagccatttacatccattgtgacatgttctcagttcaaaatggcttgctgacaccaacactaaaggctaagaggcccgagctgagagagtacttcaaaaagcaaatagaagagctgtactcaatctccatgtgaagctcaaggaggcccttctcagcccagcaaagtttgcagcaatattctaattattcttgagagaaaggagtcagaatgccacagctcagagtgaacgagcacctgattttttttttttttgcaactgagcctttcctgacctgagaagtctctaacaatattttctctaccatcaccaagtacactttatttttattaaatgatattgtagcaagctgctaaaaaaattattgcaaacggtaatgtaaaaacaaatcaagacactttctcaagaactgtgtaccactaaagtaatatattcgcgatgttcacagaattccattaaacataaagaaaaaaaagt

SEQ ID NO: 500 - DNA, 1836 bp, Rattus norvegicus
ccttgcactggtgggctcccagcaaacatccagctggacattgatggggaccgtgaaacagagcgcatctactctctctttaacctgtacatgggcaagttggaaaagatgcaggaggcctgcggcagcaagtccgtatacgatggccctgagcaggaggaatactcaacattcatcatcgatgacccccaggagacgtacaagacgctgaagcaggtcatcgctggggtggggacccttgagcaggagcacgcgcagtacaggaggaacaagttcaagaagacgagatacgggagccaggagcaccctattggagacaagagcttccagaactacatcaggcagcagtctgagatctcaacccattccatttaaggtcacagcacttcccagaacggtgctgttgagccacaccaggaaaaagcagacgaaagaagacagaatacatacatggagaggaaccatgttcacccgttcactcgggccccaccacgctggcggggccaccgagagccaagcatgctccttccccagcaggaactgttgcctgggctgtgcacgcccctccgctgccagcacaggtggtctgagccatcctggaatgtatgagcatcgtctttttactcctttaatcgtacagggatccagggatctgttaaatagtagggaactgtggactctgtctaaatctgttccccccgtggtccagcccctctttgcagcggcacatggttcgtccatgttagcgtgcaccttctgtagtgtgcactgtctcttgttccttgcctgctggtctctattacatgtagccgtctggccctcgccctagacgtacatgtaatcctgcccttctacctaatccctgctcgggatgttagaagcagtattttcctgtcagccagcaggcgcagcctttgccctcagcttatgttggtttgttcctggctaaagagttttgtggctgggatgggacaggatggtacagaaaccccttgatctttgaggacatggggtccttttctttcttagagtccctggagagggagggctgtgagcccagtcttctctgggtgaccatcacccctcagtttgaacacaggtctggatgccgggtaaggttttaaactagattccacatgcttgctgccttggtgaaagtttgggaaaggtttttaaaaatgtcgttttccaagctgtctttcttaatgttcttaaaggatcgtttcttaaatagcattttgatttgaggaagtatggaacatcaatagctatatgcattaaagggggttgacccaggggaatccaaaggggacagtatttgatttctcacaaaccaagccaaagggtcctcagggacgggagctctggaatagaggctgcactgtccagcaataaaggccaaacgtggcattgcacacgcctatgtctctgtgagcccaacaggccacacgtggcactatctggagccacttttgattggggtgggagggtcctgaaacagacaagacagtccgtgccagcttcgccccacagtgctgctggagtcacatcccaagctgcatcttcagaggctgagaggggcggctctgggtagatgttgctaagggacactaccacgcatctggtaccattttctctttcttcatatcttgggaggttcactctgcatctggaaacataatagcattggatggcatagcaacggaagatgaaaaaaagtcggtaacttgtgcactgaacatgtttttaacttgggtttgtaacagtgtttctgtttataagatactaacgaccctgatgtattttactgacccattaaagcagatgtttattcat

SEQ ID NO: 501 - DNA, 2849 bp, Rattus norvegicus
ccgccatgggctgctgcagctccgcctccgccgcgcagagctccaaacgagaatggaagccgttggaggaccgtagctgcacagacataccatggctgctgctcttcgttctgttctgcattgggatgggatttatttgtggcttttcagtagcaacaggtgcagcagcaagactagtgtcaggatacgacagctatggaaatatctgtgggcagagaaatgcaaaactggaagcaatagcgaacagtggcctggaccacacccaccggaagtatgtgttctttttggacccatgcaatctggacttgataaacaggaagatcaagtctatggcactgtgtgtagcggcatgtccacgacaggagttgaaaaccctgagtgacgtccagaagtttgccgagatcaatggttcagcactgtgtagctacaacataaagccttccgagtacactctgactgcaaaatcctctgccttttgccccaaactaccagtaccagccagtgcacctattccattcttccatcgctgtgctcctgtgaacatttcctgctatgccaagtttgcagaggccctgatcacctttgtcagtgacaatagtgtcttacacaggctgattagtggagtaatgaccagcaaagaaattatattgggactttgcttgttatcactagtyctgtccatgattttgatggtgattatccggtatatctcaagagtgctagtgtggatcctaacgattctggtcatcctgggttcactaggtggcaccggtgtactatggtggctatatgcaaagcagagaagctcccccaaagaaacagttattcctgaacagcttcagatcgcggaagacaatctgcgggcgctcctcatctatgccatttctgctacggtgttcactgtcattctcttcctgatcatgctggttatgcgtaaacgcgtcgctctcaccatcgccttgttccacgtggctggcaaggtcttcatacacctgcctctgctagtcttccagcccttctggactttttttgctctcgtcttattttgggcatactggataatgacacttctcttccttggcactactggcagtgctgttcagaatgaacaaggtttcgtggagtacaaaatctctgggcctttgcagtacatgtggtggtaccacgtggtcggcctgatttggatcagtgagttcattctcgcctgtcagcagatgactgtggcaggagctgtggtaacatactactttacaagggataaacggaatttgcctttcacacctattctggcatcagtgaaccgccttattcgttaccacctcggtactgtggccaaaggatccttcattatcaccctcgtcaagatccccaggatgatccttatgtatatccacagtcagctcaaagggaaggaaaacgcttgtgcacgatgcatgctgaaatcctgcatttgctgcctttggtgtcttgaaaagtgcctgagctacttaaaccagaatgcatacacagccacagccatcaatagcaccaacttctgcacctcagcaaaggatgccttcgtcattctagtggagaatgctctgcgagtggctgccatcaacacagtgggggacttcatgttattcctaggcaaggtgctgatagtctgcagcacgggcctggctgggattatgctgctcaactaccagcaagattacacagtgtgggtgctgcctctcatcatcgtctgcctctttgctttcctagtcgctcattgcttcctgtccatttacgaaatggtagtggatgtgttgtttttgtgttttgccattgatacaaaatacaatgatgggagcccaggccgagaattctatatggacaaagtcctaatggagtttgtggaaaacagtaggaaagcaatgaaagaagctggtaagggaggcgccgcggatgcccgagagctaaagccgatgctcaggaaaaggtgacctgtctctggggactggaagaatggactcaaaggaggctgtttacacaaggctctcccactcaccagctgttgagtttgtgaggaagacaggatcttattacttcaatggccgcgatcaagaaggttctccaaccatatacagccaaatggatttactaccatggggctggctaattaatgattaattcaggggcawtttgatagtaatctgccttggcagccacatcytcaaacttcatgttgctttctcttctggccttgtcatgttgaggtcaagccctgctagtgggtgctggcttgaagtcagaactcacggggtgggggggaattctctgcgctcatctgtcctctcggaactctgctaattatagawtccacgtkgattgytaaytattamtwaggggcctgctgcatgctaagcactgggatgggtgcctgacataatactgaatcctcmcacggccctgtaaagttgctttgtatcgctgacattttgaccatgatgaaatgagatgctcmsararawymtgtkttgtggktaaraycacmcagttgatargatcsgtattcccatttcagaggccctccactataacactatgctttgctcattcytgctacaaagataactgccctgtagcatcccctgtgggtatcactccctgtctcaaattggggtgggtatggcggtgtatgtgcatgggaagtgtcttggggggagggttgtagaagcacagaggaatcacagaattattttctaagcgagataacactgtttgtttatggcccatggatcatatctccctgtccccacctatttttgtaaataaagttttatgggaacacaaccacatcctttataaaaaaaaaaaaaaaaaaa

SEQ ID NO: 502 - DNA, 1433 bp, Rattus norvegicus
gctatcgtggctcttgcgttctctgaagatggcggcagctgcgggaaggttgctctggtcctcggtggctcggcctgcgagcactattttccggagtatttctgcctcaacagttcttaggcctgttgcttctagaagaacctgcttgacagacatgctgtggtctgcctgtccccaagcaaagtttgcctttagcaccagttcttcattccacacccctgctgtcacccagcatgcgccccattttaaaggtactgctgttgtcaatggagagttcaaagagctgagtctcgacgactttaaggggaaatacttggtgcttttcttctaccctttggatttcacatttgtgtgtcctacagaaattgttgctttcagtgacaaagccaatgagtttcatgacgtaaactgtgaagtagttgcggtttctgtggattcccacttcagtcatcttgcctggatcaacacgccaagaaagaatggtggtttgggccacatgaacatcacgctgttgtcggacttaactaagcagatatcccgagactacggagtactgttggaaagtgctggcattgcgctcagaggtctcttcattattgaccctaatggtgtcatcaagcacctgagtgtcaatgaccttccggtgggccgaagtgtggaagaaccactccgtttggtaaaggcgttccagtttgtggagacccatggagaagtctgcccacccaactggacaccagagtcccctacgatcaagccaagtccaacagcttcaaaagagtactttgagaaggtccatcaataataggtcatcctatgtctgctggtttacctgaagcttctcatgccaaaagagagccccagctggaatcctgaagattatttatagaatggcaaaaacctcaccatgcttgtgtttataagtactgctccatgggctttgtaattttaagacaggttcaggttaaaggtggccagctccttccatagctgtccttactagggacttcttgatggctaccaattctctacaagtgcttggtccccatttcttagatcatgtcttcagagggttaagatttcttagcctgccctgaagcttggtctacagtgaagtagcacatagcaccagtacttagtgaaatgaagtagcacatagcgccagcacttagtgaaatgaagtagcatatagtgccagcacttagtgaaagcttctgatcaaggtcctgaaatttcctcttggatttttgttaattatgctgaatttcccattattttttagtgtagtcattaactcacagtgtccttgtgtgttctaaggtattgatgagttataatcatgaaggactatgtttctaaaacactatgtcattttcttttcttcaagtgctggatgtaaagaataaaaataaacattaagataaaaaaaaaaaaaa

SEQ ID NO: 503 - DNA, 1630 bp, Rattus norvegicus
cttttttttcctctcccttgatttcaacattttcccgatcttcttggcgccgccgacgcctcttacctgttctgcgcagcgcgcgagctggcagctgagagaagtgggggtgcgttttaggttttaagcaaaggcaaaaaaaaaaattaagccaaatccattttttttccttcacctctccccgtttcaaggcctccaagatcattatttctgtagctttggggtgagcgattctgtgtttctcttcatcacccctccaattctgccccgatcccgcctgggtctccactcactgcgtgcacctggcgcgcctcttttttttttcacccccaacctgttgcaagtctttaatccttgcaattgggacttgcgtgcaggcacctgaatcctccttgcctcatattttgcaagtgtttggaggacagcacctgctttacctgcaagagatattttttaaaaaaaaaaaaatctccaggctccctcttggcccctttctccacacactctcgctctcctgccccgccccgaggtaaagccagactcggaaaaaatggtgatcagcgtggtcctcctgctgctggccgcctgtgccgtgccggctcaaggcctgggctctttcgtgcattgtgaaccctgcgacgagaaagctctgtccatgtgtccccccagccctctgggctgtgagctggtcaaagagcccggctgtggctgctgcatgacttgcgccctggcggagggacagtcgtgtggcgtctacactgagcgctgcgcccagggtttgcgctgtctcccccggcaggatgaggagaagccgctgcacgccctgctgcacggccgcggggtttgcctcaacgaaaagagctacggcgagcaaaccaagatagagagagactctcgggagcatgaggaacccaccacctccgagatggctgaggagacctactccccgaaggtcttccggcccaagcacactcgcatttccgagctgaaggccgaggctgtgaagaaggatcgcagaaagaagctgacccagtctaagtttgtggggggcgcggagaacactgcccacccccgagtcatccctgcacctgagatgagacaggaatctgaccaaggcccctgccgcagacacatggaagcttccctccaggagttcaaagccagcccacgcatggtgccccgtgccgtgtacctgcccaactgtgaccgcaaaggattctacaagagaaagcagtgcaagccttctcgtggccgcaaacgtggcatctgctggtgtgtggacaagtatgggatgaagctgccgggcatggagtacgtcgatggggactttcagtgccacgccttcgacagcagtaacgttgagtgacgcgtcccctcccttcctccccctttcctaccccccagccccaactccagccagcgcctccctccaccccaggacgtcactcatttcatctcatttaggggaaatatatatacatatatatttgaggaaactgaggacctcggaatctctagcaagggctaaggagacactccccattcccgaccccggaaacgtattcctatttgaagcaagttgaacggacagagaagggaagaagagaaggggcaagaaggagcgaggaat

SEQ ID NO: 504 - DNA, 468 bp, Rattus norvegicus
aaaatgagtgagtccttggtggtttgtgatgttgctgaagatttagtggaaaagctgagaaagtttcgttttcgaaaagaaacccacaatgctgctattattatgaagattgacaaggataaacgcttggtggtgctggatgaggagctcgagggtgtctctccagatgaacttaaagatgaactacctgaacggcaacctcgcttcattgtgtatagttataaataccagcacgacgatggccgggtctcctaccctctgtgctttatcttctccagtcctctggggtgcaaacctgagcagcagatgatgtacgctgggagtaagaacaagctggtccagaccgccgaactaaccaaggtatttgaaataagaaacaccgaagacctgactgaagaatggttacgtgagaaacttggatttttccactaatgtgaacttctgtgtttcttaagtatttatgtatta

SEQ ID NO: 505 - DNA, 1089 bp, Rattus norvegicus
gcggccgctccagcatggcggcgggggcggctgaagcagccgaggcggccgtggcagtggtggaagtcggctctgcccggcagtttgaggagctactgcgcctcaaaaccaagtcactccttgtggtccatttctgggcgccatgggctccacagtgtgtacagatgaacgatgtcatggcagagttagctaaagagcatcctcatgtttcatttgtgaagctggaagccgaagctgttcctgaagtatctgaaaaatatgaaattagttctgttcccaccttcctgttcttcatgaagggaacacctcaggaaccacgctgtggttttagcaagcagatggtggaaatccttcacaaacacaatattcagttcagcagttttgatatcttctcagatgaagaagttcgacaggggctcaaaacatactctaattggcccacctatcctcagctctatgtttctggagagctcataggaggacttgacataattaaggagctggaagcatcagaagaactagatacaatttgtcccaaagcacccaagttagaggaaaggctcaaagtgctgaccaataaagcttctgtgatgctctttatgaaaggaaacaaacaggaagcaaaatgtggattcagcaaacaaattctggaaatactgaatagtactggggttgaatatgagacttttgatatactggaggatgaagaagtgcgtcagggattaaaaacgttctcaaattggccaacctaccctcagctgtatgtgagaggggatcttgttggaggactggatattgtcaaggaactgaaagacaacggtgaattgctacctatactgaagggagaaaattagtgaacgttaagcacggtgtccaaggactgcaagaagtatttaattatcgtggaatagttgatggcttggtcctgcgaagtggactgagagtagaaatgcgacatagtcagctgtgctcaatgtgcttcacaaagttgtgctgaaaaaaacatatgttacattttccatgaagcatagaaggcaataaactccagattcagctaaaaacgaaaaacaaaaaaaaaaaaaaaaaaaa

SEQ ID NO: 506 - DNA, 5575 bp, Rattus norvegicus
gtttttttttttttttttcctcccctccctcccccgcgtttcatgcagctgatccgaaagggaataaaaggctgcgcataatcataatataaaagaaggggagcgcgagagaaggaaagaaagccgagaggtggaagaggggggagcgcctcaaagaagcgatcagaataataaaaggaggccgggctctttgccttctggaacgcgcggctcttgaaagggcttttgaaaagtagtgttgttttccagtcgtgcatgctccaatccacggagtatattagagccgggacgcggccgtcgcgggggcagcgacgacggcagtcctcggagggagcaccagcgctagcagcggcggcggcgtccggagtgccccccgcgcggcagcgatgcggtccccacggacgcgcggccggccggggcgccccttgagccttctgctcgccctgctctgtgccctgcgagccaaggtgtgcggggcctcgggtcaatttgagctggagatcctgtccatgcagaacgtgaacggagagttacagaatgggaactgttgcggcggagcccggaaccctggcgaccgcaagtgcacccgcgacgagtgtgacacgtacttcaaagtgtgcctcaaggagtatcagtcccgcgtcacggccgggggaccctgcagcttcggctcagggtctacgcctgtcatcgggggcaataccttcaatctcaaggccagccgcggcaacgaccgtaatcgcatcgtactgcctttcagtttcgcctggccgaggtcctacactttgctggtggaggcatgggattccagtaatgacactattcaacctgatagcataattgaaaaggcttctcactcaggcatgataaaccccagccggcagtggcagacactgaaacagaacacagggattgcccactttgagtatcagatccgagtgacctgtgatgaccactactatggctttggctgcaacaagttctgtcggcccagagatgacttctttggacattatgcctgcgaccagaatggcaacaaaacctgcatggaaggctggatgggtcctgagtgtaacaaagcaatatgccgacagggctgcagtcccaagcatggctcctgcaaactcccaggtgactgcaggtgccagtatggttggcagggcctgtactgtgataagtgcatcccgcacccaggatgtgtccacggcacctgcaatgaaccctggcagtgcctctgtgaaaccaactggggtggacagctctgtgacaaagatctgaattactgtgggactcatcagccctgtctcaaccggggaacatgtagcaacactggccctgacaaataccagtgttcctgccccgagggctactcaggaccgaactgtgaaattgctgagcatgcctgcctctctgatccctgccacaacagaggcagctgcaaggagacctcctcgggctttgagtgtgagtgttctccaggctggactggacccacgtgttccacaaacatcgatgactgttctccaaataactgttcccatggaggcacctgccaggatctagtgaatggattcaagtgcgtgtgcccaccccagtggactggcaagacttgtcagttagatgcaaatgagtgcgaggccaagccttgtgtaaatgccagatcctgtaagaatctgattgccagctactactgtgattgtcttcctggctggatgggtcagaattgtgacataaatatcaatgactgccttggccagtgtcagaatgatgcctcctgtcgggatttggttaatggttatcgctgtatctgtccacctggctatgcgggcgatcactgtgaaagagacatcgatgaatgtgctagcaacccctgcttgaatgggggtcactgtcagaatgaaattaacagattccagtgtctgtgtcccactggtttctctggaaacctctgtcagctggacatcgattactgcgagcccaacccttgccagaatggcgcccaatgctacaatcgtgccagtgactatttctgcaagtgccctgaggactacgagggcaagaactgctcacacctgaaagaccactgccgcaccactccctgtgaagtgattgacagctgcaccgtggccatggcctccaacgatactcctgaaggggtgcggtatatctcttccaacgtctgtggtccccatgggaagtgcaagagcgagtcaggaggcaaattcacctgtgactgtaacaaaggcttcaccggcacctactgccatgaaaatatcaacgactgtgagggcaacccctgtacgaacggtggcacgtgcatcgacggcgttaactcctacaagtgtatctgtagtgacggctgggagggcgcgcactgtgagaacaacataaatgactgtagccagaacccttgccactatgggggtacatgtcgagacctggtcaatgacttttactgtgactgcaaaaatgggtggaaagggaaaacctgccactcgcgtgacagccagtgtgacgaagccacgtgtaataacggtggtacctgctatgatgaagtggatacgtttaagtgcatgtgtcctggtggctgggaaggaacaacctgtaatatagctagaaacagtagctgcctgccgaacccctgtcataatggaggcacctgcgtggtcaatggagactccttcacctgtgtctgcaaagaaggctgggaggggccgatttgtactcaaaataccaacgactgcagtcctcacccttgttacaacagcggaacctgtgtggatggagataactggtaccggtgcgaatgtgcccctggttttgctgggccagactgcaggataaacatcaatgagtgtcagtcttccccttgtgcctttggggccacctgtgtggatgagatcaatggctaccagtgtatctgccctccaggacatagtggtgccaagtgccatgaagtttcagggagatcttgcatcaccatggggagagtgatacttgatggggccaagtgggatgacgactgtaacacctgccagtgcctgaatggacgggtggcctgctccaaggtctggtgtggcccgagaccttgccggctccacaaagggcacggcgagtgtcccaatgggcagagctgcatcccagtcctggatgaccagtgtttcgtgcgcccctgcactggtgctggcgagtgtcggtcctccagcctccagccagtgaagaccaagtgtacatcggactcttattaccaggacaattgtgcgaacatcactttcacctttaacaaggagatgatgtctccaggtctcaccactgagcacatttgcagcgaattgaggaatctgaatattctgaagaatgtttctgctgagtattcaatctacatagcctgtgagccttccttatcagcaaacaatgaaatacacgtggccatttctgccgaagacatccgggatgatggaaaccctgtcaaggaaattactgataaaataatagatctcgttagtaaacgggatgggaacagctcacttatcgctgctgttgcagaagtcagagttcagaggcgccctctgaaaaacagaacagatttcctggttcctctgctgagctctgtcttaacagtggcttgggtctgttgcttggtgacagccttctactggtgtgtgcggaagcggcggcggaagcccagcagccacacccactctgcccctgaggacaacaccaccaacaatgtgcgcgaacagctgaaccaaatcaaaaaccccatcgagaaacacggagccaacacagtccccatcaaggattatgagaacaaaaactccaaaatgtcaaaaatcaggacacacaactcggaagtggaagaggatgatatggataagcaccagcagaaagtccggtttgccaaacagcccgtgtacacgctggtagacagagaggagaaggtcccccagcgcacgccgacaaaacacccgaactggacaaacaaacaggacaacagagacttggaaagtgcccagagcttgaaccggatggagtacatcgtatagcagacagtgcgtgccgccataggtagagtttgagggcaccccggggcttgtagtttctttaaactgttgtcgtatcccagtctgaggctgttgttgacttagagtcctgtgttaatttaagtttcgacaagctggcttccactggcactggtagtttctgtggttggctgggaaatcgagtgcagcgctcacagctatgcaaaaaccagtgaatgtgcccgggtgtacattcccctgcagccgactcgtcggctcccaggagctgcccaggcctaggcctcggagcttccacatctgccagcggtcctaatggtgatggcagccttaggatcatagttttatttatatttattgactcttgagttgtttttgtatattggttttatgatgacgtacaagtagttctgtatttgaaagtgcctttgcagctcagaaccacagcaactatcacaaatgactttattatttattttttttattgtatttttgttgttgggggaggggggatttgatgtcagcagttgctggtaaaatgaagaatttaaagaggaaaaatgtgtcaaagtagaatttttgtatagttatgtaaataattcttttttattaatcactctgtatatttgatttattaacttaataatcaagagccttaaaacatcattcctttttatttatatgtatgtgtttagaattgaaggtttttgatagtgttggaaacatatggctttttttttttttttttgtgaactttttctcattacgtgttgcctgtaagccaaaagtaaggtgtttggaaatagtttctcttggaaggatgggataggcttcttcccctgggaatactgatggattttttttttttttttttttttttgtacgacgtcaggtgttcaaacacttccttgatagcatcactttaagacacattctaaggactgactgaggcagattgagaattcgtctagaacaggtttttgtttttttctcttttctttttttattttttcctgctttagacttgaaaagagacaggcaggcgatctgtgacagagcagtttaagggaacaaactgagctatgtagtcagaatgtgactggttggatctcattaaaagtatcagattgtgtgaagttggaagcttaccaatcttactttgtaaattctgatttcttttcaccattcgtatgtaatgctgaaccacttgtagatttgatttcattgttgttgtctactgcatttagggagtattctaataagctagatgaatacttgaaccataaaatgtccagttagagcactgtttagattggccatagagtacactgcctgccttaagtgaggacatgaaagtgctattaccaagttcaagatcaaaaaaggcttataaaacagtcatcctggctcaccacggagcccaggaagatactttgtattgtcctattagtgttatatgaacataaaatacatctttgatgtgttgttcctggcaataaattttgaaaagtgatatttattaaattttttgtatg

SEQ ID NO: 507 - DNA, 680 bp, Rattus norvegicus
gaggggcttgttctttcacctcagcggccgacctggaaaagcctagaaagtgctccccttttcttccgcctccggctacccgcatcggccgcctgcgcggagtcctggccaccaatcggcgcgcgcgctggagtggccgccttctctcacgctaaggggctgagtgcgcctgcgcgctgcgctgtcttttcacgtgtcctgagccggcccacgggagtctccttgcagcaggagtccgagtgcagagtccggagctgcggcggcgtaagtcatggctggacaagcttttaggaagtttcttccgctatttgacagagtattggttgaaaggagtgccgctgaaactgtgaccaaaggtggcattatgcttccagaaaagtctcaaggaaaagtattgcaagcaacggtcgtggctgtgggatcaggcgggaaaggaaagggtggagagattcagcctgtcagtgtgaaagttggagataaagttcttctcccagaacacggaggcaccaaagtagtactagacgacaaggattacttcttatttagagatggcgacattcttggaaagtatgtcgactgaaatcactgttgaaatggtgtcacatgaagctgcccattccactgatattctgaactatttcatcatgtaaataatttccatgcctcccttttataataaa

SEQ ID NO: 508 - DNA, 903 bp, Rattus norvegicus
gagggtaccgctgggctgactagaacagagacaatgtttcgagcagcggcgcctgggcagctccggcgggcggcctcgttgctccgttttcagagcaccttggtaatagctgagcatgcgaatgattctctagcacctattactctaaacactatcactgcagctggacgtcttggaggtgaagtgtcctgcttagtagctggaacaaaatgtgacaaggtggtacaggatctctgtaaagtagcaggcgtggcaaaggttctggtggctcagcatgatgcgtacaaaggccttcttccagaggaactcacaccattgattttggaaactcagaagcagttcagttacacacacatcgttgctggagcatctgcttttggaaagaaccttctgcccagagtagcagccaaacttaatgttgccccagtttctgacatcattgagatcaagtcacctgacacatttgtgagaactatctatgcagcaaatgcattgtgtacagtgaaatgtgatgagaaagtgaaggtgttttctgttcgaggaacatcttttgaggctgcagcagcaagtggaggtagtgccagttcagaaaaggcaccaagttcttcatcagcaggaatatcagagtggcttgaccagaaattgacaaaaagtgaccgaccagagctaactggtgccaaagtggtggtatctggtggtcggggcttgaagagtggagagaactttaaactgcagtatgacttggcagatcagctgcatgctgcagttggtgcttcccgtgctgctgttgatgctggctttgttcccaatgacatgcaagttggtcagacaggaaaaatagtagctccagaactttatattgctgttggaatatctggagccatccagcatttagctggatga

SEQ ID NO: 509 - DNA, 300 bp, Rattus norvegicus
gtggtccaggaagctctggacaaaagccaggtaaggccaacctcccatgcaatccccactccaaacccctacccctcctcgcatgtgccgcctgtcactctgaacctctcagctctcactcttccctctgtcactgccttgttcctctgctttggcaggtgcagagcaccattctgtcaacaagtttcatggccagctagggctcagggaggtgagccagagcgcccagctgctggtctgctcaaggaaatgacccacaggaattccaggctgaagatggacagacgtggtccctactag

SEQ ID NO: 510 - DNA, 318 bp, Rattus norvegicus
atgggtgatgttgaaaaaggcaagaagatttttgttcaaaagtgtgcccagtgccacactgtggaaaaaggaggcaagcataagactggaccaaacctccatggtctgtttgggcggaagacaggccaggctgctggattctcttacacagatgccaacaagaacaaaggtatcacctggggagaggataccctgatggagtatttggaaaatcccaaaaagtacatccctggaacaaaaatgatcttcgctggaattaagaagaagggagaaagggcagacctaatagcttatcttaaaaaggctactaatgaataa

SEQ ID NO: 511 - DNA, 493 bp, Rattus norvegicus
accctaaaatcaagtttgaaacaatgatcatagacaactgttgcatgcagctggtgcagaatccttaccagtttgatgtgcttgtgatgcccaatctctatgggaacattatcgacaatctggctgctggccttgttgggggagctggtgtggttcctggtgagagctacagtgcagagtatgcagtttttgagacgggcgctcggcacccatttgcccaggcagtgggcaggaatatagccaatcccacagccatgctgctgtcagcttccaacatgctacggcatctcaaccttgagtatcactccagcatgattgcagatgcagtgaagaaggtgatcaaggttggcaaggtccggactcgagacatgggaggctacagcaccacaactgacttcatcaagtccgtcatcggccatctgcacccccatgggggctagagccctttacttcctccttcaaaaggatcatgcttcgaatacatcccttcagt

SEQ ID NO: 512 - DNA, 1570 bp, Rattus norvegicus
ccctatccacagcagagatggcggcggcggctgtatcccggacgttgttgccggtggccggacggcgcctgtggggatttacgcgaaggcttccgctccgcgccgccgctgctcagccattgtactttggaggggaccgactcagaagtacacaggctgctccacaagttgttctgaatgttcctgagacacaagtcacttgtttggaaaatggactcagggtagcttctgaaaactctgggatctcaacatgcaccgttgggctgtggatcgatgctggcagtcggtatgagaatgaaaagaacaatggcaccgctcactttctggagcacatggctttcaagggcactaaaaagaggtcccagttagaccttgaacttgagattgagaacatgggtgcccatctcaatgcctatacctccagagagcagactgtctactacgccaaagccttctccaaagatttgccaagagctgtagaaattcttgctgacataattcagaacagtacattgggagaggcagagattgaacgtgagcgtggagtcatcctcagagaaatgcaggaagttgagaccaacttgcaagaagttgtctttgattatctgcacgccacagcctatcaaaacaccgcgctcggacggacaattctgggaccaaccgagaacatcaaatctataagccgtaaggacttagtggactacataaccacacattataagggaccaagaatcgtgctggctgctgctggaggtgtttgccataacgaactgctggagttagcgaagtttcattttggtgactctttgtgcgcacacaaaggagatgtaccagctctgcctccctgtaaattcactggaagcgagattcgggtgagggatgacaagatgccactggcgcacctcgcagtggctattgaagcagttggttggacgcacccagacacgatccgtctcatggtcgcaaacacactgataggcaactgggaccgctctttcggaggaggaatgaatttatcgagcaagctggcccagctcacgtgccatggcaatctctgccacagcttccagtccttcaacacctcctacacagacacaggattgtgggggctctatatggtttgtgaacaagccacagttgctgacatgctgcacgctgtacaaaaggaatggatgcgtctgtgcacagctgttagtgagagtgaggtcgcacgcgccaaaaaccttctcaagacaaacatgctgctgcagcttgatgggtcaactccgatctgtgaagacatcggtaggcagatgctatgctacaacaggagaatccccatccctgagcttgaggccaggatcgatgctgtggacgcggagatggttcgagaagtgtgcaccaagtacatttatggcaaaagcccggccattgctgctctcggtcctattgagcgcttaccagattttaaccagatttgtagtaacatgcgctggactcgtgactgatttttgtgatgaattatcctacacatacatatttataaaactgagacctagaagttttgaaagactgctcatcttcaagtgaa

SEQ ID NO: 513 - DNA, 2037 bp, Rattus norvegicus
ggtctgctttggagtttggtggccacacttttgggctccaagtggcctgagcctgtattcgggcgcctggtgtcccctggcttcccagagaagtatggcaaccatcaggatcgatcctggacgctgactgcaccccctggcttccgcctgcgcctctacttcacccacttcaacctggaactctcttaccgctgcgagtatgactttgtcaagttgacctcagggaccaaggtgctagccacgctgtgtgggcaggagagtacagatactgagcgggcacctggcaatgacaccttctactcactgggtcccagcctaaaggtcaccttccactccgactactccaatgagaagccattcacaggatttgaggccttctatgcagcggaggatgtggatgaatgcagaacatccctgggagactcagtcccttgtgaccattattgccacaactacctgggcggctactactgctcctgccgagtgggctacattctgcaccagaacaagcatacctgctcagccctttgttcaggccaggtgttcactgggaggtctggctttctcagtagccctgagtacccacagccataccccaaactctccagctgcgcctacaacatccgcctggaggaaggcttcagtatcaccctggacttcgtggagtcctttgatgtggagatgcaccctgaagcccagtgcccctacgactccctcaagattcaaacagacaagagggaatacggcccgttttgtgggaagacgctgccccccaggattgaaactgacagcaacaaggtgaccattacctttaccaccgacgagtcagggaaccacacaggctggaagatacactacacaagcacagcacagccctgccctgatccaacggcgccacctaatggtcacatttcacctgtgcaagccacgtatgtcctgaaggacagcttttctgtcttctgcaagactggcttcgagcttctgcaaggttctgtccccctgaagtcattcactgctgtctgtcagaaagatggatcttgggaccggccgataccagagtgcagcattattgactgtggccctcccgatgacctacccaatggccacgtggactatatcacaggccctgaagtgaccacctacaaagctgtgattcagtacagctgtgaagagactttctacacaatgagcagcaatggtaaatatgtgtgtgaggctgatggattctggacgagctccaaaggagaaaaatccctcccggtttgcaagcctgtctgtggactgtccacacacacttcaggaggccgtataattggaggacagcctgcaaagcctggtgactttccttggcaagtcttgttactgggtgaaactacagcagcaggtgctcttatacatgacgactgggtcctaacagcggctcatgctgtatatgggaaaacagaggcgatgtcctccctggacatccgcatgggcatcctcaaaaggctctcccctcattacactcaagcctggccagaggctgtctttatccatgaaggctacactcacggagctggttttgacaatgatatagcactgattaaactcaagaacaaagtcacaatcaacagaaacatcatgccgatttgtctaccaagaaaagaagctgcatccttaatgaaaacagacttcgttggaactgtggctggctgggggttaacccagaaggggtttcttgctagaaacctaatgtttgtggacataccaattgttgaccaccaaaaatgtgctactgcgtatacaaagcagccctacccaggagcaaaagtgactgttaacatgctctgtgctggcctagacgccggtggcaaggacagctgcagaggtgacagcggaggggcattagtgtttctagacaatgaaacacagagatggtttgtgggaggaatagtttcctggggttctattaactgtggggggtcagaacagtatggggtctacacgaaagtcacgaactatattccctggattgagaacataataaataatttctaa

SEQ ID NO: 514 - DNA, 2535 bp, Rattus norvegicus
gagcagtaccccggccactgccagtgtgtgcgtggtgcaggatagactcatggcttcgcctctgaggttcgacgggcgtgtggtcctggtcaccggcgccgggggagggttgggcagagcttatgccctggcttttgcagaaagaggagcattagttgttgtgaatgacttaggaggggacttcaaaggcgttgggaaaggctcttctgccgcagacaaggtcgtggaagaaataagaaggagaggcgggaaagcggtggccaattacgattcaggcgaagcaggcgagaagcttgtgaagacagcactggacacattcggcagaatagatgttgtggtgaacaatgctgggatcctgagggaccgttccttctctaggataagtgatgaagactgggatataattcaaagagttcatttgcggggctccttccaagtgacccgggcagcatgggatcatatgaagaagcagaattatggaagaatcattatgacggcctcagcttctggaatatacagcaactttggccaggcaaattatagtgctgcaaagctgggccttctgggtctcgccaatactctcgtgattgaaggcaggaagaacaacattcattgtaacaccattgccccaaacgctgggtcacggatgacagagacggtgatgccagaagacctcgttgaagccctgaagccagagtatgtggcaccgctggtcctttggctttgccatgagagctgtgaggaaaatggtggcttgtttgaggttggagcaggatggattggaaaattgcgctgggagaggaccctgggagccattgtcaggaagcggaatcagcccatgactcccgaggcagtgagggacaactgggtgaagatctgtgacttcagcaatgccagcaagccgaagagcattcaagagtccacaggtggtataatcgaagttttacataaaatagattcagaaggaatctcacaaaatcacaccggtcaagtggcatctgcagatgcatcaggatttgctggcgtcgttggccacaaacttccttcattttcttcttcatatacggaactgcagtgcattatgtatgccctcggagtaggagcttcagtcaaaaatccaaaggacttgaagtttgtttatgaagggagtgctgacttctcctgtttgcctacatttggagtcattgtcgctcagaagtccttgacgagtggaggcttagcagaggttcctgggctgtcaatcaactttgcaaaggttcttcatggggagcagtacttggagttgtataagccacttccccgatcaggggaattaaaatgtgaagcagttattgctgacatcctggataaaggctctggcatagtgattgttatggacgtctattcttattctggcaaggaacttatatgctataatcagttctctgtcttcgttgttggctctggaggctttggtggaaaacggacatcagaaaaactcaaagcagctgtagccgtaccggatcggcctccagatgctgtactgagagataccacttcactgaatcaggccgctctgtaccgcctcagtggagactcgaatcctttacacattgacccgagctttgcgagcattgccggttttgagaaacccatattacacggattatgtacttttgggttttctgcaaggcatgttttacagcagtttgcggataatgatgtgtcaagattcaaggccattaaggttcgttttgccaaaccagtgtatccaggacaaactctacaaactgagatgtggaaggaaggaaacagaattcattttcaaaccaaggtccaagagactggagacattgtcatttccaatgcatatgtggatcttgttcctacatctggagtttccgctcagacaccttctgagggtggagcactgcagagtgctcttgtatttggggaaataggtcgacgcctcaaggatgttggacgtgaggtggtaaagaaagtaaatgctgtatttgaatggcatatcacgaaaaatgggaatgttgcagccaagtggaccattgacctgaagaacggctctggagaggtttaccaaggccctgccaaaggctctgctgacacgaccatcacaatttctgatgaggatttcatggaagtggtcctgggcaagcttaacccacagaatgccttcttcagtggcagactgaaggcccgaggaaacatcatgctgagccagaagctacagatgattctgaaagactatgccaagctctgaaggacccactgcgtgctttaataaaaccagaatcattacgttctgtctacgcagtcatgctccagccttctttgaaacgatccacggtaatgtgcagcagaaatcgcttaacattttcagattcagataactttcagattttcattttctactaatttttcacatattatttttataaggaactgtaatctagctagcaaataattgttctgttcatagatctgtatcttaataaaaaaaaagtcaaccgaaaaaaaaaaaaaaaaaaaaaaaaaaaa

SEQ ID NO: 515 - DNA, 4563 bp, Rattus norvegicus
gcctgctctccggcggagctgcgtgaggccaggccggcccccggcccccccttccggccgcccccgcctcctggcccacgcccgcccgcgctcggcccgccagcgcctccatccgggctggcggccccgcgtcgacgccgtccgccacctcgctgctaactcccgtgcagggcgccgtcggcggggcctcgctccgtcgggcctgcggatctccccaccgcctcctcctctatctacctcaacaccccattcctgcttcgccagaggaggcggtccccaccgcaggcagtccggcttgcaggtcgccggcgttgtcatcccccgcgctccccctcccagccctccccggcgcgcagcccggcagctcctctcttttcgctgcagtcccgagcagccgcggcgccgccacgcctgacccccccacaagaagccggggcttacgacggctgagggctccgtcggccctaaccgagctgggtgcccgtggccggggtgacgcctccattcctcccccctcaacaccgtcctcgatccttcgaagttgcatcctttcctctgcttagagtgcgccccccctcgcgcactcgcttacccgccacctttcctaggctcccctcctgccccctccccgttcctcctcgcctcagactccctccccctcacgtccgccctctgccttcgcctacccaagtggattaattatacgctttctgtttctctccgtgctgtcctctcccgctgtgagcctacccgcctctcgctgtcctctctccctctctccctctctgtgtcccccccctttcacgttcactctgtctctctcactatctctgccccccaactatccttgatacaacagctgacctcatttcccgatacctttcccccccccgaaaatacagtatctggcccgccccagccctaagataccctaaagaagcagaagagacgcccccctccccatcaaaaaaagccatctccccgttctgtcccgtcgcacattcggcctctgcgacttggacagagcggcgctggcagaggagtgcccggcagaagggccttcgcccgctgttcggtttgcatacccgcagcagggagatgggcggcagcgtcgccggcttccaggtaccaatggggatcccagtggggaagtcgatgttggtgcttctcatctctttggccttcgccttgtgctgcatcgctgcttaccgccccagcgagactctgtgcggaggggagcttgttgacacgcttcagtttgtctgttcggaccgcggcttctacttcagcaggccttcaagccgtgccaaccgtcgcagccgtggcatcgtggaagagtgctgcttccgcagctgcgacttggccctcctggagacatactgtgccacccccgccaagtccgagagggacgtgtctacctctcaggccgtacttccggacgacttccccagataccccgtgggcaagttcttcaaattcgacacctggagacagtccgcgggacgcctgcgcagaggcctgcctgccctcctgcgtgcccgccggggtcgcatgcttgccaaagagctcgaagcgttcagagaggccaagcgccaccgtcccctgatcgtgttaccacccaaagaccccgcccacgggggagcctcttcggagatgtccagcaaccatcagtgaaccaaattatgtggtaattctgcaatgtagtaccatcagtctgtgacctcctcttgagcagggacagctccatcatgtcccacactaaggtctctctgctccacttcccttcccaggtttctccccacccacccccatgccccgcctccccacatcaggctgctccccttgccccacaccatcgggcaaggggatcccagcaactcttcaaaaccaaatttgattggctctaaacaacccaattggcaccctccaaattatatatgaacattaaaaaaaaactttaaagcatatagtccctttacaacaaattggcttaagaaactccataactgataatctaaaaattaaataaccaaagaaattaattggctaaaaacatactaaaaattaattggcttaaaaacaattggcaaaaatcaaataatttggcccgcccccccccccttcatcttctttccatttagatctttagtcaaattggctcagacttggatctcagaacccaagaagaaaggaaggggacccaaaattttgcaggtagcatgtcattgcttcagtgctctctccttgtcactagtcacttttagcataatctggctgtgaacaacaatagccgcccaaactctttcttcactggtcattccatcacaaatgtcacccatgtcaccaaggggctgggtgaaggaacccaaggagaggaacagaacatgaaaactgaaaatagaacctaattggcacaagcccccagtcccaaaaatctcacttttcatacctactctaaaaagcacatgattatacccacacgtacatgcacacacacatgcacacaggcatgcatacacacacacacacacacacacacactattagatgagaacattgaaatggctgagcaacttcgattggaaccacattgcccaatccaaggcccatcttaaattccctgagcagtttgcatggtttgagctcctctctgaatccatctagtttctgctgccagtgtagagtcagtttggccagataaggagatggcactgccaagtgatacatgctacccgagtagcctgacccctaggtgtgctcctgggaggaaagatctgggggacaacccctaccccaagcacacctatgggccatctctgtcaatctcctggggagcccccactttttaggggctccccaggagactcacactgatgtggggagtgtgggaagtctggcggttggaggggtgggtggggggcagtgggggctgggtggggggaaactatgggtaggaagtggtcccagagaggtcttaggtggaacagtcaggaggaggcacaggtcaacttgcagaattactgaagaatcaggaccccaaattttctgtcaattgatctattcccctctttttatgtctggggcaggttttttccttttttttttttaatccctccttagcttttaatgcgctcataatcccattccctatgtaacgggggcagcgatcaagtaatgaatgcatcaagccatcaataccagcgagagccagtaacaccggctagagccatcaacaccggcttccaccatgtcctgctcccaaccatttatcaaccttttttttttttttatctgtctctatcgcttggcctgagttgggagtggagtctctgtggggtgctggccacgcacccacagagaaataaaaggaattgagaaggccgctacctggcctgacttctggggacagtggctggtccccagaagttctgaggagtggagggggcgtggggcagtgtcccctcaggtgttaggaaggtgctcggaggccacaaagatggggccccagctggccctgccagttgggggggaaggggatgtagatgtaagactagagaggttccatcaggcgggagcaagtggctgccttctgagcacttgggggaggtcctccccgtgcccctcagtgtcatcttgcccactcctcagcaccccatcttaccctcaggaggtctggagctctacagacctcctgggggcaaggtggggtgaggcctggagctggggaagcgaggaggctttaaagccttcagagccaggagaactgtgtacatggggttgtctgggccctggggcccgagggtctggtgagccgtagcagccactccacggtgcctaggactgcggcggggaacagggcggctggaggtttacctcacccccacttctgcttccagtgcagtccccctgcccaacagtcctactagtaatctagaggcctgaggcttctgggcccaggtgacaggactggcaccaccctgggggcggtgtgtgtcagccagccatggcacagagggttctcagcaagtgcctaaagaatgggccatttggaacattggacagaaactcaaagagtaaattgttataattggagaatatgaattggcctggtacccaaaatatctcgaggcaccctaaattacctgcccatttgactggacatccacccagtgttaatatgcctcgtgggatgggtgttttcaggggcatttgctgaccatcctctgtgtccccagatttgcagttctccccatcataggtcaccctgatgcaggcacctccctggcctcccatgcctagtgtggccctccatcttgttttgtctcttccctactgtcttcggtgggatcccctcttgggtcccccaatttgtcatcctgtgaagacttcccacgcgtcgaatgccatatgtcacctgtgccactgcccatgtcatccagcagtggccccgggtatttgccccaactcagtccttttaacatgcattttctggcaaaatccaaagcttgggttttgtttttaacctgttaacgcttgcaaacctaataaagcattcaaaatact

SEQ ID NO: 516 - DNA, 783 bp, Rattus norvegicus
atgaagatcgaactactgcctgccctgaccgacaactacatgtacctgatcattgatgaggacacccaggaggccgccgttgtggacccagtgcagccacagaaggttatagaaactgtgaaaaagcaccgtgtgaagctgaccacagtgctcaccactcaccaccactgggaccacgctggtgggaacgagaagttggtgaagctggaacctgggctgaaggtttatggaggtgatgaccgcattggggccttgacccacaaggtcacacacctttccacactggaggtggggtctctcagtgtcaaatgtctgtcaacaccctgccatacttcagggcacatctgttactttgtgagcaagcctggtagctcagagccttctgctgtgttcacaggtgacacattgtttgttgctggctgtgggaagttctatgagggaaccgcagacgagatgtacaaggcgctgcttgaagtcttaggccggcttcctccagacacaaaagtcatctgtggccatgaatacaccgtaaacaaccttaagtttgcgcgccatgtggagcccggcaataccgccgttcaagagaaactggcctgggccaaggagaagaatgccatcggggagcccacggtgccatccaccctggcagaggagttcacttacaaccccttcatgagagtgaaggagaagaccgtgcagcagcacgctggagagaccgaccctgtgaccaccatgagggccatccgcagggagaaagaccagtttaaggtgcctcgggactga

SEQ ID NO: 517 - DNA, 1719 bp, Rattus norvegicus
cgggtgtgagcggggttattgaagtaaaaatgtccagaaaaatccatggcggttctgtggtggaaatgcaaggagatgaaatgacacggatcatctgggaattgattaaagaaaagctcattcttccctacgtggaactggatctgcatagctatgacttaggcatagagaatcgggatgccaccaatgaccaggtcaccaaggatgctgcggaggctataaagaaatacaacgtcggcgtcaagtgtgctaccatcacccccgatgagaagagggttgaggagttcaagttgaaacaaatgtggaaatcacccaacggtaccatccggaacattctgggcggcactgtcttcagagaagctattatctgcaaaaatatcccccggctagtgacaggctgggtaaaacccatcatcattggccgacacgcctatggggaccaatacagagcaacagatttcgttgttcctgggcctggaaaagtagagataacctacacaccaaaagatgggtcgcagaaagtgacatacctggtgcatgactttgaagaaggtggtggtgttgccatgggtatgtacaaccaggataagtcaattgaagattttgcacacagttccttccaaatggctctgtcgaagggctggcctttgtatctaagcaccaagaacactattctgaagaagtatgatggacgcttcaaagacatcttccaggagatctatgacaagcaatacaagtccaagtttgaagctcagaagatctggtatgaacacaggctcatagatgacatggtggcccaggctatgaaatcagaaggaggcttcatctgggcctgtaagaactatgatggtgatgtgcagtcagactcagtagcccaaggttatggctcccttggcatgatgaccagtgtgctgatttgtccagatggtaagacggtagaagcagaggctgcccatggcactgtcacacgtcactaccgcatgtaccagaaaggacaggagacgtccaccaatcccattgcttccatttttgcctggtcccgagggttagcccacagagcaaagcttgacaacaatactgagctcagcttctttgcaaatgctttggaagaagtctgcattgagaccattgaggctggctttatgactaaggacttggctgcttgcattaaaggcttacccaatgtacagcgttctgactacttgaatacatttgagtttatggacaaacttggagaaaacttgaaggccaaactagctcaggccaaactttaaggtcaaacctgggcttagggcaaatctttgtggtaactaagtccacagtttacatatttcctttttgttttaataacactcaaggttaaaaacaagaatcattttgtaatttgtttagaagacgaagttgaacttttctatatgtttacagcctattttctttttcatacagttattgccaccttaatgaatgtggtggggaaggtttttttaattgtattttactgtgtaatagcagtctaggaattgtgttagtatctgttcacaattaactgtcactttttatttgctctaatgtaaatgaccaaaatcagaaatgctccaagggtgaacaatcactacactatgtttccccgtaaaggtgaaggagaggctcacctcccctactgtccatgagtgtgaacacagggagcaaaagtgtgcaaatgttgcactgtgtgtggaa

SEQ ID NO: 518 - DNA, 1806 bp, Rattus norvegicus
gcggccgctcgggcttttccaacatggcggccgcagctctgcggggcggctggtgccgctgtccgcggaggtgcctaggcagcggaatacaatttctctccagtcacaacctaccccgtggtggttcaagctaccagataagccggccaggaggagagctgacgctgactaaatcttattcttctgggagcagaaaagggtttttgtcaggcttgctagataacatcaaacaagaattagcccaaaacaaagagatgaaagaaagtataaagaagttccgagatgaggccaagaaactagaagagtcggatgcccttcaggaagccagaagaaaatataaaaccatcgaatcagaaactgtgcgaactagtgaagcaataaagaagaagctcggagaattgacaggcacagtgaaggagagtcttgatgaagtcagtaagagtgaccttggccgcaagatcaaggaaggagtagaagaggctgccaggacagccaagcagtcagcagagtcagtgtccaagggcggggagaagctgggcaagacggcggccttcaaagccatctcccagggtgtagagtcggtgaagaaggagattgatgagagcgtgctcggacacacagggacataccgccggcctgagcggctccggaaaaggacagagtttgctggagcaaagttcaaagaaagcaaagtgttcgaggctaatgaggaagcattaggggttgtgctacacaaggactccaagtggtaccagcagtggaaggacttcaaagataacaatgttgtattcaaccgcttctttgagatgaagatgaagtatgatgaaagtgacaatgttcttatccgggcatcccgggccttaaccgacaaggtcactgacttgctgggaggtcttttctcaaagacagaaatgtcagaggtgctcacggagatcctgagagtggacccaacctttgacaaggaccgctttcttcatcagtgtgagactgacattatccccaacatcctagaggccatgatttccggggaacttgacattctcaaagactggtgctatgaagctacctacaaccaactggcccactctatccagcaggccaaggctctgggcctccagttccactcccggatcctggatatcagcaatgtggacctggccatgggcaagatgatggagcagggccccgtgctgattgttaccttccaggcccagctggtgatggtgatcaagaaccccaaaggcgaggtgtttgacggtgacccggacaaggtgctgcgaatgctgtatgtgtgggcactctgcagagaccaggaggagctcaacccttacgctgcctggcgccttctggacatatcagcctctagcacagagcagatcctttgagggcaacaatggagtttaggcagctccgggctagaccatcatggggcagacacacagaaacaattgggcacatttgatacagctgtgaactggcttttgccccaagtttttcacgacagctgtgaaaccagctggacaaggaaagagcttggggtgtttagcaggtgggggaatgtttcccagagtgtcacaggggggatactggcagtgtcagaaggccccttcccaggactcctttggggtgaggcctggcctgccgttttgagtagtccactggctttgcttgccaagccactttaggtcctttttttttttttttttttttaaatcagtgctcttacttcctgtacatagcctaagatctgaacataataaaacaccagagcgcagaagagcaaaaaaaaaaaaaaaaaaaaaaaag

SEQ ID NO: 519 - DNA, 3032 bp, Rattus norvegicus
gcgtgaactcctgcttgccagtcgccggtcaggagcctcggagccgccacaatggggatgtccaagtctcggggttgctttggctacccattgagcatcttcttcatcgtggtcaatgaattctgtgaaagattctcctactatgggatgcgagctctcctggttctgtacttcaggaacttccttggctgggatgatgacctctccacggccatctaccatacgtttgttgccctctgctacctgactccaattcttggagctctgatcgcagactcgtggctggggaagttcaagacaattgtctcactatccatcgtctacacgatcggacaggccgtcatctcagtgagctcaattaatgaccttacagaccatgaccacgacggcagtcctaacaaccttcctttgcacgtagcactgtccatgatcggcctggccctgatagcccttggtacaggaggaatcaagccctgtgtgtctgcatttggtggcgatcagtttgaagagggtcaggaaaaacagcgaaaccggttcttttccatcttttatttggctatcaacgcaggaagcctgctctccacgatcatcactcccatactcagagttcagcagtgcggaatccacagccaacaagcttgttacccactggcctttggggttccggcagctctcatggctgttgccctaattgtgtttgtcctcggcagtggaatgtacaagaagtttcagccccagggcaacatcatgggcaaagtggccaagtgcattcggtttgccatcaaaaacaggtttcggcaccgaagtaaggcatttcccaagaggaaccactggctggactgggctaaagagaaatacgatgagaggctcatctcgcagattaagataatgacgaaggtgatgttcctgtacattcccctccccatgttttgggccttgtttgaccagcagggttccaggtggacactgcaagcaacgaccatgactgggaaaattggaacaattgagattcagccggaccagatgcagacggtgaacgccatcttgattgtcatcatggtccccattgtggacgccgtggtgtatccgctcattgcaaaatgtggtttcaacttcacctccctgaagaagatgaccgttgggatgttcctggcatccatggcctttgtggtggctgcaattgtgcaggtggaaatcgataaaactcttccagtcttccccagcggaaatcaagttcaaattaaggtcttgaacattggaaacaatgacatggccgtgtattttcctggaaagaatgtgacagttgcccaaatgtctcagacagacacattcatgactttcgatgtagaccagctgacaagcataaacgtgtcttctcccggatctccaggcgtcaccacggtagctcatgagtttgagccgggtcaccggcacacccttctagtgtggggccccaatctataccgtgtggtaaaagacggtcttaaccaaaagccagagaaaggggagaacggaatcagattcgtcagcacccttaacgagatgatcaccatcaaaatgagtggaaaagtgtacgaaaatgtcaccagtcacagcgccagcaactatcagtttttcccttctggccaaaaagactacacaataaacaccacagagattgcaccaaactgttcatctgattttaaatcttccaaccttgacttcggcagcgcgtacacctacgtgatcagaagtagggcgagtgatggctgcctggaagtgaaggaattcgaagacatcccacccaacacggtgaacatggccctgcagatcccacagtacttcctcctcacctgcggcgaggtggtcttctctgtcacaggactggagttctcctattcccaggccccgtctaacatgaagtccgtgcttcaggcaggatggcttctaaccgtggccatcggtaatatcattgtcctcattgtggctgaggcaggccacttcgacaaacagtgggctgagtatgttctgttcgcctccttgctcctggtcgtctgcatcatatttgccattatggcccgattctacacctacatcaacccagcagagatcgaggcacagttcgatgaggatgagaagaaaaagggcgtagggaaggaaaacccgtattcctcgttggaacctgtctcacagacaaacatgtgaagatcagaaagcaagtggagaacataccaagtccagcattcaccatgacctctgcccaagggacaggaccctccaccacagagtccttgcctggagaaagacttcagacattgtgagccaaaataataacaaagccaggttttcaggctgacggctgtgaatctgaaactctaggggagcctttttaatttgtttttcttgagacagggtatctctgtgtaaccctggctatcctggaactcactctatagaccaggctggcctcgaactcacagatatctgtctgcctctgcctcctaagtactgggattcaaggcatgtacggcaactgcccagctaaaatattatttataacatgcactttctgggttttttgtttttaaaacatacttttttttttaacactgggccatttctaacatttctgcacagaagtggatttagctcagattaacttaattttgaaaaggtaacagtactgtttttttttccttaatgctcttatgaaaacaatgttgaatttacagagggctttttgtgtttttgtttttttgttttttgttttttgtttgggagctggggaccgaacccagggccttgagcttcctaggtaagcgctctatcactgagctaaatccccagccgacagagggcttttttagtagtgtgtagtgagtatcagctgattcgagctaataactttaccttggggtttttgtttgtttgttttcctggtctcctttgcctgacctctttttaaattatgtgtaattcaaaagactattcaagtgatggttagtcatgagtcgtgacgtttgactggtgtgaagtaaattcttgttcttaag

SEQ ID NO: 520 - DNA, 553 bp, Rattus norvegicus
tgaattcgtgggttacccctagccccgcctgagaggtgggagccaagtgctttcttgggtgacacaggagcagcttctacgttcgattgagcgggcctgggaaaggttcccagaaggccgcgcgctggagtctctgagcgcagtcatggcgggcttggtgaagaagactactggcctggtgggattggccgtttgcgacactccacacgagaggctaacaatattgtatacaaagattcttgatcttctgaagcactttcctaaacatgcagcctacagaaagtacacagaacagatcaccagtgagaagctggagttggtcaaattggaaccagatgttaaaaaattagaaaacttgcttcagggtggtgaagtagaagaggtgattcttcaggctgaaaaagaactaagtctggcaagaaaaatgttgcagtggaagccctgggagccactggtggaggagccccctgctaaccagtggaagtggccaatataatccccgtgtctgatgatggatgtggatctaatgtgcaattaaatgttctgtgatgcc

SEQ ID NO: 521 - DNA, 810 bp, Rattus norvegicus
agctcggcaaggcgcagggacggcggggctctgcttgccatggcccccggcctgcggggcctcccgcggcgcggcctctggctgctgctggctcatcatctcttcatggtcactgcctgccgggaccctgactatggtactctcatccaggagctgtgtctcagccgcttcaaagaggacatggagaccatagggaagactctgtggtgtgactggggaaagaccatagggagctatggggagctcactcactgcaccaaactcgtggcaaacaagattggctgtttctggcccaatccggaagtggacaagttcttcattgctgtccaccaccgctacttcagcaagtgcccagtctcgggcagggccctgcgggaccctcccaacagcatcctctgccctttcattgtgctccccattacggtcacactgctcatgactgccctggtggtctggaggagcaagcgcacagagggcatcgtgtaggtgtcccaggtgatgggggattggggaaccatgggcctggcccagcaacagcatcagggacagaccccacattgcatcctgctctagcctagttagcacaggatttgaaagcagatctgcattacactaaacctgccccagccagaggcttctaacaggggagcagggacctgcctctgtttacctctgaaagagcgctaagcgccaggtctctggtatacttcatcaccaccatcatgtgggcattccgacctctgaggaagactgcacagatgtgtttgtggatgcatagtttgtgattaaacgagcgttcttaaacttgaa

SEQ ID NO: 522 - DNA, 1411 bp, Rattus norvegicus
tgtctaaaaacagaggagaggccgcactgccctttaagtgctgtccctagcgccaccgtggtattgtcgctttaaggccggcggcatccctggttccgggggcggggcctgcctccctttggactccagcagccgcccggctgattcattccgggcacgagcgccaagctttgacgttagcgcctgcgcaggacgcggcctcactccggattggctggtgtcggtccgccctcccccgcgcgccacccctagtttccctccccgggccgcaggagaaacagtgccctctcccttcttgacccctggcccttccctcccttattccctcttgccgccgctgcttctggcgctgccgctcccggaggagctcccgtcacggtgatggggtctcgggcctccacgttactgcgggacgaagagctcgaggagatcaagaaggagactggcttttcccacagtcagatcacacgcctgtacagccgcttcaccagcctggacaaaggggagaacggaactctcagccgggaagatttccagaggattccagaacttgccatcaacccactgggggaccggatcatcaatgccttcttctcagagggagaggatcaggtaaacttccgaggattcatgagaactttggctcatttccgacccattgaggataacgaaaagagcaaagatgtgaatggaccggaacccctcaacagccggagcaacaaactgcactttgctttcagactttatgacttggataaagatgacaagatctcccgcgatgagctgttacaggtactgcgaatgatggtcggagtgaatatctcagatgagcagctgggcagtattgcagacaggaccatccaggaggctgaccaagatggagacagtgccatatcttttacagaatttgttaaggttttggagaaggtggatgtagaacagaagatgagcatccgatttcttcactaaagggcagagaccaaattattcttgctttctagtatttaagaactgaaacttccttctgtcctccagccccaccccatcctgtcatccccctttcccagaatactacagctcctgcatgacaacctgaagtctctcctgtccatacaaacttgcctttggtgtataaacagggcgttacagaatggtaccctgtctatttctgttcggtatccacccatcagtctttattgtaagtaccaacttcccctgttctactgctcagtgccacgcatccgtcctgtctgaggaaagaaacagggactcatgtcaagaaccagccagcaaagctcccactagatgggaccatatccatgctggccttcccttcatcagccctccatcatggtcctgggcgggtcgggtctgggtgtctctactttgacagctttcatcagctttcagc

SEQ ID NO: 523 - DNA, 322 bp, Rattus norvegicus
gtgatcggacgaagaagattgaagtcatggctggcccagaaagtgatggccaattccagttcactggtattaaaaaatatttcaactcttataccctcacaggtagaatgaattgtgtcctggccacatatggaggcattgctttgttggtcctatactttaagttaaggcctaaaaaaaccccagctgtgaaagcaacataaatggattttgaaatgtctggccttatctgttaagtcccacgcctgaagaagctgatgtgaactcatcatgtaatactcaatttgtacaataaattatgaacctggaaaaaaaaaaaaaa

SEQ ID NO: 524 - DNA, 485 bp, Rattus norvegicus
ggcacaaggccgcgtggtcgtgccgggatggagtcctcctcgtcctcttcgggctcggctttggccgccgtggaccctcagctgcagcatttcatcgaggtggagacacagaagcagcgcttccagcagctggtgcaccagatgacggaactttgctgggagaagtgcatggataagcctgggcctaagttggacagtcgggctgaggcctgttttgtgaactgcgttgaacgcttcattgatacaagccagttcatcttaaatcgactggagcagacccagaagtccaaacctgttttctcagaaagcctttctgactgatttcagcattacctctttggaaaagtagttcaagaagggaagagctgctgctgagtcggttaaagaaatggctatggggggattaactcccaattctcttcatcatcttgggacaaattgtcacctgagaatgaacaaagaccaatttttatgtatgggagttg

SEQ ID NO: 525 - DNA, 1715 bp, Rattus norvegicus
ggggaggccaggcttgcggcggggcgcaacggtgtctccttcacttcgccctccagccgcggtggctgcagcgcaacttccagatagcggagtggcctcagctgcgagccgagcggtggcggcagcgcccctcaggacacccgcagatcaccttttccccgcgacttcgccatggctgaatgttgtgtaccggtatgccaacggccaatttgtatccctccaccctatgctgaccttggcaaagctgccagagatattttcaacaaaggatttggttttgggttggtaaagctggatgtgaaaacgaagtcatgcagtggtgtggaattttcaacatctggctcatctaatacagacactggtaaagtcagtgggaccttggagaccaagtacaaatggtgtgagtatggtctgactttcacagagaaatggaacactgacaacactctggggacggagattgcaattgaagaccagatttgtcaaggtttgaaactgacctttgacaccacgttttcaccaaacacaggaaagaaaagtggtaaaatcaagtctgcttacaagagggaatgtataaaccttggctgtgatgttgattttgattttgctggacctgccatccatgggtcagccgtctttggttacgagggctggcttgctgggtaccagatgacctttgacagtgccaagtcaaagctgacaaggagtaacttcgcagttggctacaggactggggacttccagctacacacaaatgtaaataatgggacagaatttggaggatcaatttatcagaaagtatgtgaagattttgacacttcagtaaaccttgcttggacatcaggtaccaactgcactcgttttggcattgcagctaaataccagttggaccccactgcttctatttctgcaaaggtcaacaactctagtttaattggagtgggctatactcagactctgaggcctggtgtgaagcttacactgtctgctctggtagacgggaagagctttaatgctggaggccacaaacttgggcttgccttggaattggaggcttaatccagttaaaagaaacctctgggaacggatatcagaagatttggccttaatatatttccatgcgaccagcaggctccccctcccccccagaaggtgatcacatcaaaggatgattaagcaagagcgtgttttaaatatttagacagtcacccgttggctggtttctagttggatggttatctcgttatcagtgctgccgtcgtgcggcctcctctacattatttaatgtacttaactgttaaatgtgctacccaccaatgatgaaatagacgtttatgaaaaccgtgccatggtgtgcatgtttgttttatgttccttttacccttgactcttgtactgaatgagatggatcagtggatgttttaagatgaggatgaagatcttttttgtgatattcacccatcactagaatcactttggtaaccccaaacatgacaaattatgaataaaacgagtgtacacaactaatgcctcacgtatgtgcagtcagattgcagcctaggggctaatcttcttggtaaatacttctggtgagcactttgctctttaccgaaacttgggcaaccaaactccctgtgtccctagcataatcaatccacgaggtctttgagactacaataaaatacaaggatacatgctttaaaaaaaaaaaaaaa

SEQ ID NO: 526 - DNA, 3726 bp, Rattus norvegicus
ccggcatggtgcggcgtcgccgccgatggcgctgaggcggagcatggggcggccggggctccggccgctgctgctggcggggctggcctctctgctgctcccagggtccgcggccgcaggcctgaagctcatgggagccccagtgaagatgacagtgtctcaggggcagccagtgaagcttaactgcagtgtggaagggatggatgaccctgacatacactggatgaaggatggcgctgtggtccagaatgcaagccaggtgtccatctcaataagcgaacagaactggattggcttactcagcctaaagtcagcggagcggtctgatgccggcctgtactggtgccaggtgaaggatggggaggaaaccaagatctctcagtcagtatggctcactgttgaaggtgtgccattcttcacggtggaaccaaaagatctggcggtgccacccaatgtcccttttcaactgtcttgtgaggctgtgggtccaccagaacccgtaaccattttctggtggagaggacccactaaggttgggggacctgcttcctctccctctgttttaaatgtaacaggagtgacccagcgcacagagttttcttgtgaagctcataacataaaaggcctggccacttcccgaccagccattattcgccttcaagcaccgcctgcagctcctttcaacatcacagtaacaacgatctccagcagcaacgctagtgtggcctgggtgccgggtgctgatggcttagctctgctgcactcctgtactgtacaggtggcacatgccccaggagaatgggaggcccttgctgtcgtggttcccgtgccaccctttacttgcttgcttcggaacttggcccctgccaccaactacagccttagggttcgctgtgccaacgccttgggcccttctccctatggcgactgggtgccctttcagacaaagggcctagcgccagccagagcccctcagaatttccacgccattcgtactgactcaggccttatcctggaatgggaagaagtgattcctgaggaccctggggaaggccccctgggaccttataagctgtcctgggtccaagaaaatggaacccaggatgagctgatggtggaaggaactacggccaatctgactgactgggatccccagaaggacctggttttgcgtgtgtgtgcctccaatgcaattggtgatgggccctggagtcaaccactggtggtgtcttctcatgaccatgcagggaggcagggccctcctcacagccgtacatcctgggtgcctgtggtcctgggtgtgctcaccgccctgatcacagctgctgccttggccctcatcctgcttcggaagagacgcaaggagacgcggttcgggcaagcctttgacagtgtcatggcccgaggggagccagctgtacacttccgggcagcccggtctttcaatcgagaaaggcctgaacgcattgaagctacattggatagcctgggcatcagcgatgaattgaaggagaagctggaggacgtcctcatcccagagcagcagttcaccctcggccggatgttgggcaaaggagagtttggatcagtgcgggaagcccagctgaagcaggaagatggctcctttgtgaaagtggcagtgaagatgctgaaagctgacatcattgcctcaagcgacatagaagagttcctgagagaagcagcttgcatgaaggagtttgaccatccacacgtggccaagcttgttggagtgagcctccggagcagggctaaaggtcgtctccccattcccatggtcatcctgcccttcatgaagcacggagacttgcatgcctttctgctcgcctcccgaattggggagaacccttttaacctgcccctccagaccctcgtccggttcatggtggacattgcctgtggcatggagtacctgagctcccggaacttcatccaccgagacctagcagctcggaattgcatgctggcagaggacatgacagtgtgtgtggctgactttggactctcccggaaaatttatagcggggactattatcgtcagggctgtgcctccaaactgcctgtcaagtggctggccctggagagcttggctgacaacttgtatactgtacacagcgatgtgtgggccttcggggtgaccatgtgggagatcatgactcgtgggcagacgccatatgctggcatcgaaaatgctgagatttacaactacctcatcagcgggaaccgcctgaagcagcctccggagtgcatggaggaagtgtatgatctcatgtaccagtgctggagtgccgacccaaagcagcgcccaagcttcacatgcctgcgaatggaactggagaacattctgggccacctatctgttctgtccaccagccaggaccccttgtacatcaacattgagagagctgggcagcctgctgagaatggcagtcccgagctgccctgtggagagcagtctagcagcgaggcgggggatggcagtggcatgggggcaataggtggcatccccagtgactgtcggtacatcttcagccctggagggttggccgagtcaccagggcagctggagcagcagccagaaagccccctcaacgagaaccagaggcttttgttgttgcagcaagggctactgcctcacagtagctgttaacctgcaggcagaggacagctggggccccctggctctgccggccattgcgctggcttactaggccccgtctgatcacagcccaggcagcaaggtatggaggctcctgtggtagtcctcccaagctgtgctgggacctggactgaccaaattgcccaatcccagttcttcctgcagccgctctggccagcctggcatcagttcaggccttggcttagaggaggtgagccagatctggttgcctgaatgcaggcagctggcaggaggggagggtggctgtgtttccatgggtaccatgggtgtggatggcagtaagggagggtagcagcagccctgtgggcccctaccctcctggctgagctgctcctactttagtgcatgcttggagccgcctgcagcctggagctcagcactgcccaccacacctgagtttaaatgccaggtttgcccctctacgtcacaaagagatgtccttgtattgttcccttttaggtgacgattaggaagggattggcacacttaggtccttaagccccatgacaggaaatggtgggatattctcaggtccgaatcctcatcaccttcctgattccccaccctgccatggcctggaactgactgggtggctgagggatgcacgaggacaaagactaccgagatccgactcctaaaggcagggtctgagtctgccagatggagggggtgctaagaggttggcccaggagtcaggcatttcaggacccctctaagcttctacagtctgtctgagcatgctaccaagcccccaaacatcccagaactaacaggcagttttgtctgagcccagcccttccacatggtgacccttaggtctaccatcctctctgaatggatatcacttgtcccaagtcttaagagagagatacacctgatggctgatgtgggtaagaaaagttcctggaaccagggctggggtctaggcaccgcactgcaaacctcctggaatgcagaggcaggctcttgggctgttaggaacatttccaagctattaagttgctgtttcaaaacaataaaattgaaac

SEQ ID NO: 527 - DNA, 229 bp, Rattus norvegicus
tgcgcgtgtgcgatcgttactgctttcctctggaaagatgccgggactggctgccgctagccctgccccgcccgaggctcaggagaagaagcctctgaagccctgctgtgcctgcccggagaccaagaaggcgcgtgatgcgtgcatcattgagaaaggagaagaacactgtggacatctcatcgaggcccacaaggagtgcatgagagcgctgggatttaagatatga

SEQ ID NO: 528 - DNA, 999 bp, Rattus norvegicus
catcaggtgctctaccgagcgctggtctccaccaagtggctggcggaatccattcggtccggcaaggtggggccaagccttcgggtgctggacgcgtcatggtactcaccagggacccgccaggcacgcaaagagtaccaggagcgacacgtgcctggcgcgtccttctttgatatagaggagtgccgggacacgacttcgccttacgagatgatgctgcccagtgaggcccactttggggactacgtgggcaacctgggcataagcaacgacacacacgtcgtggtatacgatggagacgacctgggcagcttctatgcacccagagtatggtggatgtttcgtgtgtttggccaccgcacagtatcagtgctcaatggtggcttccggaactggctgaaggagggccacccggtgacatctgaaccctcgcggccagagccagccgttttcaaagccacactgaaccgctccctgctcaagacctatgagcaggtcctggagaacctccagtctaaaaggttccagctggtggattctcgggcccagggacggtacctgggcacacaaccggagcccgatgcagtaggactggactcaggccacatccgtggctctgtcaacgtgcccttcatgaacttcctgacagaagatggcttcgagaagagcccagaggagctgcgtgccatattccaggacaagaaggtggacctctcccagccccttatcgccacatgccgcaaaggggtcactgcttgccacattgccctggctgcctacctttgtggcaagcccgatgtggctgtttacgatggctcctggtcagagtggtttcgcagggcccccccggagacccgtgtgtcccaggggaagagtgggaaggcctgagtgtgtgcagcctcctcttccgcccaccagatccagccagttcccttcagtcaggcttgtatgacctgctgaaggttcgcctcttacgcaatggagattgacaggatttta

SEQ ID NO: 529 - DNA, 1203 bp, Rattus norvegicus
aggtccggggctccggtccgtgccggtgcaggcgccggcatgtggctgtgggaggaccagggcggcctcctgggccccttctctttcgtgctggtgctgctgctggtggtgacgcgcagccccttcaacgcctgtgtgctcactggcagcctctacctcctgctgcggttcttcagcttcgagccggtgccgtcccgccgggccctgcaggtgctcaagccccgtgaccgcgtgtccgccatcgcccatcgcggcggcagccacgacgcgcccgagaacacgctggcggccatccggcaggcagctaagaatggagcaacaggtgtggagctggacatcgagtttacttctgatggagttcctgtcttgatgcacgataacacagtagataggacaacagacgggtctggccgattatgtgatctgacatttgaacaagttaggaaacttaatcctgcagcaaatcacagactcagaaatgagttccctgacgaaaggatccccaccctgagggaagcagttacagagtgcctctgccataacctcaccatcttcttcgatgtcaaaggccatgcagatatggcttctgctgctctaaagaatatatacatggaatttccccagctgtacaacaacagtatggtctgctcattcttgccggaagtcatctataaaatgagacaaacagatcagaaggtaatcacagccctgactcacaggccttggagcctgagccacactggagacgggaagcctcgctacagcgtcttttggaagcagtctgtgtttgtggtgttggacatcttgcttgactggagcatgcacaatgtcttgtggtacctgtgtgggatttcagccttcctcatgcagaaggattttgtctccccggactatttgaagaagtggtcagccaaaggaatccaggttgttagttggactgtcaatacctttgatgaaaagaattactacgagtcccaccttgggtccagctacatcactgacagcatgctggaaaactgtgcacctcacttctagactccccaggaggaaacacagatgcaaaactgcctggaggccttttgcagggacacgagaacactctgttagcacaagccctgggaatcctgcggctcatactagcaatagccacagttttaccccaagcagaaaccaggcatggcgaccatgctccaaggaaggctc

SEQ ID NO: 530 - DNA, 547 bp, Rattus norvegicus
gaaggccgtgtgcgtgctgaagggcgacggtccggtgcagggcgtcattcacttcgagcagaaggcaagcggtgaaccagttgtggtgtcaggacagattacaggattaactgaaggcgagcatgggttccatgtccatcaatatggggacaatacacaaggctgtaccactgcaggacctcattttaatcctcactctaagaaacatggcggtccagcggatgaagagaggcatgttggagacctgggcaatgtggctgctggaaaggacggtgtggccaatgtgtccattgaagatcgtgtgatctcactctcaggagagcattccatcattggccgtactatggtggtccacgagaaacaagatgacttgggcaaaggtggaaatgaagaaagtacaaagactggaaatgctggaagccgcttggcttgtggtgtgattgggattgcccaataaacattccctatgtggtctgagtctcagactcatctgctgtcctgctaaactgtagaaaccaaaccattaaactgtaatcttaacagttaa

SEQ ID NO: 531 - DNA, 663 bp, Rattus norvegicus
cctttggaacaatgggagttggtttgggatttgccattgcagctgctgtggtggctaaggaggagaagccctgggcagcgggtcatctgtgtggaaggagacagtgcctttggattttccggcatggaagtggaaaccatctgcaggtacaacttgccaatcataatcttggtagtgaacaataatggaatttaccaaggttttgatgctgacacctgggggaaaatattaaattttcaaggaactgctacaacaatccctccaatgtgtctgcttccaaactcacactacgagcaggtcatgactgcatttggaggcaaagggtattttgtacaaacgccagaagagctccaagactcgctgaggcaggctctgaaggacacatgtaaactgtgccttatcaacatcatgattgaaccacaaagtactcggaaggcccaggattttcactggctcacccgttccaacatatgaataaactacttggcgtttcttgaggcattgtatctttcttacaaggtcgaattaccttttcatagcaaaattaccacaatggtaacattgtatgtcaaaatacactttaaattgtcttctatagtaaagaaattgcttaaagctgtcattatttgttaaaaaaaaaaaaaaaaaaaaaaaaaaaaaaaa

SEQ ID NO: 532 - DNA, 445 bp, Rattus norvegicus
gaaattccccggggtttttgaaggggccttactcagggcccaaggccaagccttttgtgtccctcattggtgggataactgctcccccttgccgaagggttggcccccccgggggggttttttcttgggggaaaggttgcccccaaggggagatttttgcttttccgggtgcgggtttaattttccgcatttcccccgcacagtttgggacctgccttttttagggattttaaaagggggaggttcttttaagggcccggcctggatttttaggcttttgggggaatttccccggcttgggggcccctcccggattcagccccggcacctggcccttgtttttccgtaccgggggagtcccggcctttttttggatttcctaaattggggttttttcacttacttttttaccggggccggttattaatctttcctttggtttgga

SEQ ID NO: 533 - DNA, 1058 bp, Rattus norvegicus
cattaaaatgtggcttagatcttacaggataacgttttcctgtttgaccagactaaaaacttacaggtcctcttggaagaaattatacagtacttcacaaacagttgacagcaaggaggtcaaaaccttccaggccctggctcactcatggtgggatgagcaagggaagtttgcgcctcttcattctatgaatgacctacgggtgccgttcattagagacaatcttttgaaaacaagtactaatcatgatccaggaaagcctttatctgggatgaagattctcgacgttggctgtggcggtgggttattaactgaacctctagggagactgggagcttcagttgttggaatcgatcctgtggctgaaaacattaagatagcacagcaccataaatcatttgatccagtcctggataagaggatacagtaccgagtgtgctccctggaggagaccttgaatgagaatgcagagtgttttgatgctgtcgtggcttctgaagtggtcgagcatgtgaacaaccttgaaatgttcatacagtgctgctatcaagtattgaaacctggtggctctttattcattactacagtgaacaaaacacagctgtcctatgtcttgggaattgttttctcagagcaaattgcaggcattgttccaaaaggcactcatacgtgggagaagtttgtttcacctgaaaagctagaaagcatcttggaaccaaatggtctgtcagttgaaactgtggcaggaatggtctataaccctttctcaggttactggcattggactgaaaataccagccttaactatgcagcccatgctgtgagagccagggctcaggaacacctggagcctgctgagtctgcttgaaagggggaagcagaagcaccccatgccaaagtctccggcagcccaagtgtgcacgaggggcagagaaaatgagaaagctctgaggacagcagtaaatatgcttgaagttgtgttgtttacaaatccaaacatcttactccttttcgggagggattctgaagaacaaaaggtcaataaaaatatctaaatc

SEQ ID NO: 534 - DNA, 1949 bp, Rattus norvegicus
ggtgtactgatctacccgagttcccggcatgccgggccggcgtcttattgcggcttcccgattgcccgcgcgccatggagtgcctgcgctacctgcccaggctactgccccgcgccgcgcagtcccggagcgctctgtgtatggcggcggtgcgcctgagcctcgctgcctgctgtggccgcgcgaccccgctgacctccgggagccagaaggcgccgagcacaccccgcactgcaggtgatgtgtaccggtttagaacctctgatgcctctcaagctactttagccagcgtggcccaggtgtttgctgtgacaaagtttgacaaagaaggaaacgttacctcttttgagaggaagaaaactgaactataccatgagttagcactccaggccagagacttgaggtttcagcacgtaatgagcatcactaccagaaacaacaggatcatcatgaggatggagtacttgaaggctgtgataactccagagtatcttctgatactagattatcggaatttaaacttggagcactggctgttccgggaactgccatcacagctggctggagaaggtcagctcgttacgtacccgttaccgtttgagttcagagctattgaagcactcctgcagtactggatcaacacccttcaggggaaactaagcatcctgcagccactgatcctggagaccctggatgcattagtggaccccaagcactcttctgttgacagaagcaaactgcatgtcctactccaaaacggcaaaagtctctctgagttagaaacagacattaaaatcttcaaagagtcaattttggagctcttggatgaggaggagatgctggaagaactctgtttaaccaagtggagtgacccgcatgtctttgagcagagcagcactgggattgaccacgcagaggagatggagctgctgctggaaaactactaccgactggctgacgacctctccaatgaggctcgggagcttcgggtcctgattgatgattcacagagcattatcttcatcaatctagatagccatcgcaatgtgatgatgaggttaaacctccagctgaccatgggtaccttctcgctttcactctttggactgatgggagttgcttttggcatgaatttggaatcttcccttgaagaggatcatcgtgtgttttggctgattacaggaattatgtttatgggaagtggcctcatctggaggaggttgctttcgttccttggaagacagctggaagctcctttgccccctgtgatggcctccttgcctaaaaagacccttctggcagatagaaggatggatgtgaaaaacagcctcaggccggaaggacttggagcaggcaggactatcctcgcaagccgatagcagcagcctggcagacaaggatttttattcttctgaagctattatcactttctgggggaaaacgacaactggtgtttaaattatgaatgactaaaaatactgtggcattcacagtactaaacttgatcgcatcttcagaattctttgagacagtgctttctttgtaaaaggcccaaaccctatgtcctaccaactttgaatactgtttatgggcattttaaagtatcgatttatgtactgtgagtagacttatctagatcagtgccactatacatatggaggagtgtagctttgtgctgactgctcagggactcagcagagcccgtggccccgcacagagactcacagtcccgtcagtctcgctcagggaggaaggctggtggatcacttagccttttgacaaattctgcaatgtcagtccttggtggaactttacttccaggtatttgctttcttttatatatgatgaataaaaaagaggtataatttaatgtcagcatacttggattccaattaagcaatattgttactattttttgattaattataaatagaactatggaaagttaa

SEQ ID NO: 535 - DNA, 719 bp, Rattus norvegicus
gtgacttcctggcacagcccccctggctgttgtcgctacttccactacgatctagctcgaggaaccgtgcgctcggatccagcgaagatgcagagttcgttgaagcccgcgggctccggggttcttcagctactggtctgcttccttctgctatacagtcgcccaagcagctgcagcgacataaatgcccacgatggtcagggccaagtgggatcagagcagctctggacgttccaaggactcgttgcctcagtcttccagtacttacagcttctattccaccacattgtaccccaaggcatgttctggaccgatgacatagcctatgagttaatgaccaaaaaggtggagcacctcagcagactccatccccagtatccatgccggaaggaggggaaggtggtttctcccattgcaaccactggggtgaggggcaagcaagaggagaaacttcgactcttatcgccccaaaagagtccagcagtcaaggtgaatagggaccgatgctttaccaccaaagtaatcccaaaggccaccaaacaagaggtcacccatccctccaagggtttctttgggccattccccactgtgggtctcaaccttgttgctgactgagatctcactgtataagatccttttccccgggaacctcctcactgccctccaaggggcaattcttggatgactcaaatataagtaattaaagttgactttcatgc

SEQ ID NO: 536 - DNA, 1231 bp, Rattus norvegicus
acagcgacgaagatcaagactgccaggagctgcaagtagactgacagaagactgaccatggcagaggagccgaaacccatcagtccgcttaagaacctccttgccggcggctttggcggcgtgtgcctggtgtttgtggggcaccccttggacacggtcaaggtccgactgcagacacaaccaccaagtttgcctgggcagccacctatgtactctgggaccatcgactgtttccggaagactctttttagagagggcatcacagggctgtatcggggcatggctgcacccatcattggagtcacccctatgtttgcggtgtgcttctttgggtttggtttgggaaagagactacagcagaaatctccagaggatgaacttacctacccgcagctgtttacagctgggatgttatctggtgtgttcaccacaggaatcatgacccctggagaacggatcaaatgcttactgcagattcaggcttcttcagggaaaaacaaatacagtggtaccttggactgtgcaaagaagctgtatcaggagtttgggatccgtggcttctacaaagggactgcgctcactctcatgcgagatgttcctgccagtgggatgtatttcatgacatacgaatggcttaaaaatctcttcactccacagggaaagagtgtccatgacctcagtgtgcctcgggtcctggtggctggcggctttcgagggatcttcaattgggttgtggcaatccccccagacgtgctcaagtctcgattccagaccgcacctcctggaaaatatcctaatggtttcagagatgtgttgagagagctgatccgagaagaaggagtcacctccttgtacaaagggttcaatgcagtcatgatccgagccttcccagccaatgctgcctgtttccttggctttgaaattccgatgaagatcctcaattggattgcccccaacttgtgaggctgaagacatgttgaagacctttggatgctggaagactgttgccgagaagcaggggcaggactgggaagaccctgagggtgaggggagggaagtggtgtgatcagagccccaggcatgactgtgatggtgaaactgttgccttaatgacatcctctaccttatgtaacttggtgccattttgaaacttgaatatagaaggtttccagagaattggagatggaataaatagtttatagactcgtcaaaaaaaaaaaaaaaaaaaaaa

SEQ ID NO: 537 - DNA, 932 bp, Rattus norvegicus
gtgtgtgtgcgctacggggtgwagactgtgtctgaaatagcgggaacgccatgtcccgtggttccagcgccggttttgaccggcacattactattttctctcccgagggccgactctaccaagtagaatatgcttttaaggctattaaccagggtggacttacatctgtagctgtcagaggaaaggactgcgcagttattgtcacacagaagaaagtacctgacaaactactggattccagcaccgtgactcacttattcaagataacggaaaacattggctgtgtgatgacaggaatgacagctgacagcagatcccaggtacagagggcacgctatgaagcagctaactggaaatacaaatatggctatgagattcctgtggacatgctgtgtaaaagaattgctgatatttctcaagtctacacacagaatgctgaaatgaggccacttggttgttgtatgattttaattggtatagatgaagagcaaggccctcaagtgtacaagtgtgatcctgcaggctactactgtggctttaaagccaccgcagcaggagtgaagcagacagagtcaaccagcttcctcgaaaaaaaagtgaagaagaaatttgattggacatttgaacagacagtggaaactgcaatcacatgcctgtctactgttctgtcgattgatttcaaaccttcagaaatcgaagttggagtagttacagttgaaaatcctaaattcaggattcttacagaagcagagattgacgctcaccttgtggctctagcagagagagactgaacactcttatcagcttaccagatccatgatgccatgtgcctatgtgtttagtaacaacaaaccgacatcttagaggccctggattgaagatggaaactctcccactcctcctgccactgactggttaggactctgtataaa

SEQ ID NO: 538 - DNA, 2781 bp, Rattus norvegicus
ccacgcgtccgggagccggacgtcggactagagagtagggagagcgattggggctcgagggacagggctagaccggacgcgtgtccgcgcctcggaggtggcagtaggtagtgtcgggtagcgaggcaacgatggagctcctgcggactatcacctaccagccggccgccggcaccaagatgtgcgagcaggcgctgggcaaagcttgcggcggggactcaaagaagaagcgaccgcagcagccttctgaagacgggcagtcccaagcccaggtgaccccggcggccccacaccaccatcatcaccattctcactccggacccgagatctcgcggattatagtcgaccccacgacggggaagcgctactgccggggcaaagtgctgggcaagggtggatttgcaaagtgttacgaaatgacagatctgacaaacaacaaagtctacgctgcaaaaattatccctcacagcagagtagctaaacctcatcaaagggaaaagatcgacaaagaaattgagcttcacagaatcctgcaccataagcatgtagtgcagttttaccactactttgaagacaaagaaaacatttacatcctcttggagtactgcagtagaaggtccatggctcatatcttgaaagcaagaaaggtgttgacagagccagaagtccgatactacctcaggcagattgtgtcgggactcaagtatcttcacgaacaagaaatcttgcatagggatctcaagctagggaacttttttattaatgaggccatggagctgaaggttggagacttcggcttggctgccagactggaacctttggaacacagaaggagaacaatatgtggaaccccaaattatctctcccctgaagtcctcaacaaacaaggacatggctgtgaatcagacatctgggccttaggctgtgtaatgtatacaatgctgctaggaagacctccattcgaaacaacaaatctgaaagaaacgtacaggtgcataagagaagcaagatatacaatgccgtcttcattactggcccccgccaagcacttgatagccagcatgctgtccaaaaacccagaggaccgccccagtttggatgacatcattcggcatgacttctttctgcagggcttcactccagacagactctcttctagctgttgccacacagttccagacttccacttgtcaagcccagctaagaatttctttaagaaagctgctgccgctctttttggtggcaaaaaggacaaagcaagatataatgacacacacaataaagtgtctaaggaagatgaagacatctacaagcttcggcatgatttgaagaaaacatcgataacccagcaacccagcaaacacagaacagatgaggagctccagcctcctccaactacctttgccaaatctgggacatccgcagtggaaaacaaacagcagattggagatgcaatccggatgatagttagagggacgctgggcagctgcagcagcagcagtgaatgccttgaggatagcaccatgggaagtgttgcagacacagtggcaagagtccttcgagggtgtctagaaaacatgcctgaagctgactgtattcccaaagagcagttgagcacgtcctttcagtgggtcaccaaatgggtcgactactccaacaaatacggctttggataccagctctcagaccacactgttggagtccttttcaacaacggcgctcacatgagcctccttccagacaaaaagacagttcactattatgcggaacttggccaatgctctgttttcccagcaacagatgcccccgaacaatttattagtcaagtgacggtgctgaaatacttttcccactacatggaggagaacctcatggatggtggcgatctccctagtgttactgacattcgaagacctcggctctacctccttcagtggttaaagtctgataaagccttaatgatgctcttcaatgacggcacatttcaggtgaatttctaccacgatcatacaaagataattatctgtaaccaaaatgaagaataccttctcacatacatcaacgaagacaggatatctacaactttcagactgacgaccctgttgatgtctggctgttcgctagaattgaaacatcgaatggaatacgccctgaacatgctcttgcagagatgtaactgaaaaacctcttttagagcggacctcgtgggggctcttttccactgtgagatcaacagggaagccagtggagggataacggagcatgttagagaaatcggacaggtgctggtacgaatacgagtcgtctgtggcctgctggactgctggaaccagaccagcctaaggtggacagttgactttgggcaatcttaagtgtggagccaagtacagttttccttgagatacctgtctttacaaagtttatcggacaattttgcagacagacgctttgactctgaagttctctctgtggagagtgttttcagttggaagacttggaactgtgaataaacttcctgaaggggagggagaagggaggaagctccctcgctgttgaaaggctacaatcagagcagcttttgtttggctgcttaactgtgaactatggccatacatatttttttttttggttatttttgaatacacttgtggctggaaaagtgcattccttgttaataaactttttatttattacagccccaagagcagtatttattatcaagatgtcttttttttttatgttgaccattttgaactcttggcaataaagagtatgaaatag

SEQ ID NO: 539 - DNA, 1660 bp, Rattus norvegicus
tgctggttctcggctgctccactgagctatggcgttcgtgaccaggcaattcgtgcgctccatgtcctcctcttcctctgcgtcggcggccgccaagaagatcctgatcaagcatgtgacggtcatcggcggcgggctgatgggcgccggcatcgcgcaggtagctgcagcaactggccatacagtagtgttggtggaccaaacagaggacatcctggcaaaatccaagaagggaattgaagagagccttaagagaatggcaaagaagaagttcacagaaaaccctaaggctgccgatgagtttgtggagaaaaccctgagctccctttcaaccagcaccgatgccgcgtccgtggtgcacagcacagacctggtggtggaggccattgtggagaacctgaagttgaagaatgagctattccagaggctggacaagtttgctgcagaacacaccatctttgccagcaacacgtcttctttgcagatcacaaacatagccaatgccaccaccagacaagaccgatttgctggcctccacttttttaaccccgtccccatgatgaagcttgtggaggtcattaaaacaccgatgaccagccagaagacatttgaatctctggttgacttttgtaaaaccttagggaagcatcctgtttcctgcaaggacactcctggatttatcgtgaaccgtctcttggtgccatacctcatagaagctatccggctgcatgagcgaggcgatgcatctaaggaagacatcgacaccgcaatgaagctgggagccgggtatcccatgggtccctttgagcttcttgactatgttggactggatactacaaagttcatcttagacgggtggcacgaaatggatccggagaaccccttatttcagcccagtccttccatgaataatttggtggcccagaagaagctgggcaaaaagaccggagaaggattttacaaatacaagtgatcccccctcggcagcatctccagccagccactggacaaggacaagcacgctctgcactgttgtttccaggcttgccgtgggctgctcagtggacccccccttgcagtctctctgacgtaatctcttggctagttacggtaatggggttcttccactgatatctaattctctagtttagtctgttctctgtgaatttttctgaaaagcagtataccctgggtgccttggagcaaacatctttttctctggaccttgccactttttgtaagaagcaatcattagccgcattcactcaggtctcctgaaaatgagtatgccgtgtttatcagcgttgaaccccaggggcaggcaccatggtgcctacagatgcacctgagaggccttgcgtgcctgggaacatttgtagcccgcagcctcgagccttagcctacattctgggcgtgacagaaaatgtcccgtcttttttactcctcatcaggacaggactcctggagttttgggcaagtacctgtgagcttggttcttggcccatcttcgtggccgttcggatcttaaccgtcactgtctgtctctctcatttcttcaggagaaatcagtgctacaaagtgcctctgagctgactctactaaaatgcagtcttttaatctgtaaacattgggatgggaataaataaacgtatacgacttg

SEQ ID NO: 540 - DNA, 1420 bp, Rattus norvegicus
ccctcaatagccacactatttattttatttcaattaaaaatttcttcccaaacctttcctgcacctccctcacccaaaactataaactcggtgccatgatgctggccgcccgtctttccagacccctgtcacagctcccaggaaaagctctaagtgtctgtgatagagaaaatgggacaagacacacactgttgttttacccagcttctttcagccctgacacccgtcggacctacaccagccaggcagatgcggctagtggcaaagctgtcctggttacaggctgtgactctggatttgggttctctttggccaagcatctacactcaaaaggtttccttgtatttgccggatgtttgttgaaggaacaaggcgatgctggggtcagggagctggacagcctgaagagtgaccggctgagaaccatccagctcaatgtctgcaacagtgaggaggtggagaaagcggtggagaccgtccgctccggcctgaaggatcctgagaagggaatgtggggcctggttaacaacgcaggcatctcaacgtttggggaggtggagttcactagcatggagacgtataaggaggtggccgaagtgaacctctggggaactgtgcgcacaacaaaatccttccttccccttctccgaagagccaaaggccgtgttgttaacatcagcagcatgctgggtcgcatggccaacccagcccgctcaccatactgcatcaccaagtttggggtagaggctttctcggactgcctacgctatgagatgcaccctctgggtgtgaaggtcagtgtggtggagcctggcaacttcatagctgccaccagcctctatagccctgagcgtatccaggccattgccaagaagatgtgggatgagctgccagaggtcgtccgcaaagactatggcaagaagtacttcgatgaaaagattgccaagatggagacctactgcaacagcggttccaccgatacgtcctccgtcatcaacgctgtcacccatgccctgactgctgccaccccttatacccgctaccatcccatggactactactggtggctgcggatgcaggtcatgacccattttcctggagccatctctgacaagatctacatacactgaagagctgaagaggtccctgcagcctctgccagggagcctgatgggagggagttcatacagttatcttttgattaaccattgtgggttgtccactgtcttaggaagacctattttaaccttacgtgttcaatgtggtgaatggtttgggccttcacaaatacagggcactggtgggtggccctaaccctcaaggccaatatggtgcttctatctgtctatctagagttgattttatataaagatttgtgggaaatacctttatattaaagacgttattagaatagaaaaaa

SEQ ID NO: 541 - DNA, 2121 bp, Rattus norvegicus
gcggccgctcgagcccgtggtgtttgaccccttcggcggtgtgtgaaaagaaaaggaaggagccggagcttcctaggagcggtcgccgaaatgttccggtgtggaggcctggcgggtgctttcaagcagaaactggtgcccttggtgcggtcggtgtgcgtccagaggccgaaacagaggaaccggcttccaggcaacttgttccagcaatggcgtgttcctctagaactccagatggcaagacaaatggctagctctggtccatcagggggcaaaatggataattctgtgttagtccttattgtgggcttatcaacaataggagctggtgcatatgcctacaagactattaaagaagaccaaaaaagatataatgaaagaataatgggattaggactgtcaccagaagagaaacagagaagagccattgcctctgctgcagaaggaggctcagttcctccaatcagggtaccaagtcacgtccctttcctgctgattggtggaggtactgctgcctttgcagcagctagatccatccgggctcgggatcctggggccagggtcctcatcgtatctgaagaccctgaactaccatacatgcgacctcctctttcaaaagaattgtggttttcagatgacccaaatgtcacaaagacactgcagttcagacagtggaatggaaaagagagaagcatctatttccagccaccttctttctatgtctctgctcaggacctgcctcatattgagaatggtggtgtggctgtcctcaccgggaagaaggtagtccacctggatgtaagaggcaacatggtgaaacttaatgatggctctcagattacctttgaaaagtgcttgattgcaacgggaggcactccaagaagtctgtctgctatcgatagggctggagcagaggtgaagagtagaacaacacttttcagaaagattggagattttagagccttggagaagatctcccgggaagtcaagtcaattacagttattggtggaggcttccttgggagcgaactggcctgtgctcttggcagaaagtctcaagcctcaggcatagaagtgattcagctcttccctgagaaaggaaatatggggaagatccttcctgaatacctcagcaactggaccatggaaaaagtcaaacgagagggagtgaaagtgatgcccaatgcaattgtacaatcagttggagtcagcggtggcaagttactcattaagctaaaggacggaaggaaggtagaaactgaccacatagtaacagctgtgggcctagaacccaatgtcgagttggccaagactggtgggctggaaatagattccgattttggtggcttccgggtaaatgcagagcttcaagcacgttctaacatctgggtggcaggagatgctgcatgcttctatgatataaagttgggtcgaaggagagtagaacatcatgatcacgctgttgtgagtggaagactggctggagaaaatatgactggagctgctaagccatactggcatcagtcaatgttctggagtgatttgggtcctgatgttggctatgaagctattggtctggtggatagtagtttgcccacagttggtgtttttgcaaaagcaactgcacaagacaacccaaaatctgccacagagcagtcaggaactggtatccgttcggagagtgagacagagtctgaagcttctgaaatcacaatccctcccagtgaccctgcagtcccacaggtccctgttgaaggggaggactacggcaaaggtgtcatcttctacctcagggacaaagttgtggtggggattgtgctatggaacgtctttaaccgaatgccgattgcaaggaagatcattaaagacggtgagcaacatgaagacctcaatgaagtagccaaactcttcaacattcatgaagattgaatccctatcatggaatacacaagcacttttccatccctgacagggaatgggtggataaaagaacattttttattcagcatactttttctttatgtaggagcaggaatcgaacaagcctctgtgaatattttcatctgtataaatgcacatcacaaattaaaatctgattcttttcaaaaaaaaagcggccgc

SEQ ID NO: 542 - DNA, 993 bp, Rattus norvegicus
tgggaagatggcggctgtgtcggtgtttcaggcaccggtcggaggcttttcttttgataattgccgcaggaatgcggtcttggaagctgattttgcaaaaaaggggttcaaacttccgaaagctcggaaaactggcactaccatcgcgggggtggtctataaggatggaatagttcttggagcagacacgagagcaactgaagggatggttgttgctgacaaaaactgttcaaaaattcacttcatatctcctaatatttattgctgtggtgctgggacagctgcagacacagacatgacaacccagcttatttcttctaacttggagctccactctctcaccaccggccgccttcccagagttgtcacagcgaatcggatgctgaagcagatgcttttcaggtatcaaggttacattggtgcagccctagttttggggggagtcgatgttactggacctcatctctacagcatctatccgcatggatcaactgataaactgccttatgtcaccatgggttctggctccttggcagcaatggctgtgtttgaagataagtttaggccagatatggaggaggaagaagccaagaagctagtgagtgaagctattgcagctggcatctttaatgacttggggtctggaagcaacattgatctgtgtgttatcagcaagagcaagctggactttctccgtccatactcagtgcccaacaagaaagggaccaggtttggccggtacaggtgtgagaaaggcactaccgctgtcctcacggagaaagtcacccctctggagctcgaggtgctagaagagattgttcagacaatggacacttcgtgaatggtgctgcgggcagttggatagctctctgggtgactcggtgtacatgccacccctgccccaccccactctaccccaatcagaaaacatgcatttggctattgctcaattaaaacaaaccagaaaacttaaaaaaaaaaaaaaaaaaaaaa

SEQ ID NO: 543 - DNA, 1688 bp, Rattus norvegicus
cagaaggagtcatggctgccaaagtgtttgagtccatcggaaagttcggcctggccttagcagttgcaggaggcgtggtgaactctgctctatataacgtggatgccggacacagagctgtcatcttcgaccgattccgtggcgtgcaggacatcgtggtaggggaagggactcacttcctcatcccctgggtacagaagccaatcatctttgactgccgctctcgaccacgtaatgtgccggtcatcaccggcagcaaagacttgcagaatgtcaacatcacactacgtatcctcttccggccggtggccagccagcttcctcgtatctacaccagcattggcgaggactatgatgagcgggtgctgccatctatcaccacagagatcctcaagtcggtggtggctcgattcgatgctggagaattgattacccagcgagagctggtctccaggcaggtgagtgatgacctcacagagcgagcagcaacattcgggctcatcctggatgacgtgtccctgacacatctgaccttcgggaaggagttcacagaggcggtggaagccaaacaggtggctcagcaggaagcagagagagccagatttgtggtggaaaaggctgagcagcagaagaaggcggccatcatctctgctgagggtgactccaaagcggctgagctgatcgccaactcactggccaccgccggggatggcctgatcgagctgcgaaagctggaagctgctgaggacattgcttatcagctctcccgctctcggaacatcacctacctgccagcagggcagtccgtgctcctccagctcccccagtaaggccagccagccagggcctccatcgctctgaatgacgccttccttctgccccaccccagaaatcactgtgaaatttaatgattggcttaacatgaaggaaataaaggtaaaatcacttcatatctctaattatcaaatgaagcttttattgttacactttttgcccactttcataacaaaattgccaagtgcctatgcagactggccttccaccctgggtgctggcagtcggcggaagaaaggcagggcagtgtgtgtggtggacggggagccagctggcagcctgagtagaccttgagcctccattctgccatatattgaagatttacagacagtggtgcacacacgtgaaccaaaagcaagccctcaatttttccagccatacgaacccggacagatgcagctgaggagggcctgaggaagtggtctgtcttaactgtaaggccattccctcttaaccgtgaccagcggaagcaggtgtgtgcgtgcgactagggcatggagtgaagaatctgcccatcacggtgggtgggcctaattttgctgcccccaccagagacctaaactttggatagacttggatagaataagaggcctggactgagatgtgagtcctgtggaagacttcctgtccaccccccacattggtcctctcaaataccaatgggattccagcttgaaggattgcatctgccggggctgagcacacctgccaaggacacgtgcgcctgccttcccgctccctctcttcgagattgcccttccttcccaagggctgtgggccagagctccgaaggaagcaatcaaggaaagaaaacacaatgtaagctgctgtcaataaatgacacccagaccctc

SEQ ID NO: 544 - DNA, 1952 bp, Rattus norvegicus
  misc_feature 1594: n = A,T,C or G
gaattcccgggccagattgacggaagacacggtttcctggtgagccagtccctctcccctaggcaacccacacaacccggggtctgaagatgctgagatcaatgtggaattttctgaaacgtcacaaaaagaaatgcatcttcctgggcacagtccttggaggagtctatatcctgggaaaatatggacagaaaaaacttagagaaatacaagaaagagaagctgcagagtacattgcccaagctcggcgacagtaccattttgaaagtaaccagaggacttgcaatatgacagtgctgtccatgctgccaacactgagagaggccttaatgcagcagctcaactcggagagtctgacagctttgttgaaaaacaggccttcaaacaagctggaaatatgggaggatctaaagataataagtttcacaagaagtattgtagctgtgtacagcacatgtatgctggtggttcttttgcgagtccagctgaacataattggtggatatatttacctggataatgcaacagttggcaaaaatggcactagcatcctagctcccccagatgtacagcaacagtatttatcaagtattcaacacctccttggagatggcctgacagagttggtcactgtcattaaacaagctgtgcagaggatcttaggaagtatttctcttaaacattccttgtcccttttggacttggagcagaaactgaaagaaataagaactcttgttgagcaacatcgatcttgctggaatgataaagacgcatccaagtcttccctgtgccactacatgatgccagacgaggagacgccgctggcagcgcaggcttatgggctttctcccagagatattaccactattaaacttctcaatgagacaagagacatgctggaaagtccagatttcagtacagttctgaatacctgtttaaacagaggcttcagtcggcttctagacaatatggcggagttcttccgacccactgagcaggacctgcagcatggtaactccataaacagtctgtccagtgtcagcctccctttagccaagataatccccatagtgaatggacagatccactccgtctgcagtgagacacccagtcacttcgtgcaggatctgctgatgatggagcaagtgaaagactttgctgccaacgtgtacgaagcattcagcaccccccaacaactggagaaatgattgttttctttcaagaaaaaccacagtggattcatctacattaaaaagtactctgaataaatcacctatacctagagtgacaatttgcaaccaaatgcctaataaaatatattcttgagccaatcttcatctcataagtagattcatttagcaccttactgtatttttaattcagcacagtctacttcttcaggtgtatctaactgtgcagagatcacgtcagcatcaatcatgattcccttaaagtctggatagctgatccaaacaagtagggcttttatacatacatggaatggaatgtggtgtcctttcacacatgtaatgagggaaaatctgtcttgaaaaggagatctaggctgtttaactaattatggcgtttcctggantctgaagtaagcaagagcaagccagatcctcttcagtcgcccttagaaggcacccgtgatttgctcacacatacctacgcaggggcttattttctagaaatgagtgggtttccacacctgtggtcacttacttctctgcactgtcctgtcagtatttatttgcagcattttctaagcttcattagcagccctcagaaggctgcatatagattcttcaagctaatgtttatgttgtttactcacaattattaataattacaggtttattcatttatgtataaatttaataactttgtattaattttgagtataataagttgttacaataaactattttaataaaaaaaaaaaaaaaaaa

SEQ ID NO: 545 - DNA, 1390 bp, Rattus norvegicus
gagactccgggcgaagatggcgacagtgaggaaggctttcccacagaggctggtgggcttggcgtccctccgggctgcgagcacctcctccatgggcaccttgccgaagcgggtgaagatcgtggaagtcggcccccgagatggtctgcagaatgaaaagagtatcgtgccgacgccagtgaaaatcaaactgatagacatgctatccgaagcagggctcccggtcatcgaggccaccagctttgtctctcccaagtgggtgccgcagatggctgaccactctgacgtcttgaagggcattcagaagtttcccggcatcaactacccggtcctgacaccaaacatgaaaggctttgaggaagcggtagctgcaggtgccaaggaagtgagcatctttggggctgcgtccgagctcttcacccggaagaatgtgaactgctctatagaggagagtttccagcgctttgatggggtcatgcaggccgcgagggctgccagcatctctgtgagagggtatgtctcctgtgccctcggatgtccctacgaggggaaggtctccccggctaaagttgctgaggtcgccaagaagttgtactcaatgggctgctatgagatctcccttggggacaccattggcgtaggcacgccaggactcatgaaagacatgctgactgctgtcctgcatgaagtgcctgtggccgcattggctgtccactgccatgacacctatggccaagctctggccaacacgttggtggccctgcagatgggagtgagcgttgtggactcctcggtggcaggactcggaggctgtccctatgcaaagggggcgtcaggaaacttggctaccgaggacctggtctacatgctgactggcttagggattcacacgggtgtgaacctccagaagctcctagaagccggggacttcatctgtcaagccctgaacagaaaaaccagttccaaagtggcacaggccacctgcaaactctgagccccttgttcacctaaaccggaactgtgggagttgggtgtacacaatgattcctggatggggaaatggaatgaaggcaaatgagccggcctcacagaggtccctctcctacatagaagggctagagctgccagcacgcccggaccagctccccagagctgcgtgcctaagcactgcttggctggccctgggtgagtccactagccagcagagctgacatccatgtgccacgaccgcgggtcccatgttctacctctgaggacagcagcgcctttgctgaaatggtgggctcaatctactgcggtggccgactgccaactccagcgtctctgggaaatctctgtacgtgattcttgaaaacagcttatgtaattaaaggtttaattttctaatatc

SEQ ID NO: 546 - DNA, 2619 bp, Rattus norvegicus
ctgaccttcctcccggaagtgctcctgtggctggagttgccggcgtgactttgagcgcttcccgctctgctgccggcgctgagcacaacagagcacagcgacgaggaaccctggaagtggctgttccagacttgtcatgcggctgctgcggatcactgcaggcctggggcgtgggccgctccctcgggtccctgccatcctgggttggcaggggaagcaggctaattggaagacctaccgatggtgttcgtcaggatcaattcccaatgagaaaatccggaacattggaatctcggctcacattgattctgggaagacgacgttaacagaacgggtgctgtactacaccggcaggattgccacgatgcacgaggtgaaaggtaaagatggagtcggtgctgtcatggactccatggagctagagagacagcgagggatcactattcagtcagcagctacctacaccatgtggagagatgtcaatatcaacatcatagacactccaggccacgtggacttcacaatagaagtggaaagggccctgcgagtcctggatggtgcggtccttgtcctctgtgcagtcggtggagtgcagtgccagaccatgactgtcagtcgccagatgaagcgctacaacgttccctttttaaccttcattaacaaactggaccgaatgggctccaacccagccagggcccttcagcaaatgagatccaaactaaatcacaatgctgcatttgtgcaaatacccattggtttagagggggattttaagggaattatagacctcattgaagaacgagccatttactttgatggagactttggtcagattgttcgatatgatgagattccggctgatctgagggccgcagcagctgaccaccggccagagctaattgaatgtgtggctaattcagatgagcagcttggtgagctgtttctggaagaaaaaatcccctcagtgtctgatttaaagttagcgatccggagagctactctgagtagatcctttactcctgtgttcttgggaagtgctctgaagaacaagagagttcagcctctcctggatgctgttttagaattcctccccaatccatctgaagtccagaattacgctctactcaatcagaatgatttaaaagagaagaaaaaaatcctaatgaaccccaaaagagacgactcgcacccgtttgtaggcctggcttttaaattggaggcaggccgtttcggacagttaacttacgtccgcaattatcaaggcgaactgaagaagggaagcaccatctacaacacgaggacaggaaagaaagtgcgcgtgcagcggctggtgcgcatgcatgccgacatgatggaggatgttgaagaagtatatgccggagacatctgtgcgttgtttggcattgactgtgcaagtggagacacattcacaaacaaagacaacagtgacctttctatggaatcgattcatgttcctgatcctgtcatttcagtagcaatgaagccttctaacaagaatgatctggaaaaattttccaaaggtattgccaggtttacacgggaagacccaacatttaaagtccactttgacacagagagacaaggagacgattgtgtctggaatgggagaattgcacctgagatctatgctcagagaatggagagagaatatggctgtccttgtatcacaggaaagacccaaagtggacgtttagagaaaccgttactgcccctgtgccatttgattttacacataaaaagcagtcgggtggtgccggccagtatgggaaaagtgataggggtgctggagcccttggccccggaggacctaccgaagttggagttttccgatgagacctttggggccaatgttccaaagcagtttgttcccgccgttgagaaggggtttttggatgcctgcgaaaaagggcctctttctggtcacaagctttctgggctccggtttgttctgcaagatggagcacaccacatggtggattctaacgagatctctttcatccgagctggagaaggtgctcttaaacaagccttggccagtgccacattgtgtattattgaacctatcatgtccgtggaagtcatcgccccaaatgagtttcagggagcagtgtttgcaggaattaaccggcgccatggagtgattacagggcaagacggaattgaggactatttcacgctctacgctgatgttcccctaaataatatgtttggttattccactgagcttaggtcttgcacagagggaaaaggagagtacacaatggagtacaacagataccaaccatgttccccatccacacaagaagagctcgtcaataagtatttggaagctataggtcaacttcccgtaaaaaaaggaaaagccaagaactgactctcagtggtactttgaacgtactgacagtttgactacaagacgtaaggatgatggatgccggtagaatgaatttagacggctgaaacagatttaggagcccctgccatctcgtgttcaggagcttctatatacgtgcaagataactagataactatgtgtatttaaactgtatttttattatttagtaaaagatcttaaataaaattatattattggaattc

SEQ ID NO: 547 - DNA, 2133 bp, Rattus norvegicus
atgatgccgcgcctgctgtttcgtgcctggccccgctgcccctcgcttgtcctgggagcccctagtaggcccttaagtgctgtctcggggccggacgattatctgcagcacagcatcgtgcccaccatgcactaccaggacagcctgcccaggctgcctatccctaaacttgaagacaccatgaagagatacctcaatgcacagaagcctctcttggatgacagccagttcaggagaacagaagcgttgtgtaagaattttgagactggcgttgggaaggagctgcatgcccacctgcttgctcaggataagcagaataagcacaccagctacatctcaggcccctggttcgatatgtatttaactgctcgagactctatcgttttaaactttaatccatttgtggcattcaatccggacccaaagtctgagtataatgaccagcttaccagggcaaccaacttgactgtttctgcagtccggtttctgaagacacttcgggctggccttttagaaccagaagtgttccacttgaacccttccaaaagtgacacagacgccttcaaaagactcattcgctttgttcctccctctctgtcctggtatggagcctacctggtcaacgcatatcccctggatatgtcccagtatttccggcttttcaattcaactcgtatacccagacccaatcgtgatgaactctttactgacaccaaggctagacacctcctgatcctaagaaaaggacatttctatgtctttgatgtcctcgatcaagatgggaacattgtgaatccctcagagattcaggcacatctaaagtacattctctcagacagcagccctgtgcccgagtttcctgtggcatatctgaccagtgagaaccgagatgtctgggcagagctcagacagaagttgatttttgatggcaatgaggaaaccctgaagaaagtggactctgctgtcttctgcctctgcctagatgacttcccgatgaaggatcttattcacttgtcacacaccatgctgcacggcgaaggcacaaaccgctggtttgataagtcctttaacctcattgtagccgaggacggcactgctgcagtccacttcgagcacgcgtggggggatggggtggcagtgcttaggtttttcaatgaagtgttcagagacagcactcagtcccctgccatcactccccagagccagcctgccgccaccaactcctctgcgtctgtggagacgctcagcttcaacctcagcggtgctctcaaggctggcatcactgctgccaaggagaagttcgacaccacggtgaaaaccctcagcattgactccattcagttccagagaggtggcaaggagttcctgaagaagaagcagctgagccccgatgcggtggcccagctggccttccagatggccttcctgagacagtatggccagacggtggctacctatgagtcctgcagcactgcagccttcaagcacggccgcacagagactatccgcccagcctccatctttactaagagatgctccgaggcgtttgtcagggacccctccaagcacagtgtgggcgagcttcagcacatgatggctgagtgttccaaataccatggccagctgaccaaagaagcagcgatgggccagggctttgaccgacacttgtatgctctgcgctatctggcaacggccagaggactcaacctacctgagctctatctggatcctgcataccagcagatgaaccacaacatcctgtccaccagcactctgaacagcccagcagtgagccttgggggctttgcccctgtggtccctgatggctttggcattgcatatgctgttcacgatgactggataggctgcaatgtctcctcctactcaggacgcaatgcccgagagtttctccactgtgtccagaagtgcttggaagacattttcgatgctctagaaggcaaagccatcaaaacttagcttcctagtcgctgaaaagcctccattcttcctcatgaacatggatgttcatgtagctggaaggtgccatcttgtgcccaacaaaactaatcccaaggtgcttccacagccagtgctgcaggctgagctggaagagcccaactgaaggtagtgaga

SEQ ID NO: 548 - DNA, 2133 bp, Rattus norvegicus
atgcagggaaagaagccgggcggctcgtcgggcggcggccggagcggcgagctgcagggggacgaggcgcagaggaacaagaagaagaaaaagaaggtgtcctgcttctccaacatcaagatcttcctggtgtctgagtgcgccttgatgctggcgcagggcacggtgggcgcctacctggtgagcgtgttgaccaccctggaacgcaggttcaaccttcagagcgccgatgtgggtgtgatcgccagcagctttgagatcggcaacctggcgctgattctcttcgtgagctacttcggagcacgtgggcaccgaccacgcctcatcggctgtggtggaatcgtcatggcgttgggtgcgctgctctcggcactgcctgaattccttacccaccagtacaagtatgaggctggtgagattcgatggggagccgaaggccgcgatgtttgtgccaccaatgggtccagcagcgatgaggggcctgacccggacttaatctgccgtaaccggacagccacgaacatgatgtacttgctgctcattggggctcaggtgctcctgggcatcggtgctacccccgtgcaacccctgggggtctcctacattgacgaccacgtgcggaggaaggactcctcgctctacataggaatcctgttcacgatgttggtatttggaccagcctgtggatttattctgggctctttctgtaccaaaatctacgtggacgcggtcttcattgacacaagcaacctggacatcactcctgacgacccgcgctggatcggagcctggtggggcggcttcctgctctgtggtgccttactcttcttctcctccctcctgatgtttggcttcccacagtccctgcccccacactcagagcccggcatggagagtgagcaggccatgctcccagaaagagaatatgagaggcccaagcccagcaatggagtcctgagacatcccctggagccggacagcagtgcctcctgtttccaacaactgagagtgattcccaaggtcaccaagcacctgctctcaaaccctgtgttcacctgcatcgtcctggctgcttgcatggagattgctgtggtggccggcttcgctgccttcctgggcaagtacctggaacagcagtttaacctcaccacttcctctgccaaccagctgctcgggatgacagcaatcccctgtgcctgcctgggcatctttctgggtggccttttggtgaagaagctgagcctgtctgctctgggggccattcggatggccatgctggtcaacctggtgtccacagcctgctacgtctccttcctcttcctgggctgtgacacagtccctgtggccggggtcactgttcgctatggaaacaattcagcacgtggctcgccccttgacccctactctccgtgcaacaacaactgtgaatgccagacagattccttcacgccagtgtgcggggccgatggcatcacctatctgtcagcctgcttcgccggctgcaatagcacgaacctcacaggctgtgcgtgcctcaccaccgtcccccctgagaatgccaccgtggttcctggaaaatgtcccagtcctgggtgccaagaggccttcctaaccttcctctgtgtgatgtgtgtgtgcagcctgatcggggccatggcgcaaaccccttctgtcatcatcctcatcaggacagtcagccctgaactcaagtcttacgcgctgggagttctttttctgctccttcgtttgttgggtttcatccccccacccctcatcttcggggccggcatcgactccacctgtctgttctggagcaccttctgcggggaacagggcgcctgtgtcctctatgacaacgtggtctacagatacctgtacgtcagcatcgccattgcactcaaatccttcgccttcatcctctacaccaccacgtggcagtgcctgcggaaaaactataaacgctacatcaaaaaccacgagggcgggctgagcaccagtgagttcttagcctctactctgaccctagacaatctggggagggaccctgtgcccgcacaccagacacataggacaaaatttatctataacctggaagaccatgagtggtgtgaaaacatggaatccgttttatag

SEQ ID NO: 549 - DNA, 7286 bp, Rattus norvegicus
tgcttatctcctaccatgaacctggagggctggggagaggacctggtgctcccctagccataactggctaaactttgagatcacagctgcatctgctgctccagagcacccagcatggggggagtagctccgaagaggcctaagggcactccataagaactcccacacacacccaggaattgggctcgagctgtatgtatcatgcctcctctgccactggaacacagacccaggcaggagcctggtgcctccatgctggttcgatacttcatgatcccctgcaacatctgcttgatcctgttggccacttccacattgggctttgcggttctgcttttcctcagcaactacaaacctggaatccacttcacaccagcgcctcctacgcctcctgatgtatgcaggggaatgttatgtggctttggtgctgtgtgtgaacctagtgttgaggatccaggccgtgcctcctgtgtgtgcaagaagaatgcttgccctgctacggtggctcctgtgtgtggctcagatgcctccacctatagcaacgagtgtgagctgcagcgcgcgcagtgcaaccagcaacggcgcatccgcctgcttcgccaagggccatgtgggtcccgggacccctgtgccaacgtgacctgcagtttcggtagtacctgtgtaccttcggctgacggacagactgcctcatgtctgtgtcctacaacctgcttcggggcccctgatggcacagtgtgtggcagtgacggtgttgactaccctagtgaatgccagctgcttagtcatgcctgtgccagccaggagcacatcttcaagaagttcaatggtccttgtgatccctgccagggcagcatgtcagacctgaaccacatttgccgtgtgaacccacgtacacggcacccagaaatgcttctgcggcctgagaactgccctgcccagcacacgcctatctgtggagatgatggggtcacctatgaaaacgactgtgtcatgagccgtataggtgcaacccgtggcctgcttctccagaaagtacgctctggtcaatgccaaactcgagaccagtgcccggagacctgccagtttaactccgtatgcctgtcccgccgtggccgtccccactgttcctgcgatcgtgtcacctgtgatgggtcttacaggcctgtgtgtgcccaagatgggcacacatacaacaatgactgttggcgccaacaggctgagtgtcgacaacagcgggccattcctcccaagcaccagggcccgtgtgaccagaccccgtccccatgccatggagtgcaatgtgcatttggggcagtatgcacagtgaagaacgggaaagccgagtgcgagtgccagcgggtgtgctccggcatctacgatcctgtgtgcggcagtgacggtgtcacttacggcagtgtgtgcgagctggaatccatggcctgtacccttgggcgggaaatccaagtggcccgcagaggaccctgtgacccatgtgggcagtgccgttttggatccctgtgcgaggtggaaactggacgctgtgtgtgcccctctgagtgtgtggagtcagcccagcccgtatgcggttctgatggacacacatacgctagtgaatgtgagctgcatgtccacgcctgtacgcaccagatcagcctatacgtggcctcagctggacactgccagacctgtggagaaaaagtttgtacttttggggctgtgtgctcagctggacagtgtgtatgtccccgttgtgagcaccctccacctggccctgtgtgtggcagtgatggtgtcacctacctcagtgcctgtgagctacgcgaagctgcctgtcagcagcaggtacaaattgaggaggcccatgcagggccatgtgagccggctgagtgtggctcagggggctctggttctggggaggacgacgagtgtgaacaggagctatgccggcagcgtggtggtatctgggacgaggactcagaagatgggccatgtgtctgtgactttagctgccagagtgtccctagaagcccagtgtgtggctcggatggagtcacctatggcaccgagtgtgatctgaagaaggccaggtgcgaatcacagcaagaactgtacgttgctgctcagggagcctgccgtggccctaccttggctccactgctacctgtggccttcccacactgtgcccaaaccccctatggctgctgccaggacaatttcactgctgcccagggtgtgggcttggctggctgtcccagcacctgccattgcaacccccatggctcctacagtggcacttgtgacccagccacagggcagtgctcctgccgaccaggtgtaggaggcctcaggtgtgatcgctgtgaacctggcttctggaacttccgtggcatcgtcaccgatggacatagtggttgcactccctgcagctgcgaccctcggggtgccgtaagggatgactgtgaacagatgactggattgtgttcctgtaggcctggtgtggctggtcccaagtgtggacagtgtccagatggtcaagtcctgggccatctaggctgtgaagcagatcccatgacacctgtgacttgtgtggagatacactgcgagttcggggcctcctgcgtagagaaggctggttttgcccaatgtatctgcccaaccctcacatgtccagaggctaactctaccaaggtctgcggatcagacggtgtgacatatggcaatgaatgccagctgaaggccattgcctgccgccagcgtctggacatctccactcagagtcttggtccctgccaggagagtgttactcctggggcttccccaacatctgcatctatgactaccccaaggcatatcctgagcaagacgctgccatttccccacaacagccttcctctgtctcccggcagtactacccatgattggcccaccccattacccatatcacctcacaccacagtcagcatccccagaagcaccgcgtggcctgtgctgaccgtgccccctacagcagcagcctctgacgtaaccagtctcgcaacatcaatcttcagtgaatccggcagcgccaatgggagtggcgacgaggaactgagtggagatgaggaggccagtgggggcgggtctgggggacttgagcccccggtgggcagcattgtggtgacccatgggccacccatcgagagggcttcctgctacaactcacctttgggctgctgctcagatggcaagacaccctcactggactccgaaggctccaactgtcctgctaccaaggcattccagggcgtgctggagcttgagggggtcgagggacaggaactgttctacacacctgagatggctgaccccaagtcagagttgtttggggagaccgcaaggagcattgaaagcacgctggacgacctgttccggaattcagacgtcaagaaggacttctggagtgtccgcctacgggaactggggcctggcaagttggtccgcgccattgtggacgttcactttgaccctaccacagccttccaggcatcagatgtgggtcaggccttgctccgacagatccaggtatctaggccatgggccctggcagtgaggaggcctctgcaggaacatgtgcgattcttagactttgactggtttcccactttctttacgggagctgcaacaggaactacagctgctatggccacagccagagccaccactgtgagccgactgccggcctcttccgtcaccccacgagtctaccccagtcacaccagccggcctgttggcagaactacagcaccaccaaccactcgccggccaccaaccactgccaccaacatggaccggcctcggaccccaggccatcaacagccctcaaagtcctgtgattcccaaccttgcctccatggaggtacctgccaggaccaggattctggcaagggtttcacctgcagctgtactgcaggcaggggtggctctgtctgtgagaaagtacaacccccctccatgccagcttttaagggccactccttcttggccttccccaccctccgagcctaccacacactgcgcctagcactggaattccgggctttggagacagagggactgctactctacaatggcaatgcacgtggcaaagatttcctggctctggctctgttggatgggcgtgtgcagttcaggtttgacacaggctcagggccagcagtgctaacgagcttagtgccagtggaaccaggacggtggcaccgcctcgagttgtcacggcattggcgtcagggcacactttctgtggatggcgagactcctgttgtaggtgaaagtcccagtggcaccgatggcctcaacttggacacgaacctctatgtgggtggtatcccagaagaacaagttgccatggtgcttgatcggacctctgtgggcgttggcctgaaaggatgcattcgtatgctggatatcaacaatcagcagctggagcttagcgactggcagagggctgcggttcaaagctctggtgtgggagaatgtggagaccatccgtgcttacctaacccctgccatggtggggccctatgccaggcactggaggctggcatgttcctctgtcagtgcccgcctggccgctttggcccaacttgtgcagatgaaaagagcccctgccagccgaacccctgccatggggcagccccctgtcgtgtgctttccagcggtggggccaagtgcgagtgccccctgggacgcagtggtaccttctgtcagacagtcctggagactgctggctcccggcccttcctggctgactttaatggcttctcctacctggaactgaaaggcttgcacaccttcgagagagacctaggggagaagatggcgctggagatggtgttcttggctcgtgggcccagtggcttactcctctacaatgggcagaagacagatggcaagggggactttgtatccctggccctgcataaccggcacctagagttctgctatgaccttggcaagggggctgcagtcatcaggagcaaagagcccatagccctgggaacctgggtcagggtattcctggaacgaaatggccgcaagggtgcccttcaagtgggtgatggtccccgtgtgctaggggaatctccgaaatcccgcaaggttccgcacaccatgctcaacctcaaggagcctctctatattgggggagctcctgacttcagcaagctggccaggggggctgcagtgtcctctggcttcagtggtgtcatccagctggtgtctctaagaggccatcaactgctgactcaggagcatgtgttgcgggcagtagatgtctcaccttttgcagaccacccttgtacccaggccttgggcaacccctgccttaatgggggctcgtgtgtcccgagggaagccacttatgaatgcctgtgtcctgggggcttctctgggctgcactgcgaaaaggggctagttgagaagtcagtgggggacctagaaacactggcctttgatgggcggacctacatcgaatacctcaatgctgtgattgagagtgagaaggcactgcagagcaaccactttgaactgagcttacgcactgaggccactcaggggctggtgctgtggattggcaaggctgcagaacgtgcagattacatggccctggccatcgtggacgggcacctgcaactgagctatgacctaggttcccagccagttgtgctgcgctccactgtgaaggtcaacaccaaccgctggcttcgaatcagggctcacagggagcacagggaaggttcccttcaggtgggcaatgaagcccctgtgactggatcttccccattgggtgccacgcaactggacacagatggagccctgtggcttggaggcctgcagaagcttcctgtggggcaggctctacccaaggcctatggcacaggttttgtgggctgtctgcgggacgtggtagtgggccatcgccagttgcatctgctggaggacgctgtcaccaaaccagagctaagaccctgccccactccctgagctgccaccagagctgccaccttccctactgtaattattttctatttttgtaaacttgttgcatttttatatgatttttttgactgcacgttggccagaaggactgctggcctggcctcctttccgtccggcagctgtgctacagagacaaagtggtgctaagggaactcttaagtagaccgtagcacctagagccctgggctttgaaaggcagccttaggacacactcctctgcctaaggtaccgtgcctcagccccttgcactgtatgttcctacctgtccacttgtattggtcctttgggtctcctggcccattgctaggccctgtttgtgtgttattaatgtgttattggatgagaactgtatccctgagcaggagggtgctgttggggttgagggggcccttcattaaaccaagtaacattgggtcctttgtaggttcccacttaagctgctctcctgtgtgtgctaagggccagcctcaccccaagctagcctggacccctagtgctccctgtgacaatactgtgatataaaaaacctgataattggggcatcatcttacttcccaaaatgtgtttgcctgtccctggaggctgtaaacagaagccaggctccatctaggttgtcctggctggtcctcagttggccttccccacctactcagttaccctgaacatggtcatcctttccccaaaacatcaggccacttaggaatccctaagagggagtgcgtcactacgggatgtggttgacctccattgcttacctgcctaagcagccagctacatctgtctctcaaagatgtccagccagactcctaactatattcttcaaccattgattttgtttgatttctgatgtggaagtgcggtcattcctgttctaacgcacagcaaactttaattggtctaacgtgagggcaacccacagttggtccactgtaacgatggtcatccttgtttgagtgacagttactgccgggtgtccagccaagggcaggtactagaatggcagagatgactatagagccaaaaatgactgaaactgaagcaactgtctgctcctccatcccctatctttaatgtccagcacagtcatctcgggagaaaaaccagacaaatctgggatgggggcagtctgaccttcttcctgcttcggtgatcaaggctagagggaactgcatggtatcttgttactaactccagtatgtgtcaatgtcaaataccatgaaataaagtctgaaaaccttaaaaaaaaa

SEQ ID NO: 550 - DNA, 2020 bp, Rattus norvegicus
atgagaggcttggggccaagcttgagggctcggcgcctgctcccactgcggtacccgccgcggcctccggggcctcggggacctaggctgtgcagcgggctcacggctagcgccatggacgagctgctacggcgagccgtgccacccacgccggcctacgagctgcgcgagaagacgccggccccggccgaggggcagtgcgcggacttcgtgagcttttacggcggcctggccgaggcggcccagcgcgccgagctgctcggccgcctggctcagggcttcggcgtggatcacggccaggtagcggagcagagcgccggagtgctgcagctgcgccagcagtcgcgcgaggcggccgtgctgctgcaggcagaggaccggctacgctatgccctcgtgccgcgataccgtggcctcttccaccacatcagtaagctggacggcggcgtgcgcttcctggtacagctgcgggccgatctgctggaggcgcaggccctcaagctggtggaagggccgcacgtccgggaaatgaacggagtgctaaaaagcatgctgtccgagtggttctcctctggcttcctgaacctggagcgggtcacctggcactcgccctgtgaggtgcttcagaagatcagcgattgtgaggctgtgcagcctgtgaaaaactggatggacatgaagcggcgtgtggggccataccggaggtgttacttcttctcccactgctccacccccggggaccccctggttgttctgcatgtggctctgaccggtgacatttccaacaacatccagagcattgtgaaagagtgccctccgtctgaaacagaggagaagaaccggatcgctgctgctgtcttctactccatcagcctgacccagcagggcctgcagggcgtgggactcggcaccttcctcataaagcgagtggtcaaggagctgcagaaggagtttcctcatctgggggccttttccagcctgtcacctatacccggattcaccaagtggctgctgggccttctgaatgtgcagggaaaggagtatgggaggaacgagctgttcacagactcagagtgcaaagaaatcgcagaggtcacgggcgaccctgttcacgagagcctcaagggtctcctgagcagtggtgagtgggcgaagtctgagaagctggcacaggcactgcaggggccactgatgagactgtgtgcctggtacctttacggtgagaagcaccgatacgccctcaatccagtggccaacttccacctgcagaacggggctgtgatgtggcgtatcaactggatggctgacagcagcctcaaaggcctcaccagctcgtgcggcctcatggtcaactaccgttactacctggaggagaccggccccaacagcatctcctacctgggctccaagaacatcaaagcttccgagcagatcctcagcctggtagcccagttccagagcaacagcaaactctagggacatcctgcccagcgcttggccctgctcagaaaggaggctgtattctgatgggccagcgctgctcaccacagcaaccactcaggaggccacacctcagctgtcactgtgctggcggactcactggttggagtggtggtggttttgggtacacctgccctgaggatgtcactgtgcttctccaaaagcccttgctgctgcccccacagcctgtgctttcagaaagctctacagatgcagccacaggccgcccaggacggagcccagagcacagaccctgtagagtacagagagttggcagtcatgtcctctattcgggagagggctaaggtctgtgccgtggctgctaccacagcttaagctcagactagggagaccttgtggtgtgcacagggtgtgatctgcaacccagggatgctgctacttgaggccagaataggctcgtagggtttaaatgagatcccagttcataatgaactgaacagtaaagaacaaatttgttctgtaaacattaaacatgattgttcactgtaaaaaaaaaaaa

SEQ ID NO: 551 - DNA, 60 bp, Artificial Sequence
  oligonucleotide probe
ttgtgtctaagatgttccaccctaacgtctatgcagatggtagtatatgtctggatatac

SEQ ID NO: 552 - DNA, 60 bp, Artificial Sequence
  oligonucleotide probe
aatagtggctgaagtgttccctaggtatcctcactgactagctccatgtgatacacacta

SEQ ID NO: 553 - DNA, 60 bp, Artificial Sequence
  oligonucleotide probe
ctctaagtctacctgtgtcttcaagatggttatatttttctgttggttgatagtatacca

SEQ ID NO: 554 - DNA, 60 bp, Artificial Sequence
  oligonucleotide probe
tacatcacagctaatccggattcaaatatacttgagataaagtggaacctggaagggggg

SEQ ID NO: 555 - DNA, 60 bp, Artificial Sequence
  oligonucleotide probe
aaacactgtagcttatcagtgtgttcaactccatggaggctggggttacatgtgggaata

SEQ ID NO: 556 - DNA, 60 bp, Artificial Sequence
  oligonucleotide probe
tttggaaaaacagtcgcacacatccagactgtgcagcacaaactagcagaattgaagacg

SEQ ID NO: 557 - DNA, 60 bp, Artificial Sequence
  oligonucleotide probe
tcaacgaatgtatgtttactactacaagcattcttctcttttgactgtttgcccactcta

SEQ ID NO: 558 - DNA, 60 bp, Artificial Sequence
  oligonucleotide probe
ctaatttcagtatgattccttcctaaaatccaaacagatcgctctgaagtacaaatcatg

SEQ ID NO: 559 - DNA, 60 bp, Artificial Sequence
  oligonucleotide probe
gggagctgataaaattttctaaaattactctagtggtggatctgtaacacattgagttca

SEQ ID NO: 560 - DNA, 60 bp, Artificial Sequence
  oligonucleotide probe
ataaacgacgactactacgaggatctgacacccaaggatattgaagagattattgatgaa

SEQ ID NO: 561 - DNA, 60 bp, Artificial Sequence
  oligonucleotide probe
tgacagtctcctggaagacattctcttgtaaacatgtgtgtggaatgattcaacgcccag

SEQ ID NO: 562 - DNA, 60 bp, Artificial Sequence
  oligonucleotide probe
ggtgtgtatttggaatacgatggacatgaggaaaattgctcaaactaaaactgtacaaaa

SEQ ID NO: 563 - DNA, 60 bp, Artificial Sequence
  oligonucleotide probe
ttcatgtttgaaggccatgacaccaccactagtggtatctcttggtttctctactgcatg

SEQ ID NO: 564 - DNA, 60 bp, Artificial Sequence
  oligonucleotide probe
cttagatacagctagtactgtactgtacttaactgcttacttaacactgtatcggttaca

SEQ ID NO: 565 - DNA, 60 bp, Artificial Sequence
  oligonucleotide probe
tgagcgtactgctggttgtattaacagagcacatttgtcgggtgagttgtgtatgtaaac

SEQ ID NO: 566 - DNA, 60 bp, Artificial Sequence
  oligonucleotide probe
ccctcggaacagaacatactcatcttcatgtaggacctatgaaaattgtctatttttatc

SEQ ID NO: 567 - DNA, 60 bp, Artificial Sequence
  oligonucleotide probe
aaccctagggttcataggggtctagtatgtttagtctacttgactctgagtgaaactacc

SEQ ID NO: 568 - DNA, 60 bp, Artificial Sequence
  oligonucleotide probe
tcttcccacttttcttctcatagtagaagcatttgaagtattgtgccattaaaaaggcag

SEQ ID NO: 569 - DNA, 60 bp, Artificial Sequence
  oligonucleotide probe
gacctagtgttctttcctggatcacagacgttaacgaaaaagttaatttatgtggcttgg

SEQ ID NO: 570 - DNA, 60 bp, Artificial Sequence
  oligonucleotide probe
cgtgcagaatggagatgatggaaattcattgagtacatgtgcaaaactactaaagaataa

SEQ ID NO: 571 - DNA, 60 bp, Artificial Sequence
  oligonucleotide probe
caaagagaacctacgttctttcacaaaagatgcccatactttaatatatagggaccttcc

SEQ ID NO: 572 - DNA, 60 bp, Artificial Sequence
  oligonucleotide probe
cacgggaactcgagagcttttactgtgattcttcaatgtaaaaaataaaacaatgtcaga

SEQ ID NO: 573 - DNA, 60 bp, Artificial Sequence
  oligonucleotide probe
tcccctctgttaagccaacctagttttcaagtagcaatttatcttacgaccttgacaaag

SEQ ID NO: 574 - DNA, 60 bp, Artificial Sequence
  oligonucleotide probe
ccctccattcagtagaaattctgggccatttgtaagcatttgtacttcctaaataaatct

SEQ ID NO: 575 - DNA, 60 bp, Artificial Sequence
  oligonucleotide probe
caggcagaaggattagctttacaataaaggacttccacaatgtcaaatgaaaagtcacat

SEQ ID NO: 576 - DNA, 60 bp, Artificial Sequence
  oligonucleotide probe
ctgcgctttttaatccaatgcttttcagagtgtattcactcacctacagaaatagagccc

SEQ ID NO: 577 - DNA, 60 bp, Artificial Sequence
  oligonucleotide probe
attttatatgtcaaggaggagatgaagaaaaacaacatcccagaaccagtggtcattggg

SEQ ID NO: 578 - DNA, 60 bp, Artificial Sequence
  oligonucleotide probe
tactgcattaacagtcacatagactgggtttgttaacattgacagtttgtaaagaacaag

SEQ ID NO: 579 - DNA, 60 bp, Artificial Sequence
  oligonucleotide probe
aagagattgtagttatagcctatccatactgttgagaaaatacaggtttcacttcagtga

SEQ ID NO: 580 - DNA, 60 bp, Artificial Sequence
  oligonucleotide probe
cctggcgtaggagagaagactttggaagactgttgctaatgttgaaaggtgaacatgagt

SEQ ID NO: 581 - DNA, 60 bp, Artificial Sequence
  oligonucleotide probe
cctaagttattgaaaacatacccgctctctttcaagattgctttaaaattaactccatgg

SEQ ID NO: 582 - DNA, 60 bp, Artificial Sequence
  oligonucleotide probe
tgtagaagaatcccaacaaccgacgttggcttgaaactaaagacagtggtttaagaagag

SEQ ID NO: 583 - DNA, 60 bp, Artificial Sequence
  oligonucleotide probe
cctgacacatttcttgcccttttatacaattttcaattaaaccacctattttgtactttc

SEQ ID NO: 584 - DNA, 60 bp, Artificial Sequence
  oligonucleotide probe
tctagggccaggaaagagcgaaaatccaagaactcctgataatgatagagctgctagctt

SEQ ID NO: 585 - DNA, 60 bp, Artificial Sequence
  oligonucleotide probe
ggtcattgaattcattgcctttcaaaaccattgttcaaatgtcactatccattggactca

SEQ ID NO: 586 - DNA, 60 bp, Artificial Sequence
  oligonucleotide probe
ctgactgtggatactgatgaaattcaagttaactatcctggaatgtttgaattgatggaa

SEQ ID NO: 587 - DNA, 60 bp, Artificial Sequence
  oligonucleotide probe
taccaaggaagcatccagctttccttggtttttagacacagcataattcctaattgcatc

SEQ ID NO: 588 - DNA, 60 bp, Artificial Sequence
  oligonucleotide probe
ccccctgggatttttaggtcaggaattcccataaatcagtttgttgaaattctgaggggg

SEQ ID NO: 589 - DNA, 60 bp, Artificial Sequence
  oligonucleotide probe
taggggaaaacatctgttccaagaaaataaactagttctgagagcctcgattttcctggt

SEQ ID NO: 590 - DNA, 60 bp, Artificial Sequence
  oligonucleotide probe
atcactacaccattagtaaataagcgaaaggagtattcagagagaagaattatagggtac

SEQ ID NO: 591 - DNA, 60 bp, Artificial Sequence
  oligonucleotide probe
tgctctcaaatagatgtgtagcaattgaaatgagaactcagtgcatcatttcaagcacta

SEQ ID NO: 592 - DNA, 60 bp, Artificial Sequence
  oligonucleotide probe
agccattgtatctactgcctgtgaggcattctttcctttctcttgtaagcagaaaataaa

SEQ ID NO: 593 - DNA, 60 bp, Artificial Sequence
  oligonucleotide probe
gggtaccgaggtttgaaagttactctttctaaggggcaaagtgattcttcctcaaactca

SEQ ID NO: 594 - DNA, 60 bp, Artificial Sequence
  oligonucleotide probe
tggagtttctgatgtagaagaacacctaaaatgctcttaggtccattttttcatgatcca

SEQ ID NO: 595 - DNA, 60 bp, Artificial Sequence
  oligonucleotide probe
tggatgcattcagatgacatactttctccatgaacagtaaaacttcttgtgtgaagaatg

SEQ ID NO: 596 - DNA, 60 bp, Artificial Sequence
  oligonucleotide probe
ggccaagccttagaactcctcatttttatatccctatttatggaaataattaaagtccag

SEQ ID NO: 597 - DNA, 60 bp, Artificial Sequence
  oligonucleotide probe
tatactgaagtgcattttcaaggctctctacagacacctcaaaatgatttgaatgcagtt

SEQ ID NO: 598 - DNA, 60 bp, Artificial Sequence
  oligonucleotide probe
atgtgaagagttcacctggaaataaatagaaaactctacgctctacccattataatcagt

SEQ ID NO: 599 - DNA, 60 bp, Artificial Sequence
  oligonucleotide probe
tgatgcagtttccccaaagtctcaagttgatgagaaaatagaaagagaagcagaacaaat

SEQ ID NO: 600 - DNA, 60 bp, Artificial Sequence
  oligonucleotide probe
acaggcttctatacaaacaggaagtttgtgcaaataaaagaaatggttccagaatttgtg

SEQ ID NO: 601 - DNA, 60 bp, Artificial Sequence
  oligonucleotide probe
tatcaatcattatcccaatggggttgtcactgtgatctgtgctcgagtaatccacgggaa

SEQ ID NO: 602 - DNA, 60 bp, Artificial Sequence
  oligonucleotide probe
tgctatatttgtcaacagtcatcctaaatgagcaatagactgaatgagctttgtacaact

SEQ ID NO: 603 - DNA, 60 bp, Artificial Sequence
  oligonucleotide probe
cggtcaggctctttgaaactgatgactactgtttgagtagctgatgtagcgagtgtcttc

SEQ ID NO: 604 - DNA, 60 bp, Artificial Sequence
  oligonucleotide probe
ggtaccgatctgatctatgtttcatcctggttcatagtgtttaaattggtgagagaagaa

SEQ ID NO: 605 - DNA, 60 bp, Artificial Sequence
  oligonucleotide probe
tacaagcagaagcgaactaatgaaaaagcatcaaagctaaggcagatttccacatctcca

SEQ ID NO: 606 - DNA, 60 bp, Artificial Sequence
  oligonucleotide probe
ccgcacaattttccacttaagcaggaactatgtctccgaatgcatgaaatcatgttgatt

SEQ ID NO: 607 - DNA, 60 bp, Artificial Sequence
  oligonucleotide probe
gcagatcatggaaaaccagagacctgtaagaatctgactataaacaatgtccttttttat

SEQ ID NO: 608 - DNA, 60 bp, Artificial Sequence
  oligonucleotide probe
gagagctaatagacataaccttcactaaggaatcaatcactggttaaagtgagttgagga

SEQ ID NO: 609 - DNA, 60 bp, Artificial Sequence
  oligonucleotide probe
aaagctaagacgttcaagagcacattccttccaaatactgggctttctatgcctgccctt

SEQ ID NO: 610 - DNA, 60 bp, Artificial Sequence
  oligonucleotide probe
tatttgaagacctctctgattacatgaactccctaaaagacttactaaaagtcaaagcca

SEQ ID NO: 611 - DNA, 60 bp, Artificial Sequence
  oligonucleotide probe
agtcctatctattggtctgaaatatcaaatacaattttcttcccctgtctagctgaagca

SEQ ID NO: 612 - DNA, 60 bp, Artificial Sequence
  oligonucleotide probe
aaaggttctttctgcccttcctggcgtacacagaacagattccaagtggttcaatttgtc

SEQ ID NO: 613 - DNA, 60 bp, Artificial Sequence
  oligonucleotide probe
cctaaaaggggtatatgtgttatcatttaagtgtctcttaaatgaaaagccttcaaccag

SEQ ID NO: 614 - DNA, 60 bp, Artificial Sequence
  oligonucleotide probe
ttacaagaggccttttcgttggaccttctcaaaacagcatttgtcaatagctgctacatc

SEQ ID NO: 615 - DNA, 60 bp, Artificial Sequence
  oligonucleotide probe
ggagacccgttttgctaagagccatgatttatttaaaaatgtgaggaattgagtaaatgg

SEQ ID NO: 616 - DNA, 60 bp, Artificial Sequence
  oligonucleotide probe
aggtccttctgtcagtgataaaatacactcttcagcttacgtgtgtaccaggttggacca

SEQ ID NO: 617 - DNA, 60 bp, Artificial Sequence
  oligonucleotide probe
ccgccatatttgacaagtttgcatatagggttgggcacaggtagaagtatctagaaggga

SEQ ID NO: 618 - DNA, 60 bp, Artificial Sequence
  oligonucleotide probe
catgtatgatggtcttcttcttgagcaacatgattgagaaccagtgtatgtcaacaggtg

SEQ ID NO: 619 - DNA, 60 bp, Artificial Sequence
  oligonucleotide probe
cgagttttgtcagctaagatgacggttttacatggttgaatctaacagtcatggaagtcc

SEQ ID NO: 620 - DNA, 60 bp, Artificial Sequence
  oligonucleotide probe
gaacacatagaaatccttacagtaaatggagagttactgttttttagacaaagagaaggg

SEQ ID NO: 621 - DNA, 60 bp, Artificial Sequence
  oligonucleotide probe
ctttggatgtcaactttcattaaccttaaatacactgaatggaatctacagaagtgagac

SEQ ID NO: 622 - DNA, 60 bp, Artificial Sequence
  oligonucleotide probe
aactggacagaaagtaacgttagcataaaatacacttctgatttttctagatgtgtctgc

SEQ ID NO: 623 - DNA, 60 bp, Artificial Sequence
  oligonucleotide probe
ggagctgaagcctgcccgagtgtatgggacaggttctttggctctgtatgagaaggctgg

SEQ ID NO: 624 - DNA, 60 bp, Artificial Sequence
  oligonucleotide probe
gcaagtgagagttacagaacccattcccccttgccctaataaaagtaactaaagccagtc

SEQ ID NO: 625 - DNA, 60 bp, Artificial Sequence
  oligonucleotide probe
atcagcttgttgaatttgtcgaatcttttactgaacataaatgttcaatagacgtgacgc

SEQ ID NO: 626 - DNA, 60 bp, Artificial Sequence
  oligonucleotide probe
aaataaccctgaagtgaagtggctctatactgttttatagagtcctttaacgtgtataga

SEQ ID NO: 627 - DNA, 60 bp, Artificial Sequence
  oligonucleotide probe
cagttacttgagacaactctctaaatcaagggttgtccttaggcaaattaaaaactgctc

SEQ ID NO: 628 - DNA, 60 bp, Artificial Sequence
  oligonucleotide probe
gacagctttcagtactgagatctgtaaaattgtgggtatggaattaaagtgacttgtttg

SEQ ID NO: 629 - DNA, 60 bp, Artificial Sequence
  oligonucleotide probe
ccaggagactcgaagattcaagaaaatctattggtattgagccttaagagtactgcttca

SEQ ID NO: 630 - DNA, 60 bp, Artificial Sequence
  oligonucleotide probe
ccgtaacaaactctcaatctgtctgtctgagatgaagatgccttttgaaaacaaaattaa

SEQ ID NO: 631 - DNA, 60 bp, Artificial Sequence
  oligonucleotide probe
tggcatgacagaagtgtcaagagtgtgtgtcaaaaacttatcaaggcaaacataaaaatg

SEQ ID NO: 632 - DNA, 60 bp, Artificial Sequence
  oligonucleotide probe
gatgaacaattcccgaaagtttcgatttccttttgtagtaattgctgtaaggataatgac

SEQ ID NO: 633 - DNA, 60 bp, Artificial Sequence
  oligonucleotide probe
aaccaattagtgccttctagaagaatggctttcctttttcctgcacaaaattcccaatat

SEQ ID NO: 634 - DNA, 60 bp, Artificial Sequence
  oligonucleotide probe
ggagttggaccatgttgaacctgtattatgtatcacaagcacatttaattggaagataaa

SEQ ID NO: 635 - DNA, 60 bp, Artificial Sequence
  oligonucleotide probe
gtctgtttcagtacaaaaagtcgctagacagtatggagaggatttctaacaacaggactt

SEQ ID NO: 636 - DNA, 60 bp, Artificial Sequence
  oligonucleotide probe
gaccgatacagggacagtcatgagcccacctatggaatctactgagtattcatcgcagag

SEQ ID NO: 637 - DNA, 60 bp, Artificial Sequence
  oligonucleotide probe
aggcttagtcaacttgaaaatttacgaaaaagcctattggagttggaaataatcgcctgt

SEQ ID NO: 638 - DNA, 60 bp, Artificial Sequence
  oligonucleotide probe
ggaagctctacagttcaccagcttttctttagactaaaagatatcattgactggaaaaaa

SEQ ID NO: 639 - DNA, 60 bp, Artificial Sequence
  oligonucleotide probe
aatgttggtctacagaaggcgtttgtaccaaatcgtttcttaactctgctagagtgatca

SEQ ID NO: 640 - DNA, 60 bp, Artificial Sequence
  oligonucleotide probe
gccttatatttccttaggaaatacagagctatgaagcaacgttactattcagataccaaa

SEQ ID NO: 641 - DNA, 60 bp, Artificial Sequence
  oligonucleotide probe
accacgtgttcacaaaatacgtgtgcccacacacaatagattgcctcaagtcctaaaaaa

SEQ ID NO: 642 - DNA, 60 bp, Artificial Sequence
  oligonucleotide probe
ctgctttacggtaagagttcctggagctttgtgaatccaaaaacgagttccagacattgt

SEQ ID NO: 643 - DNA, 60 bp, Artificial Sequence
  oligonucleotide probe
actcggtaaccattctcctcagatactcctctaggtcttaatcttggtaaagagtccctc

SEQ ID NO: 644 - DNA, 60 bp, Artificial Sequence
  oligonucleotide probe
gacctctccattgttattgcaaagtagtattctctcctgggatattttcgctcacagacc

SEQ ID NO: 645 - DNA, 60 bp, Artificial Sequence
  oligonucleotide probe
gcactttactagcagttctactggtggactctcttcttctcagagttcatactctccaag

SEQ ID NO: 646 - DNA, 60 bp, Artificial Sequence
  oligonucleotide probe
gcctggagtatacaaagacaaaaggagatgctgatgaagaagttattcaagacggagtcc

SEQ ID NO: 647 - DNA, 60 bp, Artificial Sequence
  oligonucleotide probe
cgttgcctgtctatgacatggtgcttataaagatttaatgaaagcaagagtgaaataaag

SEQ ID NO: 648 - DNA, 60 bp, Artificial Sequence
  oligonucleotide probe
agtggagccccgtcggagaacaacataatggtttggaacgcggtcattttgggccccgaa

SEQ ID NO: 649 - DNA, 60 bp, Artificial Sequence
  oligonucleotide probe
cccgaagtccagtttcgttgtcttaaagtctgtgtcctgatgtgaatatctgttaagcgg

SEQ ID NO: 650 - DNA, 60 bp, Artificial Sequence
  oligonucleotide probe
tcagggcggtactcctgaactcagatcatgatgaaataaatattggggaatctactgcta

SEQ ID NO: 651 - DNA, 60 bp, Artificial Sequence
  oligonucleotide probe
ggctggaaatagtaatcacacctctctgtttttagttagagtctaatgaaactctcatct

SEQ ID NO: 652 - DNA, 60 bp, Artificial Sequence
  oligonucleotide probe
aattggcttattcattaaagcaggcagtagatatgagaactacaactacttgggaacctc

SEQ ID NO: 653 - DNA, 60 bp, Artificial Sequence
  oligonucleotide probe
acttgggacatacgccttttctcgacgagttataacacatgcgtgtatttaaagctcacc

SEQ ID NO: 654 - DNA, 60 bp, Artificial Sequence
  oligonucleotide probe
gggaggtcgtcgatgtagatcacgcttaagaaaggtgatccatggtagaaagatagatca

SEQ ID NO: 655 - DNA, 60 bp, Artificial Sequence
  oligonucleotide probe
ctagttatggggacatcccataagtagtttcaagaggaaaactgggtattacttggcacc

SEQ ID NO: 656 - DNA, 60 bp, Artificial Sequence
  oligonucleotide probe
gagtataaaagaagaaatggactggaataaactttggagatactagatactacagtctgc

SEQ ID NO: 657 - DNA, 60 bp, Artificial Sequence
  oligonucleotide probe
gcgtataatgatctctggatacttcgttttattcatgtcaataaactacagccttaagag

SEQ ID NO: 658 - DNA, 60 bp, Artificial Sequence
  oligonucleotide probe
acatcaaatggaggtgagtttggacttttgctcaggttgttgaggttaaaaatgccctgg

SEQ ID NO: 659 - DNA, 60 bp, Artificial Sequence
  oligonucleotide probe
tcttttttacagccatgtttagcttctgaggggaaatgagaagcatcaggagggagagca

SEQ ID NO: 660 - DNA, 60 bp, Artificial Sequence
  oligonucleotide probe
tgacccgaataattaaccatctcctaaaattctcctgaaacatacagtaggaactaaatg

SEQ ID NO: 661 - DNA, 60 bp, Artificial Sequence
  oligonucleotide probe
aagttcaatccggagaagaattcaccaagacaagtatatcaagttaaacagtatacactc

SEQ ID NO: 662 - DNA, 60 bp, Artificial Sequence
  oligonucleotide probe
agggtgtcattgtcagtaaatgcagccaccttttactgtgctatagcagtgtggtagttt

SEQ ID NO: 663 - DNA, 60 bp, Artificial Sequence
  oligonucleotide probe
aagcaaatgatcaagaaattgccagaaaaaagtgatctaacaaaaagagtctgccctatg

SEQ ID NO: 664 - DNA, 60 bp, Artificial Sequence
  oligonucleotide probe
gcactgagccttactgagtcatatacaagaccagtaggtaaaatatttccactatttaaa

SEQ ID NO: 665 - DNA, 60 bp, Artificial Sequence
  oligonucleotide probe
tgtcagacaaaccatgtcttcaaaaccgaagaaatgtacgtccaaaataagctcgatcat

SEQ ID NO: 666 - DNA, 60 bp, Artificial Sequence
  oligonucleotide probe
catgagtttagctgtttataattttcgcgtcctagatacacatgaaaggaatggttaaga

SEQ ID NO: 667 - DNA, 60 bp, Artificial Sequence
  oligonucleotide probe
cgcaaaatccttaattatccagagcaagaagaagcataaaactgacttttggttgttttg

SEQ ID NO: 668 - DNA, 60 bp, Artificial Sequence
  oligonucleotide probe
cctaagtgggaaaaactactccggatggacactccaataaagttttatagtttgtataaa

SEQ ID NO: 669 - DNA, 60 bp, Artificial Sequence
  oligonucleotide probe
gtgtctcaatatcatgaacttgtggtccaagcaagggatgactttagaaaagagctggac

SEQ ID NO: 670 - DNA, 60 bp, Artificial Sequence
  oligonucleotide probe
accacgagctatgtgtaaagtaatagagaaaagctttaagatctcaatagcatcaactgt

SEQ ID NO: 671 - DNA, 60 bp, Artificial Sequence
  oligonucleotide probe
gatcatgaccattgtgaggaacaacatataatttgcaaggtcaactctaagatgctgtgt

SEQ ID NO: 672 - DNA, 60 bp, Artificial Sequence
  oligonucleotide probe
agaaaactgattgttttattttaattgtagcaatatgttagaaataacttttttcttaag

SEQ ID NO: 673 - DNA, 60 bp, Artificial Sequence
  oligonucleotide probe
accttaaggttgaagagtacgttactcctgagaagttcaaatactgggaagaagtaggaa

SEQ ID NO: 674 - DNA, 60 bp, Artificial Sequence
  oligonucleotide probe
acggatgcacccgtctttagaaccaaaaatattctctcacagatttcattcctgttttta

SEQ ID NO: 675 - DNA, 60 bp, Artificial Sequence
  oligonucleotide probe
ccacttctctttttggccaatgtttttcaactttcccgacccattagaaatgtccccgac

SEQ ID NO: 676 - DNA, 60 bp, Artificial Sequence
  oligonucleotide probe
ccagtagtctaaggacatcctggtaacgtctgaagatggcatcacaacgatcacattcaa

SEQ ID NO: 677 - DNA, 60 bp, Artificial Sequence
  oligonucleotide probe
gggacacagagtaagcctctttatgagacagtagaagataatgaagtgaaaggctttgat

SEQ ID NO: 678 - DNA, 60 bp, Artificial Sequence
  oligonucleotide probe
accaaaggcttaaggaatcttatgctcaaatagatgtactttgaattctgtaatgttggg

SEQ ID NO: 679 - DNA, 60 bp, Artificial Sequence
  oligonucleotide probe
actcatcttctttaacgacaaacttaatcctaagggctatttctaagacagaagaatcag

SEQ ID NO: 680 - DNA, 60 bp, Artificial Sequence
  oligonucleotide probe
tttactttcccatcttacaggacagagaacagttgatgttccctttccacttcctggacc

SEQ ID NO: 681 - DNA, 60 bp, Artificial Sequence
  oligonucleotide probe
ggttaaatggacactggatattgttcaccttgtattcttcaaaataaacactttacacgg

SEQ ID NO: 682 - DNA, 60 bp, Artificial Sequence
  oligonucleotide probe
tgttctaggcggaggctgtatacatatagatgcgtttatataaagatgtatgtaaatctc

SEQ ID NO: 683 - DNA, 60 bp, Artificial Sequence
  oligonucleotide probe
acccatatctgagcgttagacagaaggtcgagcatatagagtggttcagaaattatttta

SEQ ID NO: 684 - DNA, 60 bp, Artificial Sequence
  oligonucleotide probe
tggtcctgtgggggtatttgaatgggaagcttttgcccggggaaccaaagctctcatgga

SEQ ID NO: 685 - DNA, 60 bp, Artificial Sequence
  oligonucleotide probe
cgaccttctgagcatccatttccgacgttcatttaggcagtttttccagtaaagtggtct

SEQ ID NO: 686 - DNA, 60 bp, Artificial Sequence
  oligonucleotide probe
tgtagaatgcattagtgttagcaaggtgattgtaatggtatttcttgagaagcctacact

SEQ ID NO: 687 - DNA, 60 bp, Artificial Sequence
  oligonucleotide probe
atcataacgtgttttgatcaacagtttaaaaagccacggtttagatcagtcatcagagaa

SEQ ID NO: 688 - DNA, 60 bp, Artificial Sequence
  oligonucleotide probe
aacccaggatgtgaaatagaatttattgtggctctgattatgtacactagatgtgcctga

SEQ ID NO: 689 - DNA, 60 bp, Artificial Sequence
  oligonucleotide probe
ggggttttgagtgcctaaattctaatacaatttagtaagttgcactgatattcaaaggac

SEQ ID NO: 690 - DNA, 60 bp, Artificial Sequence
  oligonucleotide probe
cacatgcttgtatttcagttgtgcagattgttggggaactattctctactgtcagaacac

SEQ ID NO: 691 - DNA, 60 bp, Artificial Sequence
  oligonucleotide probe
gactgaaaccttcagattctattgggcatattttcttgttaggaatgaaggacaattctc

SEQ ID NO: 692 - DNA, 60 bp, Artificial Sequence
  oligonucleotide probe
caagaaattgtagattacattgcagataagaaggatgtgtatgactaaagtatcagagcc

SEQ ID NO: 693 - DNA, 60 bp, Artificial Sequence
  oligonucleotide probe
tctcttcttttcatcttcacataatgtcttagcatctcacttcctgaaaagaaaggagga

SEQ ID NO: 694 - DNA, 60 bp, Artificial Sequence
  oligonucleotide probe
ctttgtttcttcttgggatgaaatggatttatgggagcagtttaaacaaagcataggcca

SEQ ID NO: 695 - DNA, 60 bp, Artificial Sequence
  oligonucleotide probe
ttgagagacagagataagtgaaaacgcatgggtctatggccatcatgaattatttttaaa

SEQ ID NO: 696 - DNA, 60 bp, Artificial Sequence
  oligonucleotide probe
ccaggggaatgtttgttctaagcttgggttttacatagtcctgtaacagctttatgggca

SEQ ID NO: 697 - DNA, 60 bp, Artificial Sequence
  oligonucleotide probe
ggactctgcctgctcttcgaaccagtagtggaaaagtcatcacagaaccacacaagatca

SEQ ID NO: 698 - DNA, 60 bp, Artificial Sequence
  oligonucleotide probe
ttgggtttgtaataacatttcaacgtagatcttatttgccgacgctactttcgaaccgca

SEQ ID NO: 699 - DNA, 60 bp, Artificial Sequence
  oligonucleotide probe
taccctctcctatgggcacctctgagtgaagaaataaagtttcatagtttcatagatatg

SEQ ID NO: 700 - DNA, 60 bp, Artificial Sequence
  oligonucleotide probe
aggccaagattagaacagcacacaagagaattatgattttaaaccatcccgacaaaggtg

SEQ ID NO: 701 - DNA, 60 bp, Artificial Sequence
  oligonucleotide probe
catgtggagcctcaagtaaaacaagtttttcagagtctaccaaaatctgccttcagtggt

SEQ ID NO: 702 - DNA, 60 bp, Artificial Sequence
  oligonucleotide probe
tgtcagcacagtagggacaatgtcttttctagtagctgtggcagatttgagttcctgtaa

SEQ ID NO: 703 - DNA, 60 bp, Artificial Sequence
  oligonucleotide probe
gctagacatggagaacttgctctgtttgtcctttatacatttctgtagttaacagaacac

SEQ ID NO: 704 - DNA, 60 bp, Artificial Sequence
  oligonucleotide probe
caaagggctttagtcatataggaacctagttcatgaacattattcttatcaccagacagc

SEQ ID NO: 705 - DNA, 60 bp, Artificial Sequence
  oligonucleotide probe
tatcattcaagcagtggagaggtttcagcagagatgcattggatgatggatgacagtgtg

SEQ ID NO: 706 - DNA, 60 bp, Artificial Sequence
  oligonucleotide probe
cctttttcctcatgaacctggatgttcatgtagcttgaaggttccatcttgtgcccaaca

SEQ ID NO: 707 - DNA, 60 bp, Artificial Sequence
  oligonucleotide probe
attgcccaggtctctgtggacaagggactgaaaactcttcttaaagacactacagtgaca

SEQ ID NO: 708 - DNA, 60 bp, Artificial Sequence
  oligonucleotide probe
agggaaggatcggatcatatttgtgaccaaagaagaccatgaaactcctagcagtgctga

SEQ ID NO: 709 - DNA, 60 bp, Artificial Sequence
  oligonucleotide probe
gatggggatgaagtcatgagaagtttgactatgtgtttgctgagaacgggacatgcagta

SEQ ID NO: 710 - DNA, 60 bp, Artificial Sequence
  oligonucleotide probe
tgccacagagacagaatgtgaagcagcctgcaccgaggcttacgtgaaggcaaaggagca

SEQ ID NO: 711 - DNA, 60 bp, Artificial Sequence
  oligonucleotide probe
acttgcagggttctgagtaggtttttcagggaagtctttagggagaagagtctggttcta

SEQ ID NO: 712 - DNA, 60 bp, Artificial Sequence
  oligonucleotide probe
cattgtgttgattttgtgtatcttgtgtattcatgcagttcggtttccagaaaactcaca

SEQ ID NO: 713 - DNA, 60 bp, Artificial Sequence
  oligonucleotide probe
gtggagaccatgttgtcataataaacacaagacatattgcattttcttggaaacaaatgg

SEQ ID NO: 714 - DNA, 60 bp, Artificial Sequence
  oligonucleotide probe
atgtttactttgacaatgttggaggtgacatcagcaatgcggtgataagtcagatgaatc

SEQ ID NO: 715 - DNA, 60 bp, Artificial Sequence
  oligonucleotide probe
ggtaccatttgtttctattcatctgaccactacatgacaataatgaaaacaggacatgtg

SEQ ID NO: 716 - DNA, 60 bp, Artificial Sequence
  oligonucleotide probe
gtttgctgatgtgattgtgttatttggtgcgagactcaacgtggatattacattttggac

SEQ ID NO: 717 - DNA, 60 bp, Artificial Sequence
  oligonucleotide probe
agctgcatgagtacagccgagtgataacagtagatggcaacatatgctctgggaaaaaca

SEQ ID NO: 718 - DNA, 60 bp, Artificial Sequence
  oligonucleotide probe
actctacaggagattgtcgagggaatgaaacagaaaaagtggagtattgagaatgtctcc

SEQ ID NO: 719 - DNA, 60 bp, Artificial Sequence
  oligonucleotide probe
taacaccaaattcttccaggaagaaaacacagagaaattaaagttgaagtacctgcccgg

SEQ ID NO: 720 - DNA, 60 bp, Artificial Sequence
  oligonucleotide probe
attactgtggcattcaatcaaccagttaaactttattccatgaagtttcaaggaccagat

SEQ ID NO: 721 - DNA, 60 bp, Artificial Sequence
  oligonucleotide probe
aagcagtgtgtggaccactataatgaaattaagcggcttactcttccagagtacctgcca

SEQ ID NO: 722 - DNA, 60 bp, Artificial Sequence
  oligonucleotide probe
gcactaagatatctggaatcgcatgtcgtagagagctgaagattaaaccgtgctacagaa

SEQ ID NO: 723 - DNA, 60 bp, Artificial Sequence
  oligonucleotide probe
tcctatgagagatacgagtgctacaaggttccagaatggtgcttagattactggcatcct

SEQ ID NO: 724 - DNA, 60 bp, Artificial Sequence
  oligonucleotide probe
gaaagctttggattttacataaagcaactaaaggaagcgagagaaaacccctcatgaaag

SEQ ID NO: 725 - DNA, 60 bp, Artificial Sequence
  oligonucleotide probe
acatccaaagcatgtattccctttttaaaaaagagcaaagtagctcacattctcaatctc

SEQ ID NO: 726 - DNA, 60 bp, Artificial Sequence
  oligonucleotide probe
ggccaaattctacaggaaagagtgtcacttccataatgctctcattgtttcaactcgtgt

SEQ ID NO: 727 - DNA, 60 bp, Artificial Sequence
  oligonucleotide probe
gatcaaggatctagtccctgacttgagtaacttctatgcacaatacaaatccattgagcc

SEQ ID NO: 728 - DNA, 60 bp, Artificial Sequence
  oligonucleotide probe
ccctgaagatataaatacatttaaattgctctcatatgcctcctattgtattgagcatgg

SEQ ID NO: 729 - DNA, 60 bp, Artificial Sequence
  oligonucleotide probe
tgatgaagtttttggtgacgttatgaagatttttgacaaagaaggctaactaaccctggg

SEQ ID NO: 730 - DNA, 60 bp, Artificial Sequence
  oligonucleotide probe
atatcacggtgaaacaaggacgggataaagtccgagaaatgttcatgaagaatgcccatg

SEQ ID NO: 731 - DNA, 60 bp, Artificial Sequence
  oligonucleotide probe
gtattacaacaagtacatcaacgttcggaaaggcagcatctcagggattaacatggtgct

SEQ ID NO: 732 - DNA, 60 bp, Artificial Sequence
  oligonucleotide probe
gacatcagcatctattatgaccctatgatttcaaaactagtcacatatggatctgacaga

SEQ ID NO: 733 - DNA, 60 bp, Artificial Sequence
  oligonucleotide probe
cctggttccaggctaagaagacagtgactttgggtgtgaacctaagatatgggtggtctg

SEQ ID NO: 734 - DNA, 60 bp, Artificial Sequence
  oligonucleotide probe
gcacttactgctagctaagcagattggggtagagcatgttgtggtgtatgtgaacaaggc

SEQ ID NO: 735 - DNA, 60 bp, Artificial Sequence
  oligonucleotide probe
atgttctatgaaggcttaaaacggcagcttttaaagaagcggacgaagctctcttctctg

SEQ ID NO: 736 - DNA, 60 bp, Artificial Sequence
  oligonucleotide probe
tctttcctgctgaaaaggaagtagctgaatactatgctcaaaatggaaactcagcggaaa

SEQ ID NO: 737 - DNA, 60 bp, Artificial Sequence
  oligonucleotide probe
ggaatattcaaggagtgcttgggacaactatgaatttgacatggatgaagtgacagaagg

SEQ ID NO: 738 - DNA, 60 bp, Artificial Sequence
  oligonucleotide probe
ttcgtgttctgcaataagacccagagtaaactcctagataaaatgacgacatctttctgg

SEQ ID NO: 739 - DNA, 60 bp, Artificial Sequence
  oligonucleotide probe
ttggtgagagcaagaaggcatccgctaaagtttcagacgcgatttctacccagtaccccg

SEQ ID NO: 740 - DNA, 60 bp, Artificial Sequence
  oligonucleotide probe
gcagccatctactaagttccattgtaggatgttttcagatacttgaatgaacaaatcttt

SEQ ID NO: 741 - DNA, 60 bp, Artificial Sequence
  oligonucleotide probe
tgctttgagtagctcgaacctcacagaagatatgattggtaacaaaagttatatgggaat

SEQ ID NO: 742 - DNA, 60 bp, Artificial Sequence
  oligonucleotide probe
agctgccatagagccaataaaacattgtatgtaaatgtttttcttgtactcttcctaggc

SEQ ID NO: 743 - DNA, 60 bp, Artificial Sequence
  oligonucleotide probe
ccatgaacattagcaactaggagaaaacagtttacgtaacaacttcattggcattatttg

SEQ ID NO: 744 - DNA, 60 bp, Artificial Sequence
  oligonucleotide probe
gtggtctctcctagtgtccctttcttttaaatgtgtggagaatgtaatcaccacataggc

SEQ ID NO: 745 - DNA, 60 bp, Artificial Sequence
  oligonucleotide probe
gttcttgtgtcatgatgtctcgactctctgtactactacataaaggggtaaaatgttggg

SEQ ID NO: 746 - DNA, 60 bp, Artificial Sequence
  oligonucleotide probe
atgtatgccaaactaacctcccatatgtttggataacttctgaacaagtgtccttcaaac

SEQ ID NO: 747 - DNA, 60 bp, Artificial Sequence
  oligonucleotide probe
catcagaagaagacacctactttccatgacaaatatggaaatgctgtattagcaggtgga

SEQ ID NO: 748 - DNA, 60 bp, Artificial Sequence
  oligonucleotide probe
tttgggctttaagacagtgaaacaaccagtatatgttgcagatgtttccaaagggattgc

SEQ ID NO: 749 - DNA, 60 bp, Artificial Sequence
  oligonucleotide probe
gaaattaacctgattagattagaaaagcagctagtttgaacaaaggtcctcattatggtc

SEQ ID NO: 750 - DNA, 60 bp, Artificial Sequence
  oligonucleotide probe
cctagcatcaagagatgttgtgtctcgatccatgactctcgagatccgtgaaggaagagg

SEQ ID NO: 751 - DNA, 60 bp, Artificial Sequence
  oligonucleotide probe
cgatgctaacgatctacatggatacattaaatatatttatgcgagttgcaactatgctag

SEQ ID NO: 752 - DNA, 60 bp, Artificial Sequence
  oligonucleotide probe
caggaaatctgtgtgattgaagctatgaaaatgcagaacagtatgacagctggtaaaatg

SEQ ID NO: 753 - DNA, 60 bp, Artificial Sequence
  oligonucleotide probe
actattttgatcccagcaagatccagttaccagaagatgactgacgaaatactgagcagg

SEQ ID NO: 754 - DNA, 60 bp, Artificial Sequence
  oligonucleotide probe
gttttacaagtgcctcccatagagagtctatagaaatggcgacatttttaacaccaaagg

SEQ ID NO: 755 - DNA, 60 bp, Artificial Sequence
  oligonucleotide probe
gccaaactccatgagaatttccaaagagttaatcaggaagaatgagaaagaaaagctcca

SEQ ID NO: 756 - DNA, 60 bp, Artificial Sequence
  oligonucleotide probe
ttggggatggtgcagctcatgagcagtggagtggaaaatgcaattagcaagtcggagctg

SEQ ID NO: 757 - DNA, 60 bp, Artificial Sequence
  oligonucleotide probe
gcctcaccagtccaagtataaagtgaacttcatggtctcgctggaccactccatgtggtt

SEQ ID NO: 758 - DNA, 60 bp, Artificial Sequence
  oligonucleotide probe
acacttgaagattcttcacatttccaaacagaaagactagtgttacagaagtgcctgact

SEQ ID NO: 759 - DNA, 60 bp, Artificial Sequence
  oligonucleotide probe
ggcgttcgtctacttatgtatcacattgtcacttccgcatttgtaattttacatgtaata

SEQ ID NO: 760 - DNA, 60 bp, Artificial Sequence
  oligonucleotide probe
tagccatgtacactgtcattgtacagtaaattcatgtcatttagtcgtaggacagaaaat

SEQ ID NO: 761 - DNA, 60 bp, Artificial Sequence
  oligonucleotide probe
gcgcccgctttttatactgtccagcctctccctctagtggtgtgcgtgtcgtccccttaa

SEQ ID NO: 762 - DNA, 60 bp, Artificial Sequence
  oligonucleotide probe
cctttgtgattattgtaaccaaagactcagagacaaagtttttgctgtctgaggacgagg

SEQ ID NO: 763 - DNA, 60 bp, Artificial Sequence
  oligonucleotide probe
gtaacgtagcatctgttttgatcactgggttttactatgttaaggatcacacaaacgtga

SEQ ID NO: 764 - DNA, 60 bp, Artificial Sequence
  oligonucleotide probe
tagtgacgtatacctgtattctcagtacgcagaagactggagagcaggattgagagttca

SEQ ID NO: 765 - DNA, 60 bp, Artificial Sequence
  oligonucleotide probe
cagacttcatgacccacagcacctcaagtatctaagtatctactgtgatcttcgtcagaa

SEQ ID NO: 766 - DNA, 60 bp, Artificial Sequence
  oligonucleotide probe
tggtttccagtagccaatttttcaccttgaacactataagtctttcagaactggaaaaaa

SEQ ID NO: 767 - DNA, 60 bp, Artificial Sequence
  oligonucleotide probe
catcctagaaagtcagacactcaactctaaagatacatgtgatgaagcagtctcaaaccg

SEQ ID NO: 768 - DNA, 60 bp, Artificial Sequence
  oligonucleotide probe
ctcacggacagccaacttaaatggtgcttaattagattacagtttgccactaacattaaa

SEQ ID NO: 769 - DNA, 60 bp, Artificial Sequence
  oligonucleotide probe
gatcagactccagagatgaattcatcagaggagcgcctggccaagctagcatgacccctt

SEQ ID NO: 770 - DNA, 60 bp, Artificial Sequence
  oligonucleotide probe
ttgttgatcatgctagcatactgggtgtaggggctaatcatgggcataattatagcgagg

SEQ ID NO: 771 - DNA, 60 bp, Artificial Sequence
  oligonucleotide probe
ctggagaagtaattccaccaatgagagattttcctgataaacatcattgaagagctctta

SEQ ID NO: 772 - DNA, 60 bp, Artificial Sequence
  oligonucleotide probe
cttacggtgcaaacttttcttggaacaaaagaacaagagtgtctacaaaataggttggag

SEQ ID NO: 773 - DNA, 60 bp, Artificial Sequence
  oligonucleotide probe
gattggagacacggactggactttggaagacaacagaatggaacagaatttacttgagtg

SEQ ID NO: 774 - DNA, 60 bp, Artificial Sequence
  oligonucleotide probe
caacttcatgggtttccgcatgtacaagatgctgagtgaggcaagaggtgtagccagtgg

SEQ ID NO: 775 - DNA, 60 bp, Artificial Sequence
  oligonucleotide probe
attacgggaaatcaatggaagatgtttacatgagtaatgtttgcccttaactgtgttatg

SEQ ID NO: 776 - DNA, 60 bp, Artificial Sequence
  oligonucleotide probe
gagtacaaatctgtatttaatgctgctaaactcagtgctgttctaaaatctatccggggg

SEQ ID NO: 777 - DNA, 60 bp, Artificial Sequence
  oligonucleotide probe
catttttcccccctgagggccctcagttttaacaggaacccataaaaattgtttttaatt

SEQ ID NO: 778 - DNA, 60 bp, Artificial Sequence
  oligonucleotide probe
tagaaaaatcaggactttccattcagaacacatctctgtttcctatactgttacactttc

SEQ ID NO: 779 - DNA, 60 bp, Artificial Sequence
  oligonucleotide probe
attctctggacacttgttttttattaacttatgggaacattctcaaggagaaggtgagaa

SEQ ID NO: 780 - DNA, 60 bp, Artificial Sequence
  oligonucleotide probe
cccaagcatcatgtgatggattcttcggaatttgcttttttggattaaggaagattaaag

SEQ ID NO: 781 - DNA, 60 bp, Artificial Sequence
  oligonucleotide probe
cacatttcctgaatacagagaatacaaactataactatacacatacagtttgactccagg

SEQ ID NO: 782 - DNA, 60 bp, Artificial Sequence
  oligonucleotide probe
tgaagtaacacatgacccaattccaagttaataaaggaagatggaagctttcctagttca

SEQ ID NO: 783 - DNA, 60 bp, Artificial Sequence
  oligonucleotide probe
ctgtgaaacatttacttgaagactccgagaaagaggacctaaacatcactgtcaaaaagc

SEQ ID NO: 784 - DNA, 60 bp, Artificial Sequence
  oligonucleotide probe
gtctatgacttcagagctgtgactcagttgcgtcattaaacattctgcattgggtataac

SEQ ID NO: 785 - DNA, 60 bp, Artificial Sequence
  oligonucleotide probe
cctaccatctctccccctctggggtggaccttggcaacatgcagccacatccgctcccag

SEQ ID NO: 786 - DNA, 60 bp, Artificial Sequence
  oligonucleotide probe
ttattctaccagagaagttgtcaacattgtcaaacacttagagaaattccctactgaagg

SEQ ID NO: 787 - DNA, 60 bp, Artificial Sequence
  oligonucleotide probe
gtatggagagcttccttacacttactcaagagtcactatggaaccaaatcctcactggct

SEQ ID NO: 788 - DNA, 60 bp, Artificial Sequence
  oligonucleotide probe
aaccattttgccaaggtcttaaggtcaatactaaccaacattctgtatgtaaatttcgtg

SEQ ID NO: 789 - DNA, 60 bp, Artificial Sequence
  oligonucleotide probe
ttttctgggaccccgtctttctggaattttgagtctatggcgagcagtcatcagtactaa

SEQ ID NO: 790 - DNA, 60 bp, Artificial Sequence
  oligonucleotide probe
tcagagtgtagagttggtaccttgttgacgtcttcttactgtatcagtgaaatatacaca

SEQ ID NO: 791 - DNA, 60 bp, Artificial Sequence
  oligonucleotide probe
atagaaaccatgttggatgtgagctatgtcaaacgctagggccttttcccgtgtacacaa

SEQ ID NO: 792 - DNA, 60 bp, Artificial Sequence
  oligonucleotide probe
ctctcttttgaaagactctagctaaagtcagcgttgtttaaatccaagtgcatcacaagt

SEQ ID NO: 793 - DNA, 60 bp, Artificial Sequence
  oligonucleotide probe
gtatgtgaaaaagcatatgcaagaattgtgcctgatgattaacccaagaatcagtggagg

SEQ ID NO: 794 - DNA, 60 bp, Artificial Sequence
  oligonucleotide probe
tgagcctactgtcctgaaagtttaactacgtaaaatcagaagtgaattttagaagtgtag

SEQ ID NO: 795 - DNA, 60 bp, Artificial Sequence
  oligonucleotide probe
gttcatgagtttggagaagcagatctttcttgtgaaaaatcatgagatgtagcaaattct

SEQ ID NO: 796 - DNA, 60 bp, Artificial Sequence
  oligonucleotide probe
ttgatgcctgtaacttaaatcaggaggatttaagaaaagaaatggaacagcttgtacttg

SEQ ID NO: 797 - DNA, 60 bp, Artificial Sequence
  oligonucleotide probe
gactcctggtttacctgttggcttgcagagctgagtttggctagtagaaatcaccagtat

SEQ ID NO: 798 - DNA, 60 bp, Artificial Sequence
  oligonucleotide probe
actcttgaagaaggacccaggaaatgaagtgaagctgagactgtatgcgctgtataagca

SEQ ID NO: 799 - DNA, 60 bp, Artificial Sequence
  oligonucleotide probe
gttaataaggaagacctagagtgttcactgatgtttacgattttaatatttctgaaggcc

SEQ ID NO: 800 - DNA, 60 bp, Artificial Sequence
  oligonucleotide probe
gttctttaagtacttagaagaagtcggtgttgatctggagtctcttaaagctcctcatac

SEQ ID NO: 801 - DNA, 60 bp, Artificial Sequence
  oligonucleotide probe
agcaagaattagagtttcatcgtcgcagtcaagaacaaatggacaactttactctggaca

SEQ ID NO: 802 - DNA, 60 bp, Artificial Sequence
  oligonucleotide probe
agttttcactaaatctggcagtttgaagcttttgataccaaaacacttttctatacccag

SEQ ID NO: 803 - DNA, 60 bp, Artificial Sequence
  oligonucleotide probe
tgtggagacggacatcgtcgttgatcactacaaggaggaaaagtttgaggacacatctcc

SEQ ID NO: 804 - DNA, 60 bp, Artificial Sequence
  oligonucleotide probe
gtcaacatcagttccatttgtaatggctaaagaatccacttgagaagttaagagggcttg

SEQ ID NO: 805 - DNA, 60 bp, Artificial Sequence
  oligonucleotide probe
gggaactcattccatgcctccctttctcactcagctgtatttacactctgtgcaaagggc

SEQ ID NO: 806 - DNA, 60 bp, Artificial Sequence
  oligonucleotide probe
ggcaaaaaggtgaccaggagccttccgggatgtctgagctggagaaaggccatgggttgc

SEQ ID NO: 807 - DNA, 60 bp, Artificial Sequence
  oligonucleotide probe
tagtaccaagtgacattatgttaccttattttgaattattaaatatactgtttttcaaca

SEQ ID NO: 808 - DNA, 60 bp, Artificial Sequence
  oligonucleotide probe
ctcacccccaaaactacaacgtgtagggcagatatcaagcctgaacctagtggggcacac

SEQ ID NO: 809 - DNA, 60 bp, Artificial Sequence
  oligonucleotide probe
ctaactcggaggactctccttggaccttatttttatacaagattaataaagatgtttgca

SEQ ID NO: 810 - DNA, 60 bp, Artificial Sequence
  oligonucleotide probe
ttatcagatgactgaccatttcctgtcgaaagttaaaacgtagagattgatttactacag

SEQ ID NO: 811 - DNA, 60 bp, Artificial Sequence
  oligonucleotide probe
cacttgaagtcttgtatagaaaagaaccaaaggtgtaacgttctgttcgcatgcgatttc

SEQ ID NO: 812 - DNA, 60 bp, Artificial Sequence
  oligonucleotide probe
ttctggttcaatactgtggctctccaatactgtctactctttggggaactgtactaaagg

SEQ ID NO: 813 - DNA, 60 bp, Artificial Sequence
  oligonucleotide probe
cacacataaagaacctagggatgagacgtatgttttaaatctaatagttgtgggtccgaa

SEQ ID NO: 814 - DNA, 60 bp, Artificial Sequence
  oligonucleotide probe
agtattgcacttgctctgggaaatgcacagaaattgccaaaaggtaaaaagccaagcctg

SEQ ID NO: 815 - DNA, 60 bp, Artificial Sequence
  oligonucleotide probe
aaagcacttgaatgatgaatcgacttccaaacagattcgagcgatgcttcagtagaaccc

SEQ ID NO: 816 - DNA, 60 bp, Artificial Sequence
  oligonucleotide probe
ctagactagtggttcttcccaggagaatttagagatgggaagtatagataatattttaag

SEQ ID NO: 817 - DNA, 60 bp, Artificial Sequence
  oligonucleotide probe
cctcatttgagtgcacagatgaacaagtcttttaattctcaccttacatgaaaggttagc

SEQ ID NO: 818 - DNA, 60 bp, Artificial Sequence
  oligonucleotide probe
gtgatggttagtcatgagtcgtgacgtttgactggtgtgaagtaaattcttgttcttaag

SEQ ID NO: 819 - DNA, 60 bp, Artificial Sequence
  oligonucleotide probe
cttcgccagataacaataaatgatcttcctgttggccgctctgtggatgagattctgaga

SEQ ID NO: 820 - DNA, 60 bp, Artificial Sequence
  oligonucleotide probe
aagagtatttctctaagcagaagtgagcactggaccagttttctggcagacagctttgag

SEQ ID NO: 821 - DNA, 60 bp, Artificial Sequence
  oligonucleotide probe
ccaacctgtacaaaatggtcctatatttttgaagagggacgtgagataaaatgatgttat

SEQ ID NO: 822 - DNA, 60 bp, Artificial Sequence
  oligonucleotide probe
gcactttaatttagaaaatgtaatcgcaatacgggcacaagggcatccaatccactcctc

SEQ ID NO: 823 - DNA, 60 bp, Artificial Sequence
  oligonucleotide probe
ttctgagggacagtggcctcatgaatagtgggcatgaggggcatagtaaatgtatgttat

SEQ ID NO: 824 - DNA, 60 bp, Artificial Sequence
  oligonucleotide probe
atacctgcctagcgtgttagaataaaaagaccagccatcagaggcctttagagataccta

SEQ ID NO: 825 - DNA, 60 bp, Artificial Sequence
  oligonucleotide probe
actctgcagcaggttctacagcatcgtatttattccttagaagagggcaaaaccgacact

SEQ ID NO: 826 - DNA, 60 bp, Artificial Sequence
  oligonucleotide probe
tgctctctaagttccagactatcacagatgtgtacacagttcttgttatctcttgtctct

SEQ ID NO: 827 - DNA, 60 bp, Artificial Sequence
  oligonucleotide probe
aacaagctaatgaacgagtctttaatgttggttacagctcttaatccgcatatagggtat

SEQ ID NO: 828 - DNA, 60 bp, Artificial Sequence
  oligonucleotide probe
atttgccactgtagtggaggcgaagctgatgaagcacaagaaagggattgtcaatgaaca

SEQ ID NO: 829 - DNA, 60 bp, Artificial Sequence
  oligonucleotide probe
ccaggacccctatactactagtagctcgcattatctttgttcattattaaagataaatga

SEQ ID NO: 830 - DNA, 60 bp, Artificial Sequence
  oligonucleotide probe
cttctccctctagcacaacccaaacatttctagaaaaatctacttttgtatcaatgtgaa

SEQ ID NO: 831 - DNA, 60 bp, Artificial Sequence
  oligonucleotide probe
ccctgctgtaattacatatcatgtaccccaactgtattaaaaataacactgctgattttc

SEQ ID NO: 832 - DNA, 60 bp, Artificial Sequence
  oligonucleotide probe
gtcaaaactaggatccaaaatatgcgaatgattgatgagaagccagagtacaagaatggg

SEQ ID NO: 833 - DNA, 60 bp, Artificial Sequence
  oligonucleotide probe
tattctgggacttctgggtgggcaaacaagaaataaaggtgattcttggctgtgaaaaaa

SEQ ID NO: 834 - DNA, 60 bp, Artificial Sequence
  oligonucleotide probe
gactgaccatgcactgcatttgtatatattttatatgttcatattggattgcgcctttgt

SEQ ID NO: 835 - DNA, 60 bp, Artificial Sequence
  oligonucleotide probe
atgactggtgtatcccaagtaaggaaccaaagaatctgtcgaaggagaaactggcagtgt

SEQ ID NO: 836 - DNA, 60 bp, Artificial Sequence
  oligonucleotide probe
ctttgtagtgttgcgttcaggcaccacagctctgttctcttttcttttttgttttcgact

SEQ ID NO: 837 - DNA, 60 bp, Artificial Sequence
  oligonucleotide probe
ggatttcttaacaacagatacccatgtctgggtcattttttaaagcttttatttggactc

SEQ ID NO: 838 - DNA, 60 bp, Artificial Sequence
  oligonucleotide probe
gatgaataactgaactcttctatggggatcaatatttattgatgtgtattaactgccacc

SEQ ID NO: 839 - DNA, 60 bp, Artificial Sequence
  oligonucleotide probe
ctcaagaactgtgtaccactaaagtaatatattcgcgatgttcacagaattccattaaac

SEQ ID NO: 840 - DNA, 60 bp, Artificial Sequence
  oligonucleotide probe
tttgatttgaggaagtatggaacatcaatagctatatgcattaaagggggttgacccagg

SEQ ID NO: 841 - DNA, 60 bp, Artificial Sequence
  oligonucleotide probe
ggttgtagaagcacagaggaatcacagaattattttctaagcgagataacactgtttgtt

SEQ ID NO: 842 - DNA, 60 bp, Artificial Sequence
  oligonucleotide probe
cttctgatcaaggtcctgaaatttcctcttggatttttgttaattatgctgaatttccca

SEQ ID NO: 843 - DNA, 60 bp, Artificial Sequence
  oligonucleotide probe
accccggaaacgtattcctatttgaagcaagttgaacggacagagaagggaagaagagaa

SEQ ID NO: 844 - DNA, 60 bp, Artificial Sequence
  oligonucleotide probe
gaatggttacgtgagaaacttggatttttccactaatgtgaacttctgtgtttcttaagt

SEQ ID NO: 845 - DNA, 60 bp, Artificial Sequence
  oligonucleotide probe
ttgtcaaggaactgaaagacaacggtgaattgctacctatactgaagggagaaaattagt

SEQ ID NO: 846 - DNA, 60 bp, Artificial Sequence
  oligonucleotide probe
gatgaatacttgaaccataaaatgtccagttagagcactgtttagattggccatagagta

SEQ ID NO: 847 - DNA, 60 bp, Artificial Sequence
  oligonucleotide probe
ttacttcttatttagagatggcgacattcttggaaagtatgtcgactgaaatcactgttg

SEQ ID NO: 848 - DNA, 60 bp, Artificial Sequence
  oligonucleotide probe
tcccaatgacatgcaagttggtcagacaggaaaaatagtagctccagaactttatattgc

SEQ ID NO: 849 - DNA, 60 bp, Artificial Sequence
  oligonucleotide probe
ctcaaggaaatgacccacaggaattccaggctgaagatggacagacgtggtccctactag

SEQ ID NO: 850 - DNA, 60 bp, Artificial Sequence
  oligonucleotide probe
agtacatccctggaacaaaaatgatcttcgctggaattaagaagaagggagaaagggcag

SEQ ID NO: 851 - DNA, 60 bp, Artificial Sequence
  oligonucleotide probe
tcaaccttgagtatcactccagcatgattgcagatgcagtgaagaaggtgatcaaggttg

SEQ ID NO: 852 - DNA, 60 bp, Artificial Sequence
  oligonucleotide probe
tatggtttgtgaacaagccacagttgctgacatgctgcacgctgtacaaaaggaatggat

SEQ ID NO: 853 - DNA, 60 bp, Artificial Sequence
  oligonucleotide probe
gggtctacacgaaagtcacgaactatattccctggattgagaacataataaataatttct

SEQ ID NO: 854 - DNA, 60 bp, Artificial Sequence
  oligonucleotide probe
cggtaatgtgcagcagaaatcgcttaacattttcagattcagataactttcagattttca

SEQ ID NO: 855 - DNA, 60 bp, Artificial Sequence
  oligonucleotide probe
ccaaagcttgggttttgtttttaacctgttaacgcttgcaaacctaataaagcattcaaa

SEQ ID NO: 856 - DNA, 60 bp, Artificial Sequence
  oligonucleotide probe
tccagacacaaaagtcatctgtggccatgaatacaccgtaaacaaccttaagtttgcgcg

SEQ ID NO: 857 - DNA, 60 bp, Artificial Sequence
  oligonucleotide probe
agaaatgctccaagggtgaacaatcactacactatgtttccccgtaaaggtgaaggagag

SEQ ID NO: 858 - DNA, 60 bp, Artificial Sequence
  oligonucleotide probe
aatcagtgctcttacttcctgtacatagcctaagatctgaacataataaaacaccagagc

SEQ ID NO: 859 - DNA, 60 bp, Artificial Sequence; identical to SEQ ID NO: 818
  oligonucleotide probe

SEQ ID NO: 860 - DNA, 60 bp, Artificial Sequence
  oligonucleotide probe
aagctggagttggtcaaattggaaccagatgttaaaaaattagaaaacttgcttcagggt

SEQ ID NO: 861 - DNA, 60 bp, Artificial Sequence
  oligonucleotide probe
tcctgctctagcctagttagcacaggatttgaaagcagatctgcattacactaaacctgc

SEQ ID NO: 862 - DNA, 60 bp, Artificial Sequence
  oligonucleotide probe
ttggtgtataaacagggcgttacagaatggtaccctgtctatttctgttcggtatccacc

SEQ ID NO: 863 - DNA, 60 bp, Artificial Sequence
  oligonucleotide probe
gccaattccagttcactggtattaaaaaatatttcaactcttataccctcacaggtagaa

SEQ ID NO: 864 - DNA, 60 bp, Artificial Sequence
  oligonucleotide probe
gaactgcgttgaacgcttcattgatacaagccagttcatcttaaatcgactggagcagac

SEQ ID NO: 865 - DNA, 60 bp, Artificial Sequence
  oligonucleotide probe
cactagaatcactttggtaaccccaaacatgacaaattatgaataaaacgagtgtacaca

SEQ ID NO: 866 - DNA, 60 bp, Artificial Sequence
  oligonucleotide probe
atcctctctgaatggatatcacttgtcccaagtcttaagagagagatacacctgatggct

SEQ ID NO: 867 - DNA, 60 bp, Artificial Sequence
  oligonucleotide probe
ggcgcgtgatgcgtgcatcattgagaaaggagaagaacactgtggacatctcatcgaggc

SEQ ID NO: 868 - DNA, 60 bp, Artificial Sequence
  oligonucleotide probe
caggcttgtatgacctgctgaaggttcgcctcttacgcaatggagattgacaggatttta

SEQ ID NO: 869 - DNA, 60 bp, Artificial Sequence
  oligonucleotide probe
agccaaaggaatccaggttgttagttggactgtcaatacctttgatgaaaagaattacta

SEQ ID NO: 870 - DNA, 60 bp, Artificial Sequence
  oligonucleotide probe
atacacaaggctgtaccactgcaggacctcattttaatcctcactctaagaaacatggcg

SEQ ID NO: 871 - DNA, 60 bp, Artificial Sequence
  oligonucleotide probe
aaaggtggaaatgaagaaagtacaaagactggaaatgctggaagccgcttggcttgtggt

SEQ ID NO: 872 - DNA, 60 bp, Artificial Sequence
  oligonucleotide probe
catctgctgtcctgctaaactgtagaaaccaaaccattaaactgtaatcttaacagttaa

SEQ ID NO: 873 - DNA, 60 bp, Artificial Sequence
  oligonucleotide probe
ggcattgtatctttcttacaaggtcgaattaccttttcatagcaaaattaccacaatggt

SEQ ID NO: 874 - DNA, 60 bp, Artificial Sequence
  oligonucleotide probe
ggaatttgaaaagaggaagatgctttgaaggacacgacatgaattttaaggctgtggagg

SEQ ID NO: 875 - DNA, 60 bp, Artificial Sequence
  oligonucleotide probe
tttctcaggttactggcattggactgaaaataccagccttaactatgcagcccatgctgt

SEQ ID NO: 876 - DNA, 60 bp, Artificial Sequence
  oligonucleotide probe
caatgtcagtccttggtggaactttacttccaggtatttgctttcttttatatatgatga

SEQ ID NO: 877 - DNA, 60 bp, Artificial Sequence
  oligonucleotide probe
ccctccaaggggcaattcttggatgactcaaatataagtaattaaagttgactttcatgc

SEQ ID NO: 878 - DNA, 60 bp, Artificial Sequence
  oligonucleotide probe
tcctctaccttatgtaacttggtgccattttgaaacttgaatatagaaggtttccagaga

SEQ ID NO: 879 - DNA, 60 bp, Artificial Sequence
  oligonucleotide probe
cttcagaaatcgaagttggagtagttacagttgaaaatcctaaattcaggattcttacag

SEQ ID NO: 880 - DNA, 60 bp, Artificial Sequence
  oligonucleotide probe
acaatcagagcagcttttgtttggctgcttaactgtgaactatggccatacatatttttt

SEQ ID NO: 881 - DNA, 60 bp, Artificial Sequence
  oligonucleotide probe
ctgagctgactctactaaaatgcagtcttttaatctgtaaacattgggatgggaataaat

SEQ ID NO: 882 - DNA, 60 bp, Artificial Sequence
  oligonucleotide probe
ggccaatatggtgcttctatctgtctatctagagttgattttatataaagatttgtggga

SEQ ID NO: 883 - DNA, 60 bp, Artificial Sequence
  oligonucleotide probe
aagacctcaatgaagtagccaaactcttcaacattcatgaagattgaatccctatcatgg

SEQ ID NO: 884 - DNA, 60 bp, Artificial Sequence
  oligonucleotide probe
ctaccccaatcagaaaacatgcatttggctattgctcaattaaaacaaaccagaaaactt

SEQ ID NO: 885 - DNA, 60 bp, Artificial Sequence
  oligonucleotide probe
ctccgaaggaagcaatcaaggaaagaaaacacaatgtaagctgctgtcaataaatgacac

SEQ ID NO: 886 - DNA, 60 bp, Artificial Sequence
  oligonucleotide probe
ccctcagaaggctgcatatagattcttcaagctaatgtttatgttgtttactcacaatta

SEQ ID NO: 887 - DNA, 60 bp, Artificial Sequence
  oligonucleotide probe
cgtctctgggaaatctctgtacgtgattcttgaaaacagcttatgtaattaaaggtttaa

SEQ ID NO: 888 - DNA, 60 bp, Artificial Sequence
  oligonucleotide probe
ttcacgctctacgctgatgttcccctaaataatatgtttggttattccactgagcttagg

SEQ ID NO: 889 - DNA, 60 bp, Artificial Sequence
  oligonucleotide probe
aacatggatgttcatgtagctggaaggtgccatcttgtgcccaacaaaactaatcccaag

SEQ ID NO: 890 - DNA, 60 bp, Artificial Sequence
  oligonucleotide probe
tagtcgctgaaaagcctccattcttcctcatgaacatggatgttcatgtagctggaaggt

SEQ ID NO: 891 - DNA, 60 bp, Artificial Sequence
  oligonucleotide probe
agaaggcaaagccatcaaaacttagcttcctagtcgctgaaaagcctccattcttcctca

SEQ ID NO: 892 - DNA, 60 bp, Artificial Sequence
  oligonucleotide probe
cccgcacaccagacacataggacaaaatttatctataacctggaagaccatgagtggtgt

SEQ ID NO: 893 - DNA, 60 bp, Artificial Sequence
  oligonucleotide probe
gcatggtatcttgttactaactccagtatgtgtcaatgtcaaataccatgaaataaagtc

SEQ ID NO: 894 - DNA, 60 bp, Artificial Sequence
  oligonucleotide probe
ctcgtagggtttaaatgagatcccagttcataatgaactgaacagtaaagaacaaatttg

SEQ ID NO: 895 - DNA, 1099 bp, Mus musculus
gaaccgcgccaggtgactcgcagaactgacactatggtacatcaggtgctctaccgggcgctggtatccaccaagtggctggcggaatccattcggtctggccgcctggggcccagccttcgggtgctggacgcgtcttggtactcacccgggacccgccaggcacgcaaagagtaccaggagcgacacgtgcctggcgcgtccttctttgatatagaggaatgccgggacacgacttcgccttatgagatgatgctgcccagtgaggcccactttggggactatgtgggcaacctgggcataagcaacgacacacatgtggtggtatacgatggagatgacctgggcagcttctatgcacccagagtctggtggatgtttcgtgtgtttggccaccgcacagtgtcagtgctcaatggtggcttccggaactggctgaaggagggccacccggtgacatctgagccctcgaggccagagccagccgttttcaaagccacactgaatctctccctgctcaagacctatgagcaggtcctagagaatctccagtctaaaaggttccagctggtggactctcgggcccaaggacggtacctgggcacacaaccggagccggatatagtaggactagactcgggccacatccgtggctcagtcaacatgcccttcatggacttcctgacgaaagatggcttcgagaagagcccagaggagctgcgtgccatattccaggacaagaaggtggacctctcacagcccctcattgccacgtgccgcaagggggtcactgcctgtcacgttgccctggctgcctacctttgtggcaaacccgatgtggctgtttacgatggctcctggtcagagtggttccgcagggcacccccagagacccgtgtgtcccaggggaagagtgggaaggcctgagtgtgtgcagcctcctcctctgcccacccaatccagccagttcccttcagggaggttggtgtgacctgctgtaggttcaccttttaggctacggatattgacagggttttagaattgctcatggtgcctccctccctccctccctctacattggaataaagtgccttttctc

SEQ ID NO: 896 - DNA, 845 bp, Mus musculus
gagtcagcctagagcggccggggtcggagcatcgcgtaccccgccatgttctccttggcgctgcgggccagggcgaccggcctcgctgctcagtggggaagacatgcaaggaatttgcataagacagcagtgcacaatggtgctggaggagccttatttgtgcatagagatactcctgagaataacccagatactccatttgatttcacaccagaaaactataagaggatagagacaatagtaaaaaactacccagaagggcatcaagccgctgctgtgcttccagtcctggatctcgcccaaaggcagaatggatggctacctatctccgctatgaacaaggtggctgaagttttacaagtacctccaatgagagtatatgaagtagcaactttttatacaatgtataatcgaaagccagttgggaagtaccatatccaggtctgcactactacaccttgcatgctgcgagattctgacagcatattggagacccttcagagaaagcttggaataaaggttggagagactacacctgacaaacttttcactcttatagaagtggaatgtttaggggcctgtgtaaatgcaccgatggttcaaataaatgacaactactatgaggatctgacacccaaggatattgaagagattattgatgaactcaaagctggaaaagttcccaaaccagggccaaggagtggccgcttctgttgtgagccagctggaggccttacttctttgactgaaccacccaaaggacctggctttggtgtgcaagcaggcctttaacttgtattcaactgtaaaaaatgtcactggacaaataaaatatgaacttccct

SEQ ID NO: 897 - DNA, 594 bp, Mus musculus
ggagttaccgctgcattttcaaaggtcggagatctttcttctgcctgagttggtcatgtagcaattttttcctaaacacaaaatggccttttgcttgtctggtaatgagattgtaaatccatttcctgcgtgtgttctccgcaggcttgcctgagtgtgtggggtgcgcaggcgcgtgcctgtctttttgtactgtaactacctcatggtttgaatgatgagcgtactgctggttgtattaacagagcacatttgtcgggtgagtcgtgtatacaaactttttttttttatcctgtttgttttatctgggggttcgttcattaaactgacagatatttttctaggaaggactattatcagtttccaaatgcaatactctattctggtttttcctgagtgagcctgattttgttcctgtttttcatctacgagggtaaaagcataccccgggaaatccctgtggccagtttgaacacccctgctgtaaccttccctctgttccatggtctttgtgaacctgcttagaggtatagttttgataaccacagttttaattcttttatctgtgcataataaagatatgtatcaattatt

SEQ ID NO: 898 - DNA, 498 bp, Mus musculus
gggacgtccgctcagccaggttgcagaagcggcttagcgtgtgtcctaatcttctctctgcgtgtaggtaggcctgtgccgcaaacatgctccgccagatcctcgggcaagccaagaagcatcccagcttgattcctctcttcgtatttattggagcagggggtactggagcagcactgtatgtgatgcgcttggcactgtttaatccagatgtcagctgggacagaaagaacaacccagagccatggaacaaactgggtcccaatgaacaatataagttctactctgtgaatgtggactacagcaaactgaagaaagaaggcccagacttctaaactatgaagttcactgtaaagctgctgataatgaaggtctttcagaagccatccgcacaattttccacttaagcaggaaatatgtctctgaatgcatgaaatcatgttgatttttttttttttttggagtttattacactgatgaataaatctctgaaacttg

SEQ ID NO: 899 - DNA, 2470 bp, Mus musculus
gcacactctgagtttcggtgacccggaaggcagccccgtggtagaggtgaccggagctgagcatttcagatctgcttaggtaaaccggtgtatcgcccaccatgttggctgcaaggcttgtgtgtctccggacactaccttccagggttttccagcccgactttcatcaccaaggcctctccacttgtgaagaattccatcacaaagaaccaatggctcgtaacacccagcagggaatatgctaccaagacaagaattaggactcaccgtgggaaaactggacaagaactgaaagaggcagccttggaaccatcaatggaaaaaatctttaaaatcgatcaaatgggaaggtggtttgttgctggaggagcagctgttggtcttggggcgctctgctactatggcttgggaatgtctaatgagatttggatctatcgggaaggctgtaatttggcctcagtatgtaaaggatagaattcattctacttacatgtacttagcaggaagtattggtttaacagctttgtctgccttggcagtagccagaacacctgctctcatgaacttcatgatgacaggctcttgcggtgacaattggtgcgacctttgcagccatgattggagctggaatgcttgtacactcaatatcatatgagcagagcccaggcccaaagcatctggcttggatgctgcattctggtgtgatgggtgcagttgtggctcctctgacgatcttaggggggcctcttctcctgagagccgcatggtacaccgctggtattgtgggaggcctctctactgtggccatgtgtgcgcctagtgagaagtttctgaacatgggagcacccctgggagtgggcctgggtcttgtctttgcgtcttctctggggtctatgtttcttccccctacctctgtggctggtgccactctgtactcagtggcaatgtatggtggattagttcttttcagcatgttccttctgtatgatactcagaaagtaatcaaacgtgcagaaataacacccatgtatggagctcaaaagtatgatcccatcaattcgatgttgacaatctacatggatacattaaatatatttatgcgagttgcaactatgctagcaactggaagcaacagaaagaaatgaagtaaccgcttgtgatgtctccgctcactgatgtcttgcttgtttaataggagcagatagtcattacagtttgcatcagcagaattccttgaggtttagaagatagcctgtcaccatgtttaaaatgtgcagtaatgcgacccttcaggcatgccttttcttttagaaaataaatgcaatagatgtcttccaaatatattttcatctcttatgctttcatactttaaaactgctttgatgaatgtgtgaacaaatatattttagaagatttcaagtattgttttatgtattggataagtaaaatttagcaaatttgcgtgtcttcatattgtggaagcctgcagaatatttcagtggcatcatgagtgacaagtttttgtatagaggtcagagagataaaaggcacctgcagtcagtttgaatgcccaggacaacactgattgtggtgagccagtgaaagacatcagagatgtggaacaagggaccaccaaatgtggggttaacaaagacacggatgtttcttctgtgctcttaatgtccttgaggttgactgctcattgtcaggacagtccagagtgttaaccatacagagaatctctgctggaattatgtctgtgttttactatgaagtctttagaacaagcaggttggtggtggcgcacacctttagtcccatcatctgggaggcagaggcaagcagatctctaaattcaaggccagccaggtctacaaagtgagttccaagccagacaaggacctgtctctaatacaagcaaacaaacaacaacaaacactacccgctatgctcggtatgatgtactactccaaagctcaagactcctttgctgtcagatgtgtggtgtatatgcagttggacaggatttaggttttggtttttggttttgttttattttgatatttttctcagtgtctaattgaaagcatgcttgctttctcatcacagctttgacagctgtcagaaaagcctctttgtggcttatgctaagattaggattggtttttcttctaaaactgttggcttcctccgttccctctcagcttaagcatgaacaaagcaaacttagttgaccttgggaagtatttgaatgaaaactggaatggggaggtgctcagcttccttgtgacataagattttaatacagatcacttgtttgtggtgaggggttcttcattgaagtctgtatgtatttacaaaataactatttttgagaagtatttattacagtaatccataagtaattcttttaatcactttaaagtacactgaatgctaatttctgaaataaaagtttcagctaagtggc

SEQ ID NO: 900 - DNA, 3032 bp, Mus musculus
cgagtcggcctgtcagccggcttcgaggtgtgtccctgcgcttgcgcggcggcggtgatgaaagcgatggcggcggaggaggaggtggactcggcagacgccggtggagggtcaggatggctgacagggtggcttcctacctggtgtcccacatctacatcacaccttaaagaagctgaagagaaaatgttaaaatgtgtcccctgcacttacaagaaagagcctgtgcgcatatccaatggaaacagaatatggacgctgatgttctctcacaacatttctagtaagacgccacttgtcctccttcatggttttggaggaggtcttggactttgggccctgaattttgaagatctaagcaccgataggcctgtctatgcctttgacctattgggcttcggaagaagtagtagacctaggtttgacagtgatgcggaagaagtggagaatcagtttgtggaatccattgaagagtggagatgtgccctcaggttggacaaaatgatcttgcttggacacaacctgggagggttcttggctgccgcttactcactgaagtacccatcaagggttagtcacctcattttagtagagccatggggttttcctgagcgaccagatcttgctgatcaagagagaccaattccagtttggatcagggccctaggggcagcattgactccctttaaccccttggctggcctcaggattgcaggaccttttgggttaagtctagtgcagcgtttgaggcctgatttcaagcggaagtactcctctatgtttgaagatgacacggtgacagagtacatctaccactgtaatgtacaaaccccaagtggtgagacagctttcaaaaacatgacgattccttatgggtgggccaaacggccaatgcttcagcggataggtggcttgcatcctgacattccagtttcagtgatctttggagcccgatcctgcatagatggcaactctggaaccagcatccagtcactgcgaccgaagtcctacgtgaagacaattgccatcctcggggcggggcattatgtgtatgcagatcagccagaagaattcaaccagaaagtcaaggagatctgccacacagtagactgagcacacagaaccatgcagcacccgtgacgggtgccgttcatgagcaatccccacagcccgaggacccccgcagtctcctggactggactctgcagctttccacatttaaaccaaccagtgccttctagaagaatggctttcctttctcctacacagaattaaaatataggagagtctcccaatttaataatcgccttaaataaaggttgtccttctgatgtactgaaaaattgtgatttttcagctgagacttttctcaatttcacctaactgcttgttaggtgtttggtgttgcagtccgtatgccagtgtacctagtccatatgccagtgtacctagtccatatgccagtgtacctagcgacttctgggcctgtggtgttaggtgttgggaagctgcactttattttccttgcatgtatttactgtctctaacaactaacatagttaacccaagtatttttatgtaaaaagatttcaatttagaatacttcatttttgagatggagtttagaatatttcattttgaaatggaacgaaagggttaggttttgatgtaaaagacaggagtcaatcactagcgttaactttccttgttttcctgttttatgatcaaggccgtgtttcagcattttaaatgtgttccatggtgacatagtgcttacagcaacgcagttcctggggcccttctgtgtgtaatctacagggttctatgagaacatatgcatagactcagccattcaagtgctgagtagcccgaacctgaaacctgtcccctttccttccagtattcccaggacccaggatctaggtcccctcacttgcagggatgttaacactgttgcctatcgggaaaccaagtcccactgtgttctcatgagcaaccagcttacatggtgcttaaactggattgcattttaccactaacatttaaaactatgtggtgctgttacgtctcatggcgccagaaatgagatagaacttgtggttatttttattgaatattatgttgatctaaccacttatatacttgaagtaaaattatgaaaaaaatctattatgttgtttgaactgtttggcagaaaccaccattggatttataactttctgacagtgttaaagtgagagacaatttgaaactatgaaaaagctccatggaatagctggatgctgagaaagccttctgtctagagaacagagaacaaagagcattgttaccaacattgtttgtccaggagaaaagcagattacacaaataaaacctcgacctcacaaatcacgactcgatgacttgagctattacatttttagtgactagtcaggaaatttttttgaaaataaaattatatcacatgtaattaactgccagcaagattagctccatactttaggagaccgtgaaaatcatattgaagcgggacaaagcagcctcccagcgaccctttatctgactcatttaacgcattaggttagtgcaaggagccaccgtgagaccaaaagtgcttgttctcaccaccttgagaataaaaatagcctttttccccctttatagttagtgttgtgggtggccagatccacacttgagagtggtagaacatttgtgcaggactcttacttggcagtcaccagcctcagtcttttgttcaccaaagaaaaaaaattctgcacaagaaaccggtctgcccaaagaaactgacttccccactgagctgctttgctttactggaaacctgtgaagcttcctaaacattaaaatttccatggtgtgtgcagtgattgttgtaaaggttgaagtagtaaagtttataatctgcaaattcttgagaacagtggttgctaaacatctttcttgtaaacgatctcttaactatcattggtctttgctaagttattttacagaataaactcgacagtgctagc

SEQ ID NO: 901 - DNA, 594 bp, Mus musculus
ggtgtccatggagagaagttgagtccccacgctccagccggaggctgcgggtgccgcgacgtggacatgtcggcgtcgttggtccgcgccaccgtgcgggctgtgagcaagagaaaactgcagcccacgcgggcggccctcacactgaccccctctgctgtaaacaagataaaacaacttcttaaagacaaacctgagcatgtgggtctgaaagttggcgtgcgaaccaggggctgtaatggcctctcttacagcctggagtacacaaagacaaaaggagattctgatgaagaagttattcaagatggagtccgagtgttcatcgagaagaaagcacagctaaccctgttaggaacagagatggactatgtggaagacaaactgtccagtgagtttgtgttcaataaccccaacatcaagggaacctgtggctgcggtgagagctttcacgtgtgaaacctcaggactgtgagctccaggtgagccgggtctgcctcggcgcttcctgaagaaatcatgtgatggcacgtgctcaggcgtgtggctgcctgcctcgtgggtgaaaataaagtgacgcatttgaaaaccaagtct

SEQ ID NO: 902 - DNA, 639 bp, Mus musculus
gagtgccatggctaccggtggcggcgtgacctccagagaggggctgcgctacgccgaatacctgcctccttctgcccaaaggtcggacgccgacatcgaccacacagcggggagaaggttgctagctgtaggactaggtgttgcagctgttgcatttgcaggtcgctatgcatttcagatctggaaacctctagaacaagtaatcacggcaacagcaaggaagatttcctctccaagcttttcatcctactataaaggaggattcgagcagaaaatgagtaagcgagaggctagtcttattttaggtgtaagcccatctgctggcaaggccaagattagaacagcacacaagagaattatgattttaaaccatccagacaaaggtggatctccttacttagcatccaaaataaatgaagcaaaagatttgctcgaagcatccagcaaagctaactgatgctaaaggactgtacataccgagggaaaatggaacaaacgcacagctgtaaaagtccttcagaagaatgtggcacgtggtcgtgttccatactgacccagtctgttttctgtcattaagtgtgcagcaataaaagcctggcagccttgcagccttggtctggcagggacttcatccgtccc

SEQ ID NO: 903 - DNA, 1174 bp, Mus musculus
  misc_feature 442: n = A,T,C or G
gatcggagaggagaggatgcagtagtgagcgagagctagttagtacacgcgggaagatggatgtggtgtagtagacgaagacgtgctcgggtatctactgttgaggtgtctggtagtgacatagtgatgtgcgatgtttgcttagtcggagttagtgagcagcagcaacacgggatcgagatacgataatgtggacagtgagaggtgcagagagtcgttgctgtagagatatattatggagagatacggatacgtatctatcgatagaggcttggggagggatatgatggagagacgcgtgaacgagacagtctgagagagccgccgcacgcttgtatcgagattttaggaacacttgtaagcagagaataatagactccttgcaggcatcagtgattgagttcgtcagcaaccgggtactgtgtatctactgtcttcgcgncttagtcttactagctgacgggctgtgagagagatagatatcgagaactcgtgacatgtattctgagtcagtggaggtacgtagagtgcttcactgtcatgaggtaatcattatagacatgtgttgcgaggcggtgttgattgagaagtagtgtgacgatagctattagaaggatcggagctcatataatatagctggggtgagaggcaacgaataccgtctcagaatgtgtgttcgagagaggttgatagaggcagtgtagtcaaaaagtggtctgtggagcaagaaaagtatattgtcgtgtggttgcgttgcttcaggcgattgaagtggtattgagaggaagagggaacccccccccccccggtcttccggtcgggccgagcttgtcgctaggtttgttgaaggacatcggccgccgagtttggggttcggacgaagattgacgtcatggctggtgcagaaagtgatggccaattccagttcactggtattaaaaaatatttcaactcttataccctcacaggtagaatgaattgtgtcctggccacatatggaggcattgctttgctggtcttatacttcaagttaaggcctaagaaaactccagctgtgaaagcaacataaatggattttgaaatgtctgacctcacctgttaagtcccatgcctgaagaagctgatgtgaactcatcatgtaatactcaatttgtacaataaattatgaacctgg

SEQ ID NO: 904 - DNA, 1649 bp, Mus musculus
gagctgtgcttgtctaggttggcgctgaaggatacacagaagcaaatgcacagatcggagatgactcccacgggggcaggcctgaaggccaccatcttctgcatcttgacctgggtcagcctgacggctggggaccgcgtatacatccaccccttccatctcctttaccacaacaagagcacctgcgcccagctggagaaccccagtgtggagacactcccagagtcaacgttcgagcctgtgcccattcaggccaagacctcccctgtgaatgagaagaccctgcatgatcagctcgtgctggccgccgagaagctagaggatgaggaccggaagcgggctgcccaggtcgcaatgatcgccaacttcgtgggcttccgcatgtacaagatgctgaatgaggcaggaagtggggccagtggggccatcctctcaccaccagctctctttggcaccctggtctctttctaccttggatccttagatcccacggccagccagctgcagacgctgctggatgtccctgtgaaggagggagactgcacctcccgactagatggacacaaggtcctcgctgccctgcgggccattcagggcttgctggtcacccagggtgggagcagcagccagacacccctgctacagtccattgtggtggggctcttcactgctccaggctttcgtctaaagcactcatttgttcagagcctggctctctttacccctgccctcttcccacgctctctggatttatccactgacccagttcttgccactgagaaaatcaacaggttcataaaggctgtgacagggtggaagatgaacttgccactggagggggtcagtacagacagcaccctacttttcaacacctacgttcacttccaaggaacgatgagaggtttctctcagctgcctggagtccatgaattctgggtggacaacagcatctcggtgtctgtgcccatgatctccggcactggcaacttccagcactggagtgacacccagaacaacttctccgtgacgtgcgtgcccctaggtgagagagccaccctgctgctcatccagccccactgcacctcagatctcgacagggtggaggccctcatcttccggaacgacctcctgacttggatagagaacccgcctcctcgggccatccgcctgactctgccccagctggaaatccgaggatcctacaatctgcaggacctgctggctgaggacaagctgcccacccttttgggtgcggaggcaaatctgaacaacattggtgacaccaacccccgagtgggagaggttctcaatagcatcctcctcgaactcaaagcaggagaggaggaacagccgaccacgtctgtccagcagcctggctcaccggaggcactggatgtgaccctgagcagccccttcctgttcgccatctaagagcaggactcaggcacgctgcactttctgggcagagtgaataacccccagagtgtggtgtgaggccttgtgcctagcccatggagacaaggccggtgtcggagaaccgttctgggcaaaactcagtgctgtcacccctggctccccatcacgccttgtagcgcggcagaggccgtctccttggagactgcgctgaccgagaataaatgatgagcagc

SEQ ID NO: 905 - DNA, 1900 bp, Mus musculus
cgcagcacgctgagtgacttggaattcgggtgccggcggtcaccgaggtagatagagagatggctgccgctctgcagcgcatcgagcagctgtccagtcgggtggtgcgcgtgttgggctgcaacccgggtcccatgaccctgcaaggcaccaacacgtacctggtggggaccggcagcaggagaatcctcattgacactggcgagccttcagttccagaatatatcagctgtttaaagcaagccttggttgagtttgacacagcaatccaggaaatcctggtgacacactggcattctgatcattctggaggcattgtagacatttgtaaaaacatcaataatgacaccacctactgcattaaaaaacttcgacggaatccccagagagaagaaattataggaaatggagaacagcaatttatttatatagaaaacggagacgtggttaagaccgagggagccactctcagagttttgtacactcctggccacactgatgatcacatggctttactcctggaggaggagaatgccatcttttctggggactgcatcctaggagaagggacgacaatatttgaagacctctatgattatatgaactccctaaacaacttactaaaaatcaaagctaacattatatatccaggacatggcccagtcatccataatgctgaagctaaaattctggaatatatttctcatagaaataaccgagaagaacagattatttcattattccgtgataactttgagaaatcatttaccgtaacggaacttaggacaatgatttacaaggatgttccagagaatttacataagatggcagagcataatctcttgcttcatttgagaaaactagagaaagatgggaagatattctacacaacaactcctgtcaagaaatggaaagccgtcctttagttacagatcagtgaagttctgtcttgttttgcttttagaagatggtattttcttttagctatagattatatatttatagaaaatattaaatgcacaactttgaaaataacccttgatacttgtaatccgtgataattgtaaaatatgtaaattacattttatatctggaggacaggttactgatctaaccttggtcttggaaggttttaccagaaattcagaatctagcactttttcaattttctatggattaagtaaagtggttattaagaataatagattttgaacaattcaaaccagttaatactttagagtttgattgttagggtttctattgctgtaaaaaacaaaaatgactaaggcagctcttataaaggaagacatttaattagggctggcttacagttcagagattcagtccagtatcatcatggtgggaagtatggcagcctgcagacagacatggtgctggaaaaggagctgagagttctacatcttgatctgaaggcagccagaacaagactgtcttctgcaggcagcctggaggaggctctcccaagcccacagcgacacacttcctccaacaaggccatacctcctaatagtgccactccctatgggccaagcattcaaacacatgagtctatgggggccgtttctattcaaaccaccacagttatttgttagcatttgccagtaatactgctttctttagctacttcaatcaacagcacacatatctgcatacgcattccttttcttcagccctgtcaatgccttttacataccaagtttatttcacttttctatcaattatatcatttaagtattgtttctacagttctatgctatgtttattttcttgtaacggtatcccataagcaattcataagttgatcattaacaaatactaaatatactaatttaaaatattatgtgattaataataagtaattcttaaaaaaaaaaaaaaa

SEQ ID NO: 906 - DNA, 2574 bp, Mus musculus
ggtttctctccccgggccgcaagagaaacagtgccctctcccttcttgacccctggcccttccctccctccttcccttctgccgctgctgcttctggcgctgccgctcccggaggagctcccgtcacggtgatggggtctcgggcctccacgttattgcgggacgaagagctcgaggagatcaagaaggagactggcttttcccacagtcagatcacgcgcctgtacagccgcttcaccagcctggacaaaggggagaacgggactctcagccgggaagatttccagaggattccagaacttgccatcaacccactgggggaccggatcatcaatgccttcttctcagagggagaggatcaggtaaacttccgaggattcatgagaacattggctcatttccgacccattgaggataacgaaaagagcaaagatgtgaatggcccggaacccctcaacagccggagcaacaagctgcactttgctttcagactctatgatttggataaagatgacaagatctcccgtgatgagctgttacaggtactgcgaatgatggttggagtgaatatctcggatgagcagctgggcagtattgcggacaggaccatccaggaggctgaccaagatggagatagtgccatatcttttacagaattcgttaaggttttggaaaaagtggatgtagaacagaagatgagcatccgatttcttcactaaagggcagagaccaaattattcttgctttctagtatttaagaactgaaacttgtgtcctccagccccaccccatcctgtcatccccttttcccagaatactacagctcttgcatgacaacctgaagtctctcctgtccatacaaacttgcctttggtgtataaacagggcgttacagaatggtaccctctgtctgcttctgttcagtatccacccaccaggtccttacttgtcagtaccatcttcccctgttagctgctgagtgccatgcatccatcctgtctggggaaatgaaccagccagcaaagctcccactggatggggactatatccatgctgccttccatccctgcatcgagcctccaccatgtttctgtgaccttgtgtccttttgtccttgtgtctgttacttcctacctctcagtcatccaaccttctctccattcagtttttcagctgccctcctgtcgttgagattccctgcattttacttgattctgggctctgggctctgctgttaagcctgtttctgatgtggcaggatagttagtggtgtggtgagttatagctaccttctaatgtgtctctgggacgttgcctatccaggagcttttcagcaagcagtactgctcttggaagcatgtgactcccttggtcccctgtattgctctgttgtcgaagggcttatgagcagacatgttcttaaaaggtggtcatggtgaggcttgtagagccatgtttcctaggtggcttcccaggtctctctacctctgactttttattttcaaacatatttatgtggcttttctgggtacagtgttgacattcattagaaaatattctaatgcctgccagtttgcttctctttggaacattgtcaccacccaagtggctcttctgacaatgtggtagagggccttcttgtagttttctgaacaaggctaggcaccctggagagctggccacatttgctctacagcatgggtcatgcctcagtgttctgtacactggaagagtcttcacatttccaaacagaaagactagtgttacagaagtgcctgacttatctcagtcctaaagaattagattgtcctcagtgtcttaaagtttcgcacaaaactctgaatgaattttatacttggcaaattttaatgctggacgatgtgcagtcagttcatagtcctggtccaggcctttagtgtattgtctcatgagcctcctgatggcgtgaccttcctagctccctgtgtatactacgcagatcccatagaagcatggggccaaggattggtggcaccaactgaggtgacatttagaggtctttgagtgacccagctcaacttctctgccaatgtcagcttgatttagatctcactgaatcaggctgcttctgtcctgtgtccctgtgaatctgctcttggctggctttctctgatgtcgcttccttgcttgcttgcttcgttgctttggaaggctatccaaggtgtgtaaacaattctttagtaaataaattgctattaacccaaacaaacaaaaacactgcaaagaggatgggtaaaggtgagcaacaggggaatggctgggatagatggctggggctacatgaactggggattctttacgaaatatctgttagactttgtgatcaaatgatgtgataaaagaattgtataaagggaataattgtctgatactgatctgtttgagaagtattgagaagcttctcaatttaaatatttaaactttctaagcttatgcccccttggctgtgtatagcaaactgtttttatccacagttgtgccttattgtcccattaaagttgtattcctcaattcatcaataaatcaattgttgtt

SEQ ID NO: 907 - DNA, 192 bp, Mus musculus
atgccgggactggcggccgctagccctgccccgcccgaggctcaggagaagaagccactgaagccctgctgtgcctgcccggaaaccaagaaggcgcgtgatgcgtgcatcattgagaaaggagaagaacactgtggacatctcattgaagcccacaaggagtgcatgagggcactgggatttaagatatga

SEQ ID NO: 908 - DNA, 2210 bp, Mus musculus
ggcgaacaagggcggtcggcagagcccagacgctgacagaagctgagcagtcggggcttcttggcaggtgatggcgcccctcgtagcctagaagtccagcaccctcggcaagccgcagacccacgcctctctcctttgtatctggtcaagtctccgggtcactttgaacatgttggtgcgactaaccaagctgtcctgccctgcgtatcactggtttcatgccttaaaaattaagaagtgcctacctctgtgtgctccaagatgttcttcaacctctgctgtacctcagattaccactcactacactgttcatccccgggagaaagacaaaagatgggaaggagtgaatatggagaggtttgcagaagaagcagatgtggtcatagttggtgccggcccagcaggactctctgcagctattcggctaaagcagctggctgctgaacaggggaaggacatccgtgtgtgtctggtggagaaagctgctcagatcggagcacacacgctctcaggggcttgtcttgatccagctgccttcaaagagctcttcccagactggaaggagaaaggggctccacttaatactcctgtaacagaagacaggtttgccattttaacagagaaacacagaattcctgtgccaattcttccaggtcttccgatgaacaatcatggcaattacatcgtacgcctaggacatctggtgagctggatgggagaacaggcagaggctcttggagtcgaagtgtatcctgggtatgctgctgctgaggtcctttatcatgaagatggtagtgtaaaaggaatcgccactaatgatgtaggcatacaaaaggatggtgcaccaaagacaacatttgagagaggactggaactgcatgccaaagtcacagtctttgcagagggttgccatggacacctagccaagcagctttataagaaatttgatctgagggccagctgtgatgcacagacttacggaattggtttgaaggagttatggattattgatgaaaagaagtggaaacctggaagagtagatcacactgttggttggcccttggacagacatacttatggaggctctttcctttaccacttaaatgaaggtgaacctctagtagctgttggctttgtggttggcctcgactatcagaatccgtacctgagtccattccgagagttccagaggtgtaagcatcatcccagcatccagccaaccctggaaggcgggaagaggatagcctacggagcccgagcgctcaatgaaggcggcttgcagtccataccaaaactcacttttcctggtggcttactaattggttgtagtcctggtttcatgaatgtccccaagatcaaaggtacccacacggcaatgaaaagtggaagtttggcagcagaatcaatttttaagcaactaactagtgaaaatctccagtcaaagacaacaggactccatgtaactgaatatgaggacaatttgaagcaatcctgggtatggaaagagctacacgctgttcgaaatataaggccatcttgccacgggatactgggagtatatggagggatgatttacactgggatattttactggatattgagaggaatggagccatggactctaaaacataaaggctcagactctgatcagctcaaaccagccaaggattgtacacccattgagtatccgaaacctgatggacagatcagttttgacctcttatcctctgtggctttgagtggtactaatcatgaacatgaccagccagcacatttaaccttaaaggatgacagcatacctgttaatagaaacctgtcaatatacgatgggcctgagcagcgattctgccctgcaggagtttatgaatttgttcctttggaacaaggtgatggatttcgattacagataaatgctcagaactgtgtgcactgtaaaacatgtgatatcaaagacccaagtcaaaatattaactgggtggtcccagaaggaggaggagggcctgcttacaatggcatgtaagacactaggccttcattcactggcacacctgacagccagtttccataaaactgtaaatgtatgccaaactaacttcctgtatgtttagataacttctgaacaagtgtccttcaaacattattgaagtaaaaaactttgtatctaaagttgccccataaaatcatgaagtatttgtcataaataaaacttt

SEQ ID NO: 909 - DNA, 1013 bp, Mus musculus
gcagccagcacctgaggacttcttatacagtcataaagccacctagagcgatttgttgttgagcaacccgccccttccctccaggatcagaagcacaccacccttgccatgataaacattccatcccctgctgttctgataatgtgaagtcagatgagggttcccaggttatgtggcacctgcggaaaccatgtctagagtcgtttctatgtagcttggcagagcccactgatggctgcaggtgtgtagcctactgacagctttggttaacccactgcacatcacccagtcatttacccaacttactctagaaatgtccacagctaaggaaggctcctgagccagtcaggcggagttcaagtgatatcttgggacagtgaccatggtctgcattacttgggggaggatggggtacaagacaccagatcatttttatacaggatgtagagtactgatgcggttgatcttttccttcaagaacattcttttctatagaaaaatgattccctgtgatcttctggaagctccaaagctgaaacccttcagctttgcaactaaaaatattacagtttaataatcaattaaaccaaccaacaataagcactacacatctgccaccaacaatgttgtttgcatttaccttaccaatattaatcccagcgtggtaactctgtgtgaccccgataacattttgtaacattgtgctgccttagagtttgtactgtgagttctatcagtatttatgttgaaatttctaacatggattctagtctctattctgttaatttaattttaaatgctttatccatttgtgcaaaggtaaacacagattgtatcttttttaatggtacggcataaaaaaataaccctaaagtgaagtggctctatactgttttatagagtactttaacgtgtatagatatcttgtaaacttgtattgtggatgtgtaaataatatgtactttggggttttaacaccgcatgtaaagtcaaaataaaatatccaagtcatt

SEQ ID NO: 910 - DNA, 550 bp, Mus musculus
ggggcgggagctgcccctacccagcccgagcggttggagccaagagtgttcttaggtgactcaggggcagcatcgacgctcgattgagcgggcttgggaaaggttcccagagggctgtgcgctggaggcgctggacgctgtcatggcgggcttgctgaaaaagacaactggcctggtggggttggcggtgtgcgacactccacacgagaggctcacaatattgtatacaaagactcttgatattctgaagcactttcctaaacatgcagcctatagaaaatacacagaacagatcaccaacgagaagctggatatggtcaaggcggagccagatgttaaaaaattagaagccttgcttcagggtggtgaagtggaagaggtgattcttcaggctgaaaaagaactaagtctggcaaggaaaatgttgaagtggaagccatgggagccattggtggaagagccgcctgctaaccagtggaagtggccaatatgacctcagtgtcagatggtggatgggaattaaatgtgcaattaaatgctctgtgatgct

SEQ ID NO: 911 - DNA, 747 bp, Mus musculus
gagtggaagtggcggcatcgctggctcggccctgtcgttctccacagctgtaccgtggcggtgggctcgcgctgggatgagcgcgcggtgccgagccgcggagtggagtcatggccagcacagtggtagcagtcgggttgaccattgctgctgcaggatttgcaggccgttatgttttacaagccatgaagcatgtggagcctcaagtaaaacaagtttttcagagcctaccaaaatctgcattcggtggtgggtactacagaggtggatttgaacccaaaatgacaaaacgggaagcagcattaatattaggtgtaagccctactgccaataaagggaagatcagggatgctcatcgccggattatgctattaaatcacccagacaagggccctctggtggaagaaggtctgaaacccataccaatctgtcgcagctgctcatcaatctgcagacgttccattcttagttgttccacttcctacgatcaaaacaaaaacccttttactgtgtgtgtgtgtgtgcactcgagcgcacacacaggcattcatacacctgtcaaaccatgtgagaccaccatgtgagatcacctttacccacttgacccatcttccctagcccacatcctatacaggtttgatttgtgtgttttggcctagagctggaactgtacaatctacacaaaaggaaacaaactatgatctttgaaatcatcttctcataaagcagaatcgtattcacaaggcc

SEQ ID NO: 912 - DNA, 1033 bp, Mus musculus
  misc_feature 8: n = A,T,C or G
ggctcttncacattgagacaagcctgacgtctaagacccaatggctaacgaagctaaccttgcccatgtgacattggtcacaaactagagtatggtggcatgggcccacgaattcaggttgagcaatcaaggcttatgtcacccggtcccccgtggtagcaggcaaagccgtgttgtcgtccaggttatatttggctggcagctgcccaacaccaggtatatggctgacatgattgccagaaatggatacacaactattgtcccagacttcttttgtgggtcaagagccatgggacccagctggtgactggtccaccttccccgcgtggtttgatatcaagaaatgccagaaaagtcaatcgggaggttgatgctgtcttgaggtatctgagacaacagtgtcatgctcagaagattggcattgtgggcttctgctgggggggtgttgtggtgcaccaagtgatgacggcatacccggacatcagggcgggggtgtctgtctatggtatcatcagagattctgaagatgtttataatttgaagaacccaacgttgtttatttttgctgaaaatgacactgtgattccacttgagcaggtttctacactgacccagaagcttaaagaacactgcatagttaattaccaagttaaaacgttttctgggcaaactcatggctttgtgcatcggaagagagaagactgctcccctgctgacaagccctacatcgaggaggcaaggaggaacctaattgaatggctgaacaagtatgtctaacagcacccaagcacaaggcagctgttgcccaaatttgcctgaataattaaccatctcttactatccatgatagcatgactgttaggggaactgggggcaattcagggaccagctagattctcagatatggccttacattggtaattcaagtgttaaaatgtacaaaaccaggaagagcagttgtcactatgtatattcaacttcccctaatgagcagtgtcgacattcaacctaataaagtgatttttaaaactcg

SEQ ID NO: 913 - DNA, 787 bp, Mus musculus
gaaagtaaaggacgccgcgggtcggagagcatgtccagcttctctagggcgccccagcaatgggccacttttgctcgaatgtggtatctcttagatggcaaaatgcagccccctggcaaacttgcggttatagcatccaacaaactgcaaggattaaataaaccagtgtaccatcagctgagtgactgtggagaccacgttgtcataataaacacaagacatattgcattttctggaaacaaatgggaacaaaaagtgtactcctcacatactggctacccaggcggctttagacaagtaacagctgcgcagcttcaccggaaagaccccgtggcgattgtgaaattggctatttatggcatgctgcccaaaaacctgcacagaaggacaatgatgcaaaggctgcatcttttcccagacgaggatattccggaagatattcttaagaatttagtggaagagcttcctcagccacggagagtgcctaaacggctggacgagtacacccaagaagaaatagaggctttccccagagtgtggactccacctgatgattttcggatgtaggagaatggaaatgatagaacattacagcaagagactgaatgtttcctgaagtattaccatgacccaaggcagagagaaaccatgggaactccctgtgggaacactcaagaaggccaagcctcagcaggaaagtgcagtagaagatactgttttacagacaagtcctgtgtaacctgctttaaatgctacacatgttaataaaatgcttatttggttagct

SEQ ID NO: 914 - DNA, 6576 bp, Mus musculus
ggaaaaataacaaatatactttgccaaggttcagcctcagattgaagaggggttcttagaggaggagcttgagggagagaaacaaacggaggagctgcggggaaggactggaagcttggggcttacttttcactccgggtatcggattttctttgcaaattgacatagaaggagaaggtctcaggagctatggggacctcccaccaggtctttctggtcctcagctgtctcctcacagggccgggcctcatctcctgccagctcttattaccctctatcctcccaaacgagaatgagaagattgtgcagctgaattcgtccttttctctgagatgcgttggggagagtgaagtgagctggcagcaccccatgtctgaagaagaagaccccaacgtggaaatcagaagtgaggagaacaacagtggcctctttgtcacagtgctggaagtggttaacgcctccgcagcccacaccggatggtacacttgctactacaaccacactcagacggatgagagtgagatcgaaggcaggcacatttacatctatgtaccagacccagacatggcctttgtgcctctcgggatgaccgattccttagtcatcgtggaagaggatgactctgccatcataccttgccgcaccacagatccggagactcaagtaaccttgcacaataacgggaggctggtgcctgcctcctatgacagcaggcagggcttcaacggaaccttcagcgtggggccttacatctgtgaggccaccgtcaaagggaggacgttcaagaccagcgagtttaatgtttatgccttgaaagcaacgtcagaactgaatctggagatggacgcacgccagactgtgtataaggcaggagaaacgatcgtggtgacctgtgccgtctttaacaacgaggtcgttgacctgcagtggacttaccctggagaagtgagaaacaaaggtatcaccatgctggaggagatcaaactcccatccatcaaactggtgtacactttgaccgtccccaaggccacggtgaaggacagtggagagtatgaatgtgctgcccgtcaggccactaaagaggtcaaggaaatgaagagagtcaccatttctgtccacgagaaaggcttcgtcgagattgagcccacctttggccagctggaagctgtcaacttgcacgaagtcagagagttcgtggtggaggtgcaggcctacccgacgcccaggatatcgtggctgaaggacaacttgactctgatagagaatctcaccgagatcaccactgatgtacagaagagtcaggaaacaaggtatcagagcaaattaaagctgatccgggctaaggaagaagacagtggccattacaccattatagttcaaaatgaggatgacgtgaagagttacacgtttgagctgtcaaccctagttcctgcatccattttggatctcgtagatgaccaccatggctctggcgggggacagactgtgaggtgtacagccgaaggcacccctcttccagaaatcgactggatgatctgcaagcatattaagaaatgtaataatgacacttcgtggacagttttggccagcaatgtctcaaatattatcacagagctccctcgccgtggcaggagtaccgtggagggacgagtgtccttcgccaaagtggaagagaccatcgcagttcgatgcctggcaaagaacaacctcagcgttgtggcccgtgagctgaagctggtggctcccactctgcgatctgaactcacagtggcggccgcagtgttggtgctgttggtgattgtcattgtctctctcatcgtcctggtggtcatttggaagcagaaaccacggtatgaaattcgctggagggttatcgagtcaatcagccccgatggacatgagtatatctatgtggaccccatgcagttgccttacgactccagatgggaattcccgagagatggcctcgtgcttggtcggattttgggatccggtgcatttgggaaagtggtcgaaggtacagcttatggattaagccggtcccaacctgtaatgaaggtggctgtgaagatgctcaaacccacagccaggtctagtgaaaagcaggctctcatgtctgagctgaagataatgactcacctggggccacatttgaacattgtgaacttgctgggagcctgcaccaagtcaggtcccatttacatcatcacagaatactgcttctatggggatttggtcaactacttgcataagaacagagatagcttcatgagccaacacccagagaagccgaagaaagacctggacatctttggattgaatcctgcagacgagagcacaagaagttatgtgattttgtcttttgaaaataacggcgactacatggacatgaagcaagctgataccacacagtatgtccccatgcttgaaaggaaagaggtttctaaatactctgacatccagagatcgctgtacgatcggccagcctcctacaagaagaaatccatgctagactcagaagtcaaaaacctcctttcggacgatgactccgagggtctgactttgctggatctattgagcttcacctatcaagttgctcgaggaatggaatttttggcttcgaaaaattgtgtccaccgggacctggctgcccgcaacgtcctcctggcgcaaggaaaaattgtgaagatctgtgattttggcctggccagagacatcatgcacgattccaactacgtgtcaaaaggcagtactttcctgcctgtgaagtggatggcacccgagagcatcttcgacaacctctacaccacgctgagtgacgtctggtcctatggcattctgctctgggaaatcttttcccttggtggcacaccctatcctggcatgatggtcgattctactttctacaataagatcaagagtggataccggatggccaaacctgaccatgccaccagtgaagtctatgagatcatggtgcagtgctggaacagtgagcccgagaagagaccctccttctaccacctcagcgagatagtggagaacctgttgccgggacaatacaagaagagttatgaaaagattcacctggacttcctaaagagtgaccatccggccgtggcacgcatgcgggtggactctgataatgcgtacatcggtgtcacttacaaaaatgaagaggataagctgaaggactgggaaagtggcctggacgaacagagactgagcgctgacagtggctacatcatccccctgccagacattgaccctgttccagaggaggaagacctgggcaagaggaacagacacagctcacagacttcggaagagagtgccatcgagacaggttccagtagttccaccttcatcaagagagaggacgagaccatcgaggacatcgacatgatggatgacattggtatagattcctcggacctggtggaggacagcttcctgtaactgacacgctccgggtatcatcttctccgggagcctcctcgggataaccttaagaaaaccacttcattgcaatgcaaaagttgagaagaggacttgggtgatgtggagagagaaagttcccgagccgagggccttggtaagcctgtgtggatgactgggatacttggattgaactttatccgtgttgcctcttgcaacgcgtcagtagcatctcagcggcgtgtgcggtttggaaatggatggacaagagagtgactggccacagaagacgggctttgtgtttccagggcatgggtgagagtcccacacgcgccaacttgtactgcagacaactccagcattgtaattatgtaaataactcttaaccgaggatgggtttagatctgtgttaactctcctctccggacctctgaagagaccactcagtccacccgtgtgcttccttccttcttggaatccggtaccagctgctgttgaattttctcatgaagtacatgcaaaaccactttgaactttggaaggtactggaaccgttgtgttttactgtcttgtaagtgttaaagaggcaaaaagataaaaactaaccaaccgtgagtagtaggtttgggtcttttaggcacccaagaattcctctgtatcttgtaatctgtacttataacactactactgtttaacaagaatgctaaatatgtaatcctaacatgatttctttacagagaaagcacaattaaaacaaaacccttactaagtaggtgacaagtttggcagtttttgacatttatattaagtaacacgtttctcaataaagtataatgggtttagctgattaaagttagcaaacactagagagcagagtgtaagtagttatccagaaagtcaaacctttttgttttgttctaagcagtctccctaatccaaggcactaggaacagttaatgacctctgaagtactgggataagcaaagcagaaaccccggtggtgtcctaagtgttctcagtacaaaggcgtacgcctgagcccagtgtgactcctcacgctgtgtgcgaccttttggaagagactcattcacaaaaaggactcagatgggcagaatgtccatcagatgggactcagatgtctctcctgaccagtgatggcttggatggatcccgcccatacctacttttaaagtctgtgacctttaaggatgcttcaacatcagcaccttactttttctctcttgtctcagacgagaaagaactgcaaaccctgagaccacaatggtgctgttgaatgaaggctatgtgggcatcagcttggctcttcccttcccaccgttaactgcagctacagttactagcctcaatggtgtcagacctttgccccagagatttggaattacaaggtctgacgggaacaggaagctatatatatgaactgcctggtgctcttgaatagtcagtgttcagaaacactggcttggattactgttgggggaggggaactttgaaatttggaacggggctagaagtcaaccatgcaggaaggctactgtttaagttcttggcttcatgtcaataacatgtcaatgccacgtatgcagctattcctacccttgatttaagtttccaggcttggctgaggctgagaaagcaaacatcttgacttgggaacatcttcccattctagtcaacgtgggtaccagcttttgttccctttcttccccctggatgggagaacctgagctcgctcacctcaaagtgtgtccgggaatgatgcaagtctgtgtgtcaggtctttgtgcaccagctccatattcggtggagaagattaaaaaaaaagttttctgaatttggggcctttgcgtggtaggctatcaggagcatccgaactgtcaaagtggttagtgtgagttcattggcattctctgccatgtgtctaattgctgactctgtatgaatgaaacatgggctatgattactgcaatcactgtattgcttctagcaggtgacgctttggaaggcacagaagcaataacaaggtacttgactacctactggcataatctcaatgcaaaccccaactttcccttttcacagtaagtgtgaagactgagccagattggccaattgaaaaacaaaaacctgactagagtctttcgagccaattagacttgaactacatccgtctttctagactcgtggctggagcagtctgtttaccactcatttgcacagcctctgtttgttgcattctttttattctgatgtcgctttgggccttgcatgacaccatgaagttggatgatacttctcagaccagcagtttcccatctttagctgtacccacctctgagattcaatgggaatacgttcacttttgttttttgagacagggtctttctacagccctggctgccctggaactcactgtgtaaaccaggctagccttgaactctcagagatccactgtctctgtacccccagtgctgggattacaggcatgcaccaccacactcagcagggatacatttttatttttaaacagtgttttgactgtatcctgatttgttttctttctgcctcctgcagagtccctggaagaaaatttaccaatctttcctgctttctatttttatgatgacaatcaaagcttgcccgaggaacacaatttgtgacttttaaaaaaatgatcaatgatgtccttaaaaaaatgtggtctgccaacctgtacaaaatggtcctatatttgtgaagagggacgtaagataaaacgatgttatacatcgatatgtatatatctgttgctatgtagacttggagaatactgccaaaatgtgtatgacaagctgtatcactgcctttgtttatattttttttaactgtgatattccccacaggcacgttaactgttgcacttttgaatgtccaaaatttatattttagaagtaataaagagaaaaatactgacatgttcccaacatggtggtgtggtaagtgtgtgagagcgacttactccataggaagggtcttccaatacaagatggcttccagatacccctgttcatgttttgttttaaaaagtgtaaatggagatctttatatttcaataaatgatttattataaaaaaaaaaaaa

SEQ ID NO: 915 - DNA, 455 bp, Mus musculus
acgctttgcaagggtagctggggtgaatttgcaccaaggcagcagcatagtcgccgcagttccatcttcgtctccgcgatgttgcccttagccaaaaacgcactaagccgtctccaagttcgaagcattcagcaagtggtggcaaggcagagccaccagaagagggcacctagtttccatgacaaatatgggaatgctatattagcaggtggagccatcttctgtgtttctacatggacatatacagccacacaaattggaatagaatggaacatgtcccctgttggcagagtcaccccaaaggaatggagagatcagtagtcgtgccagctggtacaataatcaaggaattgtttaaaaccaacttataagtgaatgccaagtcaaagaatcatgtactcattatactatggcagattgaagaacaaataaagaaataaagtaccttaacctcc

SEQ ID NO: 916 - DNA, 1239 bp, Mus musculus
gatgaccgcaacagtagttgctgcggctgccactgcaaccatggtctccagcagcagcggcctcgccgccgcccgcctgttgtcgcgcaccttcctcctgcaacagaatgggatacgacacgggtcttacacagcctctcggaaacatatctatattgataaaaatacgaagattatttgccagggtttcacaggcaaacagggtacctttcacagtcagcaggctttggagtacggcaccaaactcgtgggaggaaccactccagggaagggtggccagaagcacctgggcttgcccgtctttaatactgtgaaggaagccaaagagaaaacaggagcaacggcttctgtcatctatgtccctcctccttttgctgctgctgccattaatgaagcaatcgacgcggagattcccttggttgtgtgcattacggaaggtattccgcagcaggatatggtgcgggtcaagcacagactgacacgccagggaacgacgaggctaatcgggccaaactgccccggcgtcatcaaccctggagaatgcaaaatcggcatcatgcctggccacattcacaagaagggaagaataggtatcgtgtccaggtccggtactctgacttatgaagcagttcaccaaacaacccaagtcggattggggcagtccttgtgtattggcattggaggtgacccttttaatgggactgattttattgattgccttgaagtcttcctgaatgatccagccacagaaggcatcatactgattggtgaaattggtggtcacgctgaagaaaatgctgccgcgtttctgaaggagcataactcaggtccaaaggccaagcctgtagtgtccttcattgctggtataactgctcctcctggcagaaggatgggccatgcaggggcaattattgctggaggaaaaggtggcgctaaagagaagatctctgctcttcagagtgctggggtggttgtcagcatgtcccccgcacagctgggaactaccatttataaggagtttgaaaagaggaagatgctttgaaggacacaacaagaaattctttaaagctgtggaagaaatctagacgtgagggccagtccaggctgtcagcccatgcagctgacactggttggtctctcagtatgtgggaaatccaggcaagttttagaatgtcctaaattgagctattttcacttactgtgtaacagagacagataataaatctatcatttgatttg

SEQ ID NO: 917 - DNA, 1504 bp, Mus musculus
gctccttgcttcttttttggggtcgtggccttgctcctgccctgcaagagaagcgtccagggctttcacgcgcaagtgtgcgcgtgggtcctgacgtgctcgtaggtccacgctccagactctgcggggacagaagcaggagccatgggcgggaccgctagcacccgccgggtcaccttcgaggcggacgagaacgagaacatcaccgtggtgaagggcatccggctttcagaaaatgtgatcgaccggatgaaggagtcctctccatctggctctaagtctcagcgatattccagcgtttatggtgcttcagtttctgatgaagatttgaaaagaagagtagctgaggagctggcattggagcaagccaaaaaggagtcagaacaccagagacgccttaagcaagcaagggacctagaaagagaaagggctgcagccaatgagcagctgaccagagctgtccttcgggaaagaatatccagtgaagaggagcgcatgaaggcgaacgatctggctcggcagctggaagagaaagaccgagtgatgcggaacaggatgcattctacaaagagcagctggccagactggaggagaggagctcagagttctacaaagtcaccaccgaggagtatcagaaagctgctgaagaggtggaagccaagttcaagcggtatgaatatcatccagtctgtgcagatctgcagaccaaaatcctccagtgttaccgtcagaacacccagcagactctcagctgctctgctctggctagccaatacatgcactgtgtcaaccatgccaaacagagcatgctggagaagggaggctaaagttaccctgagaacatgcaagctccttcaacgtataattccagaggtggaacatttttcttttcctagtatgaaaatgacccatttaaagagaagaccactaaagacagacaggcactggaaaatggactcaactgaatcataacgtgttttgatcaacagtttaaaaagccatgttctagatcagcgatcagtcatcaaagaacactgttaagtgttaatgaaaccacaaaatgaataaaagaggaaggcagtccaccccacctttttgtactctctttccagcttccactgatataaaacgttctcgtcactccaggctccatccagcatttagtgacttccactctgacaaagctgggaggagggacattaaactatttcagatggagagacagcaagaaagcactgggctggggcaacagtgtagacttgccaagactgtggagcctgggtgtgctcttctcattatatagaagctaattcattgtaacttatgatgatctttcaaggaagacagaaaggagagaaaatgtacctcttttactggaataatgtttatgattacaggtaaaataaggcatttttgtcaatataaaggcaaccttggcttgttcaaccaagtagtgaatactgacaacttcactcactatcaataataaatctattttctgact

SEQ ID NO: 918 - DNA, 1963 bp, Mus musculus
gttttcgcggactctaagatttcagaatgactaccatcttgacttccacttttagaaacttgtcaactacatcaaaatgggctctcagatcttctataagacctctgagctgttcttcccaactgcactctgccccagctgtccagaccaagtcaaagaagactttagcaaaacccaatatgaagaatattgtggtggtggaaggggtccgcattccatttctgctgtcaggcacttcgtataaagacctaatgccacatgacttggctagagctgcactttcgggtttgttgcatcggaccaatattccaaaggatgttgttgattatatcatctttggtacagttattcaggaagtgaaaacaagcaatgtggctagagaggctgccctgggagctggcttctctgataagactccagctcacactgtcaccatggcttgtatctcttcaaaccaagccatgaccacagctgttggtctgatagcttctggccagtgtgatgtcgtcgtggctggtggtgttgagttaatgtctgatgtccctattcgtcattcaagaaatatgaggaaaatgatgcttgatctcaataaagccaagactctgggccagcgcctgtccttactcagtaaattcagattgaattttctgtcccctgagctccctgcagtggctgagttctccactaatgagaccatgggccactctgcagaccgactggctgctgcctttgctgtttctcgaatggaacaggatgaatatgcactgcgttctcatagtctggccaagaaggcacaggatgaaggacacctttctgatattgtacccttcaaagtaccaggaaaggacacagttaccaaagataatgggatccgtccttcctcactggagcaaatggccaaactaaaacctgcgttcatcaaaccctatggcacagtgacagctgcaaattcttctttcctgactgatggcgcttctgcgatgctaatcatgtcagaggacagagctctggccatgggttataaaccaaaggcatatttgagggattttatatatgtgtcccaggatccgaaagatcagcttttactcggaccaacatatgctactccaaaagttttagaaaaggcagggttaaccatgaatgatatcgatgcttttgaatttcatgaagccttctcaggccagattttagctaactttaaagccatggattctgattggtttgcacaaaactacatgggtaggaaaaccaaggttggatcacctcctctggagaagtttaatatctggggcggatcactgtctctggggcacccttttggagccactggctgtcggctggtcatggcagctgccaacagactgaggaaggatggaggccagtatgctttagtggctgcctgtgcagctggaggacagggtcatgctatgattgtggaagcttaccccaaatgactgctctagaaggaggcgaccgactgatctcttcagcacttgcactgggcaatgccatttcaatgcactaccaagtgatacctgcagttcctagctcttcttaggaaacaacatttgtggccttctcttaaatactttgcaatccagccttgccagtgttcgaggttttcgataatcacagcttctgctctctaagttccagactattacagatgtttgcgcagttcctgttatttcttttcacagagactaatggctgctagccacttggagagagagaggctagctcaggtttagaatcgtctttgtaacatttgcagatactccttattcctgtctgtgtcatagagataattatttttttctaaaatacaaaccggtgtgcctaagttaacttactatagaaaaaaaaataatctaaacatctcttaaacctgaaatgcttagagacatagataccatgttggttgaccttaataaagtagacatgtattaaaaaaaaaaaaaaa

SEQ ID NO: 919 - DNA, 1787 bp, Mus musculus
ggggccctctttccgacctgcccacggccccgcccacctgaatgtaggtgaaaggtcggcggagccgctcgggcagcggagcaagaccaagactgcccggagctgacagacagacagacagaagactgagcatggcagacgagccgaaacccatcagtccgtttaagaacctcctggctggcggcttcggcggcatgtgcctggtgtttgtggggcaccccctggacacggtcaaggtccgactgcagacacaaccaccaagtttgtctggacagccacctatgtactctgggaccttggactgtttccggaagactcttatgagagagggcatcacagggctgtatcggggcatggctgcgcccatcattggagtcacccctatgttcgccgtgtgcttctttgggtttggtctggggaagaaactacagcagaaatctccagaggatgaacttagctacccacagctgtttacagctgggatgttatctggtgtgttcaccacaggaatcatgacccctggagaacggatcaaatgcttactgcagattcaggcttcttcaggggagaacaagtacagtggcaccttggactgcgcaaagaagctgtatcaagagttcgggatccgcggcttctacaaagggactgtgctcacactcatgcgagatgttcctgccagtgggatgtatttcatgacatatgaatggcttaaaaatctcttcactccagaggggaaaagagtggtcagtgacctcagcgtgcctcggatcctggtggctggtggctttgcagggatcttcaactgggccgtggcaatccccccggacgtgctcaagtctcgattccagactgcacctcctggaaaatatcctaatggtttcagagatgtgttgagagagctgatccgagaagaaggagtcacctccttgtacaaagggttcaatgcagtcatgatccgcgccttcccagccaacgccgcctgtttccttggctttgaaattgccatgaagttccttaattggattgcccccaacttgtgaagctgaagactcttcaagacctgtggaagctggacactgttgctgagaggcaggggcaggaggaggaagtcctgagagggaggggagggaagaggtgtgatcagagctccaggcttggctgtgatggtgaaactgttgccttaatgatatcctctaccttgtataacttggtgccattttgaaacttgaatttagaggatttccagagaattggagatggaataaatagtttatagactcgatacctttggccaaattgccacctactggttgactgaaggccctgttacactcaaaatactccttcccgaagaggtgatggctgactctctggaggccccttgcctactttcagccagctaaaccaggagctgggatctttaattgctagccaggaaaactcaagagatgtctctggtgccatccatatactcctggctgtgcatgggatgtgggtgtgaaccacacatctgtctatccaatggactgggtagataatacctaagaacagcccacctactaaccatttttttttgatatttttacacaagaaataataagaagaaagctacaattgtctaaatccccaggagaaagtagagaattttccctcctacacagtgaagacagtcccagcctcctgggataagtgtgagagccataatgtatgaaggctccttttgcacattctttccccatgagagcactcagttttaacaggaaacaataaatattgtttctaatttt

SEQ ID NO: 920 - DNA, 1214 bp, Mus musculus
gatgttcaaggtgagaatgtggagccgggtcacagctgtcattgtcccctctcagcctccaggagccctccccacgctcccgggcgtctttttgcgggaccagactcggttcctcctgaggcctttttcacctccgggctaaattctggcttggcggcggttcattcagcactcggtaccagcacctgtgaggttgtggagtgaaaccctagattggtgggatcggccctttgagctctctcgcgaatgaaacactttgaaaagttaaaacgcctctatcgtgcccacctcctcggctaatgcccttttggggttgtggggaggatgaagccaggtctgggcgctgcagggtaattcagagatctgtggggccagccagcctgagcctgctcaccttcagagtctatgcagcacccaaaaaggactcgcctcacaaaagttacatgaagatcgatgagctttcactctactcagttcctgagggtcaatctaaatatgtggaggagccaaggactcaacttgaagaaaacatctcacaactccgacatcattgtgagccatatacaagtttctgtcaggaaatatactcccatactaaacccaaggtggatcactttgtccagtggggagtagacaactataactatcttcaaaatgcgcctcctggatttttcccaagactcggtgttattggttttgctggttttgttggactcctttttgctagaggttcaaaaataaagaagctggtgtatcctccttttttcatgggattaggtgcctctgtctattacccacaacaagccatcaccattgcccagatcactggggagaagttatatgactggggattacgagggtacatagttatagaagatttgtggaagcaaaattttcagaagccaggaaatgtgaagaattcacctggaaataaatagaaaactccatgctctgcccatttcaatcagttataggtaaacattggaaacttcagacagtaaatcagtatttctacagacaaatggcgaaatcagtattggatatagtaaactggctttcttcaggaaaaacaacactaagcctttttgctcttttgggtgatgccatattacaggccaactaatctgcaatctttcacatggaaataatgtacaagccttagaactcctcattcttataccactatttatgtacataattaaactccagattcc

SEQ ID NO: 921 - DNA, 1601 bp, Mus musculus
gatctgtgggagccgtctgcactcaggctgcttcgtggggactgaaggccagcactttgcgtcaccttaccctagccagcataattaaatccagaaggaaaacggaccacctagagagaactgccagtgtcctccgccgggaggtcatggctgcagctaaggtgtgtgaaatcactcacgagtctccatcagtgaagagcctccgtttgcttgttgctgataaagacttttcctttaaggctggccagtgggttgatttcttcatcccaggagtctcagtggttggtgggttttcaatttgctccagtccccaacggctagaacgagacagaaaatagaactggcggtgaaatatgcagaccaccctcctgctgtctgggttcacaataagtgcacacttgactctgaagtggctctcagagtaggtggagagttcttctttgaccctcagcccacagatgcccctcgaaacctcatcttgattgctggaggggtcggaattaaccccctgctttctatcctgcgccactcggcagatctccaccgggaccacgcagacaaaggacgtagctatgagatagggacagtaaaactgttctacagtgcaaagaacaccagcgagctcctgtttaagaaagatatcctcgacttagtacatgaattccctgagaagatttcttgcagttttcatgttacaaaacagacagcacaaatcagtgcggaattgaagccttatgtcacagacggaagaataacggagaaggagataagagatcacatctcagcagagactctgttctatgtctgtggaccacctccaatgacagactttttctctaagcacctggaaagctgccacgttcccaaggaacacatctgctttgagaagtggtggtagggaacgggcacagaagacctgagagccacttgggacagtgaggctctcaaatgtccagcccggctacacgagtcacacgagaaacttccggcagacttcattggtcacactctttttgactatattgatttttctttcgttaataataattccattattacagaatttctgactcctgggaaaagacaattcagttttacttaaaagatttattgttgagctgctggcatggcaggctgacagtctgagggccacatttcagattgccataaaggagggggtggggagagggttcctaagggaagaaccacaggaaggcaggcctacaggatctacgcaagcaagcagacactggcctggtctgccaagtttaagtggttaaagcaactgaaaacaacctgggtatccacataagcaagttacagaagtgaagacgcagtctccataccaaggagccactcacagctggacatttctgggagttcccaagtcagggttgttttttgggacgctatctttctggaattttgagtttgtggcaagctgtcattagtactaacatggaggggacctagaaaaccatggagtttctctggttggcctctacaccatgaactgattaatacagagttttctttcgcctttaggggacaaattggtctacttacattaattaaagaaaatgtgggttttgtgtgaactg

SEQ ID NO: 922 - DNA, 1169 bp, Mus musculus
cggacgcgtgggcggacgcgtgggtaagtttccgcgtttctctcaaccgcagccagcagtgaaaatgtcagcgccagagggtctgggagatgctcatggcgacgccgaccgcggcgacctttccggggacctccgtagtgtgctggtcacgagcgtgctcaacctcgagccgctagatgaagatctctacagaggaaggcattactgggtacctacctcccagcggctctttgggggtcaaattatgggccaggccctggtggctgcagccaagtctgtgagtgaagacgtccatgtccactccctgcactgctactttgtccgggcaggggacccgaaagtgccagtgctgtaccacgtagagaggatacggacaggagccagcttctcagtgcgcgccgtgaaggctgtgcagcatggcaaggccatcttcatctgccaggcctccttccagcagatgcagcccagcccgctgcagcaccagttctccatgccctccgtgcccccgccagaagacctgctggatcacgaggccctcattgaccagtacttaagggaccctaaccttcacaagaagtatcgagtggggctgaaccgagttgctgcccaggaggtacctattgagatcaaggtggtgaacccacccaccctgacccagctgcaggcactggagcccaaacagatgttctgggtgcgtgcccggggctacattggggaaggtgacatcaagatgcattgctgtgtggctgcttatatctctgactacgccttcctgggtacagcactgctgccccaccagtccaagtataaggtgaacttcatggcgtcactggatcactccatgtggtttcatgccccattccgagccgaccactggatgctgtacgagtgtgagagcccctgggctggtggctctcgagggctggtgcatgggcggctgtggcgtcgggatggggtccttgctgtgacctgtgcccaggagggtgtgatccgattgaagcctcaggtgtcagagagtaagctatagtgaaagatgcctggctcggcctggggctaaaaggactttgcactgccatttctgaggcaggagtcacagttgagagctgggcttcctgcctcttacatacaataaagagattgctaacactggaaaaaaaaaaaaaaaaaaa

SEQ ID NO: 923 - DNA, 1807 bp, Mus musculus
aaactcggtcctccgaccccatcttgctttgctgtctgcagcggtgaccgtgggaaagggcaactgctagagccatgaagctcctcagcagggccgggtccttctcgagattttattccctcaaagttgccccgagagttaaaacttcagcagcccctggaggagtgcctctgcagcctcaggatcttgagtttaccaaattaccaaatggtttggtgattgcttctctggaaaactatgctcctctgtcaagaatcggcttgttcgttaaagcaggcagtagatatgaggactccaacaacttgggaacctcacatttactacgtcttgcatctagtttgactaccaaaggagcttcatctttcaagataacccgtgggattgaagcagttggtggtaaattaagtgtgactgcaacaagggaaaacatggcgtacactgtagaaggcattcggagtgatattgagatcctcatggagttcctgctcaatgtcaccacagcacccgagtttcgccgttgggaagtagctgccctgcggtctcagctaaagattgacaaagctgttgcctttcagaattcacagacccgtatcattgagaacttgcatgatgtttgcctacaagaatgccttggctaatcctttgtactgtcctgactataggatggggaagataacatcagaggaattacattactttgttcagaaccacttcacaagtgcaagaatggctctggttggacttggtgtgagtcattctgtcttatagcaggtggctgaacaatttctcaacatgaggggtggccttgtttagctggtgcaaagccaaataccgtggaggtgaaattagagagcaggatggagacaacctggtccatgctgctattgttgcagaaagtgctgccattaggaatgcagaggcgaatgcattcagtgtacttcagcatcttcttggtgctggacacatatctaaaagggcaactacaccaccagcctcctgagccagagtgttgccaagagaagtcaccagcctttgatgtctctgcatattatgccagtaactcagactctgggctctttggaatttacactatttcccaggctgcagctgctggagaggttatcaatgctgcctacaaccaagtcaaagcagttgctcaaggaaacctttccagtgcagatgtccaagctgccaagaacaagctaaaagctggatatctaatgtctgtggagacgtcagagggcttcctgagtgaaattgggtcacaggctctagctgcaggttcttatatgccaccttctaccgtccttcaacagattgactccgtggctgatgctgatgttgtaaaggctgcaaaaaagtttgtttctggcaagaagtcaatggcagcgagtggaaacttgggacatacgccttttctcgacgagttataacacatgcgtgtatttaaagctcagcccagaccagcaagcacatcaaagtcaggtctcttaataattaattaatgttaattcaacattttctcaatgaagtaaaaaaaaaaaaaacttaaaagcatagtgactcccagctgtcctagtgtcaataaagcattgtgtgtaaatgttcttcttgcattctttctaagcagtcagcaagtatttattaaatgctttaaggaaaacaataatagagtaatttttgagttcgccaattacatcaattaagaaatttcagaaactgttaaaattgaggctaagcagctttaaaagtaaaaattccagattattactggtggctttttaaaataaaaacaactttaacactt

SEQ ID NO: 924 - DNA, 3001 bp, Mus musculus
cccttggaggcggccttgaccatctcagacggttgccccaaatctgcagatgtgaatcctaaataccagtgtgatcttgtgtctaaaaacgggaatgacgtatatcgctaccccagtccacttcatgctgtggctgtgcagagcccaatgtttctcctttgtctgacgggcaacactctgagggaagaggaggggcttgggagccatgccagcgacatctgcattggatctgaactgaacgccaccaaaacagacaattccctgccatctccaagcagtttgtggtccgcttcccatcctgcatccagtaagaaaatggatgggtatattttgagcctcgtgcagaagaaaacacaccctgtaaggaccaataaacctagaaccagtgtgaacgctgaccctaccaagggccttctgaggaatggaagtgtgtgtgtcagggcccctagtggcgtcccaccggtcagtagtgtgaactttaagaatacaaaacagatgtgtttgcccgctgggggaataacctctttggaaaacgggccattctcccctcctaagcagaggtccaaagactcaaagacagaccagttagaaagcaagaggttggctctgccggagagctgctcggcaggcgccgccatggaaccccaaagcaagcatgtgcccaaagccgccaaggcagcctctcaagagctcacaaggtgtcaagccgggctgggggaatccatgaaggaaagcaatcaggcctccgctgtttctcctaaaacaagtcctggcagaggccctgtcgcccccgcagagagcaaagccctgcagctcccgaaaaagatgtcgcagaagaacagcctccaggctgtgcccgcgctggacaggccggccttggacttcaaaagcgagggctcatctcaaagcctcgaggaagggcatctggtgaaagctcagttcattccggggcagcaggcggccggcaggcctcaccgtgcacacaggaacccgggtgtcgcaaggagcgccaccttgaaggcccgtggccaggcagccatggaacacggcctgcccaccgtcagggagaaaccgcgggcagcaggcaagaagtgccgtttcccagacgactcggatacaaataagaaattcaggaagacctccgccaagggccggcgcagtggcgggctgcaggacgctggccttcccggtagggccctgggcaccggcggccatcgggcgggtagcagggcgcacgcgcatggccgggagcccgtggtggccaaaccgaagcacaagcgaaccgactaccggcggtggaaatcgtcagccgaggtctcctacgaagaagccctgcggagggcccggagggctcgcagggagcacggggctgcctaccgggtggctgtcgccctgccttacgccagcccctatgcctacgtgcccagcgactccgagtactcggcggagtgcgagtcgctcttccactccacggtgggggacaccagcgaggacgagcagagcaactacaccaccaactgcttcggcgacagcgagtccagcgtgagcgaaggcgacttcgtgggcgagagcaccaccaccagcgactcagaggagagcgggggtttaatctggtcccagtttgtccagactctcccgattcaaacggtcacggccccagacctccacacccgtcccacaaaaacctttgtcaaaatcaaggcttctcacaacctcaagaagaagatcctccgtttccgctctggctctttgaaactgatgactaccgtttgagtagctgatgtagcgagtgtcttctcctccccctagtctctgagaaaaagaaaaaggtgttgtcttaatatttgtgtcatacttaaatggaatactttcctttcactaggataaacccaagataaattatgtctcgcggtcatgtatggacgctagtgcctttaatggaaggtgaaggatgtatctctagttagaagtgaatattgaggtcttagtggtggtgatagtgaatgcattttgattatcagatgtttcgtccgagtgtctggccaagtacaggtgtgtgatgttcaagttttatttggatgagaccttttgtttccaaggttcgtggataaaatttttaagccgtgaactcgctccttgatcctttagggctttgtccctgaaagggctttccggttgaggggcattgcatacaattgtgtagagtaggtagaaaaaacaaacaaacaaacaaaacagtcattgctttctgtaaattttttactatagacaacactctcagatgtctctccatcctattttcttcttagaagtacactttttactggatttagaacttagtagaccagacttttaatctggaggtggtaaactggatagggagactgataggaccttaaaaggattcacaaaaacctttgccacctgtagtgcctccgccttcgttacagtagccctttcatgggccatatatccagcagtttttgatgcctttctatctctctgctcctaatttgtagccaatacaactgtttgtcccttagagggcttgtctttgggataaagtgttggtcctttggtgcaaagaaattcacccttactgggcttgactccaagcccagaattgctctcaccaagcactggcctgaacagtagtgcagttcaaccctcaccggaccgctgacttatctggaagggcattacattttttaaaaaagcttttggtaaacagtattgtgtaaaatagagtttttaaaatactgatatatgcatgttttgtgcatgagtagtagttctttggattcctgttttgatattcctgttgctgaattactgtatgatataaacagtatgtgttttatatatatcattgtgtaaatttaatataacacattatatgctgtactaaatgatttgttttattgctgttaaactttgttatttgttataaaaaccagatgtttacacctataaaaaaaaaaaaaaaaaaaaaaaaaaaaaa

SEQ ID NO: 925 - DNA, 1796 bp, Mus musculus
gacagaggtagctcctccgccggcagcagctcggcgccccggcggtccatggaccggaaccctgggcggaccggcaggaacccgggccgcgaccgccgcctcccggccccaggctcctcctcctcactccccgccgccctctgcggtcgcccgccggccgcgcagccaaccgcgggcctctgggagccacgccgggaggctgtgtggcgggtccgcggccgccgcgggactgaggcctactccgccgcctcttatttctattgtcccggggcctggccctgagcggggctgcgggcgagggccgagctcgccggctccgcggaagatgccggaccaagcccttcaacagatgctggacagaagttgctgggtgtgctttgccaccgatgaagatgatagaacagctgagtgggtgagaccatgcaggtgcagaggatctactaagtgggttcaccaggcttgtctccagcgctgggtagatgaaaagcaaagaggaaacagcacagccagagtggcctgtcctcagtgcaacgccgagtacttaatagtgtttccaaagctgggtccagtggtttatgtcttggatcttgcagatagactgatctcaaaagcttgcccttttgctgcagcaggaataatggttggatctatctattggacagccgtgacttatggagcagtgacagtgatgcaggttgtaggccataaagaagggctggatgttatggagcgagctgaccctttatttcttttgattggacttcctactattcctgtcatgctgatactaggcaaaatgattcgctgggaggactatgtgcttagactatggcgcaaatactcaaataaactacaaatcttgaacagtatatttccagggattggttgtcctgttcctcgaattccagctgaagctaaccctttagcagaccacgtctctgctaccagaattttgtgtggagcccttgtctttcctactattgcgacaatagttggtaaactgatgttcagtagtgttaactcaaatttacaaaggacaatcttgggtggaattgcttttgttgccataaaaggagcatttaaggtttacttcaaacagcagcaatatttacgtcaggcacaccgcaaaatcctaaattatccagagcaagaagaagcataaaactgacttctggttgttctgaggcctctcatcctgacgagtctgttgtgttctgattccatcattaatgcgctagtggagacttgtgacgctgctcctatattctaagagatacaataaagcacgcagggccggggcaagccgcccagtaatcacggacctaaggacacgcgtcagctctgtcatttgtatgttctacttttatggcagtcggctaaaccattattttagcatgggaaacctgagtttgttcatatttttccagacaagaatgtaaagataaaactgtacaaacattaaaagtggacatgttttattctgacgcctcttttgtatatactcagttcagtgttttcttaggaatagcaactcgatgaaggaactgtgagggcttttctcattggtgtaattgattgtatgctacaaaggagcctctgttaacaggaggaagtgtaaactagttctgaataaataacaaacccagaaatgtatgtcagcattgaagtgattatctgaacaaaagagattttgttttcttttcctaaacccatgtgacatctcagatgtgaagggtcagtttccagggcttccaaagcactttttcactattaaactttatttatgcaatgttgac

SEQ ID NO: 926 - DNA, 1006 bp, Mus musculus
gaaagcctcggcgggccactgtccctcgctgcccggactaccgctgccgccccgcgcgccgagtcccgcggtcccagaccccgactcccttcggcttggcccgcgcgccccacgcccggctcgggcggcgcgacgggaggatgagcggcgggcggcggaaggaggagccgcctcagccgcagctggccaacggggccctcaaagtgtccgtgtggagcaaggtgctgcggagcgacgcggcctgggacgacaaggatgaatttttagatgtgatctactggttccgacagatcatcgctctggttttgggtgtcatttggggcgttttgcccttgcgaggcttcttgggaatagcaggattctgcctgatcaatgcaggagttctgtatctctacttcagtaactacctacaaatcgacgaggaagaatatgggggcacgtgggagctcaccaaagaaggctttatgacatcatttgccttgttcatggtcatttggatcatcttttacactgccatccactatgactgatggcatttgctcccgtgtcttctgtccagtccgaaggacccttttactacagcacaggtacatgccaattggggcactcctgccgcgtggaaccgggaagacccacgtctcctgaacttagaatcaacgtgttggacatcagtattttccgcaagggttgtgaaacttttcaaagaaccatccgcctttggggaagcatttctgaatttgtccattgtcaactgtttttccttggataccatcatgtaacagctgtttgccgagtggagctgctgttgaatttgatgcgcctctggatccggatgaaacattgtcttccttggttctccgtcaggtgtacagtttttaaaccatcactgcatctcaagtcttctgaaaacaccatgtgtgtggtccatggtacaatacaagcagccatctaataagtctccattgtaggatgttttcagaaacttgaataaacaaatctttaactg

SEQ ID NO: 927 - DNA, 2055 bp, Mus musculus
ccggctttgatggtgccatccagctggtgtctctaagaggccatcagctgctgagtcaggagcatgtgttgcgggcagtagatgtagcgccttttgcaggccacccttgtacccaggccgtggacaacccctgccttaatgggggctcctgtatcccgagggaagccacttatgagtgcctgtgtcctgggggcttctctgggctgcactgcgagaaggggatagttgagaagtcagtgggggacctagaaacactggcctttgatgggcggacctacatcgagtacctcaatgctgtgactgagagtgagaaggcgctgcagagcaaccactttgagctgagcttacgcactgaggccacgcaggggctggtgctgtggattggaaaggttggagaacgtgcagactacatggctctggccattgtggatgggcacctacaactgagctatgacctaggctcccagccagttgtgctgcgctccactgtgaaggtcaacaccaaccgctggcttcgagtcagggctcacagggagcacagggaaggttcccttcaggtgggcaatgaagcccctgtgactggctcttccccgctgggtgccacacaattggacacagatggagccctgtggcttggaggcctacagaagcttcctgtggggcaggctctccccaaggcctatggcacgggttttgtgggctgtctgcgggacgtggtagtgggccatcgccagctgcatctgctggaggacgctgtcaccaaaccagagctaagaccctgccccactctctgagctgccactagagctgccaccttccctcctgtaattattttctatttttgtaaacttgttgcatttttatatgattttcttgactgcacgttggccagaaggactgctggcctggcctcctttccgtccgggcagctgtgctgcagagacaaaaagtggtgctgagggactcctaagtcggccgtagcacctcgagccctgggctttgaaggcagccttaggacaaactcctctgcctaaggcctcatgcctcagccccttgcactgtatgttcctatatgtctacttgtattgatcctttgggtctcctggcccattgctaggcactgtttgtgtgttattaatgtgtaattgggtgagaactgtgtccctgagcaggaggggctgttggggttgagggggccttcattcaaccaagtaacattgggtcctttttaggtcccacttaagctgctctcctgtgtgtgctgagggccagcctcaccccaggctagcctggacccccagtgctccctgtgacaatactgtgatatcaaaaaactgataataattgggacatcatcttacttcccaaaatgtgtttgcctgtccccggaggctggaagtagaagccaggctacatctaagttgccctgactggccttcagctggccttacccacttcttcagttaccctgaacatggggagtgcatcacgatagggtgtggctgacctccattgcttacctgcctgagtagccagctgcatccatctctcaaagatacctagccaggctcctaaccacgttcttcaaccattgatcttgtttgatttctgatgtggaagtgcggtcattcctggtttaactcacagcaacttttaattggtctaatatgagggcagccctcagttggtccattgtaatgatgatcgtcctcatctgagtgacagttactgcccagtgtccagccaaggacaggtacaggaaggcagagatcactatagagccaaaaatgactgaaactgaagcatccatctgcttctccattccctatctttaaagtccagcacattgggagacaaactaagcaaatctgggatgggggcagtctgaccttcttcctgcttcggtgatccgaggctagagggagctgcatggtatcttgttactaactcagtatgtgtcaatgtcaaataccatgaaataaagtctgaaaaccttaaaaaaaaaaaaaaaaaaaaaaaaaaaaaaaaaaaaaaaaaaaaaaaaaaaaaaaaaaa

SEQ ID NO: 928 - DNA, 1564 bp, Mus musculus
agagagtcggacagacggctgcggtggaacggcggcggctcctcgtccttactccctccgttcttccctccctccttccctttcctggctggcctgaccgcccagcccgacaggcaagcggcagccaggcatggcgttgactgtggatgtggcaggaccagcaccttggggcttccgaattagcgggggcagagatttccacacacccatcattgtgaccaaggtcacagagcggggcaaggctgaagcagctgatctccggcctggcgacatcattgtggccatcaatggacagagtgcagagaacatgctacacgcggaggcccaaagcaagatccgacagagcgcctcacccctaagactgcagctggaccggtcccaaacagcctctcctgggcagaccaatggggagggctccttggaagtgctggcaaccagattccagggctccctgaggacacaccgtgacagccagtcttcccagaggtctgcctgcttcagcccagtctctctcagccccaggccttgcagccccttctccaccccaccccctaccagcccagttgccctttctaaagaggatatgattggctgtagtttccagagtctgacacactctccaggccttgctgctgctcaccacttgacctaccctggccaccccaccagccaacaggccggccacagcagcccaagcgactccgcagtgagggtgctgctccattccccaggacggccctccagccctaggttcagcagtttggatctggaggaagactcagaggtgttcaagatgctgcaggagaaccgccaggggacgggccgccccaaggcagtccagctcttttcgactcttacaggaagccttggaggctgaggagagaggtggcacacctgcctttgtgcccagctcgctgagctcccaggcttccttgcccacctccagggccttggccactccacccaagctccacacctgtgagaaatgcagcgtcaacatctcgaaccaggcggtccgcatccaggaggggaggtaccgacaccctggctgctacacttgcgcagactgtgggctgaacctgaagatgcgcggccacttctgggtgggcaatgagttgtactgcgagaagcatgcccgccagcgctactctatgcctggaactctcaactctcgagcctgagcctcaaggtgctcggcctgtctgcactctcagactctgcagacatgattatactgagagcaagcagggaaggggtgatagcaggtgatagatgatcttacatgaactaaggttggggagtcccctttgtccttgctgggtgaggccaagggttgggactaatgtcaggttgctagtgctaaggacagttccactctctctggccttcctcctgcaggccaggttctgtattacggtctacagtggctgccatgtttgacacgaaagcgtatggggttgggcatggatagaagcatctagaagggaatggtgggcctgaggtaaatgatattcatggtgtgaagtttctaacatatgaactctatatacacgtggataaaatc

SEQ ID NO: 929 - DNA, 1196 bp, Mus musculus
gtcgcttcagtgctcgcctcggcccgcgtggtcgtgccgggatggagtcctccacgtcctcttcgggctcggctctgggcgccgtggaccctcagttgcagcatttcatcgaggtggagacgcagaagcagcgcttccagcagctggtgcaccagatgacggaactttgctgggagaagtgcatggataagcctgggcctaagttggacagtcgggctgaggcctgttttgtgaactgcgttgaacgcttcattgatacaagccagttcatcttaaatcgactggaacagacccagaagtccaaacccgtcttctcagaaagcctttctgactgatctcagcattacctctttggaaaagtagttcaagaattgaagagctgctgatgaggtggttgaagaaatggctatgggggggattaaactcccaattttctttatcgtcttgggacatcttgtcacctgagaatgaacaaagaccaatttttatgtatgggagttgagagtcatgtgtatttggttgtgtttttaaagctaaccatgtgacaataattgacagataaatgaaagtgtgagatgcatataactgtatatgggactgctttctcaaggtccctttactgctttataaaataattttgataggtggactgctttctagaatttgatagtgggaccacatagggtaaatcttgatttgtatgggttcatttctgatttttttagggagatctttgtgtcagtcaaattggcagtggggaaagatcctggcactgtttaactgtgagccttctttcatgtctgacctggagctgaaaaaaagtcctatggagtgttcctgcaatccaacttcttaggttgtctctcccctatactgtgacttacttaactcgcaaattgaaaatatggtctcaaggtagaagaggaagcctgagaatccaaagggctttagtcataaaagaatctagctcatgagtactattcttattaccagacagccacgagaagaagttaacttactatgtatatccagatgcaaaacattcacagatgtgcctaaagaaaccgcgacttaggccagttcagaactaacaactgtttcaggtagaggtgcatgcctgatggtagacatcgattccattaactgcattcttttggtcactgaaataaaagctcgcaagatccaaaaaaaaaaaa

SEQ ID NO: 930 - DNA, 1743 bp, Mus musculus
gagtgtcgcggtgtcccgacgtctggtccgagtggccgccgctgacccgcacactgcggctcttccctctccacctcatgaagccgttggtcgtgttcgttttgggcgggcccggtgcgggcaaggggacccagtgcgcgcgcattgtcgagaaatacggctacacacacctttctgcaggagagcttcttcgtgatgaaaggaagaatccagactcacagtatggtgaacttattgaaaagtacattaaagaaggaaagattgtaccagttgagataaccatcagtttattaaagagggaaatggaccaaacaatggctgccaatgctcagaagaataaattcttgattgatggatttccaagaaatcaagacaaccttcaaggttggaacaaaaccatggatggaaaagcagatgtatcttttgttctgttttttgactgtaataatgagatctgtattgaacgatgtcttgaaaggggaaaaagtagtggtaggagtgacgacaacagagagagcttggaaaagagaattcagacttaccttgaatcaacgaaaccaattattgacttatatgaagaaatggggaaagtcaagaagatagatgcttctaagtctgttgatgaagtttttggtgaagttgtgaagatttttgacaaagaaggctaactaaccctgaaggcatctttgaaatcatgcttgaatattgctttgatagctgctatcacagccccttttaaggcagttttaacctttcaagattacatctcaattaatgtctagaaatatatagtaagacaaattaaattatgtgttttttttttatttgtggtcacagtacacagtgaattcaggtttaaatcattttaggtattatggtgctcacaaaatgaagaagggtatcagctaattcttgtttgtggtaaagactacccctctttatcccttttatgtctgtgccttcggtgagttaattttttttagtatgcatgtatatccctttggtaattgcagtatattgggatttgagatttccacttcctcttgcttcacatttaaaattttcaacctgctaagtgaatttgtggaccaaatttaaaggaactttatgtgtagctggctcttgctcaaggtgtttagtaaacatactcataaaatggactcctagcaatgctctgtttatcagatgactgaccatttcctgttgaaagttaaaacttagagactgatttactacagcttgtgcaacgttgtatgatagtgcatagtctttgcttccaaggtttgagtcagggcacggggcttcagagcctgggcaggattgtcagctttcttctgacatagtctgtggggcaagggtcacaagtagtgacttgtattcctgtgctctgtgacacaggactgactagtcatcataaagtgatgtaacaagagttcctaccagtagacccttgacatgcattcactagtttatggtaatttgattcagttcttgttttagtaatagttaaaaagtttttttgttttgttttcttagactaaatatagagttagagtaaattagataaagcaatctaatggttaaaattcccatttgtattttattttctggaatatgtttttcatggttacttgttttaaaagattttaaaaatcattgcactttggtcagaaaaaataataaatatatcttataaatgtttgattcccttactgcttgctttttcaataaagtttgaagtcc

SEQ ID NO: 931 - DNA, 2795 bp, Mus musculus
ggcttcccgaagtctcctgctgctagtaagaggaagtactgcagggctgatgtcgcgaccttgtggactcccggagcctgtcaggtaaagctctccggctccaagcaccggagcctgaccaagccgggctctgatcattgcacaggccctatctatccaccctgcagttcaggctcctcagggctcccctccagccggaactttgctcttctgctcctggggacagagttggggttttcacctaacaagattcacacacgcgcaggcgtgtcctcatctcccagggtcacagcgtttcccttttgccaatccgagtcactcttcaggaacccccacagcggaacctcagaaccccaacatggccagacagttatgcatcagccaaacagagttcaagttcctgggtggcttcttccacccataaccgaggttcttgctcaaggcattgctgctcccagcctggcctcagtactacaaggctgttctgagaactcaacacagaatgggccagccctgctcctattttgatggtattgtctcgacacaattagacttttattttcctgctgcctctgggcagttctaggggttgtttaaaagccttcttcctctttggctggctaattgtcttttctggacagaggcctgtgagtatcagctgtactgtgtgccagctttcattggccctttccaggacatttgattggtttgcagccagctctctgtcacatggatgggatggggcttgtgggggggggggcggtgtttgagaataagcaaacccctctaaccaaaggcttgttaaggatgcgctagtgattaacactcacagctcagggccaccttgttcatgaactggccactttacctgcacggctaccctcgagcaagttacagatgaggacttctcgaggctccaggagatgatgggtagcccaggctgatctcaaactttcggtagtcgttctgcctcagcttctccaagcactaggaggttgcaggtgtgagctagttaccgcacccggctccacccagcttttgagatggaatgagttctggctgacctaaacatctggttttgcacagtcatactgcggaatagtgagaactaatgttacactttctacagccactgtgacaaagtcctaccaactggatgacttgaggaatagcaattagcctctcttgggtctgaaggacccataatcaggtctgaagtccataatcaaggtattagcaggcacacaatcagaagtctctggggatgttccattgccccttccagcttctggtaactttcgatcatccttggcttatagcagcagattttgggtccccattcccatctgtctgtctgtctgtctgtctctctgtgtgtgtgtgtgtgtgtgtgtgtgtgtgtgtgtgtgtgtgtgtgtgtacatctatgtctatagcctcttccttcaaagacacctgttgttggattgggagttctccctacattcaggatggtgcaatctcaagagccttaactacttacatctgcaaagaacccatttctgaataacaccacattctcaggctctatgttgacatgaataaggtggtcactgtcacacaccatgcaaacaagcagcataaagcatagagctcatccgagggactcggaaagagccacatgaaaacagtcccatttgtggtgctaaatctaaactttggcggtaactatcagtgatggtacagtcccttgagctgccacagaggcaaccttgtcactttggaagttggatcaagcgctcaccctcgggcctcacctcaaagtcaccgagtcaggttttgggaaacaatctgatagatgatgccaaggctcgcctgagaaagtctgatgtcgggaccagatattctcacctgtcctctaataaattctctgtccttgtaccactgctggccagaggaggaaagttgtatttgatgttcacggtccgctcagacaagctgaaaagggaacctggagaagtctgcttccctggaggaaagagggacccggtggacacagatgacacagccactgctctccgtgaagcccaggaggaggtggggctgcatccccaccaagtggaggtggtctctcacctggtgccatacgtatttgataatgatgcactggtaacccccgtagtgggttttctagaccacaacttccaggcccaacctaatgctgatgaagtgaaggaagtcttctttgtgcctttggactatttcctccatccccaagtctactaccagaagcaaatcacacagtctggccgtgatttcatcatgcattgcttcgagtacaaagaccctgagactggtgtgaactacctaatccagggaatgacctcgaaactggctgtgttggtggccttaattattttggaacaaagtcctgccttcaagattgattttgatctccatgacctgataccgtcttgtgaaaggaccttcctttggagatattctttaagcaagttgtgaagaccctgaaacccaaaagaacgtacatgaggtttttgtgtgagcttatgctcagaacaacagtgtttagcaagtggcatctgacaggtgtgaatattttcctacaatgtggctgtgagatccttgcctgacttcctgttgctgctttagaacactaaaagtttttcaaaactggaaaaatgcactggcaggggagaataattttacccatttaaaaaaatggcacgatttttagtcatattagggaaatttgtcacatagtaggcccttaataaatatttgtcaaatatatggct

SEQ ID NO: 932 - DNA, 2440 bp, Mus musculus
gggtgttgccgctgtcgccgcggtgagggaagtggacgcgatggccgggtccgcgtgggtgtccaaggtctctcggctgctgggtgcattccacaacacatatacaggtgacaagaggttttgctggtggtgttcagacagtaactttaattcctggagatggaattggcccagaaatttcagcctcagtcatgaagatttttgatgctgccaaagcacctattcagtgggaggagcgcaatgtcacagcaattcaaggaccaggaggaaagtggatgatccctccagaagccaaggagtccatggataagaacaagatgggcttgaaaggcccactaaagaccccaatagccgctggccatccatctatgaatctgttgcttcgtaagacatttgacctttatgccaatgtccggccatgtgtctcaattgaaggttataaaaccccttacacggatgtaaatatcgtcaccatccgagagaacacggaaggagaatacagtggaattgagcatgtgatcgttgatggggttgtgcagagcatcaagctcatcaccgaagaagcaagcaagcgcattgcagagtttgccttcgagtacgctcggaacaaccaccggagcaacgtcacagctgtgcacaaagctaacatcatgaggatgtcagatgggctctttctgcaaaaatgcagggaagttgcggagaactgtaaagacattaaatttaacgagatgtaccttgatactgtatgtttaaatatggtacaagacccatcccagtttgatgttcttgtcatgccaaatttatacggagacatccttagtgatctgtgtgcaggactgattggaggtcttggggtgactccaagtggcaatattggagccaacggtgttgccatctttgaatcggttcatggaacagccccggacattgcaggcaaggacatggccaaccccacggccctcctgcttagtgctgtgatgatgcttcgccacatgggactttttgaccatgcagcaaaaatcgaggctgcatgttttgctacaattaaggatggaaagagcttaacaaaagatctgggaggcaacgcgaagtgctctgacttcacagaagaaatctgtcgtagagtcaaagacttagattagcactcctgctggtggatttgctgcagtcagtcaatcactccaaaaggataccctgtaatcctccttgagggcgcccaccattggtttgcttgcttcttgacagagtacgttttttgaatctggccttttcttaacaaaacccttgcaatggatgcacatgatggccccaggccttcattcaaagggttttcccaagtgctggttgtatttattgtccgtctggtaaaccttattttgtaaactgtaagtgaactgtatcatttatcattgttaacccattttacacttcaggcaaaatcattttcctcaactgtaaatattctgatacagaattaataagagaagatatttaactttttaacaaaagccctggatttttggtttatgaaaaacaaactgggaataaaacagggttttaacaatcgcacaagataacattattctaatactaatgggtacaaaagaaatttactgggaaagttcacagcaaaaaaatggtatatttcttaaaaatatggaaataaagtatttgtcctatacatgaattactattaataaaaatgtaagctccaagaaatccataatgaatgatgtaattttgttactacatcggtaatccttgtcaaggccccggatgctctctgtgtatttgattcttttgttaccttgagattcactattttgggggaagagctttcagataagggagatcactcctcactagacagatcgtcagcattgcgagctgtcagccatgagagccagccactgcagatcccctcccacgtggccacactccagccagttgttgcaggtgaccctggaaaggcctggctgccccttgactttccctaaagcaaccagtcactgccttctgccccagtagcacccattacagacttaattgccgaaggtggagctgactcagccccacgctcatacaaatcaggccaagcgggggcctgtgttaccagctgctgaccatcaggttctgcccctcattcttcccacagcctctgctccacagcatgaacctagcctttggcccacaccaaagccaagctgtcttcccttagcccttgcactagtttgcaaactcgtggctttgcataatgtaccctggtcccaaggggatttcttaacaacagatgtccctgtctgggtcatttttttaaagcttttatttggacttacaatcttctgtgtattttactttaaaactgctgctttccctgtctcactggattgttctggttagcagtggctttgggttcacagtaataaagaacttaagaact

SEQ ID NO: 933 - DNA, 844 bp, Mus musculus
ggcacgaggagcgggcgcagagctcggcaaggcgctgggacggtggggctctgcttgccatggccccgggcctgcggggcctcccgcggtgcggcctctggctgctgctggctcaccatctcttcatggtcactgcctgccgggaccctgactatgggactctcatccaggagctgtgcctcagccgcttcaaggagaacatggagactattgggaagacgctatggtgtgactggggaaagaccatacagagctatggggagctcacttactgcaccaagcacgtggcgcacacgattggctgtttctggcccaatccggaagtggacagattcttcatcgctgtccaccatcgatacttcagcaagtgccccatctcgggcagggccctgcgggaccctcccaacagcatcctctgccctttcattgcgctccccattacggtcacgctgctcatgactgcactggtggtctggaggagcaagcgcacagagggcatcgtgtaggtatcccaggtgatgagggattggggaaccatgggcctagcccagcaacagcatcaggagcaggtcccaccttgcatcctgctctagcctagttagcacaggacttgagagtggctctgcattaagctgaatatgccctagccagaggcttctagcaggggagcaggggcctgcctctgcttacctctgagattgttctaagcaccaggtctctggtacacttcatcaccactgtgggcattctgaactccaaggaagactgcacagatgtgtttgtagatgcacagtttgtgattaaaagagtattcttaaacctggaaaaaaaaaaaaaaaaaaaa

SEQ ID NO: 934 - DNA, 318 bp, Mus musculus
atgggtgatgttgaaaaaggcaagaagatttttgttcagaagtgtgcccagtgccacactgtggaaaagggaggcaagcataagactggaccaaatctccacggtctgttcgggcggaagacaggccaggctgctggattctcttacacagatgccaacaagaacaaaggcatcacctggggagaggataccctgatggagtatttggagaatcccaaaaagtacatccctggaacaaaaatgatcttcgctggaattaagaagaagggagaaagggcagacctaatagcttatcttaaaaaggctactaatgagtaa

SEQ ID NO: 935 - DNA, 2998 bp, Mus musculus
ctgtcagccaactgattgcagatgtggttggcattggaggaaccagattccagcagtccttgtctatcatcaacaactgtgccaacagcgaccggatcatcaagcacaccagcttttcctctgatgtgaaagatttgactaagaggatccgcacagtcctgatggccacagcccagatgaaggagcacgagaacgacccggagatgctggtggacctccagtacagcctggctaagtcctacgccagcacccctgagctcaggaagacgtggctagacagtatggcgaggattcacgttaaaaatggggacctctcagaggcggcaatgtgctatgtccacgtgacagccttggtggcagaatatctcacacggaaaggcatgttcagacaggggtgcacagccttcagggttatcacaccaaacatcgatgaagaggcttccatgatggaagacgtcggcatgcaggacgtccatttcaacgaggatgtgctgatggagctgctggagcagtgtgcggatggactttggaaggcggagcgctatgagctgatcgctgacatctataagctcatcatccccatctacgaaaagcggagggatttcgagagactagcccatctgtatgacacgctacaccgcgcatacagcaaagtgacagaggtcatgcactcgggccgcaggctcctggggacctacttccgggtggctttctttggacaggggttcttcgaagacgaagatgggaaggaatacatctacaaagagcccaagctcacgcctctgtcagagatttctcagagactccttaaactttactcggataaatttggttccgaaaatgtcaaaatgatacaggattctggcaaggtcaacccgaaggatctggactccaagtttgcctacatccaggtgacccacgtgaccccattctttgacgaaaaggagttacaagagaggagaacagagtttgaacgatgtcacaacatccggcgcttcatgtttgagatgcccttcacccagaccgggaagaggcagggtggcgtggaggagcagtgtaagcggcggaccatcctgacagcaatacactgcttcccctacgtgaagaagcggatccctgtcatgtaccagcaccacactgacctgaaccccattgaggtggccatcgatgaaatgagcaagaaggtggccgagctccgccagctctgctcgtcggctgaagtggatatgatcaaactgcagctcaaactgcagggcagtgtgagcgtccaggtcaatgctggtccgctagcatatgcccgagccttcctcgatgacaccaacacaaaaagataccctgacaataaggtgaaactgctgaaggaagttttcaggcaatttgtggaagcttgtggtcaagccttggcagtgaacgagcgtctcattaaagaagaccaactggagtaccaggaagagatgaaggccaactacagggagatggccaaggagctctccgacatcatgcgtgagcagatttgccccctggaggagaagacaagcgtgctaccaaattccctgcacatcttcaacgccatcagcgggacaccaacaagcacagtggttcaagggttgaccagctcgtcctcagttgtgtgattttacctcatgaaccgtgtgtggggacatgctttgtcatgtgcaaactcaggatgacttccagagctaatcactggtgtggccaagcacaggaagaagccatggggaatgggagagagaaggagcctggactgtgatatttaatagcagattttataggagtcgggggaaggtgcacatagttttttaaatctcactggcaatatttagttttcctcatgtcttaacaggtatatgtggatactcttgagctgaagttcagttttattcttcttacagtatagtattaaaataaatggtctaaaggaaaagagggaaagtgtgctgggacacctgtggcaggtgtcctgggatacctgtagcaggtgtcctgggacacctgtagcaggtgtgctgggacacctgtagcaggtgctgggacacctgtagcaggtgttgctgggactgggacacctgtagcaggtgttgctgggactgggacacctgtaacaggtgttgctgggactgggacacctgtagcaggtgttgctgggactgggacacctgtagaaggtgtcctgggactgggacacctgtagcagacaaagcagcactgaacctggggttggggactaagctggaaaaatcttgaaaatatttttctccctggggcacattcaggttgagtacaagaactatttttgtgtctaattttgatgacggaaaggaattgcctattgtaattttgtactagtgaatgaggagacttagagcctttatattcatgccttgtgttggcaacatgagcacttcagaagctgagtgtgagcctaagcctagtcagcattatagaaccaaaggcctgtactagcaaacacacccatgctaaaacctaaaaccccatgtacatactgactgtcaatacagcctccttgctatgtccacacactcaccacatttctacacttttaatacgtcagtgtccatgttaagtttattattcgtggcccatttgtgctgttctcagtatatgcaaacacattggacttcactgtttattcttgtacataagaagtgcaatatggagatgtatacagtctttgctatattaggtttataaactgttttaaaaaaattcatccttttgccaaaatgatgaactaagtgattggtaaaccctaagccctgtatgagtggagggatagtttaaagttttcaccatgttatattttcttttgagactttaatttagtaattttatatttgggaaaaaaaataaaggtttttaatttaactggaatcactgccctgctgtaattaaatatcctgtaccccaactgtattaaaaataacattgctgattttctggtaataaaaaaaaaaaa

SEQ ID NO: 936 - DNA, 543 bp, Mus musculus
gcttgataccaattggttgttcatgatacatacttttctgcaagaaagctttgaatgaaataaaggcatagagaggaaaacttggaaaaaccacaatatattaggatgtcacttaattaaacttgtatgtgattggttagttgttttagttacagtttcaaatcttatagatacagaaattctacttctttctagaacaaacttatatgtccttacatgacagtgggggagacaacagatttctaactgctgagctttttacttctgaggagagtcaacattgttacttcttgtccttcatagtctagaattcatctgggtcattagcttctccaatttgattgctagggctatgtttcctttaatcttcaactttcctgacataaatgccatggttggctttaatttccctgaaaacattttgacaaaatcatcagtggccatactcatcaccacgtctgcccggtcagagggctctccgtgtccaaccttcccgcctttgctctttagatcaagaaaccacgtaccaccatcttcacctga

SEQ ID NO: 937 - DNA, 980 bp, Mus musculus
gagtgggtgaagtcagagaagctgacgcaggcgctgcaggggccactaatgaggctgtgtgcctggtacctgtacggtgagaagcaccgaggctacgcgctcaacccagtggccaacttccatctgcagaatggggctgtgatagcaccgaggctacgcctcaacccagtggccaacttccatctgcagaatggggctgtgatgtggcgtatcaactggatggctgacagcagcctcaaaggcctcaccagctcatgcggcctcatggtcaactaccgctactacctggaggagacaggccccaacagtatctcctacctgggctccaagaacatcaaagcttccgagcagatcctcagcctggtagcccagttccagaacaacagcaaactctagggacagccttcccaaagcttgggccccttcttagaaaggaggctgtgttctgatgggccaggcttacttaccacagaatccttttcagggaggccacagcggtgctgtcctctgacctcagcaggcactcaggaggccacaccttggctgtcactgtggtggcccactcactgctaggaggcggtggcggactgggtgctggggttccggggatcccactgtgctgctcccccacagcctgtgccttcagaaagctctacagatgccaccacaggccacccaggacacagcccagagcacagaccttttggagtatgaagagctgacagtcatgttctctctatttgggagaggactaagatctgtactgtggctaataccgcagcttaaagctcagactagagagagtttgtgccgtgcacagggtgtgtttggcacctcagggatgctgctgctgcttgaggccagagttggcttacagggtttaaatgagatcccagttcataatgaactgaacggtaaaggacagatttgttctgtaagcattaaacatgattgttcactgtaaaaaaaaaaaaaaaaaa

SEQ ID NO: 938 - DNA, 1870 bp, Mus musculus
ttctgcaccagagcaagtctaagtctgagccggctcccccagaactccagctactgggtcttgaactcctgcgttccggagtcctagcgttgctgcacccaaggccacccccagaatcatgcgctgcgctccgacagcaggcgctgccctggtgctatgcgcggctactgcggggcttttgagcgcgcaagggcgccctgcacagccagagccaccgcgctttgcatcctgggacgagatgaacttgctggctcacgggctgctacagctcggccatgggctgcgcgaacacgtggagcgcacccgtggacagctgggcgcgctggagcgccgcatggctgcctgtggtaacgcttgtcaggggcccaagggaaaagatgcacccttcaaagactccgaggatagagtccctgaaggccagactcctgagactctgcagagtttgcagactcagctcaaggctcaaaacagcaagatccagcaattgttccagaaggtggcccagcagcagagatacctatcaaagcagaatctgagaatacagaatcttcagagccagatagacctcttggcccccacgcacctagacaatggagtagacaagacttcgaggggaaagaggcttcccaagatgacccagctcattggcttgactcccaacgccacccacttacacaggccgccccgggactgccaggaactcttccaagaaggggagcggcacagtggacttttccagatccagcctctggggtctccaccatttttggtcaactgtgagatgacttcagatggaggctggacagtgattcagagacgcctgaacggctctgtggacttcaaccagtcctgggaagcctacaaggatggcttcggagatccccaaggcgagttctggctgggcctggaaaagatgcacagcatcacaggggaccgaggaagccaattggctgtgcagctccaggactgggatggcaatgccaaattgctccaatttcccatccatttggggggtgaggacacagcctacagcctgcagctcactgagcccacggccaatgagctgggtgccaccaatgtttcccccaatggcctttccctgcccttctctacttgggaccaagaccatgacctccgtggggaccttaactgtgccaagagcctctctggtggctggtggtttggtacctgtagccattccaatctcaatggacaatacttccactctatcccacggcaacggcaggagcgtaaaaagggtatcttctggaaaacatggaagggccgctactatcctctgcaggctaccaccctgctgatccagcccatggaggctacagcagcctcttagcctcctcactggagcctggttccaggcctaagaagacagtgactttggttgtggccctgagatttggccattctctgctgggggcaggagctctaagtagggctatctgcgtcttgtggacaaagaagaagcccgtaactggagagactggaggaccccttttccgtgttggggtctgcaagcattgttgtctgaaacagtcagagcaacaggaaacaaatggcccagatccagaaaacatgggctcgaggggcactgaatatcacttctcgcctaccagagaagttggggatgcagagggaccactacagtccaaactagctgggcccttaatggcggactcagtcatattgactgactggagacagggtgccaggagccctggatacactcatggtgcttttttaggtgctgtggatgcacaggtgctaactgtggttcccaggcacagctcacagcattcttacaataaaaacaacctcagaaccaaaaaaaaaaaaaaaaaaaaaaaaaaaaaaa

SEQ ID NO: 939 - DNA, 2154 bp, Mus musculus
gcagacacacaacctttgggcaggcgagacgcgaagagaagaggtcagtggtcaagacttcggcggcggctttggagatgcagtcggctcggatgaccccgagtgtggggcgacagctgctgcggctgggggcccgaagctcgcgatctactactgtgcttcagggacaaccccggcctatctctgcccagcgactttatgccagggaggccactcaggcagttctggacaagccagaaaccctctcctctgatgcttccaccagagaaaaaccagccagggcagaatcgaagtcctttgctgtggggatgttcaaaggccagcttaccattgatcaggtgttcccatacccatctgtgctcagtgaagaacaggcacaatttctcaaagagctggtgggaccagtggcccggttctttgaggaagtgaatgaccctgccaagaacgacgccttggagaaggtggaggacgacactttgcagggactcaaggaactgggggcatttggcctgcaagtacccagcgagctgggtggtttgggcctctctaatacccagtatgctcgcttggcagagattatgggcatgcatgaccttggtgttagcgttaccctgggagctcatcagagcatcggtttcaaaggcatcttgctctatggcacaaaggcccagagagaaaaataccttcccagagtggcatctgggcaggctttggcctgctttctgcctaacagagccctcgagtggatccgatgtagcctccatccgaagctcagccatacccagcccctgtggaaaatattacactctcaatgggagcaagatctggatcagtaatgggggcctggctgacattttcactgtctttgccaagacgccaattaaagatgcagccacgggggccgtgaaagagaagatcacagcttttgtagtggaaaggagcttcggaggggttacccatgggctccctgaaaagaagatgggcatcaaagcatctaacacgtcagaggtgtactttgatggagtgaaggtgccatcagagaatgtgctaggagaggtgggagatggcttcaaggttgctgtcaacatcctcaacaacggaagattcgggatggctgcaaccctcgcaggcaccatgaaatccctcattgccaaggcggttgatcatgctactaatcgtacccagtttggggacaaaattcacaactttggggtgatccaggaaaagctggctcggatggctaatctgcagtatgtgactgagtccatggcttacatgctgagtgccaacatggaccagggattcaaagacttccagatagaagccgccatcagcaaaatcttttgctcggaggcggcctggaaagtggcagatgagtgcatccaaataatggggggcatgggcttcatgaaggaaccaggggtggagcgtgtgctccgagatattcgaatcttccggatctttgaaggggcaaatgacattcttcgactgtttgtggctctgcaaggctgtatggacaaaggaaaggaactcactgggctgggcaatgccctgaagaatccttttggaaacgttggcctcctgatgggagaagcaggcaaacagctgagacggaggacaggaatcggcagtggtttgagtctgtcagggattgtccacccagagttaagtcgcagtggtgaactggcagtgcaggctctggatcaatttgccaccgtggtggaggccaagctggtgaaacacaagaaagggattgtcaacgagcagttcctgctgcagcgactggcggacggcgccattgacctctatgccatggtggtggttctgtccagagcctcaaggtccctgagtgagggctacccgacggcacagcatgagaaaatgctctgtgatagctggtgcattgaggctgcaactcggatccgagaaaacatggccagtctgcagtccagccctcagcatcaggagctcttccggaacttcagaagcatctccaaggccatggtggagaatggtggcctggtcaccggtaaccccctgggaatctgagactcccaatcaggccctggcaaggtcatgtgccttctctgatgccaaaaccctttatgggggtgatggagtacttattgccttaacaataatttctaccaagtc

SEQ ID NO: 940 - DNA, 1138 bp, Mus musculus
cgcacagctccggagctccagaaatggctaccgcgatgacagtttccagtaaactccgcggcctgctgatgcagcagctgagaggtaccagccagctgtacttcaacatcagccttcgatctctgagctcctctgcacaagaggcctccaagagagcccccgaggaagtctcagaccacaactatgagtctattcaagtcacaagtgcccagaagcatgttctccacgtgcagctaaaccggccagagaagaggaatgccatgaacagggctttctggagggagttggtggaatgcttccaaaagatatccaaagactcggactgccgggctgttgtagtctccggtgcaggaaagatgttcacttcaggtattgacctcatggacatggcctccgaactcatgcagccctcaggagatgatgcggcccgcatagcctggtacctccgtgacctcatcagcaagtaccagaagaccttcactgtcattgagaagtgccccaagccagtgattgctgccattcacggaggctgcattggcggaggtgtggacctcgtttctgcctgtgacattcgctactgcactcaggatgcttttttccagatcaaggaggtagatatgggcttggctgctgatgtaggaacactgcagagactgcccaaggtcatcgggaaccagagcctggtcaacgagctgaccttctctgcccgcaagatgatggctgacgaggccctggacagtgggctggtcagccgcgtgttccaagataaggacgccatgctgaatgcagcctttgccctggcggctgatatttccagcaagagccctgtggctgtgcaggggtcaaaaatcaatctcatctactcccgagaccattctgtggacgagagccttgactacatggccacctggaacatgagcatgctgcagacccaggacatcatcaaatcagtccaggcagccatggagaagagggacacaaaaagcatcaccttctccaagctctgaatgtcttccggaccctgagagaggaggactccacggagccaggcctcctcccatggggtgtcccagtgtataactttatgacttagttcttcatttcctggggccttatcttcactgtgaacaataaagtt

SEQ ID NO: 941 - DNA, 3187 bp, Mus musculus
cggagctcagggctgaagatggttcctctcctgcccttatatgctctgctgctgctgttcctgtgtgatattaaccctgcaaatgccaacagttactatgacaaggtcctggctcacagccgcatcaggggtcgggatcagggcccaaacgtctgtgccctccagcaaattctgggcaccaaaaagaaatacttcagctcctgtaagaactggtatcaaggtgctatctgcgggaagaaaaccactgtgctatatgaatgctgccctggctatatgagaatggaagggatgaaaggctgccccgcagtgatgcctattgaccatgtttatggcacgctgggcattgtgggagccactaccactcagcactactccgatgtctcgaagctgagagaagagattgaaggaaaagggtcatacacgtacttcgcgccgagtaacgaggcttgggagaacctggattctgacattcgcagaggactggagaacaatgtcaatgttgagctactgaatgccttacacagccacatggttaataagagaatgttaaccaaggacctgaaacacggcatggttattccttcaatgtacaacaatctggggctttttattaaccattatcccaatggggttgtcactgtgaactgtgctcgagtcatccatgggaaccagattgccacaaatggtgtcgtccatgtcattgaccgtgtcctgacacaaattggtacctccatccaagacttccttgaagcagaagacgacctttcatcatttagagcagccgccatcacctctgacctcttggagtcccttggaagagatggtcacttcacgctctttgctcccaccaatgaagctttcgagaaactgccacgaggtgtcctagaaaggatcatgggagacaaagtggcttctgaagctctcatgaagtaccacatcctaaataccctccagtgctctgaggccatcactggaggagccgtgtttgagaccatggaaggaaacactattgagatagggtgcgaaggggacagtatctccattaacggaatcaagatggtgaacaagaaagacattgtgactaagaatggtgtcatccacctgattgatgaagtcctcattcctgattctgccaaacaagttattgagctggctggaaaacagcaaaccactttcaccgacctggtagcccaattaggcttggcatcctctctgaagccagatggagagtacaccttattagcacctgtgaacaatgcgttctctgatgacactctgagcatggaccaacgccttcttaagctaattctgcaaaatcacatattgaaagtaaaagttggccttagcgacctctacaatggacagatactggaaaccattggaggcaaacaactccgagtctttgtgtatcggacggctatctgcatagaaaactcatgcatggtgagaggaagcaagcagggaaggaatggtgccattcacatattccgagaaatcatccaaccagcagagaaatccctgcacgacaagctgcggcaagacaagcgctttagcatcttcctcagcctccttgaagctgcagatttgaaagatctcctgacacagcccggagattggaccttgtttgcaccaaccaatgatgccttcaagggaatgactagcgaagaaagggagcttctgattggggataaaaatgctctccaaaacatcattctttatcacctgaccccaggggtttatattggaaagggattcgaacccggagtcactaatatcctgaagaccacacagggaagcaaaatctatctgaaaggagtaaacgaaacgcttctagtgaatgagttgaagtccaaagaatctgacatcatgacgacaaatggtgtcatccacgtcgtggacaaactcctctatccagcagatattccagttggaaatgatcagctcttggaattactgaacaaactgataaaatacatccaaatcaagtttgttcgtggcagcaccttcaaagaaatccccatgactgtctatagacctgcaatgacgaagatccaaattgaaggtgatcccgacttcaggctgattaaagaaggcgaaacggtgacagaagtgatccacggagagccagtcattaaaaagtacaccaaaatcatagatggagttcctgttgaaataactgaaaaacagactcgggaagaacgaatcattacaggtcctgagataaaatataccaggatttccacaggaggtggagaaacaggagagaccttgcagaaattcttgcaaaaagaggtctccaaggtcacaaagttcattgaaggtggcgatggtcacttatttgaagatgaggagattaaaagactgcttcagggagacacacctgcaaagaagataccagccaacaaaagggttcaagggcctagaagacgatcaagagaaggccgttctcagtgaaaacccagaggccagaccacagagtttatataatcctaaatcaacgatctgattttaagggaaattgtaagagccaccacactgacttcagaatctgaaatgacaaccaacagaagccaatcttcaagcaagtccaaacacagagttcatgtctttgtttctgcatgagaaatataagaaaatgatagctagtctcctgtggggtaggaactgaggaaatataggaccatgcagggattttatctcaatgagaaaacttctgattaaagtagaatccaccaaagaacatcattgtgactgggtccatacagctaagtctttgcacagtaaaaaccttccgcctcaggaagaggctggaaaaacccaaagcacacagttacctttccaggggaggctaaggtatcaaaaggggtgttcagttatacaacatgcaaacaaacctaccaaattacgaacagtggtgttacatatttctcatgcaatgtgggtttcctgctaaattttgttatttttacacttgatttatatcctcgagatgattgtcataagcttcttgcaatacaaatgttttctctcaaacatttcaataaaaccattcttcaggtataaagagaattactgcagagttggtaattcagaaaactcaaggtttaagttaaaagtgagtttagactttggaataggacttcatacctttttttattgttaacaagtactcaataaagtaaactga

SEQ ID NO: 942 - DNA, 1871 bp, Mus musculus
ggtcctgcgagtttagccatggcgctcagctttctctctccaagcctttcccgcctcggcctgtgggcttctgtagtgatcctgatggtaaccgtcctgaagctcctcagcctgctgtttcggaggcagaagctggccagggctttggacagcttcccagggccccccaagcactggctttttggtcatgcccttgagatccagaagacaggaggcctggacaaggtggtaacttggaccgaacagttcccctatgcccacccactctggcttggacaatttattgttttcctgaacatctatgagcctgactatgctaaagctgtatacagccgaggggacccgaaggctgcatatgtgtatgacttcttcctccagtggatcggaaaaggcctactggttctggaagggccaaaatggttccagcaccgcaagctgctcacacctggcttccattatgatgtgctgaagccctatgtggccatatttgctgagtccacacgggtgatgctggacaagtgggagaaaaaggctagtgagaataagagctttgacatcttctgtgacgtgggccacatggcactggacaccctcatgaagtgcacctttggcaaaggagacagcggcctaagccacagtgacaacagctactacctggcagttagtgacctcacactgctgatgcagcagcgcatcgactccttccagtaccataatgacttcatttactggctcacaccacatggccgccgtttcttgcgggcctgccagatagcccatgaccatacagatcatgtcatcaggcagcggaaggcagctctgcaggatgagaaggagcagaaaaagcttcaggagcggagacacctggacttcctcgacattctcctgggtgcccgggatgaaagtgggatcaagttgtcagatgcagacctccgggctgaagtggacacattcatgttcgaaggccacgacaccaccactagtggtatctcttggtttctctactgcatggccctttatcctatgcaccagcagcgatgtagggaggaggtccgtgagatcctaggggaccgggactccttccagtgggatgatctggcccagatgacctacctgaccatgtgcatgaaggagtgcttccgcctctacccacctgtaccccaagtgtaccgccagctcagcaagccagtaacctttgtggatggccgctctctacctgcaggcagcctgatctctctgcacatctatgccctccatcggaacagtgctgtgtggcctgacccagaggtctttgacccactgcgcttttctcctgagaatatgacaggacggcatccctttgccttcatgcctttttctgcagggcccaggaattgcattgggcaacagtttgccatgaacgagatgaaggtggtcacagccctctgtttgctgcgctttgaattctctccagatccctcaaagatccccattaaggtcccccagctgatcttgcgctccaaaaatggcatccacctctacctgaagccactgggccctgggtctggaaagtaggtcttaggagagcaaggatatggagtcattgtggatccctgcctgtggggggtttgtgagataaaagcatgcacattgagagtatcctggaagacattctcttgtaaacatgtgtgtggaatgattcaatgcctgggctttcaaactcattccttcactccacaaatatttgctgaatgtttccctgtcttgagaaacttcatttatttctcataactgcatttatttagccatctcagtgtgcattttggatataatagacataaggaaaattgcttaaactaaatctgtacaaaataaataatactttaaaaagc

SEQ ID NO: 943 - DNA, 1876 bp, Mus musculus
aattcgtctcatctatagggcgaatatgggtccgtgtgccccccccccccccgcgtggtgatctggaccgtgcggacttgctcgtccctcagctctcctgttaggcgtctcttttctccaggaggaaaaaatgggagcagcagtagtggatccgcaacagagcgtggtgatgagagtggccaacctgcccttggtgagctctacctacgaccttgtgtcctccgcttatgtcagtacaaaggatcagtacccgtatttgagatccgtgtgtgagatggccgagaagggcgtgaagaccgtgacctctgcggccatgacaagtgccctgcccatcatccagaagctggagccacaaattgcggttgccaatacctatgcctgcaaggggctagacaggatggaggaaagactgcctattctgaaccagccaacgtccgagattgttgccagtgccagaggtgccgtaactggggcgaaggatgtggtgacgactaccatggctggagccaaggattctgtagccagcacagtctcaggggtggtggataagaccaaaggagcagtgactggcagcgtggaaaggaccaagtctgtggtcaatggcagcatcaatacagttttggggatggtgcagttcatgaacagtggagtagataatgccatcaccaagtcggagctgctggtagaccagtacttccctctcactcaggaggagctggagatggaagcaaaaaaggtggaaggatttgatatggttcagaagccgagcaactatgaacggctggagtccctgtctaccaagctctgctctcgggcttatcaccaggctctcagcagggttaaagaggccaaacaaaagagccaggagaccatttctcagctccactccactgtccacctgattgaattcgccaggaagaatatgcacagtgccaaccagaaaattcagggtgctcaggataagctctatgtctcgtgggtggagtggaagagaagcatcggctacgacgacacccatgagtcccactgtgttgagcacatcgagtcacgtactctggctatcgcccgcaacctgacccagcagctccagactacatgccagactgtcctggtcaacgcccaagggttaccacagaacattcaagatcaggccaaacacttgggggtgatggcaggcgacatctactccgtattccgcaatgctgcctcctttaaggaagtgtccgatggcgtcctcacatctagcaaggggcagctgcagaaaatgaaggaatccttagatgaagttatggattactttgttaacaacacgcctctcaactggctggtaggtcccttttatcctcagtctaccgaggtgaacaaggccagcctgaaggtccagcagtctgaggtcaaagctcagtaaacccctccttgtcaccagagcatgatgttgctggccagatgaccccttttgctgtattgaaattaacttggtagatggctttagcttagaaaagcagcttcttagaaccaagggcctcattatggtcactcacagctcagttatggtcttgccccagctggccctggcacaggagttctcttacctggctggtgagtggcctgtgttagtcttgtgaggacctcgaggaacctaaaagctcagatgcacttacagtcttgtctgtggcctttgtattgttattggctgtaaacgtctgtctggaccgaataaagattcattcacgtggcctctgctcctgtgtggtctgagcaggcttcatctctgtttctctcaaggcgtgtgcttgggcagcttgaggtgaggtttttccttccctgtgaagaaataccaacctttggacccaataacattcataactggtagagt

SEQ ID NO: 944 - DNA, 2772 bp, Mus musculus
cgtagggagagagactggtgctcgagggacagggctagcccggacgcgtgtccgcgcctcggaggtggcaagtaggcagtgtcgggtggcgaggcaacgatggagctcctgcggactatcacctaccagccggccgccggcaccaagatgtgcgagcaggctctgggcaaagcttgcggcggggactcaaagaagaagcgaccacagcagccttctgaagatgggcagccccaagcccaggtgaccccggcggccccgcaccaccatcaccaccattcccactcgggacccgagatctcgcggattatagtcgaccccacgacggggaagcgctactgccggggcaaagtgctgggcaagggtggatttgcaaagtgttacgaaatgacagatctgacaaacaacaaagtctacgctgcaaaaattattcctcacagcagagtagctaaacctcatcagagggaaaagatcgacaaagaaatcgagcttcacagactactgcaccataagcatgtcgtgcagttttaccactactttgaagacaaagaaaacatttacattctcttggaatactgcagtagaaggtccatggctcacatcttgaaagcaagaaaggtgttgacagagccagaagtccgatactacctcaggcagattgtgtcaggactcaagtatcttcacgaacaagaaatcttgcacagggatctcaagctagggaacttttttattaatgaagccatggagctgaaggtgggagactttggtttggcagccagactggaaccactggaacacagaaggagaacaatatgtggaaccccaaattatctctcccccgaagtcctcaacaaacaaggacacggctgtgaatcagacatctgggccttaggctgtgtaatgtatacgatgctgctaggaagacctccattcgaaaccacaaatctgaaagaaacgtacaggtgcataagggaagcaaggtataccatgccgtcctcattgctggcccctgctaagcacttgatagctagcatgctgtccaaaaacccagaggaccgccccagtttggatgacatcattcggcatgacttcttcctgcagggtttcactccggacagactctcttccagctgttgccacacagttccagatttccacttgtcaagcccagccaagaatttctttaagaaagccgcagccgctctttttggtggcaagaaggacaaagcaagatataacgacacacacaataaggtgtctaaggaagatgaagacatttacaagcttcggcatgatttgaagaaagtgtcgataacccagcagcctagcaaacacagagcagacgaggagccccagccgcctcccactactgttgccagatctggaacgtccgcagtggaaaacaaacagcagattggggatgcaatccggatgatagtcagggggactctcggcagctgcagcagcagcagcgaatgccttgaagacagcaccatgggaagtgttgcagacacagtggcaagagtccttcgaggatgtctagaaaacatgccggaagctgactgtatccccaaagagcagctgagcacgtcctttcagtgggtcaccaagtgggtcgactactccaacaaatatggctttgggtaccagctctcggaccacactgttggcgtccttttcaacaacggggctcacatgagcctccttccggacaaaaagacagttcactattatgcggaacttggccaatgctctgttttcccagcaacagatgcccctgaacaatttattagtcaagtgacggtgctgaaatacttttctcattacatggaggagaacctcatggatggtggtgatctcccgagtgttactgacattcgaagacctcggctctacctcctgcagtggttaaagtctgataaagccttaatgatgctcttcaatgacggcacatttcaggtgaatttctaccacgatcatacaaaaatcatcatctgtaaccagagtgaagaataccttctcacctacatcaatgaggacaggatctctacaactttcagactgacgactctgctgatgtctggctgttcgttagaattgaaaaatcgaatggaatatgccctgaacatgctcttacagagatgtaactgaaaacattattattattattattataattatttcgagcggacctcatgggactcttttccactgtgagatcaacagggaagccagcggaaagatacagagcatgttagagaagtcggacaggtggtggtacgaatacaattcctctgtggcctgctggactgctggaaccagaccagcctaaggtgtagagttgactttggacaatcctgagtgtggagccgagtgcagttttccctgagatacctgtcgtgaaaaggtttatgggacagtttttcagaaagatgcattgactctgaagttctctctgttgagagcgtcttcagttggaagacttggaactgtgaatacacttcctgaaggggagggagaagggaggttgctcccttgctgtttaaaggctacaatcagagcagcttttggctgcttaactgtgaactatggccatacattttttttttttttggttatttttgaatacacttgtggttggaaaagtgcattccttgttaataaactttttatttattacagccccaagagcagtatttattatcaagatgttctctttttttatgttgaccatttcaaactcttggcaataaagagtatgacatagaaaaaaaa

SEQ ID NO: 945 - DNA, 1846 bp, Mus musculus
aggcaccatggcagcagcgttccgcagaggctgcagggtcctgagaagtgtttctcattttgagtgtcgaacacaacactcgaaagcggctcacaagcaggagcccggattagggtttagttttgagttgacggaacagcagaaagagtttcaagcaactgcccgcaagtttgccagagaggagattatccccgtcgccccggaatatgacaaaagcggggagtacccgttccctctcatcaaaagagcctgggaactcggcttgatcaacgcgcacattccggaaagctgcggtggccttggcctgggaacgttcgatgcttgtttaattaccgaagagttggcgtatgggtgtacaggggtgcaaactgctattgaagcaaattctttggggcaaatgcctgtgattcttgctggaaatgatcaacaaaaaaagaagtatttggggaggatgacggagcagccaatgatgtgtgcttactgtgtgacagagccctccgcaggctctgatgtggcggccattaagaccaaagcagagaagaagggtgacgagtatgttatcaacggccagaagatgtggataaccaacgggggaaaggccaactggtatttcttgttggcacgttctaacccagatcctaaagtacccgctagtaaagcctttactggattcattgtggaagccgacaccccgggaatacatattggaaaaaaggaactaaacatgggccagcgatgctctgacaccagaggaattgctttcgaagacgtcagagtgcctaaggaaaatgtgttaatcggtgaaggagcaggtttcaagatcgcaatgggtgcttttgatagaaccagacctacagtcgcagctggcgctgtcgggctagcccagagagctctagacgaagccacgaagtatgccctggataggaagacatttggaaagctgctagtggagcaccaaggagtttcatttctgctcgcagaaatggcgatgaaggttgaactcgctaggctcagttaccagagagcagcctgggaggttgactccggtcgccggaacacttactatgcctcgattgcaaaggcctttgctggagacattgccaatcagctagccactgacgccgttcagattttcggaggctatggattcaacacagagtaccctgtggagaagctgatgagggacgccaagatctatcagatttatgaaggtactgcacaaattcagaggctgatcatagctcgtgagcacattgaaaagtataaaaattaacaggaattactattgaacgatgcatcaccctcgtgtaactaagctccaagcactgttgctgcttcaggggaaaagggctttactgtcttcccaaggaaatgagatcaaagacgagtttggatctgtgcagcggattcccatggcggaggaacctgtcttcagctctatggtgaccctttctagataggtttggcttttggacaatgattggtccttagccccgaattgtgttagtttgctctttgatcacttaaaatggaaaaacaccctggacttttaatgttcattcaagtgacaggaaaggcggcttgtcaaggaagaactcatgattctaacataaacactgaaaatttgtggtagattggacacgtcagactgtgacatagcagcatttctgtgctgaactgttaattttataattttgttatatttgctttgttttgcacaaaagagtaaaaagtttatattcatattctcccattataaaactaaaacttttctgggaatcttagtactgaacgagaattttatttgtcttgtttaaaataattcaataaagctaaccttaactcc

SEQ ID NO: 946 - DNA, 1893 bp, Mus musculus
ggccgccgtccatcccgccatggctgcgcgcctgctcctccgctccctgcgcgtcctgagcgcccgctcggcgccacgcccgctgccctccgcccgatgttctcattctggagcagaagcgcgtctagaaactccttctgctaaaaaattaactgacattggaatcaggagaatcttttcctcggagcatgacattttccgggagagtgtaaggaagtttttccaagaagaagtgattcctcaccacacagaatgggagaaagctggagaagtgagtagagaggtctgggaaaaagctggcaagcagggcttgcttggcatcaacatcgcagagaaacatggcggcattggtggggacttgctctcaacagcagttacttgggaagagcaagcgtactccaattgcacaggccctggcttcagcctccactcagatattgtcatgccctatattgcgaattacggcacaaaagaacagatcgagaagttcatcccccagatgacggcgggcaagtgtatcggtgccatagccatgacagagcctggggctggaagtgacttacaaggagtaagaacgaacgccaaaagatctgggagtgattggattctcaatggaagcaaggtgttcatcactaatggctggttaagtgatctcgtgatcgtcgtggccgtcaccaaccgtgaagctcgatcgcctgcccatggcattagcctctttttggtggaaaacggaatgaaaggatttatcaagggccggaagctgcataagatgggaatgaaagctcaggacacagcagaactattctttgaagatgtccgattgccagctaatgccttacttggagaagagaataaaggcttctactacctcatgcaagagcttccacaggaaaggctcttaattgctgagttggcgatttctgcctgtgagttcatgtttgaagaaaccaggaactacgtgaagcaaagaaaagcttttgggaaaacagttgcacacatacagacggtgcagcataaactagcagaattaaagacacacatatgtgtcaccagagcttttgtggacagctgtctgcagttgcatgaaaccaaacgtctggactccggttctgcttccatggcaaaatactgggcatctgaattacaaaacagtgtagcttatgaatgtgtgcaactccacggaggctgggggtacatgtgggagtacccgattgcaaaagcttacgtggatgctcgggtgcagccgatctacggtggtaccaacgaaataatgaaagagctgatcgcaagacagatcgtcagtgacagctagacatctgcctacatcctggaatcctattacatgcagctaatgcggattctaatctacttgagataaagtgtaacctggaaaagggggggaaatggtaaagctggttttatgtatgattgttacagagaaagaaataaaatagaattctaaagattaacacagggagagagaaatttttgagcccaagagtctaaagttttgtcatgaaaggtataaccttttttcatgcatatacagtgaatataaaagattttctaactgaagagccttttaatgtcttacttgtctttcaaattctgaagagcataagttggctttcattcttaaagttgaggcagaatttaatattaataatacttacaagactttggaaaggtcaaataattgtaacttatatgaagtcatttcagctactttttgctccatattcccccaggacattggttcccaccatgttacccccaaccccatgttttttaaagtaatgaacagaacccttcagaaaaaagtggaccgtactgtatataatgcacatagaggcaattgtgtatcaatattaaaaataaagtaaaacttaaagc

SEQ ID NO: 947 - DNA, 11009 bp, Mus musculus
gacctctactgcaagctggttgggggtccggtggctggcggagatcccaatcagacaatccagggccagtactgtgacatctgtacagctgccaacagcaacaaggcacaccctgtgagcaacgccatcgatggcacggagcgctggtggcagagcccacccctgtcccgtggcctggagtacaatgaggtcaacgtcacactggacctgggccaggtgttccatgtggcctatgtgctcatcaagtttgccaactcacctcggcctgacctctgggtgctggagcggtccacagacttcggtcacacttatcagccgtggcagttctttgcctcctccaagagggattgtttggagcggtttggacctcggactctagagcgcatcacgcaggacgacgacgtcatctgcaccacagaatactcgcgaatagtgcctttggagaatggcgagattgtggtgtccttggtaaatgggcgccctggggccttgaacttctcctactcaccgttacttcgagacttcaccaaagccaccaacatccgcttgcggtttctgcgaaccaacacgctactgggccacctcatgggcaaggcgctgcgggaccccacagtcacccgcaggtattattacagcatcaaagacatcagcattggtgggcgctgtgtctgtcatggccacgcagatgtctgtgacgccaaggacccattggatcctttcaggctgcagtgtgcctgccagcacaatacatgtggaggctcttgtgaccgatgctgtccaggcttcaaccagcagccgtggaagcccgccaccacggacagcgccaatgagtgccagtcctgcaattgccacggccatgcctacgactgttactacgaccctgaggtggatcggcgcaatgccagccagaaccaggacaacgtgtaccagggtggaggtgtctgcctggattgccagcatcacactacgggtatcaactgtgagcgttgtctgcctggcttcttccgtgcccctgaccagcctctcgactcacctcatgtctgtcggccctgcgactgtgagtcagacttcacggatgggacctgtgaagacttgacgggccgctgttactgcaggccgaacttcacaggagagctatgtgctgcctgcgctgagggctacacggacttcccacactgctaccctctgccttcatttcctcacaatgacacgagagaacaggtgcttcccgctggacaaatcgtgaactgtgattgcaatgctgcagggacccagggcaatgcctgccggaaggacccaaggttgggacggtgtgtctgcaaacccaacttccggggtgcccactgtgagctctgtgctcctggattccacgggcctagctgccacccatgccagtgttccagccctggggtagccaacagcctctgtgacccagagtctggccagtgcatgtgccgcaccggctttgagggggacaggtgtgaccactgtgcccttggctatttccacttccctctctgtcagctgtgtggctgcagcccagcagggaccctgcctgaaggctgtgacgaggctggccgctgccagtgccgacctggctttgacggtcctcactgtgaccgatgccttccaggataccatgggtatcccgactgtcacgcttgtgcctgtgaccctcggggggccctggatcaacagtgtggagtgggcggtttgtgccactgccgtcctggcaacacaggtgccacttgtcaggaatgtagccccggcttctacggcttccccagctgcatcccctgccactgctctgccgatggctccttgcatacaacctgtgacccgacaaccggccagtgtaggtgtcgaccccgagtgacaggactacattgtgatatgtgtgtaccaggcgcctataacttcccctactgtgaagctggctcttgtcatcctgctggtctggccccagccaatcctgcccttcctgagacacaggctccctgtatgtgccgggctcacgtggaagggccaagctgtgatcgctgtaaacctgggtactgggggctgagcgccagcaaccctgaaggctgcacacgctgcagctgtgacccacgaggcaccctgggtggagttactgagtgccagggcaatgggcagtgcttctgcaaggctcacgtgtgtggcaagacctgtgcagcctgcaaggatggcttctttggcctggattatgctgactactttggctgccgtagctgtaggtgtgatgttggtggtgccctgggtcagggctgtgaaccaaagacaggtgcctgcaggtgccgccctaacacccaaggacccacctgtagcgagccagcgaaggaccactacttgccagacctgcaccacatgcggctggaactagaggaggcggccactcccgagggccacgctgtacgctttggcttcaaccccctggagtttgagaactttagctggagaggctacgcacacatgatggctatccagcccaggattgtggccaggctgaacgtgacctcccctgacctctttcgactggttttccgatatgtcaaccgtggatcaaccagcgtgaatgggcagatctctgttcgtgaagagggcaagctttccagctgtaccaactgcacagagcagagccagccagtggctttcccacccagcactgagcctgcctttgtcactgtgccccagaggggctttggggaaccctttgtgctgaaccccggcatctgggccttgctggtcgaggctgaaggtgtactcttggactacgtggtcctactgcccagcacctactatgaggcagctctcctacagcatcgagtaacggaggcctgtacctaccgtccctcagccctgcactccacagagaactgtcttgtctatgctcacctacccctggatggcttcccttcagcagctggaactgaggccctgtgtcgccatgacaacagcctgccccggccctgccccacagagcagctcagcccctcacacccaccgctggcgacctgcttcggcagtgatgtggacatccagctcgagatggccgtgcctcagcctggccaatatgttctcgtggtggaatatgtcggtgaggattcacaccaagagatgggagtggctgtgcacacccctcagagagccccccagcaaggggtgctcaacctccacccctgcccatacagctccctgtgccggagtccggctcgggacacccagcatcatctagccatcttccacctggactctgaggctagcatccggctcacagctgagcaagctcacttcttcctgcacagcgtcaccctggtacctgtggaggagttcagtactgagtttgtggagccccgggtcttctgtgtgagcagtcatggaactttcaaccccagcagtgctgcctgtctagcctcccgattcccgaagccaccgcagcccatcatccttaaggactgccaggtcttgccgctgcctcccgacctgcctctgactcagtctcaggagctctcaccaggtgcaccccccgagggaccacagcctcggccgccaactgcggtggatcctaatgcagaacccaccttgctgcgccacccccagggcacggtggtcttcaccacccaggtgcccaccctgggccgctatgccttcctgctgcacggctaccagccggtccacccctccttccctgtggaggtactcattaatggtggccgcatctggcagggccacgccaacgccagcttttgtcctcatggttatggctgccgtaccctggtgttgtgtgagggtcagacgatgctggatgttacagacaacgagctcaccgtgactgtgcgtgtgccagaaggccggtggctctggctggactacgtactcattgtccctgaggatgcttacagctccagttacctccaagaggagcctttggacaaatcctatgacttcatcagccactgtgccacccagggctaccacattagccccagcagctcatctccattctgccggaatgccgccacctccttgtctctcttctacaacaacggggccctcccttgtggctgccacgaggtgggtgccgtaagccccacgtgcgaacccttcgggggccagtgtccctgccggggccacgttattggccgtgactgttcccgctgtgccaccggctactggggtttccccaactgcaggccctgtgactgtggagcccgcctgtgtgacgagctcacgggccagtgtatctgtccaccacgcactgttccccctgactgcttggtctgccagccacagagctttggttgccaccccttggtgggctgtgaggagtgtaactgctcagggcccggcgtccaggagctgacggaccctacctgtgacatggacagcggccagtgcagatgcagacccaatgtagctggacgtcgctgtgatacctgtgccccgggcttctatggctatcctagctgtcgcccctgtgactgccatgaggcaggcaccatggctagcgtgtgtgaccccctcacaggccaatgccattgcaaggagaacgtgcagggctcaagatgtgaccagtgtcgcgtggggaccttctccttggatgctgctaaccccaagggctgtacccgctgcttctgtttcggggccacagagcgctgtgggaactctaacctcgcccgccatgagttcgtggacatggagggctgggtgctgttgagcagtgaccggcaggtggtaccccacgagcatcggcctgagatagagctgctgcacgcagatctgcgctctgtggctgacactttctcagagctgtactggcaggctccgccctcctatctgggagacagggtgtcatcctacggtggaaccctccactatgagctgcactcagagacccagcgaggtgatatcttcattccctacgagagccggccggacgtcgtgctgcagggcaaccaaatgagcatcgccttcctggaactggcgtaccctccgcctggccaggttcaccgaggacagctacagctggtagaggggaacttccggcacttggagactcacaaccccgtgtcccgagaagaactcatgatggtgctggccggcctggagcagctgcagatccgtgctctcttctcgcagacctcttccagtgtctccttgcgtagagtggtactggaggtggctagcgaggctggtagggggcctccagccagcaatgtggaactgtgtatgtgccctgccaactaccgtggggactcgtgccaggaatgtgcccctggctattaccgggacaccaagggtctcttcctaggccgatgtgtcccctgtcagtgccatggccattcagatcgctgccttcctggctctggcatttgtgtgggctgccagcacaacacagaaggggaccaatgtgagcgctgtaggcctggctttgtcagcagtgatcccagtaaccctgcatccccatgtgtgagctgcccttgccccttggcagtgccctccaataattttgcagacggttgcgtcttaagaaatggccgaacccagtgcctctgcaggccaggctatgctggtgcctcctgcgagcggtgtgcacctggcttttttgggaaccccctggtgctaggcagctcctgtcagccctgcgactgcagcggtaatggagaccccaacatgatcttcagtgactgcgaccccctgacgggtgcctgtcgaggctgcctccgtcacaccactgggccccactgtgaacgctgtgccccaggcttctatggcaatgctttgttgccaggcaactgcacccggtgtgactgttccccatgtgggacagaaacctgtgatccccagagtggacgctgcctgtgcaaagcaggcgtgactggacaacgttgtgaccgctgtttggaaggatacttcggttttgagcaatgccagggctgccgcccttgtgcctgtggaccagctgccaagggctccgagtgccaccctcagagcggtcagtgtcactgccagccagggaccacaggaccccagtgcctcgagtgcgcccctggctactggggcctcccagagaagggctgcaggcgctgccagtgtccccgaggccactgtgacccacacacgggccactgcacctgtcccccggggctcagcggggaacgctgtgacacctgcagccagcagcaccaggtgcctgtaccgggcaagcctgggggccatggcatacactgtgaagtgtgtgaccactgtgtggttctccttctggatgacctcgagcgggctggtgccctcctccccgctatccgtgagcagctgcagggtatcaatgccagctccgcggcctgggccaggctgcacaggctgaatgcctccattgctgacctgcagagtaaactccggaggccaccgggaccccgctaccaggcagcacagcagctacagactctagagcagcagagtataagccttcaacaggacacggagaggctgggcagtcaggccacaggggtccaaggtcaggcaggccagctactggacaccacagagtccacactgggccgggcacagaagttgttggagtctgtgcgagctgtgggccgtgccctgaatgagctggcatctcgcatgggccaaggatctccaggcgatgccttggtaccgtctggcgagcagctgcgctgggctctggctgaagtggagcggctgctctgggatatgcggacgcgtgacctgggggcccagggggcagtggcagaggccgaactggccgaagcccagaggctgatggctcgtgtccaggagcagctgaccagcttctgggaggagaaccagtcattggccacacacattcgggaccagctggctcagtatgagtctggcctcatggatcttcgtgaggccctgaaccaggccgttaataccacccgggaggctgaggaactcaacagccgcaaccaggaacgggtgaaggaagccctgcaatggaaacaggaactgtcccaggacaatgccaccctgaaggccactcttcaagctgccagtctcatcttgggccatgtttctgagcttctgcagggcatagaccaggctaaggaggacctagagcacctggcggccagcctggatggagcctggacacccttactgaagaggatgcaggccttttcccctgccagcagcaaggtggacttggtagaggctgctgaggcccacgctcagaagctgaaccagctggcaatcaacctgtctggcatcatccttggcatcaatcaggaccgcttcatccagagggctgtggaagcctccaatgcctacagcagcatccttcaggccgttcaggctgccgaggatgcggcaggccaggcactgaggcaggccagccgcacatgggagatggtggtgcagcggggcctagcagctggagcccggcagctgttagccaacagcagtgccctggaggagaccatccttggacaccaggggaggctgggccttgctcagggccgtctgcaggctgcggggatccagcttcataatgtctgggccaggaagaaccagctagcagcccagatccaggaggcacaagccatgctggccatggacacgagcgagaccagtgagaagattgctcacgccaaggctgtggctgccgaagccctcagtacggccacccacgtgcagtctcagcttcagggtatgcagaagaatgtggagaggtggcagagccagctgggaggcctgcaaggccaggacctgagccaggtggaacgggatgcaagcagttcagtgtccaccctggagaagacattgccacagctgctggccaaactgagccgtctagagaaccgtggagttcacaatgccagcctggctttgtctgccaacattggtcgtgtgcgcaagctcattgcccaagcccggagtgccgccagcaaggtcaaggtgtccatgaagttcaatgggcgttcaggggtacgactgcgtcccccacgagaccttgccgaccttgctgcgtacactgccctcaagttccacatccagagcccagtgccagcgcccgaacctggcaagaacacgggggaccactttgttctgtacatgggcagccgccaggccactggggactacatgggagtgtctctgcgtaatcagaaggtgcactgggtgtacaggctaggaaaggctggccccacaactctcagcatcgacgagaacatcggggagcagtttgcagccgtcagcatcgacaggaccctccagtttggccacatgtctgtcaccgtggagaaacagatggttcatgagatcaagggagacacggtggcccctgggagcgagggactactcaacctgcatcctgacgattttgtcttctacgtgggaggataccccagcaacttcacgccccctgaacccctccgattccctggctacctgggctgcattgagatggaaacactgaatgaggaggtggtcagcctctacaattttgagcagaccttcatgctggacacggcagtagataaaccttgtgctcgctccaaggccaccggtgacccatggctcacagatggctcctacctggatggcagtggctttgcccgcatcagctttgagaagcagttcagcaacacaaaacgctttgaccaggagctgcggcttgtgtcctacaatgggatcatctttttcctcaagcaagagagccagttcttgtgcctggcagtgcaggaaggcaccctggtgctcttctatgacttcggctctggcctgaagaaggccgacccactgcagcccccacaagccttgacggcagccagcaaggcgatccaagtgtttctattggctggcaatcgcaaacgtgtgttggtgcgtgtggagcgggccactgtgttcagcgtagaccaggataacatgctggagatggctgatgcctactacttgggaggdgtgccacctgaacagctgcccttgagcctacggcagctcttcccctccggaggctctgtccgtggytgcatcaagggtattaaggctctgggcaagtacgtggacctcaaacggttgaacaccacgggcatcagtttcggctgcaccgctgacctgctagtgggacgcaccatgacttttcacggccacggcttcctgcccctggcacttcctgatgtggcacccatcaccgaagtggtctattctggctttggctttcgtggcacccaggacaacaacctgctgtattaccgtacctccccggatgggccgtaccaggtatccctgagggagggccacgtgacactccgttttatgaaccaagaggtggaaactcaaagggtctttgctgatggtgctcctcactatgttgccttctatagcaatgtcacaggggtatggctgtatgtggatgaccagctacaactagtaaagtctcatgagagaacaactcccatgctccaactacagcccgaggaaccctcacggcttctcctgggaggcctgcctgtgtctggtaccttccacaacttcagtggctgcatcagcaatgtttttgtacagcgacttcggggaccacagcgtgtgtttgacctacaccagaacatggggagtgtcaatgtaagcgtaggctgtacaccagcccaactcatcgagacctcaagggccacggctcagaaggtttcccgccgtagtcgacaacccagccaggaccttgcctgcacgacaccctggctccctgggactattcaggatgcataccagtttgggggacccctgcccagttacctacagtttgtgggtatctctccgtcccacaggaataggctccacctctccatgcttgtccgtccacatgcggcttcccagggcctcctgctctctacagcccccatgtcgggccgcagcccttcgttggtactctttctaaaccatggacactttgtcgcacagactgagggccctgggccccggctccaggtccagagtcgccagcactcacgggctggccagtggcacagggtgtccgtccgctggggaatgcagcagatccagcttgtggtggacggcagccagacctggagccagaaggctctccaccatcgggtccccagggcagagcgaccacagccctacaccctctctgtaggaggtcttcctgccagcagttacagttccaagctccctgtgtctgtggggttcagcggctgtctgaagaaattacagctggataagcagccactgaggaccccaacgcaaatggtgggggtcacaccctgtgtctcaggccccctggaagatggcctgttcttcccaggcagtgagggagttgtcacattagagctccccaaggccaagatgccctatgtgagcctggagctagagatgcggcccttggcagctgctggcctcatcttccacctgggccaggccctggccactccctacatgcagctgaaggtgctgacagaacaggtcctgctgcaggcaaatgatggggcaggggagttttccacgtgggtgacctaccccaagctttgtgatggacggtggcaccgagtggcagtgatcatgggcagggacacactccggctggaggtagacacacagagcaaccacaccacaggccgtttgccagagagcttggctggttctccagcacttctgcacctcgggagcctgcccaagtcttcaactgctcggccagagctccctgcctaccgaggatgcttgaggaagctgctgatcaatggggcccctgtcaacgtgactgcttctgtacaaatccagggggcagtggggatgcgcggatgcccctcaggaaccctagcactttccaagcagggaaaggcactgacccagaggcacgccaagcccagtgtctccccgctactttggcattgagggttcccagaccttggggtttgcctacactttctatgaataacaagtcatttctggtttacactgtcttttagaggaaaaggactctgtagaacagatat

SEQ ID NO: 948 - DNA, 2031 bp, Mus musculus
atttgtgtttcaggtgtagaaagcagagtgaacagggagcggggcttttgtctgttggtctccctggactgaaggaagggagaatagaagaagcccaagactattaagagtctcaaaatggtttactacccagaactcttggtctgggtcagccaagaaccgtttgcatacaaggaaatggagggaggtcttattaagggaagacttcccgtgcctaaggaagtgaaccgaaagaagatggaggagactggcgctgcctcgctgactccgccaggcagccgtgaattcacctctccagctaccagttacctccaccctttttaatcgtcccacctccatttgtattgcatatggtgtatggggttttgatgaggtcttggtatcatatatgggattttttttttctgtgtaaatcatcaactattagaagaaactatgggactctaagcctggctttagagaatttacagtggacaaataggtttcatcaaaccagtttttaatcattctgactcaagtgaaaacgctcagaatttcacactgtgaatccacgtttacaacccctacaggtggccttcaggcctggttcgctacaacaatgtcttccacaactcaaaactcctactgcgctcagatgactggtccactcctgcctttcatcagacagctcccgactgcttcttgcagaggctaagagtccccccccccccccggttttttttttcttcatttagatgtaacaagcctagtagtttatgttcatcaattgtctgtatatctatattttacccatgtactcttttgatgtatagaagtagtttgaaactcattgtttccttgtggtaagtgactgagacgctgccacagggcctgagacactgatgaatggtgctattttggactttcaacatgctccttggcgaggtagctctggtggagttgtttttatttccatgttctaagaaggtgtcggtactttgtttcctggaatgttcttctctagactggactgacttgtttcccttgtgtcttgagtgtggctttcttcttcagggttgtaggttgagtggatgctaccaagagtgtgagaggctgtcctctcgtgactggccctggtggatgtgcagtcacggtagcgggagcaatcacaaaactgtaattgacctaccagatctcttcctttctgcagcctcacctgcctgacttagaaaaagaaaagcaataatttttttccaggcgttctgaggttatctctttggattctttttgtttgactagatattgggggaggggggataaaagtccactcttttaataagtgccatgtgggaaaaaaaaatccaaagtgctggcatttgagtaggaatttgaaaattatccctttcccaaagttgaaattggaaaaatgtctttacaaaatagtgatgatgaagatgatgactatgatagtgatgacgatgttgttgttgttggtggtggtggtggtgatgatggtgatggtggtgaaaggcaaaatacctttttggggtggttttgataagcaaggtgtagattttacatttttgtccttgctcccaatgaaatggataaacaaaaataaaatctgacaatgccatctcctcacagaatgttgttgtgttagccagactgaaagcccaccttaatttttatataacgtctttggctcttcctttgacagggcaggccttgttctgaactgtttgcgcttctgactgttaaacaccaatgatgcatgcactgtccctcttcgctctttctctcgcttcccctctggcttgaatttcttgtgcattctcgctacccccacctctgttagggtaggtatatcagctatgtaaataaagcaaggaaacggtattgtgcatttgtggcattatgtagaattgcagtgtgcgctgccgaaaatgcaggcttttgtaacgtggtcctctcataagtacccaatgtattttagctattttagtaggatttgttcaataaatatgcaagctataaggtaaaaaaaaaaaa

SEQ ID NO: 949 - DNA, 2468 bp, Mus musculus
caggctgagctcatggcttcccccctgaggttcgacgggcgtgtggtcttggtcaccggccccgggggaggattgggccgagcttacgccctggcgtttgcagaaagaggagcattagtcattgtgaacgacttaggaggggacttcaagggaattggtaaaggctcctctgctgcagacaaggttgtggcagagataagaaggaaaggcggaaaagcagtggccaattacgattcagttgaagcaggcgagaagcttgtgaagacggcactggacacatttggcagaatagacgttgtggtcaacaatgctggaatcctgagggaccgttccttctccaggataagtgatgaagactgggatataattcatagagttcatttgcggggctccttccaagtgacccgggcagcatgggaccatatgaagaaacagaattatggaagaatccttatgacttcctcagcttctggaatatatggcaactttggccaggcgaattatagtgctgcaaagctgggcattctgggtctctgcaatactctcgccattgaaggcaggaagaacaacattcattgcaacaccattgcccccaacgctgggtcacggatgacggagactgtgttgccggaagatcttgttgaagccctgaagccagagtatgtggcccctctggtgctttggctttgccatgagagctgtgaggaaaatggtggcctatttgaggttggagcaggatggattggaaaattgcgctgggagaggaccctgggcgccatcgtcagaaagcggaatcagcccatgactcccgaggcagtgagggacaactgggagaagatctgtgacttcagcaatgccagcaagccgcagaccattcaagaatcaacaggtggtatagtcgaagttttacataaggtagattcagaaggaatctcaccaaaccgtaccagtcacgcggcacctgcagccacgtcaggattcgttggtgctgttggccataaacttccttcattttcttcttcgtatacggagctgcagagtattatgtatgccctcggagtgggagcgtcagtcaaaaatccaaaggatttgaagtttgtttatgaaggcagtgctgacttctcctgtttgcccaccttcggagtcattgtcgctcagaagtccatgatgaatggagggctggcagaggttcctgggctgtcattcaactttgcaaaggctcttcacggggagcagtacttggagctgtataagccacttcttcgatcaggagaattaaaatgtgaagcagttattgctgacatcctggataaaggctctggcgtagtgattgttatggacgtctattcttattctgggaaggaacttatatgctataatcagttctctgtctttgttgttggctctgggggctttggtggaaaacggacatcagaaaaactcaaagcagctgtagctgtaccaaatcgacctccagatgctgtactgagagatgccacctcactgaatcaggccgcgctgtaccgcctcagcggagactggaatcctctacacattgacccggactttgcgagcgttgccggttttgagaagcccatattacatggactatgtacctttggattttctgcaaggcatgttttacagcagtttgcagataatgatgtatcaagattcaaggcgattaaggttcgttttgccaaaccagtgtatccaggacagactctacaaactgagatgtggaaggaaggaaacagaattcattttcaaaccaaggtccacgagactggagatgttgtcatttcaaatgcgtacgtggatctcgtgcctgcatctggagtttcaacccagacaccttcagagggtggagagctccagagtgctcttgtgtttggggagataggccgccgcctcaagagtgttggccgtgaggtggtaaagaaagcgaatgctgtgtttgaatggcatatcacgaaaggtgggactgttgcagccaagtggaccattgacctgaagagcggctcaggggaggtgtaccaaggccccgcaaagggctctgctgatgtgaccatcatcatttccgatgaggattttatggaagtggtcttcggcaagcttgacccacagaaggccttcttcagtggcaggctgaaggccagagggaacatcatgctgagccagaaactacagatgattcttaaagactatgccaagctctgaagggaacccactgtgtgctgttaaaggagtcaataattaaatactgtctacccagctgagccgcagccttctgcgatccacaggagtgtgcaggagaaatcgcttcacatttccagattcagataacttgcatattttcattttctactaatttttcacatatttttacaaggaactgtaatctaggtagcaaaataatcattctgttcatagatctgtatcttaataaaaaaaatcaaccaaaaacc

SEQ ID NO: 950 - DNA, 60 bp, Artificial Sequence
  oligonucleotide probe
tgctgtaggttcaccttttaggctacggatattgacagggttttagaattgctcatggtg

SEQ ID NO: 951 - DNA, 60 bp, Artificial Sequence
  oligonucleotide probe
gaatgtttaggggcctgtgtaaatgcaccgatggttcaaataaatgacaactactatgag

SEQ ID NO: 952 - DNA, 60 bp, Artificial Sequence
  oligonucleotide probe
ggggttcgttcattaaactgacagatatttttctaggaaggactattatcagtttccaaa

SEQ ID NO: 953 - DNA, 60 bp, Artificial Sequence
  oligonucleotide probe
cgcacaattttccacttaagcaggaaatatgtctctgaatgcatgaaatcatgttgattt

SEQ ID NO: 954 - DNA, 60 bp, Artificial Sequence
  oligonucleotide probe
cctccgttccctctcagcttaagcatgaacaaagcaaacttagttgaccttgggaagtat

SEQ ID NO: 955 - DNA, 60 bp, Artificial Sequence
  oligonucleotide probe
tgtaattaactgccagcaagattagctccatactttaggagaccgtgaaaatcatattga

SEQ ID NO: 956 - DNA, 60 bp, Artificial Sequence
  oligonucleotide probe
gactatgtggaagacaaactgtccagtgagtttgtgttcaataaccccaacatcaaggga

SEQ ID NO: 957 - DNA, 60 bp, Artificial Sequence
  oligonucleotide probe
ttttaaaccatccagacaaaggtggatctccttacttagcatccaaaataaatgaagcaa

SEQ ID NO: 958 - DNA, 60 bp, Artificial Sequence
  oligonucleotide probe
actttctgggcagagtgaataacccccagagtgtggtgtgaggccttgtgcctagcccat

SEQ ID NO: 959 - DNA, 60 bp, Artificial Sequence
  oligonucleotide probe
tttctttagctacttcaatcaacagcacacatatctgcatacgcattccttttcttcagc

SEQ ID NO: 960 - DNA, 60 bp, Artificial Sequence
  oligonucleotide probe
ctacatgaactggggattctttacgaaatatctgttagactttgtgatcaaatgatgtga

SEQ ID NO: 961 - DNA, 60 bp, Artificial Sequence
  oligonucleotide probe
tgatgcgtgcatcattgagaaaggagaagaacactgtggacatctcattgaagcccacaa

SEQ ID NO: 962 - DNA, 60 bp, Artificial Sequence
  oligonucleotide probe
gtatgccaaactaacttcctgtatgtttagataacttctgaacaagtgtccttcaaacat

SEQ ID NO: 963 - DNA, 60 bp, Artificial Sequence
  oligonucleotide probe
cttgtattgtggatgtgtaaataatatgtactttggggttttaacaccgcatgtaaagtc

SEQ ID NO: 964 - DNA, 60 bp, Artificial Sequence
  oligonucleotide probe
tgacctcagtgtcagatggtggatgggaattaaatgtgcaattaaatgctctgtgatgct

SEQ ID NO: 965 - DNA, 60 bp, Artificial Sequence
  oligonucleotide probe
gaaacaaactatgatctttgaaatcatcttctcataaagcagaatcgtattcacaaggcc

SEQ ID NO: 966 - DNA, 60 bp, Artificial Sequence
  oligonucleotide probe
gcccaaatttgcctgaataattaaccatctcttactatccatgatagcatgactgttagg

SEQ ID NO: 967 - DNA, 60 bp, Artificial Sequence
  oligonucleotide probe
cggatgtaggagaatggaaatgatagaacattacagcaagagactgaatgtttcctgaag

SEQ ID NO: 968 - DNA, 60 bp, Artificial Sequence
  oligonucleotide probe
acaagatggcttccagatacccctgttcatgttttgttttaaaaagtgtaaatggagatc

SEQ ID NO: 969 - DNA, 60 bp, Artificial Sequence
  oligonucleotide probe
agtagtcgtgccagctggtacaataatcaaggaattgtttaaaaccaacttataagtgaa

SEQ ID NO: 970 - DNA, 60 bp, Artificial Sequence
  oligonucleotide probe
aagatgctttgaaggacacaacaagaaattctttaaagctgtggaagaaatctagacgtg

SEQ ID NO: 971 - DNA, 60 bp, Artificial Sequence
  oligonucleotide probe
cttggcttgttcaaccaagtagtgaatactgacaacttcactcactatcaataataaatc

SEQ ID NO: 972 - DNA, 60 bp, Artificial Sequence
  oligonucleotide probe
taatctaaacatctcttaaacctgaaatgcttagagacatagataccatgttggttgacc

SEQ ID NO: 973 - DNA, 60 bp, Artificial Sequence
  oligonucleotide probe
tgggtgtgaaccacacatctgtctatccaatggactgggtagataatacctaagaacagc

SEQ ID NO: 974 - DNA, 60 bp, Artificial Sequence
  oligonucleotide probe
gcaatctttcacatggaaataatgtacaagccttagaactcctcattcttataccactat

SEQ ID NO: 975 - DNA, 60 bp, Artificial Sequence
  oligonucleotide probe
agtcagggttgttttttgggacgctatctttctggaattttgagtttgtggcaagctgtc

SEQ ID NO: 976 - DNA, 60 bp, Artificial Sequence
  oligonucleotide probe
ttgagagctgggcttcctgcctcttacatacaataaagagattgctaacactggaaaaaa

SEQ ID NO: 977 - DNA, 60 bp, Artificial Sequence
  oligonucleotide probe
taaaagctggatatctaatgtctgtggagacgtcagagggcttcctgagtgaaattgggt

SEQ ID NO: 978 - DNA, 60 bp, Artificial Sequence
  oligonucleotide probe
ttctcgacgagttataacacatgcgtgtatttaaagctcagcccagaccagcaagcacat

SEQ ID NO: 979 - DNA, 60 bp, Artificial Sequence
  oligonucleotide probe
catgagtagtagttctttggattcctgttttgatattcctgttgctgaattactgtatga

SEQ ID NO: 980 - DNA, 60 bp, Artificial Sequence
  oligonucleotide probe
ggaggaagtgtaaactagttctgaataaataacaaacccagaaatgtatgtcagcattga

SEQ ID NO: 981 - DNA, 60 bp, Artificial Sequence
  oligonucleotide probe
cgtgttggacatcagtattttccgcaagggttgtgaaacttttcaaagaaccatccgcct

SEQ ID NO: 982 - DNA, 60 bp, Artificial Sequence
  oligonucleotide probe
gctgcatggtatcttgttactaactcagtatgtgtcaatgtcaaataccatgaaataaag

SEQ ID NO: 983 - DNA, 60 bp, Artificial Sequence
  oligonucleotide probe
ctgaggtaaatgatattcatggtgtgaagtttctaacatatgaactctatatacacgtgg

SEQ ID NO: 984 - DNA, 60 bp, Artificial Sequence
  oligonucleotide probe
gaatccaaagggctttagtcataaaagaatctagctcatgagtactattcttattaccag

SEQ ID NO: 985 - DNA, 60 bp, Artificial Sequence
  oligonucleotide probe
gctctgtttatcagatgactgaccatttcctgttgaaagttaaaacttagagactgattt

SEQ ID NO: 986 - DNA, 60 bp, Artificial Sequence
  oligonucleotide probe
tcagaacaacagtgtttagcaagtggcatctgacaggtgtgaatattttcctacaatgtg

SEQ ID NO: 987 - DNA, 60 bp, Artificial Sequence
  oligonucleotide probe
atgtaccctggtcccaaggggatttcttaacaacagatgtccctgtctgggtcatttttt

SEQ ID NO: 988 - DNA, 60 bp, Artificial Sequence
  oligonucleotide probe
actgcacagatgtgtttgtagatgcacagtttgtgattaaaagagtattcttaaacctgg

SEQ ID NO: 989 - DNA, 60 bp, Artificial Sequence
  oligonucleotide probe
ggataccctgatggagtatttggagaatcccaaaaagtacatccctggaacaaaaatgat

SEQ ID NO: 990 - DNA, 60 bp, Artificial Sequence
  oligonucleotide probe
ccctgtatgagtggagggatagtttaaagttttcaccatgttatattttcttttgagact

SEQ ID NO: 991 - DNA, 60 bp, Artificial Sequence
  oligonucleotide probe
tggttggctttaatttccctgaaaacattttgacaaaatcatcagtggccatactcatca

SEQ ID NO: 992 - DNA, 60 bp, Artificial Sequence
  oligonucleotide probe
gagacaacagatttctaactgctgagctttttacttctgaggagagtcaacattgttact

SEQ ID NO: 993 - DNA, 60 bp, Artificial Sequence
  oligonucleotide probe
cttttctgcaagaaagctttgaatgaaataaaggcatagagaggaaaacttggaaaaacc

SEQ ID NO: 994 - DNA, 60 bp, Artificial Sequence
  oligonucleotide probe
gaactgaacggtaaaggacagatttgttctgtaagcattaaacatgattgttcactgtaa

SEQ ID NO: 995 - DNA, 60 bp, Artificial Sequence
  oligonucleotide probe
tggtggtttggtacctgtagccattccaatctcaatggacaatacttccactctatccca

SEQ ID NO: 996 - DNA, 60 bp, Artificial Sequence
  oligonucleotide probe
ttgttgtctgaaacagtcagagcaacaggaaacaaatggcccagatccagaaaacatggg

SEQ ID NO: 997 - DNA, 60 bp, Artificial Sequence
  oligonucleotide probe
gctaactgtggttcccaggcacagctcacagcattcttacaataaaaacaacctcagaac

SEQ ID NO: 998 - DNA, 60 bp, Artificial Sequence
  oligonucleotide probe
tccttaaaagatcagggcagtgactttcacagcaggactttgactcccacattggttgat

SEQ ID NO: 999 - DNA, 60 bp, Artificial Sequence
  oligonucleotide probe
tggtgaaacacaagaaagggattgtcaacgagcagttcctgctgcagcgactggcggacg

SEQ ID NO: 1000 - DNA, 60 bp, Artificial Sequence
  oligonucleotide probe
tagctggtgcattgaggctgcaactcggatccgagaaaacatggccagtctgcagtccag

SEQ ID NO: 1001 - DNA, 60 bp, Artificial Sequence
  oligonucleotide probe
ctggcaaggtcatgtgccttctctgatgccaaaaccctttatgggggtgatggagtactt

SEQ ID NO: 1002 - DNA, 60 bp, Artificial Sequence
  oligonucleotide probe
tcaaaaatcaatctcatctactcccgagaccattctgtggacgagagccttgactacatg

SEQ ID NO: 1003 - DNA, 60 bp, Artificial Sequence
  oligonucleotide probe
ctgcagagttggtaattcagaaaactcaaggtttaagttaaaagtgagtttagactttgg

SEQ ID NO: 1004 - DNA, 60 bp, Artificial Sequence
  oligonucleotide probe
ctgtcttgagaaacttcatttatttctcataactgcatttatttagccatctcagtgtgc

SEQ ID NO: 1005 - DNA, 60 bp, Artificial Sequence
  oligonucleotide probe
ttactttgttaacaacacgcctctcaactggctggtaggtcccttttatcctcagtctac

SEQ ID NO: 1006 - DNA, 60 bp, Artificial Sequence
  oligonucleotide probe
aaagcagcttcttagaaccaagggcctcattatggtcactcacagctcagttatggtctt

SEQ ID NO: 1007 - DNA, 60 bp, Artificial Sequence
  oligonucleotide probe
tggcctttgtattgttattggctgtaaacgtctgtctggaccgaataaagattcacgtga

SEQ ID NO: 1008 - DNA, 60 bp, Artificial Sequence
  oligonucleotide probe
ggttggaaaagtgcattccttgttaataaactttttatttattacagccccaagagcagt

SEQ ID NO: 1009 - DNA, 60 bp, Artificial Sequence
  oligonucleotide probe
cacgtcagactgtgacatagcagcatttctgtgctgaactgttaattttataattttgtt

SEQ ID NO: 1010 - DNA, 60 bp, Artificial Sequence
  oligonucleotide probe
acaatgattggtccttagccccgaattgtgttagtttgctctttgatcacttaaaatgga

SEQ ID NO: 1011 - DNA, 60 bp, Artificial Sequence
  oligonucleotide probe
ttactattgaacgatgcatcaccctcgtgtaactaagctccaagcactgttgctgcttca

SEQ ID NO: 1012 - DNA, 60 bp, Artificial Sequence
  oligonucleotide probe
gcttttgggaaaacagttgcacacatacagacggtgcagcataaactagcagaattaaag

SEQ ID NO: 1013 - DNA, 60 bp, Artificial Sequence
  oligonucleotide probe
aattacaaaacagtgtagcttatgaatgtgtgcaactccacggaggctgggggtacatgt

SEQ ID NO: 1014 - DNA, 60 bp, Artificial Sequence
  oligonucleotide probe
acatgcagctaatgcggattctaatctacttgagataaagtgtaacctggaaaagggggg

SEQ ID NO: 1015 - DNA, 60 bp, Artificial Sequence
  oligonucleotide probe
cctacactttctatgaataacaagtcatttctggtttacactgtcttttagaggaaaagg

SEQ ID NO: 1016 - DNA, 60 bp, Artificial Sequence
  oligonucleotide probe
ccccacctctgttagggtaggtatatcagctatgtaaataaagcaaggaaacggtattgt

SEQ ID NO: 1017 - DNA, 60 bp, Artificial Sequence
  oligonucleotide probe
tttcaaaccaaggtccacgagactggagatgttgtcatttcaaatgcgtacgtggatctc

SEQ ID NO: 1018 - DNA, 60 bp, Artificial Sequence
  oligonucleotide probe
atcatcatttccgatgaggattttatggaagtggtcttcggcaagcttgacccacagaag

SEQ ID NO: 1019 - DNA, 60 bp, Artificial Sequence
  oligonucleotide probe
gcaggagaaatcgcttcacatttccagattcagataacttgcatattttcattttctact

SEQ ID NO: 1020 - DNA, 1216 bp, Mus musculus
gatccgctccagccgcgcccgctgcctctgcgagctgcagaggactgtcgggaacaaccatgtcctactgccggcaggaagggaaggatcggatcatatttgtgaccaaagaagaccatgaaactcctagcagtgccgagctggtagctgatgaccccaatgatccctatgaggagcacgggttgatactgcctaacggagattaactggaattgtccatgtcttgggggaatggccagcggccctcgtggggagcagttcaagtctgccttctcctgcttccactacagcacagaggatatcaaggggtcagactgtatagaccagttccgggccatgcaagagtgcatgcagaagtacccggacctctatccccaagacgaggaggaggaagaggagcaatagccagtggagccggtggaggagacagctgacactaaggtctctgcagccaaagagcaagggacaagctcttgaaggccacatggctgccactcaccatgggactttctgtacaatgccttttggtcacttttgtgaaagttctttccctctgtgcactgtaatatacaaaataacttattttaatgatcaggggtcttggccgtatacactgaagaaaagggcgtgtgtgcacctgtgtcctgcataaacctgtccttaaacattagtccactcctggatgtactactctgtgattgccctggattttgccactttgaaataatgtgttgagacttctcagcaaccaaaagttgttactcaggaaagtttatcgtgagaaagctgatctattctgatccattttggtatcccttttggtagattttacacctcttttggaaattaagtaaatagatgccaaaactcctttaagagtgggtccattcctactggaagaggctggtggtcaggtgcttgctggagtacatggggctgctgcctcgttcccgacagctaattgtctgtttgctgtccaggctccagtgcctacagctgcagggtggcattggatcctgtgactcccggtccttcctaagtgaaaggatgggctgggtttgcagtttattgttttgctgttctaagagccctggtttggggcccatgttcactcagttgtgatattgaggtggggacctagctgcttccagagcagaagccagcagaggaatgtctgaatgaagtactcaattaaaaagaaaccatttctatctgt

SEQ ID NO: 1021 - DNA, 462 bp, Mus musculus
ggccagcaggactctccttgcagcagcggcccgagttcagagtccggagctgcggtggtggcggcgaaggcgagagtcatggctggacaagcttttaggaagtttcttccgctctttgacagagtattggttgaaaggagtgccgccgaaactgtaaccaaaggtggcattatgcttccagaaaagtctcaaggaaaagtgttgcaagcaacggtcgtggctgtggggtcaggagggaaaggaaagagtggagagattgaacctgtcagtgtgaaagttggagataaagttcttctcccagaatatggaggcaccaaagtagttctagatgacaaggattatttcttatttagagatagtgacattcttggaaagtatgtcgactgaaatcactgttgaaatggtgtcacgtgaagctgccattccactgatgtctgaactatttcatcatgtaaataattt

SEQ ID NO: 1022 - DNA, 2547 bp, Mus musculus
  misc_feature 1204: n = A,T,C or G
agccagcgagggtgcccgggtcccgagggcaacggagattcctcaggcccctccggtgccctccccggagcccagagcacctccggcacccagcggagcggacacggcccggcctggccatggcctcgttgctgaaggtggatcaggaagtgaagctcaaggttgattctttcagagagcggatcacaagtgaggcagaagacttggtggcaaattttttcccaaagaagttactagaacttgatagttttttgaaggaaccaattctaaatatccatgacctaactcagatccactcagacatgaacctcccagtccctgaccccattctcctcaccaatagccacgatggactggatggtcccacttacaagaagcgcaggttggatgaatgtgaagaggcctttcaaggaaccaaggtgtttgtgatgcccaatgggatgttgaaaagcaaccagcagcttgtggacattattgagaaagtaaaacccgagattcggctgctgatcgagaaatgtaacacggtcaaaatgtgggttcagctgttgattcccagaatagaagatgggaacaacttcggggtatcaattcaggaggaaacagttgctgaactaagaactgtggagagtgaagccgcatcttacctggaccagatttctagatattatattacaagagccaaattggtttctaaaatagctaaatatccccatgtggaggactatcgccgcactgtcacagagattgatgagaaagaatacatcagcctccggctcatcatctcagagctgaggaatcagtatgtcactctccatgacatgatcctgaaaaacattgagaagatcaaacggccccggagcagcaatgcagagacactgtactgaggccagggccagggccaggggactttgtgagtctggctcaagaccgacattgccttggtttgttacatgactatcgtgatgggaaaactggctggaaatagtaatcacacctctctgtttttagttagagtctaatgaaactctcatctagttctgtgacgtgtttacctcttttttcaggcctcaggaactcttctatctccttccccaacaccccccacccagcctgtcctaatttctggagaactccaggtttgtgcaacatactggcacaagcgtaattgtgggtttttgttttttcttcccttctctcccccttnccctgttttaggttttgtattttcttccttttgatgattagttggttaaaagctggaggaactatagggaaagtgttaggtgtcttttaggaacagggggagtggaggtggaagggacatctcttgtcacaaggctagtgtctcgtttctgtgggactttgggtcctccttgcctgcccaggtgatgccttagggcttcccacctacatccatcccgctctgagcctgactgtggcgaggggtcccctagaccttcacctcgatccctgcagcttctttggatgtttttataactggggttttcacatacacatgtgtacacatgtaaacacgcatagggacatgcatacatgcttcctgctccattatagaacataccttccttcctgcaccaccactccctcaagcccttcacatacaaacatctcagcaggtgatagttgtcttagtcatccacccaggcaaaagtcccaggcccaccctcttctgataatgtagcagttggtgccagggtaagctgaaggagaaccgagagccgagcagcagagggctcatgaaggccttccctctgtggctcaggttctttttggtgttatgcaaaagctggtcctctggcccgcacttgtcttctcctaggccagcatgtgcgctggctggggagcggccggctgtgaggtgcagaggctgctgctcctcgctgtgctttcctttgggaaatgtttctcgtatttatagtattgtgcttccagggaaagcagtaattcatgtgtatacgtgtgtgtgtgtgcacatacacacgtgcacatgtgtgtgtgtgttcgtgtgtgtgtgttaatatgctgcgaaggtcaaacccatagaagagttgcctcctctcttgaatcttccagaggtaccacttgttaaagcgtttgtattaatcgcactagcccccagctttttaagtgagagttggtctctgcaattagcctgccagtgactgactctcagtgtctatttgacttttattcctctccgtcttccaatcccaaatcatatttccacctgggatgcatcactttcactcccagcattctgtaggaaaggaggcgggatgcgggatgctctcttcccaagaatagtgctcagtaacaaaccaatcgcattttcgttgggcagtgcacctatccaccctcagatcccttccagctgagcccctcccctccccccaccatgtgtttcttggttttccttttgtttgattgtccctctgcccctccttccttggattgtaatgtaaaattcttttaccatgtcaagaaattattaaaaatacaggtactttgacctctttctaaagctgc

SEQ ID NO: 1023 - DNA, 1888 bp, Mus musculus
aatacttttttatgtttgtttttaggttcccctaaataatatgtttggttattccactgagcttaggtcttgcacagagggaaaaggagagtacacgatggagtactgcaggtaccagccgtgttcaccatccacacaggaagagctcatcaataagtatttggaagctacaggtcagcttcccgtaaaaaaagggaaagccaagaactgactctcctcactcaggatatactgactatttgactaccacacttggggatgatggagtctgcttgaatgaattctgacggcagaaacaaatttaggagcccctgctggcccacgttcaggagcttctgtatgtacgccaaggataactgtgtatttaaactgtattgactatttttattgtttagtaaaagaccttaaataaaattatattattactgatgtatatataatattatataagggaagaagagaataattttcagcttaaaatatatataaatttacttcactgctttttttttttttggacataagggctgtgtgtatatagcccctgttggcctcaaaactcacagtcctctcatcaagaggtaggattctgggcacacaacacccgacaccgtgcacatgtatgtacgtctgtggtttagtgtgtgaatgtacatgccagaggttgtcttttgtagttgtcctctaatttaattatttaggtaaagtctctcactaagcctgaagcttgtgttgctgagcagaacatccagggattccccctgcctctgtttccccagactgggattacaggtgtggtccaggcccagctgttttcacatggttcctgggggcttgaactcaggtcctcatgcatgcctgcctaccagtggtttactgacagagactcctctcaagctccctaattttttttttaaatcatgtgcaggcattaagtttccaaatagatactgtggttccaattattcagtagctccctgtccttatgaacatctgtggctataccagagcatcaagcctggggagtggtgtgctttaggtactatgagtatattctcagtaaggaaacagtctcatagaatttaatgcagtctctggatattgagaataatcagaaaagtgggctaaattgcgtgtgcttttaatttgctaaataattccgaaggtaggggtaggtagatctctgagttcaaagctaacctggtctacatggtgagttccaagccagacagggctatacagtgagaccttggagagagagagaggtggcggggagaggagttaagttataatacgtatcctgggtatctaatccattagtgacatttcatatgcaaaggcatgggcccacatgggagtgtggatagaacaggatcccataggaacagttccaggaacagagcccacatctgtggctagctcattagattagtgatggacggatggtaaagaccaaacaagtcgatagcctggaaaagactaatgtggatattaatcaatgaagacttttatgccactatcatgaagtatagttttagacaatttaaagaaagtgttagcttgtgttggggagaggcctcactagaggcctcgctagtgactgctgtgtggctggctgcactctcctgactcactctagagctttaagtgaggaccccagttccatctccagatatccaggctccctggaacatttccagttgattccagcatgcatttgatgttaaagaccactgcagtgtcacctgcacataggcccaagacatggaattatagttttttgcaattctaatgtataatgtcaatattcttttgtgtgtactacatttgggctattgtcccttcagctgatagctgaaattaaagaaatacatttgcgttttctcct

SEQ ID NO: 1024 - DNA, 2109 bp, Mus musculus
gagggggacgggtcggactcagaaatggcggcgtccatgttctacggccggcagttggccgcggccgccctgaggagccaccggccgcagactacgctgcgagccgccgcccaggttctgggaaattctggcttgtttaacaagcatggactacaagtgcagcagcagcagcagaggaccctttcgctgcatgaatacttgagtatggagttattgcaggaagcgggtgtctctgttcccaaaggcttcgtggcaaagtcatccgatgaagcttacgcaattgccaaaaaattaggatcaaaggatgttgtgataaaggcacaggttttggctggcggcagaggaaaaggaacatttacaagtggcctcaaaggaggagtgaagattgttttctctccagaagaagcaaaagctgtttcctcacagatgattgggcaaaaattgattaccaagcaaactggagaaaagggcagaatatgcaatcaagttttggtctgtgagcgcaaatatcccaggagagaatactactttgcaataacaatggagaggtcatttcaaggtcctgtactgataggaagtgcacaaggtggtgttaacattgaagatgtggctgccgagaaccctgaagccattgtaaaggagcctattgatatagtggagggcatcaaaaaggaacaagccgtgacacttgcacagaagatgggatttccttctaacattgtggactctgcagcagaaaacatgatcaagctttataatctttttctgaagtatgatgcaactatggtagaaataaacccaatggtagaagattctgacggaaaggtgttgtgcatggatgcaaagatcaattttgattcaaattcagcctaccgccagaagaagatctttgatcttcaggactggagtcaggaagacgaaagggacaaagaagcagctaatgcagatattaactacatcggcctcgatgggagcataggatgtctagtaaatggtgctggcttgctatggccacaatggatataataaaactacacggagggactccagccaactttcttgatgttggtggaggcgccacagtccagcaagtaacagaagcgtttaaactcatcacttcagataaaaaggtgcaggctattctggtcaacatttttggaggaatcatgagatgtgatgttattgcacaaggaatagtcatggcagtaaaggatttagaaatcagaatacctgttgtggtgcggttacaaggtacacgagttgatgatgctaaggcactaatagcagacagtggtcttaaaatccttgcttgtgatgatttggatgaagctgctaaaatggttgtaaagctctctgaaatagtgaccttagccaaagaagcccatgtggatgtgaagtttcaattgccaatatgagcaagaccttggtggatggctacgggtattaatgtgctgtaattctttattatactgtggtctctcctagtgtcccttttcttttaatgtgtggagaatgtaatcaccacataggcacacatacctttgaaagcatttgctctgcatctgattctgctgctgagaatggactgtttatataaagaatgtctgatataaacttacggtggtctcttttcttgcagccatctttttttgcttcctctacagaatgtcacttgcagtatgcctgctttctggtgttggatacagagttcttcattgataagagttctataaataaaattactacaaagataaagctttattctttagtataaaaatatatctaataacagcctcattaggacaatggtatgttataacaatgttttatataagaaatatttatcttcagcatcaaatggctcttaaatgtatcaatcattatttatacatagaacttggaagcactcctcagaacatcttttaagtattttagagaagtaacttgctgattatttgaacatcattttaattattacaggacaatgataagtgcaagtcgtcatgattctgtggtggtaaaaacacacgcagattgataagaaaggcacctattaagacttggacaaaactagaatgccagcttaagtcaataaaagtttcctaatgt

SEQ ID NO: 1025 - DNA, 1982 bp, Mus musculus
tcagaagcgggtgtcaccaacaacaactcttaggctagtgaagctgtgagctgcgagagtgccttgaagtaactttaggtggaagatgccagaaagtaactccgcagagggtagcgacagaagcgaggagcaggtgtctggtgctaaagtcatcgcccaggctctaaaaactcaagatgtggagtacatgttcggtgtcgtaggcatccccgtgaccgaaatcgcccttgctgcccaggaactgggcatcaagtacattgggatgcggaatgagcaagcggcttgttatgctgcctctgcagttggatacctgacaggcaggccaggagtgtgccttgttgtttctggtcccggtctcatccacgccttgggcggcatggcaaatgcaaacatgaactgttggcccttgattgtgattggtggttcttctgaaagaaatcaagaagctatgggagccttccaggagtttccacaggttgaagcttgcagattgtataccaagttctcggcccggccaagcaccatagagctcattccgtttattattgaaaaggcagtgaggagcagtatctatggtcgcccgggagcttgttacattgacattcctgcagattttgtgaccctccaggcgaacgtgacttctataaaatacaaggagtgctgcatgccacctccagttagcatggcagaaacctctgctgtgtgcgcagcagcctctgttcttcgggatgccaagcaacccctgcttatcatcgggaaaggcgctgcctattcccacgcagaggacagcatcaggaagctggtggagcagtgcagtttgccatttttgcctacgcctataggcaagggggttgtccctgacaatcatcccaactgtgtaggcgcggccagatccagggctttgcagtccgctgacgtgattgtgttatttggtgcgagactaaactggatcttacattttggactgcctccaagataccaggcagacgtgaagtttattcagattgatatctgtgcagaagaactggggaataatgtcaggccttctgtgattttgctaggagatatagatgctgtctctaaacagcttttagaacagtttgataaaactccgtggcagtgccccccagacagccagtggtggaagactctgagggagaaaatgaagagcaatgaagccatctccaaggaactggcttcccaaaagtccctccctatgaattattacacagtgttctaccacgttcaagaacagttgccccgagactctttcatagtgagtgagggggcaaacaccatggacatcggacggactatgcttcagaactgccttcctcgccacaggcttgatgcaggttcttttggaacaatgggggttggcctgggatttgccattgcagccgctctagtggctaaagacagaagtcctgggcagcgggtcatctgtgtggaaggtgacagtgccttcggattttctggcatggaagtggagaccatctgcaggtacaacttgccaatcatactcttggtagtaaacaataatggaatttaccaaggttttgacgctgacacctgggaaaaaatgctacattttcaagaagctgctacaactgtccctccaatgtgcctcttgccaaactcgcattatgagcaggtcatgactgcatttggaggcaaagggtattttgtacgaacaccagaagagctccaacactcgctgaggcaggctctgcaagacacaagtaaaccctgccttctcaacattatgattgagccacaaagtacgcgcaaggcccaggattttcactggctcacccgttctaacatgtgaataaactacttgatggttatgaggaattttctctttcccgcaaggtagaatttacttttcatagcaaaattaccatagtgctaaaattgtatttaaaaatacactttaaattgtattttatagtaaagaaattgactaaagccagacattt

SEQ ID NO: 1026 - DNA, 1578 bp, Mus musculus
  misc_feature 860: n = A,T,C or G
ggagtgtgtgtaaggcacatccgggtgtcagaagcaggaggccgcggttttaggggtcgggagagggtcttggagagcctaggcaacgagccaactccaagccagaagcgcgagcacctgcagagctacgggttcagacgagcgcacccgtccagcccttgctgcggagccccctgccggcttgctttgggagccaccagaaggaagcagagcgtcttacaacttggtgccacgatgctagctgcccgtctctccagacccctgtcacagctcccaggaaaagccctaagtgtccgtgacagagaaaatgggacaagacacacactgttgttttatccagcatccttcagccctgacacccgtcggacctacgccagtcaggcagatgcggctagtggcaaagctatcctgatcacaggctgtgactctggatttgggttctcactggccaagcatctgcactcaaaaggcttccttgtatttgctggctgtttgatgaaggacaaaggtgatgctggggtcaaggaactggacagcttgaagagtgaccgactgagaaccatccagctcaatgtctgcaacagtgaagaggtggagaaggcggtggagacgatccgctccggcctgaaagatcctgagaagggaatgtggggcctggttaacaacgcaagcatctcaacgtttggggaggtggagttcaccagcatggagacatataaggaggtggctgaagtgaacctctggggaaccgtgcgcaccacaaaatccttccttcccccttctccgaagaagccaaaagtcgcgtcgttaacatcagcagcatgctgggccgcatggccaaccccgcccgctcgccatantgcatcaccaagtttgggatcgaggctttctcggactgcctgcgctatgagatgcaccctctgggtgtcaaggtcagtgtggtggaacctggcaacttcatagcggccaccagtctctacagccccgagcgcatccaggccatcgccaagaagatgtgggatgacctgcctgaggtcgtccgcaaggactatggcaggaagtacttcgatgaaaagattgccaagatggaaacctactgcaacagcggttccacagatacttcctctgtcatcaacgctgtcacacacgccttgaccgccgccaccccgtatacccgctaccatcccatggactactactggtggcttcggatgcagatcatgacccattttcctggagccatctctgacaagatctacatacactgaagagctgaagaggtcccttcggtctccgccagggaacctggtgggagggagaaagatgaggggagggagtttaccttttgattagctgttgaggattacccactgtcttaggaagacctattttaaccttacgtgttcaatgtggtgaatggtttgggccttcacaaattagggggggggcgggcggagggcgcaggtgggtggccctaaacctcagggccaatatggtgcttctatctatctcgagttgattttatataaagatttgtggggaaatatctttatattaaaagcaggttattggaatagc

SEQ ID NO: 1027 - DNA, 2005 bp, Mus musculus
gagtgcatcctgggttggcgtcgatggcgtctcgtgtcctctgcgcctgtgtccgccgcctgcccgcgggcttcgcgccgctgccccggcttcccacgttggccttggcgcggccgctcagcaccaccctatgccctgagggaatccggaggagacccggggctctgcagtccgccttggcgctcgcgcaggtgcctggaacagtcacacatttgtgccgccagtacagtgacgcacccccactgacgttagacggaatcaaggaccgagttctgtatgtcttgaaactctatgataagattgatccagaaaagctctccgtaaattctcattttatgaaggacctgggcttagacagtttggaccaagtggaaattattatggccatggaagacgaatttgggtttgaaattcctgatatagatgcagagaagttaatgtgtccacaagaaattgtagattacattgcagataagaaggatgtgtatgaataaagtatcagatgtctttattccatgaagagctggagtatttactacacactgacaaccaagagtgaaaaacacaggatggatgtggctgctgactggaacttactccaggttattttgggaatattccccaaagttgtaaatggctactttaaatcccagggtagctgaagaattggcgcaaaaatgcatgtggatcgtttctgctgaagatcactaagtagtgcctgccatcaggccttgaccttgtctctcctctcccacacatctggcctagtcacatcactctggatgcgtctccagctcactggcttacacatttagggtcttttttgctgaaatgctaaacacctctctgctctaagaattcacagggatggtttcaataaggattttgagctctgataggcagcaaactgaccacatagagcagtccacactacaaatcagagaacagaatacatagagttgatgtgtaagttctgtgtgcatgttcacgtgtcaaagacaggggttgatgctaagtgcctgcttgcattgttctccactttacatactgaggcagagttcactgcttgctgtttcagctaatctagctggcaagcttgtttgggtaatttcctctttttttgtgccctgggtgactctcatgagcccttgtggctggagatagagctctgtgattgaacatttgctcagaatgcatgaggccctaggttctatgcccagcactgaaaagacctggaaatagctctgtctccagcccttgtctcccagtccctctaactcagcttcttcatagtctcctcactatatatatatccttcacacagtcctaaccgcgccccgcaggagggccaggggaacctttcgagtttctgtgacagtacctacagtaatgcgagctaaagctgttctgaacgtcacccaccaggtgttcttgctacagtcctgtaagcaagatgacagtgagagagtacagaagtgaaacccacactgctgttccgggaaaggcagcatgactgttggaaatcaaagaccagagagacggtacctcgtaaccatggagctggaaagctctaggaagtagacatttggggtgactaagctgcccgtatgtgaaagacaaagtggaatttcttaggtacagcagttagaataactaagctgcctagatatagttaggagtgaagtacgtcaacagttgactttgaaatcaccctgggggaaaaaaaccaaaccaaaaccactaactgatgactagttagggtgagtctctgaattcacagtaccattctttcaactgtcaaatctgtcaaaaggtgagaggaagcttcaatacacatttgaaaaggacgatactaaggacttgtaattggatgtctgccagagcgccaaagtgtgcatcactatatataatctcaagcaccttgagtcccaagatcatcaaactctgagtggggttggttgaacagaaacaaatatgcagaataagaaaagctgctattttaagc

SEQ ID NO: 1028 - DNA, 1523 bp, Mus musculus
ggtgctcccctttatccgattcccagagcgccggcagtgacggggtcggagccggtgccctgggcgactgaggcggccgtagtccgcgacccggcgatgccggaccagatctccgtgtcggaattcgtggacgagacccatgaggactacaaggcgcccacggcctctagcttcaccacgcccacggcccagtgccgggacaccgtggcggccatcgaggagatactgctacctgctgagaggccccagagctattctggagactacgccctatcctgcgcgccctatcctgcatgtcatcacctgcagttggttccagtctccaaggatgaagtggcaggaatgctcctccctgcccccttataagtgccttcgccattgaatatttgagccttgatcagaacatggtcttggctccatttctctctcatctgcctagtttccctttctttaagtgccagcctgccactcaggtgtacccagtccatgtgagcctctggacggcttgcaagattgctgggtgacattagccaaggcacatgccatgtttggccctgagggactgtttctgtccaatatctaaaacaccttctaagcaacagcacctttcttcttgaggtgaggtgggagcaaagacaatgtctggccaatctcagagtctccagtgctcacccaggacagatgctcagtgggtgtttcctgaacatcatcagatggtctggggctcagtctacaggttctgtggctttaagcaggagggccagtggccttgctgtgtgtggagccaactgagttgggaaaggctggcatggactactctgactaaattttcggctgttccagacattcaaggtctttccccatgtctaccaattatctgcttcatccccacactcatgggagagtgaaccatgaacagggtgctgtggcaacacaggaaactcacagaccttggtttattagattattttaaaatgccagaccaatagaaaggaaggacggagcacacaggaacacctgtatttgcaggatggagggcagatgtacacagccttgagcatgcatgtatctcctgtgtaattaggcaaatgaatacataaataccacacaacagccagacttgggggtggggagaatcacaggccacagggtaccatgctttaaaggcagtcagaggctttaaaaagaggggctaaagaacttgaagctggatgacctgtttctcaagcgctatgcgtgtttgctcaaggatgtcggggaaccagtacccttccccgagccccctgaaagctttgcattttatataaaacaactaaaggaagcaagggaaagcccttcatgagataagcagtgtggctgtgtgtgtgtgtctgtgtatgtctgtgtgtctgctcctgtgagcatgtaaatgtgtgtgtgtgtgcgcatgtgcctgtgtctaaatgttatttctaaagtgtacttgagaggaaaataaaccaatgaaaatttaaaaaaaataaaataaaataaaaagagaggct

SEQ ID NO: 1029 - DNA, 1260 bp, Mus musculus
ggggggtggggatgggttggaggacaaacttttcttggctcatcaagggcggaggtaggagattttttccagtgtgagagtactcatctttgccttgagtcgtaaataacagctggtctgtgaggaaatccactgcacctgagaaacgtgtttccaatgttgctgtttgtgatacagatgtaaaggagcccgggaattcattggacattctcttctctcttgagcaggaggcttgtatcttacaagtgctgaatacagcttcttataaagtagctggagctttgggggtgtttcgaggatggaaggtcttcattattttagaacacaaaaagaagtttgggccgtttcagaggtttgagtatttgatagacgtgcccttgatccaatataacactgctgttgaagtttttatctccattctctgtccggagaacagacggaggaaaaagtcacaggagaagtggctgctgagaaagtcatacaagccaggtgtagagcaagagagacttaaggcagttaagagtatcgtatctattgtttttggtactcgaagaattgcatgggctcaccttgaccggagaccgactgtgctggactggcagcagactgagtgctggaaattaactaacaaaacatacccaacgtccttttatctggaagagatttcttcagtcatttcaaagatacctaaagcagatctctacattttggaaaaatcaggactttccattcagaacacatctctgcttcctatactgttacactttcttatcacggaagccatgctgtatgccttactcaacaaaacttttgccgaggatggccagcaccgcgtgctgagcataaatcgaaatgcggtgggcaagcactttgacctgatgatcggcgacacgaggacgagtgggagggagctagtgaagcagttcctctctgagtctgtgctgaaggagcggcctcgggtgttcttcccacaggacctcttagtgcagtacagacagaaggttgtcaagagctcataccggattgaagagttgtatgactcattattacaagctgttgctttttatgagttagtttttggcaaagactcagagctcaaatgttaatgcactcactctagtgttacacttatttattaaagcaatggttcccatcttccatgttagtggaaaacattttgaatatattttccatgtttataaaatctgatttttggcttaaaaaaaaatgagccaagaccaaatcaataaatattttgtg

SEQ ID NO: 1030 - DNA, 2070 bp, Mus musculus
ccttcctccgcttaagccacaacctctgctcagagaaacgtctgtggtttctggagagcacctagcgccgccaccgcgctgctgccggaggtccaggccaggtggacggaagacacggtgagccagcccctctcccctaggcaacccacacaacacggggtctggagatgctgagatcaatgtggaattttctgaaacgtcacaaaaagaaatgcatcttcctgggcacagtcctcggaggagtatatatcctgggaaaatatggacagaaaaaaattagagaaatacaagaaagagaagctgcagaatacattgcccaagctcggcgacagtaccattttgaaagcaaccagaggacttgcaatatgacagtgctgtccatgctgccgacactgagagaggccttaatgcagcagctcaactcggagagtctcacagctctgttgaaaagcaggccttcaaacaagctggaaatatgggaggacctaaagataataagtttcacaagaagtattgtagctgtatatagcacgtgtatgctggtggttcttttgcgagtccagttaaacataattggtggatatatttacctggataatgcaacagttggcaaaaatggcactaccgttcttgctcctccggatgtacagcagcagtatttatcaagtattcaacacctccttggagacggcctcacagagttggtcactgtcattaaacaagctgtacaaaggatcttaggaagtgtctctcttaaacattccttgtcccttttggacttggagcaaaaactaaaagaaatcagaattcttgttgagcaacatcagtcttcttggaatgataaagatgtgtccaggtcttcactgtgccagtacatgatgccagatgaggagacaccattggcagctcaggcctatgggctttctcacagagatatcaccactattaaacttctcaatgagacaagagacatgctggaaagtccagattttagtacagttttgaatacctgtctaaacagaggcttcagtcggcttctagacaacatggccgaattctttcgacccactgagcaggacctacagcatggtaactccataaacagtctgtccagtgtcagcctgcctttagctaagataattcccatagtgaacgggcagatccattcagtttgcagtgagacacctagtcattttgtgcaggatctgctgatgatggaacaggtgaaagactttgctgctaacgtgtacgaagcgtttagtaccccccaacaactggagaaatgattgttttctttccagaaaactacagcggactcatctacatcaaaaagtactctgaataaatcacctatacaatttgcaaccaaatgcctaataaaatctgttcttgagcaaagtcttcatttcataatgaagtagattcatttagcaccttactgtatttttaattcatcagcagtctacttcatcaggtgtatctaactggtgcacaaattacatcaggatcaatcatgatttcttaaagtctggatagctgatccaaaccaactaggtacttccatacgtatatggaatggaatgtggtgtcctttcacacatagaatgagggaagatatgtcttcaaaagtagatctaggagtggtggactctgaaattaggatgtttaactaactatgaagtttcctggactctgaagtaagcaagagcaagccagattctctccggccaccctgataaggcacatgtgatttgcttgaacacacgtgccagagggcttatcaccaaggaatcagtgcatttgaacccctatggtcaacttttctttactgttgtttcttcaatatttatttgcagcattttctaaagctttgttagcaaccctcagaaggttgtatatagattttcaggctaatgttatgtcgcttactcacaattattaataattacagaagtttattcatttgtgtataaatttaataactttgtattgattttgagtatgataacttgttgcaataaactattttaataaaatatagctttgtttacaaaaaaaaaaaaaaaaaaa

SEQ ID NO: 1031 - DNA, 1411 bp, Mus musculus
ggggcgctgtggttctaccgtggggtgactacagtgcagatggcggaaatggacctggtggctgagttgccgcgtcctgcgggtgctgcgcgctgggccgaggttatggctcgctttgccgccaggctgggcgagcagggccggcgggtggtgctgatcacatctggaggcaccaaggtccccctggaagcgcgagccgtgcgctttctggacaacttcagtagcgggcgacgcggagccgcgtcggcggaggtcttcctggctgccggctatggagtcctgttcttgtaccgagcgcgctcggccttcccctatgcccaccgcttcccgccccaggcctggctgtcagcccttcggccttctggcccagcccagtcgggcaagctgagtctggaggccgaagagaatgcgctcccgggctttgctgcagcattgcagagctaccaagaggcagccgctgccggcacctttctggctgtagagtttaccactttggcggattatctgcatctgctgcaggctgctaccctggctctcagtccattaggctcttctgcgatgttttacctggccgcggcagtgtcagatttctatattcctgtctccgaaatgcctgaacacaagatccactcatctggtggcccactgcagataacaatgaagatggtgccaaagatgctttcccctctggtcaaagactgggctcctaaagcgtttgtagtttcctttaagctggagacagacccggacatcataatcagtcgggctcggaatgctttggaagtttaccagcatcaggtggtggtggccaacatcctggagtcaataaagtcctttgtgattattgtaaccaaagactcggagacagagttactgctgtccgaggaggaggtggcaaaaggcttggtgatagaagagaagatagtagatgacttcggtctcgacacacagcttttatatgtgacaaaaactgaaggaaatgctcctctaggatcaaacaccagagctcttaccactgataggaactaagattgatcctctgttaaggatcaacacagtgaagagatagtaaacgcggtgtgcaggcaagtgcctgctgggacttcagttctgagagtgaaacactggacgctctcctggatctggaaagtgaacaagagttcacaaagaggactgtgggattgcgtggcctgcagagcagatgagccaggagccgctgcgtgttggcctactgtaaggtcatggtgcgtgaatggtcatgctctgaagaagtgtttatcaagtgcctaccatgtgccagggcctttgtgagctgtgagggtctgaaagatgaatgagcacgtctcatttgggaactggatgtacaaaaatttatgtgcaataaagtatgtgcccacaaagggacacttgg

SEQ ID NO: 1032 - DNA, 1353 bp, Mus musculus
gggccgtggtgccgcaaagcgctggagtgaggcggtctgagcaagctgtcgtctggaccccagacctgctggtggtgaagtatatcatgtataaaagtggatcaattccatgttaagtgaaaatggccaattcgttacgaggagaagtactgactctttataaaaatctgctgtatcttggacgggactatccaaaaggagcagactattttaaaaggcgtttgaagaacgttttccttaaaaacaaggatgtggaggacccagagaagatcaaagaacttatcgcacgaggagaatttgtaatgaaggagctagaggccttgtacttccttaggaaatacagagctatgaagcaacgttactattcagataccaaagtctgaccaatcattgcaccagtcgagctgacaaccagtgctggctgtttgcctgtaccaactattaaaaaataattcagtttaaaagggtgagatacatggtttttaaaaaaatgagttgccctactgtactgaaataggtttcaaccttattgatactgagagctttgcccataatccttttattactgaaatagtaactttagtacctttcatgataatataattttgaaagaaaatacacttaatttttaaacatgttatagccaattttcttaagtctatttcttcatttactgatgagattgtcactatcgaatggtgtctgacaggcttgccctttagcttctagagtgtctttgtccttgttttttgttgttttgttagcccatctagtatactaaagtgcatattcaaggctctctacagacacctcaaaatgatttaaatgcagttatcaaaataagacatgtgaaggtgacctctatcttgagaagctcagtgggtgactagcattgtgtagctattattcccattattctttgtgctgctggcctgccttaagttctgaaccacttcaagtagctttcatgaggagttgtaatgttcctctatttctgccattaaagctggtatattttctgtcgacctgtaaccgagtccatgtggcagtggacctaacccaggcaggactgtaagtttaagcaaaaatgtttatgtaatgtttttagcaacgttataaataacatttctaacttaaaagctgcaaatagtgttgcttataggattctgtatcaggctggagagatggctcagtggttaagagcactgactgctcttccagaggtcctgaatttaattcccagcaaccatatggtggcttacaaccatctgtaatgggatctgatgtccacttctggtgtgtctgaacacagacagtgtactcatagaataaataaataaacgaataaatctt

SEQ ID NO: 1033 - DNA, 866 bp, Mus musculus
  misc_feature 683, 726, 779: n = A,T,C or G
tttttttttttttttttttttttcagttcacccacgtttactgtgcccatcacatccaccattcatgaaggcaccgtcccacagaaatgaatgttgtcctgtggtcaagcatagcatgcactgtctttggttcgaccgaaagaaccggattggatgccccagtgcccacgtgtacccatgctgcaattacattttctaaattaaagtgctgtgacacacccctccactgctgagtgtcccacgcagacggcttctgtagcgtccctctctggacaccactgtggcactctctgggttgtgccgcctgcagccaggcctcagttcccagggtattcaaagaccgcagcagctcccatcccagtcccgatgcacatggataccacgccgtaagcccgtctgccacggcgcttcagttcattgagtagcgtgacaacctgccttgctcccgtgcagcccagggggtggcccagggctattgcaccccccagcgggttcaccttctctgcaggaattcctaacttctccacacagtagacggcctgacttgcaaaggcctcattgatctcaaagatgtctatgtcattcacagtcagccctgctttctgcaaggctgcagggatggcataggcaggtccgatgcccatgacgtcaggagggaccccgaccactgcataggacctcangaccccaaggatggggaggcccagttctttagccttggacctncgagccagcaggacgggagctgctccatcacttcacttgactgagtttccagncgggggagagctccatccttgaaggcaggcttcactttggcagcccctgcatggggtgctggggcggacaccctattctgagacaca

SEQ ID NO: 1034 - DNA, 870 bp, Mus musculus
atggcgctggctgctgcgcgtcgccttctgctgcacgcgggatcccgcctcgggcgcagggaagcggtggacggcgcgcggccgttcgctaacaagcgggtgctggtggagacggagggcccggcaggggttgcagtgatgaagttaaggaaccctcccgtgaattccctcagcttggagtgtctcacagagttcaccatcagcctggagaagctggaaaatgacaagagcatccgaggtgtcatcctcacgtcggaatgcccgggtatcttctcggctgggctggacttgctggagatgtatggccggaacccagcccactatgctgagtactggaagaacgtgcaggagctgtggctgagactctacacgtccaacatgatcttagtgtctgccatcaatggagcctctccagctggagggtgcctcttggctctctgctgtgactacagggttatggctgacaaccccaaatatactataggattgaatgagagcctgctgggcattgttgcccccttctggtttaaagacatgtatgtgaacaccatcgggcaccgggaggcggacggtgcccttcagctggggacccttttctcaccagcagaggccctcaaggtgggagtggtggatgaggtggtacctgaggatcaggtacacagcaaggctcgctcagtgatgaccaagtggttagctatcccagaccattctcggcagctgacaaagaacatgatgcgaaaggccaccgcagacaacctgatcaagcagcgagaggctgacatccagaatttcaccagtttcatctccaaagactccatccagaagtccctacacatgtacttggaaaagctcaagcaaaagaagggctaa

SEQ ID NO: 1035 - DNA, 2300 bp, Mus musculus
cagcggcctgcttgctcgggaactccctcagccaccgcgtcctcaagccgccattgccgcccgggacgatgatgccgcgcctgctgttgcgtgactggccccggtgcccctcgcttgtcctgggagcccctagtcggcccttaagtgctgtctcggggcccgccgagtatctgcagcacagcatcgtacccaccatgcactaccaggacagcctgcccaggctgcctatccctaaacttgaagacaccatgaagagatacctcagtgcacagaagcctctcttgaatgacagccagttcaggaagacagaagtgttgtgtaaggattttgagaacggcattgggaaggagctgcatgcgcacctgctcgctcaggataaacagaataagcacaccagctacatctcaggcccctggtttgatatgtatttaactgctcgagactctgtcgttttaaactttaatccattcatggcattcaatccggacccgaagtctgagtataatgaccagctcaccagggccaccaacttgactgtttctgcagtgcggtttctgaagacacttcgggctggccttctagagccagaagtgttccacttgaaccctgccagaagtgacacagatgccttcaaaagactcatccgctttgttccttcctctctctcctggtatggagcctacctggtcaatgcatatcccctggatatgtcccaatattttcggcttttcaattcaactcgtatacccaaacccagtcgtgatgaactctttactgataccaaggctagacacctcctggtcctaagaaaaggacatttctatgtctttgatgtcctcgatcaagatgggaacattgtgaatccctcagaaatccaggcacatctaaagtacattctctcagacagcagccctgtgcccgagtttcccctggcttatttgaccagtgagaaccgagatgtctgggcagagctcagacagaagttgattcatggtggcaatgaggaaaccctgaggaaagtggactctgctgtcttctgcctctgcttagatgacttcccgatgaaggatcttgttcacttgtcacacaccatgctgcacggtgacggcacgaaccgctggtttgataagtcctttaacctcattgtagccaaagatggcactgctgcagtccacttcgagcatgcgtggggggatggtgtagcagtccttaggtttttcaatgaagtgttcagagacagcactcagacccctgccattgctccccagagccagccggccgccaccgactcctccgtgtctgtgcagaagctcagttttaagctcagcagtgctctaaaggctggcgtcaccgctgctaaggagaagtttgatgccaccatgaaaaccctcaccattgacgccattcagtttcagagaggtggcaaggaattcttgaagaagaagaagctgagccctgatgcagtggcccagctggccttccagatggctttcctgcgacagtatggccagacagtggctacctatgaatcctgcagcactgcagccttcaaacacggccgcacagagactatctgcccagcttccatctttactaagagatgctccgaggcatttgtcagggagccctccaagcacagtgtgggcgagcttcagcatatgatggctgagtgctccaaataccatggccagctgaccaaagaagcagcgatgggccagggctttgaccgacacttgtttgctctacggtatctggcagcagccagaggggtcaccctgcctgagctctatcaggaccctgcataccagcggataaaccacaacatcctgtccaccagcactctgagcagcccagcagtgagcctcggtggctttgcccctgtggtccctgatggctttggcattgcgtatgctgttcacgatgactggataggctgcaatgtctcctcctactcaggacgcaatgcccgagagtttctccactgtgtccagaagtgcttggaagacatgttcgatgccctcgaaggcaaagccatcaaaacttagcttcttggtcgatgaaaagcctccattcttcctcatgaacattggtgttcatgtagctggaaggtaccatcttgtcaacaaaactagttcctggtgcttgagcagccagtgctgcaggtgtgagcggaagatcccaactgaaggtaatgagagactgcagctctaaagcccttcttaaggagatcgggttggaaagctaactcagctgtatttattgtttaaatagaaataaacccagtgttgcttgcaaaaaaa

SEQ ID NO: 1036 - DNA, 60 bp, Artificial Sequence
  oligonucleotide probe
aagccagcagaggaatgtctgaatgaagtactcaattaaaaagaaaccatttctatctgt

SEQ ID NO: 1037 - DNA, 60 bp, Artificial Sequence
  oligonucleotide probe
gaggcaccaaagtagttctagatgacaaggattatttcttatttagagatagtgacattc

SEQ ID NO: 1038 - DNA, 60 bp, Artificial Sequence
  oligonucleotide probe
tcctttgggaaatgtttctcgtatttatagtattgtgcttccagggaaagcagtaattca

SEQ ID NO: 1039 - DNA, 60 bp, Artificial Sequence
  oligonucleotide probe
ctaatgtataatgtcaatattcttttgtgtgtactacatttgggctattgtcccttcagc

SEQ ID NO: 1040 - DNA, 60 bp, Artificial Sequence
  oligonucleotide probe
catcattttaattattacaggacaatgataagtgcaagtcgtcatgattctgtggtggta

SEQ ID NO: 1041 - DNA, 60 bp, Artificial Sequence
  oligonucleotide probe
ggaattttctctttcccgcaaggtagaatttacttttcatagcaaaattaccatagtgct

SEQ ID NO: 1042 - DNA, 60 bp, Artificial Sequence
  oligonucleotide probe
ttgattagctgttgaggattacccactgtcttaggaagacctattttaaccttacgtgtt

SEQ ID NO: 1043 - DNA, 60 bp, Artificial Sequence
  oligonucleotide probe
tctctgaattcacagtaccattctttcaactgtcaaatctgtcaaaaggtgagaggaagc

SEQ ID NO: 1044 - DNA, 60 bp, Artificial Sequence
  oligonucleotide probe
ctttgttagaactgattcctgagttacgtgataacgataaagtatattcttgcagcatga

SEQ ID NO: 1045 - DNA, 60 bp, Artificial Sequence
  oligonucleotide probe
cataccggattgaagagttgtatgactcattattacaagctgttgctttttatgagttag

SEQ ID NO: 1046 - DNA, 60 bp, Artificial Sequence
  oligonucleotide probe
ccctcagaaggttgtatatagattttcaggctaatgttatgtcgcttactcacaattatt

SEQ ID NO: 1047 - DNA, 60 bp, Artificial Sequence
  oligonucleotide probe
gaatgagcacgtctcatttgggaactggatgtacaaaaatttatgtgcaataaagtatgt

SEQ ID NO: 1048 - DNA, 60 bp, Artificial Sequence
  oligonucleotide probe
ctaacccaggcaggactgtaagtttaagcaaaaatgtttatgtaatgtttttagcaacgt

SEQ ID NO: 1049 - DNA, 60 bp, Artificial Sequence
  oligonucleotide probe
agacggcctgacttgcaaaggcctcattgatctcaaagatgtctatgtcattcacagtca

SEQ ID NO: 1050 - DNA, 60 bp, Artificial Sequence
  oligonucleotide probe
ccaaagactccatccagaagtccctacacatgtacttggaaaagctcaagcaaaagaagg

SEQ ID NO: 1051 - DNA, 60 bp, Artificial Sequence
  oligonucleotide probe
tttgggagaggactaagatctgtactgtggctaataccgcagcttaaagctcagactaga

SEQ ID NO: 1052 - DNA, 60 bp, Artificial Sequence
  oligonucleotide probe
taaaagcatgcacattgagagtatcctggaagacattctcttgtaaacatgtgtgtggaa

SEQ ID NO: 1053 - DNA, 60 bp, Artificial Sequence
  oligonucleotide probe
gattcaatgcctgggctttcaaactcattccttcactccacaaatatttgctgaatgttt

SEQ ID NO: 1054 - DNA, 60 bp, Artificial Sequence
  oligonucleotide probe
tttttaatggagtatagactttcaccacttcacagactctggcctcctctccaagtctct

SEQ ID NO: 1055 - DNA, 60 bp, Artificial Sequence
  oligonucleotide probe
tgttacgttcagacaccgtagctctgtcctctcttattttgttggttttgacttaaaaaa

SEQ ID NO: 1056 - DNA, 60 bp, Artificial Sequence
  oligonucleotide probe
taatgagagactgcagctctaaagcccttcttaaggagatcgggttggaaagctaactca

SEQ ID NO: 1057 - DNA, 60 bp, Artificial Sequence
  oligonucleotide probe
cgaaggcaaagccatcaaaacttagcttcttggtcgatgaaaagcctccattcttcctca

SEQ ID NO: 1058 - DNA, 3741 bp, Rattus norvegicus
acacgggtcgttgctttggtgtctgtcacttctgtcgccacctcctctgccaacaccaacactgacctccgtcatgaaccccgacctgcgcaaggagcgggcctccgccaccttcaatccggagttgatcacgcacatcttggatggcagtccggagaatacccggcgccgtcgagaaattgagaacttgattctgaacgacccagacttccagcatgaggactataacttcctcactcgaagccagcgttatgaggtggctgttaagaagagtgccaccatggtgaagaagatgagggaatatggcatctcggaccctgaagaaatcatgtggtttaaaaaactatatttggccaattttgtggaacctgttggcctcaattactccatgtttattcctaccttgctgaatcagggcaccactgctcagcaggagaaatggatgcgcccgtcccaagaactccagataattggcacctacgcccagacggagatgggccacggaactcatcttcgaggcttggaaaccactgccacatatgaccccaagacccaagagttcattctcaacagccctactgtgacttccattaagtggtggcctgggggacttgggaaaacttccaatcacgcaatagttctggctcagctcatcactcaaggagagtgctacgggttacatgcctttgttgtccctatccgtgaaattgggacccacaagcccttgccaggcatcactgtcggggatatcggtcccaaatttggttatgaagagatggataacggctacctgaagatggacaattaccgtattcccagagagaacatgctgatgaaatacgcccaggtgaagcctgatggcacatatgtaaagcctttgagtaacaagctgacgtatgggaccatggtttttgtgaggtccttcctcgtgggaaatgcagctcagagtctgtccaaggcttgcacaatcgccatacgatacagcgctgtgaggcgccagtctgaaatcaagcaaagcgaaccagaaccacagattttggattttcaaacccagcagtataaactcttcccgctcctggccactgcctatgccttccacttcgtaggaaggtacatgaaggagacctaccttcgaattaatgagagcattggccaaggggacctgagtgaactgcctgagcttcacgccctcactgctgggctgaaggcttttactacttggacagccaatgctggcatcgaagaatgtcgaatggcctgcggcgggcacggctattctcacagcagtgggattccaaatatttacgtcacttttaccccggcctgcaccttcgagggagagaacactgttatgatgctgcagacagccaggttcttgatgaaaatctatgaccaggtgcggtcggggaagttggtgggtggtatggtgtcatacctgaatgacctgccgagtcagcggatccagccacagcaggtggcagtctggccaactatggtggacatcaacagcctggagggcctgacagaagcctacaagcttcgtgcagccagattggtagaaatcgctgcaaaaaaccttcagactcacgtgagtcacaggaagagcaaggaagtagcatggaacctaacctctgtcgaccttgttcgggcaagtgaggcgcattgccactacgtggtcgttaaggtcttctcagacaaactccccaagattcaagacaaagccgtccaagctgtgctgaggaacctgtgtctcttgtattctctctatgggatcagccagaaaggaggggactttcttgaggggagcatcatcacaggggctcagctgtcacaagtaaacgctcggatcctggagctgctcaccctgatccgccccaatgctgttgctctggtggatgcctttgactttaaggacatgacacttggctctgttcttggccgctatgatggaaatgtgtatgaaaacttgtttgagtgggccaagaaatccccactgaacaaaacagaggtccatgaatcttaccacaagcacttgaagcccctgcagtccaagctttgaagtttccctgggacacgtctgagctccacaagcagcagaaactctctcctctactcactaatccttgtgaaatcgtcatcaaatttgtgtagctacagagcaaatgatgggtttcttttcctccctataagtaaagagaaatgaacagactttagagattaaatgagaaattcggtgttgtaagtgcagtaatgcagacagagacgtaggaactcagaaagcttcagagctgtggtctgacttgcatttgtactgctgctaatctcagtaggccttgactctggagaattaacagagttttaactacaaatacttacttattttcacatttttactgctaatcactggatatatgttttttaaacaaaagtgttatatagagtggaattttccaggcattcgtgcctaccactttctgatctactgctaagagcaggagtttgggggccagaaactaatagaaaccttgatgtgggtgtgtggctgtcacacaggccgctgctgcctgccatgtgggtgtgtcacccctattaactgtcacattaacatagtcaacaagaggactccttcaacacccacccaccaagaaaccagagttcccgatgggcacaagcacccactccaggctcagccttcgtggtagtggcactactgtgcctttgaccccactttttgacacagttaagttacttgtcttacctccaggctttcagccattgcctggatttcagtcatggtggctgaccttccctttcttgcttgccttccttctcctgaaagagataaaagagatagtagtcagcctctcctcatagattaagtatatggagagccctcagctatggtattactgtattttggtgactttgttaagtaaatttcctgggacaatcctgatttgaaagattctgtattctgttgcacaagctattaaaatgctcagtggtcaccaaagtatttcacacacacacactcacaaatcactcaggtcaccttttacactagaaataacaggaaagccctggccacagccatctgctgagagtgttagttgagatgtttcgttgaagatggctgaagaaagtgcaggccctggggagtttctccttgctgagagccggctctgtggtgagcccctagcagccttacgaggcggtgaaacggccccttcagatgggagcagcctctacaatcattctgagcttaaaggtgaaatatgcaccttttgtcctataaatgtcctataaatgcttggggggaggggtaatgttttgttttttttttcttgaaacagagcccagaatggccttgaactctgatcctcacagcctggtaaatgctgggcctacaggtgtgcgccgacatgtctggctgatcggagctctttattcttaaaagcacagtagggagatgattgtaacattaagtctgtgtctgtggcattcgcattgtgagagcagttccttagaacagttctgagagcacagcatcaatgtagtgaaaacgatgtcgacgcctgacatgaaatcacaaccctccgggtcatcgacacaagccttaacctttctcctggaatgactggtaatcccttaagattgacagtacacagcatgtcaccttgttggggtttctattgacagtaattcatattctggaaaggaactaataaatataaatgaccg

SEQ ID NO: 1059 - DNA, 1749 bp, Rattus norvegicus
gtcaggaggtcccggaggtctgtgcccatggccatggccgctgcgttgctcgcccgggccggtggctctctcggcagagctctccgcgctcgagattggcgaagattacatactgtttaccagtctgtggaactacctgagacacatcagatgttgcgccagacatgccgggactttgctgagaaggagctggtccccatcgctgcccagctggacaaggaacatctcttccccacatcgcaggtgaagaagatgggggagctcgggctgctggccatggatgtgccagaggagctgagtggtgctggcctggattacctggcctactcgatcgccctggaggagatcagccgtggctgcgcctccaccggagtgatcatgagtgtcaacaactctctctacttgggacccatcctgaagttcggatcctcacagcagaagcagcagtggatcacccctttcaccaacggtgacaaaatcggctgttttgccctcagtgagccaggcaatggcagtgacgcgggggccgcttccaccactgcccgggaagagggtgactcctgggtcctcaacggcaccaaagcctggatcaccaactcctgggaggcttctgccacggtggtgtttgctagcaccgacaggtcccggcagaacaagggtatcagcgctttcctggttcccatgccaactcctgggcttacgctgggcaaaaaggaagacaagctgggcatccgggcctcatctacagctaacctcatctttgaggactgtcgcatccccaaggagaacctgctcggcgagcctgggatgggcttcaagatagccatgcaaaccctggacatgggccgcattggcatcgcctcccaggccctgggtattgcccaggcctccctggattgtgccgtgaagtacgccgagaaccgccatgcctttggggcacccctcacaaagctccaaaacatccagttcaagctggcagacatggccctggccctggagagtgcccgcctgctgacctggcgcgccgccatgttgaaggacaataagaagcctttcaccaaggagtcggccatggccaagctggctgcatcagaggctgctactgccattagccaccaggccatccagatcctgggcggcatggggtacgtgacagagatgccagccgagcgctactaccgagatgcccgcatcactgagatctatgaaggtaccagcgaaatccagagactggtgattgccgggcatctgctccggagctaccggagctgagcccccgcccttcttgggaacttgccagcctgctcagaccatgaagggacctgcctcggtcagcctttctgcccctcactgtagcccccagtcagactaggggaaagtctgtctcagggagagggaaggtcaaccgctgtgacctgtcagctcagaatggggcggcgtggctacctctttaccccccaccaacagtgcctctctctttgagcgacctgctggaggcagggccacagagacctgaatgaccctggccctcccaatgcggatgccgttcccaagagtcctcagaggcaagaacaggaggggcagggcggggtgaggaggggaaggggatggcccagtgcttgagtccccagggttgtcgtgggaaggctggggaaccggatcatagggccctggctagaggtcaagtggccgcaggtggttctgtggctgtagagctgcctgtggtcaataaagctcacctgtgtcctg

SEQ ID NO: 1060 - DNA, 1233 bp, Rattus norvegicus
ggtcagtgccggcctcgtctcatagacaagatggtgaaggtcggtgtcaacggatttggccgtattggccgcctggtcaccagggctgccttctcttgtgacaaagtggacattgttgccatcaacgaccccttcattgacctcaactacatggtctacatgttccagtatgattctacccacggcaagttcaatggcacagtcaaggctgagaatgggaagctggtcatcaatgggaaacccatcaccatcttccaggagcgcgatcccgctaacatcaaatggggtgatgctggtgctgagtatgtcgtggagtctactggcgtcttcaccaccatggagaaggctggggctcacctgaagggtggtgccaaaagggtcatcatctccgccccttccgctgatgcccccatgtttgtgatgggtgtgaaccacgagaaatatgacaactccctcaagattgtcagcaatgcatcctgcaccaccaactgcttagcccccctggccaaggtcatccatgacaactttggcatcgtggaagggctcatgaccacagtccatgccatcactgccactcagaagactgtggatggcccctctggaaagctgtggcgtgatggccgtggggcagcccagaacatcatccctgcatccactggtgctgccaaggctgtgggcaaggtcatcccagagctgaacgggaagctcactggcatggccttccgtgttcctacccccaatgtatccgttgtggatctgacatgccgcctggagaaacctgccaagtatgatgacatcaagaaggtggtgaagcaggcggccgagggcccactaaagggcatcctgggctacactgaggaccaggttgtctcctgtgacttcaacagcaactcccattcctccacctttgatgctggggctggcattgctctcaatgacaactttgtgaagctcatttcctggtatgacaatgaatatggctacagcaacagggtggtggacctcatggcctacatggcctccaaggagtaagaaacccctggaccacccagcccagcaaggatactgagagcaagagagaggccctcagttgcctgagagtccccatcccaactcagcccccaacactgagcactctccctcacaattccatcccagaccccataacaacaggaggggcctggggagccctcccttctctcgaataccatcaataaagttcgctgcaccctc

SEQ ID NO: 1061 - DNA, 559 bp, Rattus norvegicus
aattcggcacgagggctagtaagtacgcgttctgggcgcgcggggaccatgtaattccaggaaaccgtggcttgacccgtggctgaggctcagtagagccttggggagtggtaggatccgtcccagaagaggggcgcagcagccaatagggtgcagagcagggtgatacgagagtgttagaggtcaccgcagcagtccccaagggcgacttttttctcacctctaggaatctccgccttccttaagaatgcctgggcaaaggagccggtgctggtggtgtccttcactgtctggggcctcgctataattatgcccatgattagcccctacacccagtatgctagcatgatcaacaaggccacaccctacaactacccagtgcctgtgagagataatgggaacatgcctgatgtgcccagccacccacaggaacctctgggtccaagcttggaatggctcaagaacctgtgaatgcttctgttgatggaatccgtcccttccctgttgccctccaatagaaatgtgaaaactaataatcctacaaaaaaaaaaaaaaaaa

SEQ ID NO: 1062 - DNA, 1782 bp, Rattus norvegicus
gcgattggctggttcagcccagctcaacttcccgcacagcttccggcaagtcggaagccagggacaaaaagttttcaaagaagataggaggttgtggaggactcgctgctcatgagagaaggatgctacaactaagcctgtcccggctgggaatggggtccctgacagcctctccatggcatctactgctgctgggaggagcctcttggatactagcccgaattctggcctggatctataccttctatgacaactgctgccgccttcgttgcttccctcagccccctaaaccaagttggttttggggtcacttgaccttgatgaagaacaacgaggaaggcatgcagttcatagcacatctgggccgcaacttccgtgatatccacctctcttgggtgggacccgtgtacccgatcctgcgactcgtccaccctaacgtcattgctcccctgctccaagcctcagctgctgttgcacccaaggaaatgaccctctatggcttcctgaagccctggctgggggatgggctcctgatgagcgctggtgagaagtggaaccaccaccgacgcctgctgacacccgccttccactttgacatcctgaagtcctacgtgaagatttttaacaagagcgtgaacaccatgcatgccaagtggcagcgtctgactgccaagggcagtgcccgtctggacatgttcgagcacatcagcctgatgaccttggacagcctgcaaaaatgcatcttcagcttcgacagcaactgtcaggagtctaacagtgaatacatagctgcgatcctggaactcagctccctcatagtgaaacggcaacgccagcccttcctgtacctggacttcctgtattacctcactgctgatgggcggcgcttccgcaaggcctgcgacgtggtgcacaacttcacagatgctgtcatcagggagagacgcagcaccctcaatacccagggcgttgatgaattcctaaaggccagggctaagactaaaactttagactttattgatgttctcttgctggccaaggatgagcatgggaaggggctgtcggatgtggacatccgagcagaggctgacaccttcatgttcggaggtcatgacaccacggccagcgcactctcctggatcctgtacaacctggcaaggcacccggaataccaggagcgctgccggcaggaggtgcgggagctgctgagggaccgagagcctgaggagattgaatgggacgacctggcccagctgcccttcctaaccatgtgcatcaaggagagtctgcggctgcaccctccagtcttattaatctcccgctgctgttcccaggacattgtgctgccagatggccgggtcatccccaaagggaacatctgtgtcatcagcatctttggggttcaccacaatccttcagtgtggccagaccctgaggtctacaaccccttccgctttgacccagaaaacccacagaagaggtcacctctggcttttattcccttctcagcgggacccaggaactgcataggacagactttcgccatgagcgagataaaggtggcgctggcgctgacgctgctgcgcttctgcgtcctgccagatgacaaggagccgcgccggaagccggagctgatcctgcgtgcggagggcggactgtggctgcgggtggaaccgctgagcacagtgacctcacagctgccttgggacctcctcgcccaccctcctacctcttgagatctctgaataaagaattaaataagaaaaaaaaaaaaaaaaaaaa

SEQ ID NO: 1063 - DNA, 1498 bp, Rattus norvegicus
cgcgcgccctcgcccgacccgtgacagcgatgctagctctgcgctgcggtccccgcctgctcggtctgctctccggcccgcgctccgcgccgctcctcctctccacgacccgtacctgcagcgacggcggagcccgaggcgcgaactcttcctcccaaaacccgctcgtgtacttggacgtgggcgccgacggacagccgctcggccgcgtggtgctggagttaaaggcagatgtcgtgccaaagacagcagagaacttcagagccctgtgcactggtgagaagggctttggctacaaaggctccaccttccacagggtcatcccagccttcatgtgccaggctggcgacttcaccaatcacaatggcacgggagggaagtccatctacggaagccgctttcctgacgagaacttcacactgaagcacgtgggaccaggtgtcctgtccatggcaaacgcaggccccaacaccaatggctctcagttctttatctgcacaataaagacagactggctggatggcaagcatgttgtgtttggccatgtcaaagagggcatggatgttgtgaagaaaatagaatctttcggctcaaaaagtgggaagacatctaagaagattgtcatcacagactgtggccagttgagctaagtcacagccaaggtgctaggacagcagcaggcagccatgtcttggttcacccaggtactccaaagaactgtttgtacccacttctactgagtatgaggaaggccacttgggcacatggtcccccacaggaccaggctgctctcaactgtccatccttcctcagatccatttctgggcatcagcatggccactgggccatgtatccttagcaagtgtctcggtgattgccattgtgtgtgccttggacatcggcaatgctgaccagttagtcagagaaggctcctgcctttttccttgaccagcggggacagcagttgctatttaatgttgtcttcctcattgcaataatttaacaagatctcataggaacaagctactacactaactgcactgtctatgtgtgactgagttggcacaagccacagacaccccaccaccaccaccaccaccaccaccaccacctccccgcctggcttctgaaacataactcagggctcttgtgaaagtcccaccatcaatgcctctccttctggtcactgtgaatcctgctggttggctgctgtgattttctgaaaggagcctgtgaaatagaagcagctggacctggggacagacctgtgagccaggcctgtctgctcaatgtgaattcctgtgttgaaaacttacagaaactgcctgaattcatgctctcctcaagagggaagtgttttctggtaggctttgctttttctgtatgttaaatcaatcaatcaatgatatatatgtagaagatttctgaacagtcctctgtgttcatctcaaatgtgataaataaatcctattttctataaaaaaaaaaaaaaaaaaac

SEQ ID NO: 1064 - DNA, 676 bp, Rattus norvegicus
cggccgccatttcaggaatttcaatcttaaggaaaaagtaacaaaataacatatttcccattttctccatttttaagcttaattttagtaacttatttatgatgtttattttagttttgttgtggcctcgtctggaggccgaccttcccatgggtctaagagcagtgacattgtgaggagttgctgcctctcaggagttgtatgcacaagcattcagcagtgctgctgatgccgtctagggaaccttatttccgtttctcaaggcaggggcctcagactgttctcgatctgctgtagaacttcactgtgggggtgccagaaccccacactcttgaccagtctggaagaggttacactcaataaaactctcagctcgagcttatgcaatgattggtaaagtttttggcaattgtaagaattaggaaatgatcctagaaatatatgtaaagtattcaattttcaatcatttttcaaattactgttttaaattgttttgctgagttgtaatacttttgagatacaatgtattccttgtactgaaagaatgaaaaaggactttttcagcatttgaggtaagttctttaacgtttcattaaaaaacattttttacaaatattttgtacatgcacttgcagtattgaggttaatcattttaataaattcggaaattaaaatg

SEQ ID NO: 1065 - DNA, 682 bp, Rattus norvegicus
  misc_feature 267, 544, 623: n = A,T,C or G
gtactcttctccctgcggagcacgggctgagtcagtcagtctgtcggagtcagtcttccgaacaggctacgacaggctacttcggagaactagctgctggattattctgtgtcccctcccactctcccgccccaagtctctcttcacccttctcccgcccttgctcgtgcagccatggcggagtcatcggcggccactcagtctccgtcagtctcctcgtcgtcctccggggccgagccgtcaacgcttggcggcggcggcgggagncctggagcctgccccgccctgggggcgaagagctgcggctcctcctgtgcggtgcatgatctgattttctgggcgagatgtgaagaagactgggtttgtctttggcaccacgctgatcatgctgctctctctggcagctttcagtgttatcagtgtggtctcttacctcatcctggctctactctctgtcaccatcagcttcagagtctacaagtctgtcatccaagctgtgcagaagtcagaagaaggacatccattcaaggcctacctggatgtngacattacactggcctcagaagctttccacagctacatgaatgctgcaatggtgcatgtcaacaaggccctcaaactcnttattcgtctctttctggtagaagacttggttgactccttgaagctggctgtcttcatg

SEQ ID NO: 1066 - DNA, 381 bp, Rattus norvegicus
gaaggagacctggagaagcctgagggctgacctgggcctggctgcatggccccaagtgctggggaccttataaggcagcatgcccagttcacagaagatgttactagcctatacggtccatgcacaatggagtggctgctcctgtcactcttgggtaacagcaacacacatttgtaagggtaaagggttaagtcaagctaactgagacactgaatctcttcccctccagctgaaggcttgcgtgccctggcctctgccaactgtaagctaccttgggtactcccgagggtcagctccccactggtaggtttttccttctgtctttctgtctgcttggggtctctgtctgcttgggaggagagccccttcgatttttctatt

SEQ ID NO: 1067 - DNA, 572 bp, Rattus norvegicus
ctctgttgtacctgatgaagtagccaccattgcatccgaggtcacctcattctccaggcgcttcactcacgtcctcaccgcggggggcattggtcccactcatgacgatgtgacctttgaggcagtggcactggcttttggggaggagctcaaaccacaccctgagctccaagcagccatcaaaaccctaggaggggagggttgggagaagctgtcgatggtgccctcctctgcccaccgaccctggctggccttcattcatgcgcatcaacccgctgctggactggacctacagaaacatctgggaatttctgcggcagctgtttgtcccatactgcatcctgtatgacagagggtacacatcactggggagtcgggaaaacacaaagcagaatccggccctgaagtgcctgagcccaggagggcaccctgtctaccgcccagcatacctcctggagaatgaggatgaggaaaggaactcccgaatgtgatctcacacaagcttgggacaagacagagggaagggggctggcctggggtaacctgtcatgtcagtaaattgtacctcatgt

SEQ ID NO: 1068 - DNA, 444 bp, Rattus norvegicus
ccaagaaaaagatggtggtgatgcacccaatgcttcgtgtcaatgagataagcgtggaggtggactcggaccccagagcagcctatttccgccaagctgagaacggcatgtacatccgcatggctctggttgccaccgtgctaggccgtttttaggacccagccttctctctcgtctcttcaggcccaggcaggcaaccccgatgccccccacgggggcagcacgcttagcagacatcctggagcatacaggcagcccaagcacatatgtacaaactgggaccttgctctaggctccagactagggaactttctgactttggggtacagtctcagatcctgggagcccctctgcctcatctccgttcttacacctcagatctgtacagttacttttgtactgactgtaataaaacagccaagcagttaaaaaaaaaaaaaaaaa

SEQ ID NO: 1069 - DNA, 503 bp, Rattus norvegicus
aaccgacagctgagaagccggatagcttctgacttagagtgcacgcacctaagtcctcaactggaccttgatagccaacaaatgggagcagtgtcttgtctctttagcacctttaacatggtctccggcccacatgagtccaagccagaaatgggtcacagtggaaggaaggcacctccatttctatcttgaacagatcacctggtctctgagttattctggcgctaactccatgaaccgctcttccacacgtctgtccctactctggcatcttgcaccactgggctccacagtacatccatttgtccttcccatgtgtgagggtaactgactgtccagtgagtgtcgctgtttggtccactggctctccttacagaaacaaagagcagcggtgcgaggcagtgctggttttgctcacaagccatattgctgtggttattactgtctgacttgtgtgtccagtccaaataaaggtagctgctgatcaaaaaaaaaaaaaaaaa

SEQ ID NO: 1070 - DNA, 502 bp, Rattus norvegicus
gtgatgtacactgcttggtgcccctccccaccagtgcctccctcttttttggcttccagaggaactgagcctgagtgggctctgccagtgtctagtggagctgtccacgcagccagccactgtgtgttatggttctgccactaccagggaggcagcccgaggtgatgctgctcgccgcgcactacagtacctcaggatcatggccggtagcaaatagcacccactacagtgatggatatctgttacttcttgctccttctgccctgggtctatgcgtctgcctagctctggtgccctccagaggtgccatctctacctctgacacagcttgcctgccttgagactgaggaaggcaaaggcaagcaaggagccatgaaccacagggccccagccagcgcagggtttgccctcattccatggatgatgaatgaaaggaaattggaattctattggaatccagaataaatgctgctctttggcttcttaaaaaaaaaaaaaaaaa

SEQ ID NO: 1071 - DNA, 561 bp, Rattus norvegicus
ccattataatttatctctctattttgggccttctgcttctgtacatggtataccttacctttagttgagcccatcctgaagagacgcctctttggacactcccagctgttgcagagtgatgacgacattggggaccaccagccttttgcaaatgcacatgatgtgctggcccgctctcgcagccgagccaatgtcctaaacaaggtggagtacgcacagcagcgctggaagcttcaggtccaggagcagcgaaagtctgtctttgaccgacatgttgtcctcagctaactgggaactggaataaaggtgactagaaaaaccatggcagacaactgagaaggattgactgggtgtctgtgcattttaattccctgtttgtttttacaaaaccttgctggatggaggaagactcaaaactggaaacaaaccctgtgcttagtgtttttcttgttaatgtattaatagagacatttttaaagcacacagttccaagtcaaccagtaaaccttttcctacttgtgacttttactaataaaattaagctgcctgtgagttatcttt

SEQ ID NO: 1072 - DNA, 317 bp, Rattus norvegicus
gtcccatattatgagtggctggatttgaagtctgaatggcagaaaaccgcctacctcaaggacaagatgcgaaaagcagtggctgaggagctggccaagtgacctttcccatctgttcagactgcatctgaagacctgagggctcagggacccagacccagcagtgagtgctgggccggccagagttgtcacccatcagcgagatgaactctctgtaggaccttggccacagtagggggtgctcagcagctcccagggcaggcggtcctaataaatcacttgttttggtggatgccgggtctcttcccaggctctgt

SEQ ID NO: 1073 - DNA, 491 bp, Rattus norvegicus
gatcttacagttgacccgccaccctgagaactggaccctacaagcccgctggcgcctgataggtctgcccgtacacatgctgttcctgcgattctacaggcgcgataaggaggatctttaccggacctttgatgccttttccaccttctacctgaattccagtggcctcatttgtcgccatcacctggacaagctgatgccttcacactcaccatcaacgcctgtgaaaaagctgcttgtgggagccctggtggccctggggctgtcagaacctgagcccagcttacacctgtgctccaagacctgatccagacttgggtgaaggccgcactgaagactgctacgcacaaaaggaggtggaggtagacaggaatgtcgtgccagctgccgccctccactctccttccttcttcccatcatgctgtgtaaagctgctgtgtaatttaacttgtaaataataaagtttaagcaatgataaaaaaaaaaaaaaa

SEQ ID NO: 1074 - DNA, 475 bp, Rattus norvegicus
ggagcgtctgttctaagtacaaaccctgttggagctgtcctggtgaggcttttcacacagagcttcgtgttaccgtgtggtttgggttttgttgttgttgatgttcgttctatcttttttctttttcttttctgtgctctttggggggaacacacgttaagaattatatctggtttctacttaaatgtagtgcttagggttaattttttgtactgaagtctttattggtgggtgcatgctactgggaacaaggttttgtacaaaaggtccaatcagaatcactgtgcattactgagaccctgtctatcacaagccttctgtccccacacagaagactgtcagagtgaacaaaataatatgtattttgatttacttaagtgcttgtaaatttcttagggacctgccacttttgactgtggatcagttgatgtatacttgtattattaatgcctcaataaatcactgtggcggatcg

SEQ ID NO: 1075 - DNA, 351 bp, Rattus norvegicus
cgcctccctgccccttccgctcagcagcgtgccggtcggcgcgaccctccccgcctcggtcagcgtcttcccacaagcgggagccttcgccccgccgccggcgagcctgcctcagccgttgctgcccacgtcagacccggtggggccattgcccccgcaggctggcactaatcccttcctctgagacgcttcagcgcctgcgcgcgaggccccgcctcctcgagggcggatcctgcaagttgagcattggatctgtggacccctgacagatcctgaaaccaagctagggactgactgcatcttgggatcgaggactacgcccgcctaataaagactggaatctacgtcctc

SEQ ID NO: 1076 - DNA, 329 bp, Rattus norvegicus
  misc_feature 53: n = A,T,C or G
cccgaagggtgtccttcgagatggatgaggaggagcgggtccgggtgctgcangggcatccggctgtccgaaagtgttgtgaaccgcatgaaggattgcagccagccttcagcaggggaacagctggctcctggtcctggtcctgagtgctccgttcctgtgcccactgtccctcaaccaaccattccagtgcttactgttccttcaccctctgtatgtgggcccgcagaaggcacctataaagcccctcagggagactttaaagtgtccagggcagagaatagtgatggccagcagtcctcagcagttaaggaggatctcaagaagtt

SEQ ID NO: 1077 - DNA, 455 bp, Rattus norvegicus
gtgcggtacttgcagcagcccgactgtctgctcgtgggcaccaacatggacaaccggctcccgttagagaacgcccgtttcattgcgggtaccggctgtctggtgcgagccgtggagatggccgcccagcgccaggcggacatcatcgggaagcctagccgcttcatcttcgactgcgtgtcccaggagtatggtatcaacccggagcgcaccgtcatggtgggagaccgcctggacacagacatcctcctgggctccacctgtagcctgaagactatcctgaccctcaccggagtctccagtcttgaggatgtgaagagcaatcaggaaagtgactgcatgttcaagaagaaaatggtccctgacttctatgttgacagcatagccgacctcttgcctgcccttcaaggttaaagatctcgtgtctttaatctctggaataaaaaaaaaaaaaa

SEQ ID NO: 1078 - DNA, 494 bp, Rattus norvegicus
cggcacgaggcaaaacgctcttaggaagtttaaggcccaaaggaggtcccagggccaatggccggagctgggccgaccatgctactacgagaggagaatggctgttgcagtcggcgtcagagcagctccagcgccggggactctgatggggaacaggaggactcgcctgcagcgcgtgcccggcagcagctagaggcattgctcaacaagaccatgcgtattcgtatgacagacggaaggacactagtcggctgcttcctgtgcaccgatcgtgactgtaatgtcatcctgggctctgcgcaagaattcctcaagccttctgattcattttctgcgggggaaccccgtgtgctgggtctcgccatggtaccaggacaccacatcgtttctattgaagtccaaagggagagtctgtcggggggcccgtatctctgaccacgattgcacttctctttgagaccattaaaccctatgaccaaaaaaaaaaaaaaaaa

SEQ ID NO: 1079 - DNA, 366 bp, Rattus norvegicus
aaggtagaaatgggtacctcaagtcaaaatgatgttgacatgagttggattcctcaggaaactttgaatcagatcaataaagcttctccgagaaggctgcccaggaagcgggcacagaagagatcggtgggatctgatgagtaaatgttgtttgtgcaacagtccagtctgtgctcccctgccctcatgttctccgcctcgtgggaattagtgcagagaacgtgtcaccacagaaggcagcttctgcttatgtgtggactgagcagtcggaatctgtggccataagattgctgaaaatgcactgcatttgttttctaaagtaacaaatttgggttttttttaaaaccattaaactgtatgggtgtg

SEQ ID NO: 1080 - DNA, 623 bp, Rattus norvegicus
atgtctttacgtctgccaatcagggtggtcgtgagtactcaggaaacagaggcaggaggattttctcgagtttgaagccaccctggtctacatactaaaacagatgttgggcgctgagaatatagctcagtcattgcaattcttgctgtgctcgtttgaagatctcatttggatcctgggaggccaggtgtggcttcaggcacttgtaatcccagtgcttaggacggagagtcaggagggtccctagggcttcctagctagggaacctgatctgcctggtgagttccagggcagtggaggatcccatctcaaataacaaggtgatgactcccgaagaacctctggcttctacctgcacgtgtacccatctgcacatggacctctgaacgtgtctgccagtgtacacagacatagggccagggccgggattcagttaatagggactgcatcaaagtcctggattccatccctaaccacataaatcactcacagtggctcgcacctgtaatcccagaacccaggatgtacatgttggaaaagtagaagtttaaggtcatcgttggccagccagagctccatgaaaccctgtctcagaaacaataaagtggaacgcccccaaacag

SEQ ID NO: 1081 - DNA, 711 bp, Rattus norvegicus
agatgaagatccaggaggaccatagtctgtgtggagagaaaccctctatctcggctgtgaccgtggagctgagcaaagaaacgctggacaccatgttagatgggctgggtcgcattcgggaccagctctctgctgtagctaataagtaaggccagcagctattggcctgggagggtgtggctgccggcacagaggctgacagtggcagacagtggggtggaagggctgctgctacacagaaggcacagtggaggaaaggaagcggccatacccatgcccatgcccacggctcctctcttctcttcctccttttgtttttcctgaagatgagcaaagcctccatctctgagaaggccctgtgtggaggtaaaccgccttcggccatgcaaaggagcaggttcttcatcagccgcctgtgcactgctataaagaactcaggccggtgctgggcactcacctaatgatttacctccagctcacatgagctcgtttccagcccagaatacatgagggaattggggatgatgccagcagtgcctgcttccccatcacagacgtcagcagacacataacgatcccctaagacccctctctgagcttgcagccctgctgggccacagctccaatgcagaaagctggaacacaccactggccactattcctgcgctaggaagtaagaagagttggaaataaataacagtgatgattctg

SEQ ID NO: 1082 - DNA, 529 bp, Rattus norvegicus
tggattgaaggggacagaagcagaaagtaactgtcaccttcacaactaataataaaaatgtgaccgggtaaagctgcgagacagcgagacatcactacgtcactatgagacgtgacaggatctttttcctcctcgtcaatgcactttgccctctgggctgctgcctctgaggcagtggacgggcacactgaagatgtctcttctttgtagatccacatttgttttgatttatttctgcatcataaagtggaatcatcactcttgaagatcactgcaaaacccaacatgtcggcaactgacttcatcatgaacgtacaaacgggcagagagtgcaggacgtctgtgcatctccaagctttggctgcacagaagtcaccttagaaacacattcgctataagaagcaggcagagtcactccccgtccttgatcctgagtcgcagagttgggcctcgtaggaaactggaaaggacatttgacaaatcttctgtaaataaaagctgacttctcctccaaaaaaaaaaaaaaaaa

SEQ ID NO: 1083 - DNA, 418 bp, Rattus norvegicus
gtgagcgtaagcattggaaaaatatgtgtagtcttatctttttataagacgattttaataaactaaaatcacaaatgctgtaaagtttgagtgcaccagaatggaggctaacttcataaacattgtgctgtgcgaatattcctaaaatgatccccaagctgtggttttctagaagacatagttcagaaccgcttttgaaaaatctgtcctcgtgagctcactcagtttctgtcggacttttagagacagtggaaggattacctcattgagacgtttccgtgtcctcttcaactccacagggtcttgacggtggctttgtttttccttctagactattcaaacatgtagataagttatatttttctttaagtgtttaaagtaaacacttttcaagaaaacttaaaaaaaaaaaaaaaaa

SEQ ID NO: 1084 - DNA, 253 bp, Rattus norvegicus
  misc_feature 111, 122: n = A,T,C or G
ctacggctgtaagacccacgccatgctgccctatgaccagtacatgcaccgctttgctgcctatttccagcagggtgacatggaatccaatggaaagtacatcaccaagtntggagcccggnttgactaccagacaggccccattgtttggggggagccagggaccaacggtcaacatgcattctaccagcttatccaccaaggcaccaagatgataccctgtgaatttcctcatccctgttcagacccagca

SEQ ID NO: 1085 - DNA, 279 bp, Rattus norvegicus
cggcacgaggtttcctgtgtaatttagtagattccttgactagtgcttgggcacacaataaatcagtgttatttgctcttgaagccttttctttttttccttctttttttcttttttcggcagtgaatagttgactttatcatgtaagtgtatttctcaagcagctatctagcagaacattttgagagattctgttagctcagatgttcatgttgattgctgctgaatggtaaatattgaataaagttatcagattaatcttaaaaaaaaaaaaaaaaa

SEQ ID NO: 1086 - DNA, 536 bp, Rattus norvegicus
aaacttgcatgacaatatatgagcctcctcaaacgttcctgcagttttgcgattgatcctgtataagtgacaaaagctctagagtggcagctgagcaggcacagggctgtcatcaacaagaatacgtttcaaagtagtgacaaggtgaagtccttgtagcataaccattgtctgctctttgtctgcgttcaggaagagtgcagagtccctttccttgtgattcctagagaactttccctgcagagttgagttagatctctggggctgtcagggtagccctcaccctttacaggcagggctgggtttcctcctcctctgaaatgcaggattgcctccctgatcgtactctccattataccacatgtataacgagccaatatcaaagtaaagatgtaatgaaaatacactcatatattactgtaggagtgcttctagatgcccacacctcatttccatatttgtcattagctgtttccatcgaatgtttcaatgtatccttacaaaaataaagcagcatagaaagaaaaaaaaaaaaa

SEQ ID NO: 1087 - DNA, 637 bp, Rattus norvegicus
tttttctcgtgttgtagaaaagcatgggttatacatttgagtgaaaaggccctgtattatttaccaaaggtgtattgtttgcatttgtttataaatgcattattttagtactgtaaatttgggcataacttttgagtttactactattgcttcagctggcatctgtctttctccttttccgtcatccccataaatgtgcaatgtggggtgcataggtcacagaccaaacaagaccaccagcatgtaattgtccacactttgggaacagcgtgcactgtttcgtacacatcagtccctccagtgttggttttttaattttttttattttgtttataaattcagcattttgctttaaccttccggaaagatctgttgagagtccccattgcatctcaatgagctctctcttatttgcctatctttgtatgtattttgtatactagattgtgcaggacgtattctagaagggatcaatggtttgcattcaaaatgatgtagtttgtccaaaatattttgcctttaaaattgaaatgggttaatctcatttttttcttgatgatttgaaattgtaagatttgtccagctattgcttaataaaattttgcggatcaaaaaagatcaaaaaaaaaaaaaaaaa

SEQ ID NO: 1088 - DNA, 411 bp, Rattus norvegicus
tcagcagctatccatttcaacccggtgtttaccacggaaaagacagaacgtttcgtgtgactgcgtaccactggaacaaaaccaaaatgtggccacggctttttagggttctctgtgtgtgtagtgcccgagtgtctgagcagaaaggcatcatttcagtcgttgtataaagttgttttttttttttttttaagtgggcagaatctaagagtaatggtttctactctgtactaattgtcatattgactgtattttgtaacttgtttctggcctagggtgtgtttgttggaggggtttatgtactactgaacggtaccactagcacatgcctggatcgtagtgatgttagcttgttctaaagctatccgttgtgtcatatttacagaaaagtaaaaagattgccggaatgct

SEQ ID NO: 1089 - DNA, 338 bp, Rattus norvegicus
taaattcagacagacaacaaagcccactttccaagtgacgtggataccatgcattgcgaaagcacacttgggaaaaccagcaggaacatcagtagacttcccaaacaagttatagttcggaaccagatatatgacaaagcaattggttccccacaatgacagctcacagaaacacactctgacctgacaacagggacacatcaggtaagcaagtcatgcagacctgctccccaaaagggagtagcttctaaaaacaggaaaatgtcaactaatggacttctcgcttcacgtgccgacaagctttacctttataagacaaaacaaaacctttgcggccg

SEQ ID NO: 1090 - DNA, 503 bp, Rattus norvegicus
ttgataaaaatccgaaggttatttgccagggtttcacaggcaagcaggattgttctgatacaatgtaattcagcaaaggagatgcaggcagtcttagagaccagcttgtcaagccttatctgcagggtgccagcagatgccaccagctgttacagacaccatgttcaaatacaggcatcctgacaaggaagatgcacatcccgaggtggaccatgcatctgcctcctcctttccagcaggcagtctgattttgtgtatgttataatagcatataattaacctataatctaattgctgaggaagttcattatgcttgatttcttttttctgtttgttgaatgacattttgtatgacttttacattttgtgaaatgctttatgatattcttgtgacactttaacctctgatatttttgtaagatgtcagatatccatgtataagcactatttggaactgagtctgcgtcctaaattaatgatttattaaagtctttgcgtctggg

SEQ ID NO: 1091 - DNA, 580 bp, Rattus norvegicus
gatgatgatgaagataaacaatgcccaggatatcctcctctacaaggtcaacaagtatgtcaacttggtcatgtactttctcttcagactggcacctcaggcctacctcaccaagttcttcctacagtatgctggccagaggaccctggggacattcttgttgtctattctgcttatgctggacgtgatgatactcatctacttttctcgcctcctccgttctgatttctgccctgaacgtgctcccagccgccaacaaaaagacaaattcttgactgagtgagaaaggagatcccaggatgtgtgacagggacagcaagcacagccaacagctttgtaacataaactaggactctgccccaagcctgggtgtattctggggccagcctttccaccttaagcttacacccacactattgaaaacactaatgaaagctctctgaagtcctctgttcttgggcaagggttgaagcagaccaaccggttgggcatggtaaatgggtgaggacaagatgctgtccaaaagccagtgaacccataccaccccgcgatggacgctgacagctctaaaataacccct

SEQ ID NO: 1092 - DNA, 366 bp, Rattus norvegicus
cgagagctggactggtgcagaaactacttgtctcccttctcacagcactcttcaccccggagcagagacgccaggagctggaagtcacagtactcccggctgtgcctctgcgacagccaaaggggaagctcttgtgggaggagcagaggggctgcaccccctttggactcccccatgcacgttgccttatctctcccctctagccaggaatctgttgtttctcttctgccaatctactacgattgtatatgtgccgataccgccacccccccatggggggaggggagggtacaaggccctgcctgctccactttttctatcttggaactataccagataaaatcacttctgtttgttcagtttttc

SEQ ID NO: 1093 - DNA, 265 bp, Rattus norvegicus
  misc_feature 223, 237, 243, 244, 247, 255, 258, 262, 263, 264: n = A,T,C or G
atgtggaactggagcaggagctggctgacctccacggcaaggacgcggcgctcttgttctcttcctgcttcgtggccaacgactccactctcttcaccctggctaagatgatgccaggctgtgaaatttactctgattccgggaaccatgcctccatgatccaagggattcgcaacagtcgagtgccaaagtatatcttccgccacaatgatgtcaacatctngagaaactttttgnaaggtnncgncccctggnccnaaannng

SEQ ID NO: 1094 - DNA, 517 bp, Rattus norvegicus
aggaaatgcgtgctcagctgggataaactggatttccaacgtgctggtttcattgacctttttacacacagcggagtatcttacatactatggagcgttcttcctctacgccggattcgccgctgtgggactgcttttcgtctatggctgtcttcctgaaaccaaagggaaaaaactagaggaaatcgaatcgctcttcgaccaccggctgtgcacctgcggcaccgcggactcggacgagggcaggtacatcgagtacatccgcgtgaagggaagtaactaccatctctccgacaacgacgcctcggacgtggagtgacttccacccgatggctttccagttactgaagtgaacgtgtcgggaaggccagcggttggtcactgccctgctcacaagccgagtctccccaccgtccttgccaatgactccatattccagaagacttgatgagcagaaaaatacaactctggtgatgtttattttcatacacagaaatgctaaaaaaaaaaaaaaaaa

SEQ ID NO: 1095 - DNA, 504 bp, Rattus norvegicus
aagccacccacaaactaaacaaagaaaagcttgcattcacacatcatcatgaagctgctagatcttagaaatgccaggaaatgccgtaagagtaatccaagagcagctacattctgtaagggagagggtacagtcctcatcgagggaagccaggagacagtgggccagcacggtgactaccagaagaaaggaaagatgagcagaggctaggaggccaggaatggttttctcaaacttgaaggtaaaactgtgtctgttccaggtaaataaatattgtgtcttttgttaccagcaggccttcactagaagaatgtgacaggggattctttaggaggaaggggaacctggaaatacaggaaggaatctatgcactgggaagtgtaaatatatgagtaatataaaaggtaccaagaaacatagcacaggattttgctcaatatatatggcctggcctaaaagcatttaagaaaaacattgaaatgagcctaagaaaaaaaaaaaaaa

SEQ ID NO: 1096 - DNA, 478 bp, Rattus norvegicus
ctgttagtaactccgtcacaactctcttaagctgagccctgtaaaatcttccttttcatttaggtgaaagaaaattagtatttttgtgactgtggttgttgctgtttttgtgcccacagatgttttaaaactaatcttgggtaaggtaaactgtttttccatccatattacaaaaaataaagtgaaacgaggaggaaaaaaagtgtggtatttgcagttttgttatgtgggtttgaaaaataagatattgttttcagttatttataataaagaagtatactgagtacattgtataatgccaacatgtgtgtagcaatttgacatgcatagcttttgcatttaattaatggaggataaaatagatactataactttgtctttaaatttctattccaataaaagttgtgtcatttctatgacagtttttcataatattagaacattatttcatttaaataaaattgaaaataatttgtgc

SEQ ID NO: 1097 - DNA, 553 bp, Rattus norvegicus
ttggttctttcttgagttggttcaactttttcccacttctcggtcgtctcgtggagtctgtcttgcttctgccttgccggatttggtggctactggttggggctcctggcttcaatagcagccagttccaggaatgggaaaagctctatgaatttgttgacagttttcaggatgagaaacgtcagctggctcaccaggttctgggcattccagaaggagccaccaatgaagaaatacatcggagttaccgagacctggtgaaggtctggcacccagaccacaaccggcaccagacggaggaggcccagaggcacttcctagagatccaggctgcctatgaagtcttgagtcagcccaagaagcccagagcatcctggaggtgaaagcaacccctcaaggatgggctcagtcttgtcagcacagtcttcaaaacccaggacctaacagtcttaaagaagctgctcgatagaggcgaggggaactttaaaggaatgaggaagcatgtggtagaaaatatatttatgtgttaaatttctaaaaaaaaaaaaaaaaa

SEQ ID NO: 1098 - DNA, 536 bp, Rattus norvegicus
  misc_feature 498: n = A,T,C or G
gtactgtcagttctactcaaataatttttaaaattaagtagcacattgttaaattgtcaagcatgccagagagcaatgagaagtaaggtaggcccacaataaaaagtcattttttcctccatggccatttacaagcttcctgtggaacagtggcttcctatacaaacctcaactacatattacattactcactgtagagctcaccatagcttcaatataaaacattagagtctttttttcaataaaccttccaggaggcagtaaccaactaaagatttacctgcatggtttttgtttttttgttttttatttttttaattagctgcaaagtaaacatacaaactcctctgctgcctgttctctcatgattgtttcataaagcccagtattggttatctgttatctattgcacatccaacgtgaaataaataaatgtttcattgccatctaaagagaaagaataaaaataaaccattgaacaaactatattccaaacanactaataactacagatcagcatagctgactaacccaga

SEQ ID NO: 1099 - DNA, 260 bp, Rattus norvegicus
agacagacaacaagctatggcactagaagttaagaaatgttttggtatcatttttacgttctgtatttgtgtctgttccgtttcattttgtactacatgaagaactgttttttgcctgctggtacattacatttccgggggcttgggtggataatacttttcccagtctcccttggatggtggccttaaggcctggtagtgcttcaagaggtccactggttggatctctagctactggcctctaaatacaacccttcttt

SEQ ID NO: 1100 - DNA, 762 bp, Rattus norvegicus
cggcacgagggttaccattctgatggtggagcagaccccgcgcaaacgtctgcgatgagttagtttagagcttaacggccagagagaacttgctgggcatctgggcagcggacgatggaagaactctgggcttcggctgggacctttcattcatgtagcaggaaccggagatggctgcgcagagcagcccacggttttgtggaaatctgaaaactgtgcaatgtattgagaacactctgtaccatgtgcaaggagtacgctggtcccaaggtgtaaagctttaaatcatttatgtaaaatgtttaatctctactcgctctcagtgcaaaaagataaaaagaaaaaaagagagagaaactagaaaatgtagaacgaaggaaaaagacgagaaaaaggaaaaacatgtatatttgtacaaaaagttaaaaattatgctaatttaatgtttgtatttatccatgcgtggatccctctgccgcgcaactgctggcttattgattattaccaaaggcactagaaatcaccagcttcagattacccacaaatgtaaatctacttttgtattagactctagaggaatggttgttgagtaaaagcccccacacattcatcttcagttagctgacagtgtcctccacattattagattgctcttaaacttggtgaccagactgtcgaaaaatggttcctgtactgcccataccaactgcccagggctcctcgtccgccaggttctaaataaagaggcccaaccaaaatcac

SEQ ID NO: 1101 - DNA, 681 bp, Rattus norvegicus
caacaccaccttcccgcacaggatctgggaagctagcacctaaataccaggcttctttggactattaacatcttaaatgtgaagggcaccatctagttcttaaaagccattctcaaggtcttgcgtcctaggaccacagtaaggagcaagttctgtaccctcttctgtcttccaggggtcccagagcctcacctaaataatgtgtagacatcttccatgttcgtgtaacagcccaaagtgatacttctgaaccctgagcaatctactcaagaaattgaatggaaactcagaccaccttaagctctaatgagtgtgctctgaccaccaggtgtgcggagattttagtggggcttgactctccccttggcccctaggtgagtgtcagctcacacttgggggctcaggccttggttccaggctcttgacttgtgggacctatctgagaaagccctcatcctgtgatacagccctgttttgtagaagctgacaaggaaggacttcttagactctaggctaacccaggggtctgtggggctaacaggctgcatgatgttttctaaagacctgatgtaaggactgactgaataaagtgccactgatgacttgtctgctgtaaaaaaaaaaaaaaaaaaaaaaaaaaaaaaatggaagcgtgttaccaatctgaaatggaagtggccg

SEQ ID NO: 1102 - DNA, 593 bp, Rattus norvegicus
agggttagaatggcgcacctgtgatgcctgttgccttctttctagaaacatctctggcccataggccagccccaaaccaaaggcacctgggcctgggtgagggcacccctgacctgcctcaggccttgtcccagagtcttgccatggggctgtcaggagggtgctgacattcatgccctagattccctgcatacaggggccaggattttaaaatgccagttcaggctttgggcgatctacttggctgacagggtggacacatgaatcgaatttattacaggcttttgaaatcggttaatccagggaaaaggtgggattctcacagaccactccagaaatcaacccaacgagagcactttgcagagccatcagagatggtggcctcctctcttcacagacagcgacctgtgaaactgtgaactttgtactgacaggtcacctggagttttcttttttctcccgtagctttttggtttctttctgttgcaaaagtgtttggacagaagcagaactgtgaacgagatcctgaaatgcactaaattgtattctattaaactggagttacttgattcaatgaaaaaaaaaaaaaaaaa

SEQ ID NO: 1103 - DNA, 512 bp, Rattus norvegicus
ctggtgtggcatacccggacagagaaaccgaagatgaagcaggaggaacagctacagcgacagggccaggggtcagacccagctattgaggtgtgatggcaatctcaccctgacttctaccttattttaggcacataccttgtgggactgggctccaggccagcccaggatgtggctttttttttttttaagacctgatccctcagaaccagaggcagcccctccaaccacagggtgtggcccagttgcttctctgccttcttccagcctgccatgtggcactgcccacaggctggggacaagcagcttctgtagtgagccaggtcagccccatctggggtggagcaggacagatggactcaggagggagggtaacttattggggacaagcatgcagtggggggctagaggagctgggctggaccctccccacctgagcatgctgatccccttcctacctctagaataaagaatctcaacccagaggggcttcatggttcccctcacttggc

SEQ ID NO: 1104 - DNA, 567 bp, Rattus norvegicus
atattagccaacctttagagcaggaagaataatgccttgtaccagaccctctgctggatttctcttgcaatatgaatattcattaagttcatctgcatccaccatgaagttctttataggcagaaggccataaaacatctaagagaaggtgttattaacccaggtaacttccctgggacttcctagcatagcttcttgacagagcttcaagcaaatattatgagtaacatctcacacaattaaaatagagcaatgtaacccattttatcattgccttttgttttccgtgcctttacagtagaagaatgagagcaataaagtctgattggtacaaaccatcatggatgtttgttttaatctatttgaatagacgaaaatgtgggtaacaaaatataaactcatggaataaattctttaggccaacaagcaaatgtggtttggaacagctgcgtataactttttgactcagaacagacctagtacatggggaagaaggcctggtgtcacagcctaggctcagcgtgaattgaatacacagtgacaacatgaaggactctttatcaaacc

SEQ ID NO: 1105 - DNA, 519 bp, Rattus norvegicus
ggagcgaaggtgaccccggctgctaaagaaaggtagggcagagtagccatgggggcgcacctgacccggcgctatctgtgggatgcctcggtggagcctgaccctgagaagatgcccagcttcccgccgaactacggtcttccggagcgcaaggagcgagtgatggtggccacacagcaggagatgatggatgcccagctgacactacagcaacgtgactactgtgcgcactacctcatccggctgctgaagtgcaaacgcgacagctttcccaacttcgtggcctgcaagcatgagcagcatgactgggactactgcgagcaccaggactatgtgaagcgcatgaaggagtttgaacgtgagcggcgactgctccgaaggaagaagcggagggaactgagggagcaacgggtagcccaaggccagggagaaggagaggtgggccctgagatggccctgtagggattgaccgccagcctttggaccatcagtgaaataaaagctttaggtcacctgcct

SEQ ID NO: 1106 - DNA, 419 bp, Rattus norvegicus
acctaggaagggtgtaacgagacatcccaagtaataacgttaaagcctgtttttttgttttttatttctattttagtatttaaactgagattggtactttattccatttctaaaacgtagatataatttatgatacactcacatctatggacattctgggatgttttcgttaagatagacgcgtcactttcaaatgagggtgttgtacacaaactgtaacaggagagctaatggtcttttggattgagggtacccttccaagggctttttgaaaggcaatagagttactccttggtcagtcttcgcctctctaccttgtggagcaccgcccttcttttccatacccttgagccttgaagaagctgatgctaatggaagaactcacttgtctggttgaaataaagcccgtttgtgttggg

SEQ ID NO: 1107 - DNA, 464 bp, Rattus norvegicus
tgggttcaaaacttgttcgagttttgtcatgtatcccacggaatggccctcctcggagtgactgcgtctcatggacattacgtgcgtcctaaatatttgatgtatgtatacccaagtatgtatatcagatgtgtgcgtgcgcacgtgtgtgcatgcgtgtgcgtgctcccagatgcacggcttaccgtgcagccattgagccctgaggtatagaaaaactcctgtttaaaaactggggatggaaggaaaggatgttttccgtttccgtgggctttaccccttttttttcctttttgaaccttttaaatttaaaatgtctctgactctaagattaaaagaaaaaagtttgtggcgcttaatgccctcctcttggaacgtgatggttggacgcacactggaggttgctttcaaaaaatacagcgctttgttgagtcttaataaactgcagtttttcttggctgttg

SEQ ID NO: 1108 - DNA, 898 bp, Rattus norvegicus
cacccaggcctactgcaagatggtgctacacggcgccaagtacccgcactgcgccgtcaacgggcttctggtggcagagaggcagaggccgcgcaaggaacatcctcccggcgcgggcaaccacactctcttcgtggactgcatcccgctcttccacggcacgctggctctgacgcccatgctggaggtggcgctcaccctaattgactcatggtgcaaagacaacagctatgtgatcgccggctattaccaagctaatgaacgtgtgaaggatgccagcccaaaccaggtggcagagaaggtggcctccaggatcgcagagggcttcagtgatgctgcactcatcatggtggacaacgccaagttcacgatggactgtgcagcgcccacgatccacgtgtatgagcaacacgagaacaggtggcggtgccgagacccacatcacgactactgtgaagattggccggaggctcagaggatctccgcttcgctcctggacagccgctcctatgagacacttgtagattttgataatcacctggatgacattcggagcgactggacaaacccagagatcaacaaagcagttctacacctgtgctagacaaggaccacgactggagactccactacagagaagatgaaagcgtatttttaaatgtagaggcatagtgggttagcccatgggaagctgcaagtctgtaatgtgtgccttggaacgggtgcagccggcatccttcagggcggggctgtggagagagagctgtgggctatctgggctttgggttcttagtcctgtgctgcccaaccctgcccatcaaagctctttctgcttgtcccaggttattcccattaaacagttgtagccttttataatcctgaaaaaaaaaaaaaaaaa

SEQ ID NO: 1109 - DNA, 613 bp, Rattus norvegicus
aaaaagtaaaatctctccccaggagccagcagtgatcttcaaaatcccttcttttaaattagctggagagggaattcaagaagaaacactacttttaaacattttaatttacttgtgtgaccactttggatactaccagtttttaacctgtctttctgccttcactgccctggtcacgttgtctgggcagcacaggaccacattaactgtgctaataagagaaagttacatgatcagttatgtaggactgagcatcagaacactttccatatctgtgggagtggctatttatcaattacaaatgatacgaaaatcacactttccagttcccctttcggtctggtctgtgtatcagggaactgcagttgcctttcatgcaggaactatatttatgatctagcctatttcctacaacttcagttagacagttttccttaacaatgactattaccatgtttccttaacaatggctgttacaatgttttactcagactatgacttcctgacctattgttacaaacacagaacagactgaccttgataatcatgtaacaaagtattttgtagattacatattgatttgtacaaaattaaagatgtatttcaaatggtt

SEQ ID NO: 1110 - DNA, 268 bp, Rattus norvegicus
ttttaaatagcagcatcctgggcagccaatgctatctcatggtgacaaacaagcttagtgtgaagtgggagagtctttccaattgagccaattctacccccttccctcccccagtactagttattttacataactacaggttgttgtaaaaaatagaagaatttggcattttggaactttgtcccatgtgaggcattgtgctttatttttaactgcccctttcttaagtgaccctaaattcagacagacaaaaaaacctttgcggccg

SEQ ID NO: 1111 - DNA, 478 bp, Rattus norvegicus
gtcttcccaaacagaaaccatataattatccagggagcaacagcttcttagttcccctctgagaatactgatttttttaagtaactaactgcaggattaaaactctaggtaggtccttgctagggacactcgctgcctgggaattaaatggtatatacagacttctacgtggaaagaatggctgtgtgtagccagcccaggctgaaggagaacccacgggtaacaaaaagataaccgtgggtaatggtttactcaaggggaagctcttaagtggagaagcagactcaggaaaatagtgagtgtaaggttagcctgggctacacacatctgattgccttaatgggggatctttaaatgaggcatggtatagtgtttaaaaaaaagtccctagtcacagagagtagattggtctagatggtgaacatgtatatcaaaagtctacacacgtttaatgtatataatctgagtcagatgggaa

SEQ ID NO: 1112 - DNA, 795 bp, Rattus norvegicus
ccgttgcctaccctacttccttccgtggctgtagtagccatggcggctatgagcctgctgcagcgggcttcggtcgccgctctgacagctctgtctggccgccgcgctggcactaggctcggagtcggaagttttctcacacggagctttccgaagactgtcgctcctgtgcggcacagtggggaccatggcaagagactgtttgtcatcaagccttccttatactatgacgcccgcttcctgagattaatgaaattctaccttttgttgactgggatcccagttataatcggcataacactggtgaacatatttattggtgaagctgaactcgcagaaatcccagaaggctacatcccagaacactgggagtattacaagcatccaatatcacgatggattgcccggactttctacgatggacctgaaaagaactatgaaaagaccctggctatcctccagatcgagtctgaaaaggccgacttacggttaaaggagctggaggttcgaagactgatgcgtgcccggggtgatggaccttggtatcaatatccaacccctgaaaaggagttcattgattattctccaaaatcaactcctgacaactgatgattcgtctgttcctctagtgggaagaaaggaataaatactctgtattttcactcggatgcacacaagcttctgtggctgtttcttcatgtggttcaggtgatgcgtttgttctcttggtcctttcagcttcatctgttgcggtttacagggcaataataaaagctagaggcctgggaacttgtg

SEQ ID NO: 1113 - DNA, 496 bp, Rattus norvegicus
aagggctgcgagtgaggggtaaggaggcaagaggctgggtctcagctactcagctagtccctctcgggtcgtatcctgagggcatcgcggagaacgaacctacagacggtccgacaaacacccggccacgccatccattctcctagcaggtccaggtcgagttcccaggcaccattgtttctgtggcttggtcttctcaagttactcccattgcacagtgggaaatctgacagaaagaaactgggaactcccgacccccatgtgtggccagaatcattggtcagtttgcgtagtcacccacctatgtttacattttacagaaattactgctctgtaaccctcagtcctgggtgcggcccagcagcgtgttgttgggaaatgaccctgcccctggcctccctgggaagccatgttctgctcctaggtcctgctgctggattcttttcttcataaacttttacagttaactagtgtaacagaaaaaaaaaaaaaaaaa

SEQ ID NO: 1114 - DNA, 536 bp, Rattus norvegicus
tataccgtgaggggcaggtgaaggaggctgctcccaagtactacgatgccattgcctgcctcaagaacctgcagatgaaggagcagcctggatcacccgactggatccagttggacttgcagatcacaccactgctactcaactattgccagtgcaagctggtggctcaggagtactatgaggtgctggatcactgctcctccatcctcaacaagtatgatgacaatgtcaaggcttacttcaagcggggtaaggcccatgctgctgtgtggaatgcccaggaggcccaggctgactttgccaaggtgttggagctcgaccctgccctggcgcctgtggtaagcagagagctgcgggccctggaggcacggatccggcagaaggatgaggaggacaaagcccgcttccggggcatcttttcccactaacaggacctcagttctgccctgccctgccaagcccactgctgccaccacctgtcaatcccccactgccaccttgtgcttctgtgtatataaaggccttatttatctctc

SEQ ID NO: 1115 - DNA, 609 bp, Rattus norvegicus
gggtcgccgggcatggcggcatggggccccgtggccgctatgcctttgctccgcgggagccgcgggctccctctgtggcactgtgcacatcggatgttcgcctcccagacggagggggagctcaaagtgacccaggttctcaaagaaaagtttcctcgagccacggctatccaagtcacagacatctcaggaggctgcggggcgatgtatgaaattaaaatcgagtcagaagaatttaaagcgaagaggatggtccagcagcaccagatggtcaatcaggcactgaaagaagagatcaagggcatgcacggcctccggatatttacctcagtccccaagtgctgaccaagctccctggctgcgcgactgctcatgctgaaaaccttgagcgtactttgctcacagcaatattctagaaaaatccctgcctcactccccgagtatctattttttgttcattatcatttctatattataattatagagatacgttatctatttagagttaattaaagatcacaggtacctactgctcagaacaggtgtgtgtcacactcaggccctcctgtcagaagcagcgtcctttgttcacaaaaaaaaaaaaaaaaa

SEQ ID NO: 1116 - DNA, 571 bp, Rattus norvegicus
  misc_feature 118: n = A,T,C or G
ccatccctaccgcctcagattgtcagtgaatgaacatacacatgtgctggaaggttttttaagtttatatacaaacaggtttttgtttttttaagatttattttatgtatatgagtanactttgctctcttcacacacaccagaagagggcatttagatcccattaacaatggttgtgagccaccatgtggttgcggggaattgaactcaggacctttagaagagcatcagtgttcttaaccactgagccatctatttttccagcccacaaacatgggtttttaaagtttgtgtatcactacaacttttcatgtctagagacaaagtgataatacacttttcaaaatatttgggggatgtactttttgggattgactgaatagctcaaacaatatcagtggttaagagatattattcttgcaaaggaccaggatttggtctctcaacatccatgtcaggtggcctatgactccatctccaaaggaactctagcctccaagagcagccaaacacatgtggtacacacacatgcataattacaaataaatactgtctgtattcatttaatcct

SEQ ID NO: 1117 - DNA, 578 bp, Rattus norvegicus
ccttttcaacatccttgtttcaaacagaataaaagcaagcgaggattcagatatctggaaacagcattatcactgatttccagtgtattctcccttgcaaactatgccctgcctgcctacctgttttaaaagttttgaccacgttctttctatgttgtggtcaagtgatatgtgtttaagatctattttattatatgtgtgtgtgcatgtatgtgtacatgcatatgggagggacatcggagtgcctgaagtcagagttactggcagttgtgagccccctgatgtgggtgctgggacccaaactccagtcttacagaagagcagcaaatgctcttaaccactgagccacctctccagccccctcgagcaatattttttgatacagcatgtatttttacacccatatagtctaaacaccagggttcctgatatcctggtttctaaaaaggaactgaagtaaaacagatgcctgtctgctttagaagatcttttgaatgttttatgactgtctgcttgtttgaatattggcgaaaggataaataataaattgacatcaaaaataaaaaaaaaaaaaaaaa

SEQ ID NO: 1118 - DNA, 365 bp, Rattus norvegicus
aagagggagacttgcatcattgaagccatgtgtgggctgatggactatggatggtaggcaggagggatcccagtccacctacttcttcctctctcttgcaggactattggggttcatgtctagaccatgtcatgagggagaggtgttcctctgggctgttgctatgagcaggatgggctacctcacctaacttgtttagaattaaaaagggcacctggtgccggggacaggagtatggatgtagacaggaattttgacccatggggaaaagataggaaaagatgtgctttgacaagtgtgaggtgttcacctttgatattagccatagaaattaaaaagtatgcaaacaaaaaaaaaaaaaaaaa

SEQ ID NO: 1119 - DNA, 575 bp, Rattus norvegicus
cttattttcccattgatatggggctgcttttggtgggtgtgcatgagaggtggcatgagacaacatgtttacatacagaaacaggcctgcctcttctgctgatcattctgaaggtccgagtttcctctcctggatcctcttgaggaagagtaaccctgttgcatagcaaatggtgcttgtgtgccctcagctggattgtatgtgattgaagagcaagggctccatgttggttcatttcctcttttcttctctcagagccaaaccctcattaccctcacctagccatctgctcctctgcaaacagctaaactcactgactctctcacgcatgaacagcagccttccattctatcgctatgtgtacactatgctcttacactgagatgcggctctccgtgtctccttggctcacttgtagttttttgttcctgcatctgaagatgctctttgatgggtctgaacagcagagagaactgaacagcagagagaactgtcctaaccctctgggtgccctgggaaggcagttaaaacgactttactttgtgttacattaaatgcagatgctttctccacct

SEQ ID NO: 1120 - DNA, 448 bp, Rattus norvegicus
tgaggtgtttggccctccctgaggtagataacttcttctctggctctgactgtacttggttcatactgggggctcctgagtacatccctctagtgaagccaaattcaactccaggtatttggtcaaatcaatgtcaataataaaggagcaaaacttgttggtcttgccaaatgtgtgcaggggaatgtgtgtttgtgtgtggatgtttcagtggagacataaaaatctgtaattttttttagcacctcaccagacataacaattagctattatcctttcgacaacaccacgaagattgcatctgttaaacaggttcaagttaacaggaggttagtgtaattgtacaccatgatattggtggtatttatgctgtcaagtccaaaactttatttgttcttctaaatgtttaataaactgatttttttccttttaaaaaaaaaaaaaaaaa

SEQ ID NO: 1121 - DNA, 460 bp, Rattus norvegicus
  misc_feature 402, 437: n = A,T,C or G
taatttctctgttgctgcaatggcaaaacaaaaacgtagactgactcttctgcatgtttcccatagagcagaaaagtgctaaccaggtagccacttcatgatgcaagcaaaaagcataggcgacaaagttcccactgagatgcctttggggctcagtcggaacgcactgtgcggtcacgtgactgctgtgcaggagttgcagcggctgctccaactccctcctcgcctttttaagaacttgccagaatgcatggtttaacttccttatcaaaactctgacctcccttctgttcttttgtgctttcacacgactaacacagatttccagagaactaacattttgaactttgctgtaattctcaagtgactttccccccctactaatgtttgactcccctatgnggcgtgttctctgagcgtcctacttaaaccatggnacacaggtgatttggagcaccta

SEQ ID NO: 1122 - DNA, 556 bp, Rattus norvegicus
gttgaatccgttgctttagttgctgaaagtctaggtgaaggttgttcctggccaacaggagagtcagagcttcttagtcacctgacttccacttgggctgtgggatttcaactggctgcccagactctgggtgagaccacagggtgtgacccaggcaggatttccacgggttcatgggctgatgagggttcccaaagctcctgaagggaacctgagttggccatctcggttcattccttcatgggcgtatacagatgagggcccaagggggagagaaaggaacagatgggctggaccagatgagagatcccagtgttggagaggaggatgggagtggccgagcatgggaacacattcagggatggatgagtctgtggtttcttatccaaaactccactgactcaaccttaaaactcacaagtgggatccatgcggactgagtcaatctgagtgactgtgaataatgaatgctctccctcaactctttgtcacaacactaaacttcaaaatactcaaataaaatattgaggtcaatgtttaaaaaaaaaaaaaaaaa

SEQ ID NO: 1123 - DNA, 700 bp, Rattus norvegicus
aattcggcacgaggcggagcggaaggaatatggcgtccgctactcgcgttatccaaaagcttcggaactgggcgtctgggcaagacctgcaggcgaagctgcagctgcgctaccaggagatcgccaagcggacccagccacctccgaagctccctgtgggccccagtcacaagctgtccaacaattactactgtactcgtgatggccgccgggaagttgtgcctccctcaatcatcatgtcctcacaaaaggccctggtgtcgggcaagacagctgagagttctgctgtggcagccactaagagggcagtgacacctgctcctcccatgaagaggtgggagctgtcaagggaccagccgtacctgtgaccctgagttggctaccttgctatgtttccagggccacatgactgcttttcctccttggattccttctggggagagtgtgacctaatttataacaaatacattaagtaccacattatttccaatctgtcttttcttggtatttattgattggatttgatctgttattactgtatgtgttgggggtgtgagtacatgctacagcatgtgtggatgtgagaagataactttgggaattggttttccccttccacttgttgaggcagggtcttttgtttttggtatcctgtgtactccaggttagttggcccaagaatgtctacatgaggctgctg

SEQ ID NO: 1124 - DNA, 486 bp, Rattus norvegicus
tgagagatgacatgattgaggtaggtgaacttagagataaaagggttcttataattgaatatagaaaacttctggtttgacggtgtaacattaggttcttttcacttgaaaagattttgaaataaaatcacatattttaaagctgtaaattgtatatgtctgaggatttagtaaaatgtcagagatcaatctataagaaaatttaaatgttgtttttatatcttagttgtctgtcattattttggatcccacaatccctaatttaaccatttcggcaagtgcctttgacacttaaggagtattgtgggagatgagcaaatgtaggtgccacaccccgtttcctggcttctcaattcctcgtgacagtatatgttttacagtgctacaaagttcagtcctttgtgttcatgtgagattgtactgtagcctttccatagtaaacagcaaaataaaccatttgcagaaaatgaaaaaaaaaaaaaaaaa

SEQ ID NO: 1125 - DNA, 322 bp, Rattus norvegicus
  misc_feature 38: n = A,T,C or G
aagttaatttacccaagagcaaactctagtttaatctntgtgatgtgaaaatggaacattttggtcagaatttcctacatagcaatgacacctacaacctagttttcacattattccccttatattcaccctctcaaaaattattatttgaaataatttatttacaggaagtgttaatgagatgtattttcttatagagatgtttcttacagaaagctttgtagcagaatatatttgcagctgtcgactttgtaatttaggggaaatgtataataagatgaaatatattaaatttttctctctcgaaaaaaaaaaaaaaaaa

SEQ ID NO: 1126 - DNA, 644 bp, Rattus norvegicus
atgatgagggcagatgcgagtttggacaaggctggttgctctgtaattatgtacatgtttgcttgggcagccgtcccaaattttgtatattagaacaagagtttctatgaattatcatacctaaagtaaatattctaagtggagcccacttgcgatcatcagcctctgtcacgaggattttacctttagaaggttactcaagacaggagccggtggcttaggaaggggcaaggaaatgtgctgtagcggcctgtggcctcagccatcagcatccctcggggttttctttccatgatggccatagaagacctcactttgataacatgctcctcctgatgctttctgtaaagatgttcttcataagcagtctctcgtgagggatgtggctgggagctgggaggcaagggactgcagtgaacttagctgtgtgaccttgggcaagtcacctaacctctctgtgcttcagtctccctcttgtaaatgggagtaatacctacctcacagggttgttgtggggattaattagagaggaagtctgtaaagcatttaaaaggttcttgaagaaggcgctatataaatacaaaataatatctattaaagttggcttatttgtgcttgtcggtttttaaaaaaaaaaaaaaaaa

SEQ ID NO: 1127 - DNA, 534 bp, Rattus norvegicus
cagccaccgggttccctgcgtcgccgagcctcgcggttcaaggacactttcaccgaggaactccgccgcggcgtccgggaccgtctggggcagcagaagggtcccggcgccaacgcgtaagcacggactgtactcttcacgggtcgaggtcaggtatcctcccttcagtgatctacaccgacctcagcattctcgggtcatcagaacgctacgctgcttcgagtcctaagtcggattgtcaccttacagatgcctaaagtcacatggacatctgcccggtaggcctgcagatgtaaagacctcgaagcccaccaatgattaagagtctagaccataaaatagcacgactgagagccatggacaaacaaccagaaagaaagcccgccttctgcgagcaggactgaagctgaataaatgctgctgcatctgcacgggtgcaggagaataccagcgaagcttgtaaatggaatgacaatcccaggttgccaaaatctttcattaaatgtgtaagctgattaaaaaaaaaaaaaaaaa

SEQ ID NO: 1128 - DNA, 352 bp, Rattus norvegicus
tacccatgtgtgctcaggacccaggatctgacctggcagacagcctagtctggctttgctctctttggggtcaccacgagcatgtggacttcctcagcctgaagcaccatagctggggagaggtggcccagtgtcactgtccttcctaggtacatgggcaggagctgttgtggttgtacgggggcgaggcagccacagggctgctgcaggtaggaggggcaagagcagctgcttaaaagctgggcctgccaaactctgctccatggctgaacttaatgataatcgcttggtaatgagtggttagtcgctcttgagtaaatgacttcacctctctgaaaaaaaaaaaaaaaaa

SEQ ID NO: 1129 - DNA, 492 bp, Rattus norvegicus
catttgtgtgaatgtgtgtgtatttatatatcacaataatgtagttatttaggtacttacacgtgaaattgagcatcatgttggtgtggtgaccagaagtagtaaggtgctagacggtcacattaagagcacagccgagtgtgcaatcagtcactgactggtgggtttgtaaactaggttcagtttttgaaccacagaatacctcatgtgtaaatacagtgttcatgacttaactgagatacagttattgtaaaaaaaaatgtgaagcccctggctggctcctgccttctgagtttttatttttacctcctttttggaaaggagttgtttttgttttgttattttttaaatagggtttacagctagaaatttgaatgccaaagttctatttattaaactaataaaaaacgttttcaatgttaatggctagtatttttccactggactattgtttgttgatgttggaatttgtatttacagagaaataaattt

SEQ ID NO: 1130 - DNA, 468 bp, Rattus norvegicus
taccttgggttatcctcggattcaactatatcattggaggctcggttatcaatgagctcattggaaaccttgtcggacatctttatttcttcatgatgttcagatacccaatggatttgggaggaaggaattttctgtccacacctcagtttttgtaccgctggctacccagcaggagaggaggggtgtcgggcttcggtgtgccccctgcaagcatgaggcgagctgctgatcagaatggcggaggtgggagacacaactggggccagggcttccgacttggagaccagtgaggagcagccctggcctgctcaccagccatgctaagcagatgacagtctcctcccagtgctgggcacgcttaatggccgagctcttgctgccgctcttggacctgacccacactgaatgtagtcttttggtacaagacacatttttaaatcccgaaggaaaatacaagtgttcctc

SEQ ID NO: 1131 - DNA, 510 bp, Rattus norvegicus
ttttctctgatgtctatacgccatccgctgtatttagtctgcaatgcagaattttacatagacttactggttacaagcttgttccttaaactttgtgtatgtttaagtgttactaaagtagtactaaagaaaggtttgtattcaaccacgtagtaatatttcaagctactaaaggaatagttttacctatttagacaacagcaatttctactacattttttataagcttaaaactcactatgtatacaatagccggtggggtgtagaacaaaagaggccaggaaccaccgtatacaattagagcgggtataattgtttcattaatttgtcacagttttactgtaaaggaaagtagaggcagaatctttatactccccccgaaaaccacaatgctgactctatgaatctgcacgccatccttaaaatagtaattaagtagccaaatgtgttcttgacgttgttcacaactttgaataaactaagtttcaaagccaaaaaaaaaaaaaaaaa

SEQ ID NO: 1132 - DNA, 530 bp, Rattus norvegicus
tgactttctaatccgcgttaactttcaggatgcaggttctgagaaagagagaaaaatgaacagtctaaatgagattaaagccttggaaataatttgtgcttccaaacaatgatagcagagatttccagtttagtaaaagttgatgtgactaccttgggtaggcattaagaactcagtgttacagatggcccaggtgattagtcttagtaaactgtattgccatatgtcgatgttaacctgctgcagagcaagggattctcgcactaggttgagcacggagaggggagaaggggagctttccccagaaagaatagggaagccatgggacctcccagcaccgagaaagtcgcctcaacacttccttccatgatgctcattatgcaaacctctttagcgctctttttaagtttgcaacgttttaaatgtaggggaaggggaaggtttccaccaactgaatcatttgtgcacgtgtacagctcaaagagcttagagttcaaatatatctggtgaatgaaaaaaaaaaaaaaaaa

SEQ ID NO: 1133 - DNA, 600 bp, Rattus norvegicus
ggcaacgtctgcctcaacatcctcagagaggactggaagccagtccttacgataaactccataatttatggcctgcagtatctcttcttggagcccaaccccgaggacccactgaacaaggaggctgccgaggtcctgcagaacaatcggcggctgtttgaacaaaacgtgcagcgctccatgataggtggttacatcgggtccacctacttcgagcgctgcctgaaatagggttagcaattacccatccctgccagggttactggcccaggcatcccctgcaaatatttattgggggcccaggtagggtgtgtggggtagccttggcccctgccttggccttgcctctcctccctgtcacctgcccctagttattttttttgaccaccacgtgattatggtcggtgctgcctcccccgacctgctcagcgatgggaaatgaattggcttgtttagcgccccccctcccgctgggtgctgtccaaccccccactcttgactgtggggtaagtgggcaatgggcctgggtcaccaggctcaagcaacccaccccaccaccactggaggtcccaccaggctattaaaggggaatgttactgc

SEQ ID NO: 1134 - DNA, 1260 bp, Rattus norvegicus
  misc_feature 629: n = A,T,C or G
aaagtccctttaccacctataaaacatcactgctccgtcccgcccacctccggggctgactggtcagaagccacccttgtctacgtgggataattctccccttcgtgtaggtggaggatggggaaattctgacgccagatataccccaggctccagctggggtgagagcagctcagggagaataaccaattggcttgttctgaagaacctcacacctcagattgacggctccactctgcgcaccctgtgcatgcagcatggcccactgattacattccatctgaacctcccacatggaaatgctctggtccgttacagttcaaaggaagaggtagtgaaggcacaaaagtctctgcacatgtgtgtgctggggaacactactattctcgctgagtttgccagtgaagaggagatcagtcgcttctttgcacaaacccctgttgttctgcccacaaatggtattataatgcttgcttagtcagagagactaaacaagggtaaagttttaacagtacagagtatgccgtcatttcattgccttgattctaacgtttgtgtcctaagacgcaaaagaggctcttttataatgaaagttacaaagttgctgcatgtgagaggtcttctcatanagcagcagattaaaaatctaagcaattatttgaacgttttacctgaacttctccacaatcaccctgagataatgtgagaacagtggaaactgtagcttgctccctcctcccctgagcatctttgggagcttgttgctcaaagctcttctctggcttcaccttccccaccatctgtgcccatctcaagcctcagcgggaccattcggaacacgaagcttactgacttgacagcatcctagcgttaacctctcatacctcacacagtggggatgccaccacctggactggcctctcttccccgtgccctccgcccctcctcgctgcaggagctctgggcgcagaacctgtatgacttcagtcacgctccacttgccaggtgtaagctaatgttggacaccgtaacctaaacaaatgtttaactcgttcggtgtgtgttgacgtccatactggtttttccaaaaaccaaaggtagctttgaaaaaccatgtgtggagatgtttggaacattaagctgagtgaccgttaggggctttgagtagtatataactgacttcatgacttcgttaattgtattgttaaaagtgtttgggagttttttgcgcttgttatgtggaaataaagtgtttgattt

SEQ ID NO: 1135 - DNA, 346 bp, Rattus norvegicus
tacgcaaaatgtccgtgttctgcgtataaataagttttgggatcaccaagctgcctggctcactgtgctgatagtggaatgaagattatccctcgggctgtaagctgcagctttctgcccactgtcatgtcaaatctctatggcaaggagaataaaagcaaaggcttcccaggtatgtggtgagcctgaagctggtgtgtgacaactggcatctgtgaaaatgattgtgtttgttacaacagacatgagtggtgcaggatgccatgcagtgagacatggctgcaactttactgacctctcaagaaataaatgtgcccatggaaaactttaaaaaaaaaaaaaaaaa

SEQ ID NO: 1136 - DNA, 515 bp, Rattus norvegicus
taaaaaataatttccctctcaggttggctgtgtttttaaaacatcccgctaagcatttccacctctgagaaagtaaatggagacacataaaggtctaaaagccaggattttttggtgcagtgttatttataatagtgaaaacttgacaatgatcagaaaattcactcataagggaatggctaaattatggtataagtacactgtggaaaattatacaggcattaaaatcattgtagaccaagactgctgatgtggaaatactaagttaaaaagcaagctacaaaaataagtgtattatacttaattttgtgtttaagaaagagtttgtctgtgtttagattttttaaagcctggaaggggctatgacagaatgtttacagagatcatctttgaataactgacttatgaagtattcctattttcttctttcacttgtatttttaaaaatttcaataacaaacatgtaatactttcatcacttgaaaacataataaaagttgttgttttaaaaacca

SEQ ID NO: 1137 - DNA, 487 bp, Rattus norvegicus
attgaaaggatggaggggctgagttactcttcttgggatttgtttaattcccctttagagctctctgaatccatgactaaaagactcttctgcaatttctgaagaagcttcgtggaataacctaaaaaaactactgacagcctccgggtaaggttagtatcggtcaggcaaggcactgtttagggctttctaagaacttgttttcattgaacaaagccatttttccatctgaaaatagaaaatttctaaaaagaattcaatatattaataaggtagttatattttcaacaagttgacttagttttcagttgcttaagtaatgcatgtatgtaagtgtgtaaataagtatgtatgtgtgtgtgtgtaatatatggattgggaacttgtcactcattcttatttaaaatgctgttttgtattcttttcattacaggaatagtgggcaatcattttgctgtatttaagtaaataatattttctgaaattc

SEQ ID NO: 1138 - DNA, 315 bp, Rattus norvegicus
  misc_feature 35, 99, 120, 244, 278: n = A,T,C or G
ctgacccgtgggttaaggtacagctgcctaaaggntcatagccccacactgacccctgcctcagagatggctctggccgggccagtaggaaggcatttntctgtatatgtccttactggntcaggatctgggcgagcctccatcctgagaggagaatgagaaccagtgaactcccagcacatgcgctgagccgagaggatgagcctgcgtgtccgcataggccttggggtaagagttagacagncacaactgcaggctgctctgttctgaagacactnccgtcaggttgtagggattgagaagtcctaaacgcca

SEQ ID NO: 1139 - DNA, 265 bp, Rattus norvegicus
acagcattaaagtactgaaaggatcgctgggtcatgtggacgtgtttgggcgtggtttggggctgtgaaagcctagaggtggtttctaagctcttaggttacagaaaagcccgacttctgaaaatgtgtttcttataaatgctacaaatgcaacaacgttcccaggagcctccttcagagtcacggctgtgactggatttggtggcagcacccggcacagccttagctttgctctgcaggatgctacttgcaccttaaggctcta

SEQ ID NO: 1140 - DNA, 449 bp, Rattus norvegicus
tccttcttgccattccattttcctgactgggatccaactatcagcagtgcttgctcagtagtgattcttctcattgaacagactgggctctacactagaacatgtgtccagaatccacaatgcctggctcgtggtgctagaataactagccaggatgtgccagaaagacaggcaccaacaactgtctgctagctctgaaatgaaaagagcttggtactggatggtgtgctagtcttactttcagtgcctcacaggtcttcattatctcattggcacttagatatacaaaagctgattgttcaccaaatgaatttctgcttctctgtatttcatgtatttgtaagaaaatgggagtgatagggaactttatttatggcatgaaaataaaaatctggtggcttgattctaactcaaaaaaaaaaaaaaaaaaaaaaaaaatggaagcggcc

SEQ ID NO: 1141 - DNA, 619 bp, Rattus norvegicus
caagcgtgtccagatgtatggagcttacctccgcatccatgcccacttcactggactcaggtacctgctatacaacttccccatgacctgcgccttcgtgggtgtggccagcaacttcacattcctcagtgtcatcgcgctcttcagctatatgcagtgggtgtggggtgctgtctggccccgacaccgcttctctttgcaggttaatatccgacaaagggataattcaggacacggggcccagcgtcggatctctcgccatcagccaggtcaggcgtctacccagcagtcagatgtgacagaggatggcgagagccctgaggatccctcaggaacagagggtcagctgtctgaggaagagaaaccagagaagcagcctctgaatggagaaggggagcaggagccagaggctagtgacggctcctgggaagatgctgctttgctgaccgaagcctcaacgtctgccctcgcccctgagactctgggcagcctcaggcaacgccagacctgctccagttcctgaacaaaagggtggagtcttcacattccagcactttcccatagggcacctcttcccttgttcccttaataaactattttgtgtcagctgctagtatgg

SEQ ID NO: 1142 - DNA, 455 bp, Rattus norvegicus
ctgaactgtttgttttcacaatttagtctgccctttccgatacatttgtattacattccttagatcgttagtcctcaccacaagctttggaaatcgtatttactcctgacaagtcaaattcagctctcgtgggacagcgttctcccatttcctagcagtgagttttgtctctcaagtccaatggtatttggttcttttgtgatatttattgatttctgtgttacagtacagggaggtatgtatgtgtgacatctccaccaacctgaaaccctgaaaaagacccatgttgtacaggtcttcataaaccctaaggtgtttaatggcatctgacatgaaaaaagtttctaaaaacgctgaatacctgtgaagcataaagaatgattaaatgtaagcatctacttagaatattaataaaacattgtattctgatacaaaaaaaaaaaaaaaaaaacttg

SEQ ID NO: 1143 - DNA, 608 bp, Rattus norvegicus
catggaggtggaccggctgaagttgacttttgaggataccaccgacttttttgaccgtgtagtcatctaccacctgcgggtgctgggtgagaaggcagggtgagaagtatcggcggttacttcctccaggaagccccgctgggaggcacccagaagcccttcaagttctgcacagatttattggttcctgttggggagggctcttcccaccactgtccaggagctgccttccaagccagttgtgggctgactggtttgtccctgagtgcctgggttcccaacaggctgtcttcactccgggtccgcaggccccagggtaccctggaacagtttgaggatgtggctctccatcacctgttgcactgtgggaggaggtggggggaggtgtgagctgggcacaggggctgaagaagatgctcagactcaggagcctctctgctcttgctgggccgggcttgcaaccctgagaataggttgctttaaggcaaggtctgctggtctcccttccacttgctgcttcccactcaccctccgaatcgtagctcttcctgcctccagaaccatgagtccaagtaaaacattaaaaacatcaaaaaaaaaaaaaaaaa

SEQ ID NO: 1144 - DNA, 515 bp, Rattus norvegicus
  misc_feature 11, 18, 103, 104, 105, 106, 107, 108, 109, 110, 111, 112,113, 114, 115, 116, 117, 118, 119, 120, 121, 122, 123, 124,125, 126, 127, 128, 129, 130, 131, 132, 133, 134, 135, 136: n = A,T,C or G
gcgcggactgntgcggcnggggaagccattgcctggttaatagttgctgttgctgcacttccgcttctctcccagcgagagcgagacacgagtggccaggccnnnnnnnnnnnnnnnnnnnnnnnnnnnnnnnnnnacggagcagccagacacaaagagaggggccgttcgcggggtggggtggggggttcgctatgtcggatgacgattcgagggccagcaccagctcttcctcatcttcgtcctccaaccagcagaccgagaaagaaggcagcacccccaagaagaaggagagtaaagtcagcatgagcaaaaactcgaagctcctctccaccagtgccaagaggatccagaaggagctggcagacatcactttagacacgccgccaaactgcagtgctggtcccaaaggtgacaacatctatgagtggagatcaaccattctggggcctccagggtctgtgtatgaaggtggagtcttcttcctcgacatcacttttacaccagagtatccc

SEQ ID NO: 1145 - DNA, 301 bp, Rattus norvegicus
  misc_feature 103, 245: n = A,T,C or G
cgggcgggcagctgcgggcgggtgccgggctctcttgtctcgcttcgccgtgcgtttctccccgccatggagtactgggagcgattcacccctgcgaagaacnctgcatggaactgcgacgcgagctttcccactcatccctatagtggtggagcagacgggtcgaggcgagcgcgcttacgacatatactcgaggctgttgcgggaacgcatcgtgtgcgtcatgggcccgattgatgacagcntggccagcctggtcaatcgcccagctgttgttctttacagtcagaaagcaaccaag

SEQ ID NO: 1146 - DNA, 379 bp, Rattus norvegicus
  misc_feature 7, 29, 31, 33, 39, 40, 42, 44, 45, 46, 47, 73: n = A,T,C or G
gccagancggctttaggacaggctaagcnangnggaggnnantnnnngggaggaggcagccgcgggtcatgtnaccggaaaggctcctgacggacgccgtccctcctcggcgccgcctgagcgcccggcccgaccccgccatggggtgctgctatagcagcgaaaacgaggactcggaccaggaccaggaggagaggaagctgttgttggaccccagtaacacccctaccaaagccctcaatggagccgagcccagctaccatagcctgccttcagctcgcacagatgagcaggccctgctttcctccatccttgccaagacagctagcaacatcattgatgtgtctgccgcagactcccagggcatggagcagcatga

SEQ ID NO: 1147 - DNA, 490 bp, Rattus norvegicus
agcgcgggggccggccgtgaggagcgctggagctgccggtagggaacatgtcggagtccgagccgggcagaaagtgggaccggtgtatggccgacgcgttagtgaagctaggtactggttttggattaggaatggttttctccctcaccttctttaagagaagaaagtggccattagcctttggttctggcgtgggactggggatggcctactccaactgtcagcatgactttcaggctccatatcttctacatggaaaatatgtcaaagagcagtgacttatgctgagaacatcccagcgggagaaaagagaagcctcgtttattcctcaggaatactgaagtgccctggagtgcgctgacgtcctgtgacagtgccatcagcaacgctttcaactccagccactgtttatgtgtttgaaaccaagtctgttgcttttgtatcatctctttggaaattgtaaggaggtcttaaataaatgagaaacagg

SEQ ID NO: 1148 - DNA, 238 bp, Rattus norvegicus
  misc_feature 48, 61, 160, 173: n = A,T,C or G
cgcacgagctgggggtccccggggggcgcccgcagttaagatggcgtntacagcggacggngacgtgggagagacgctagggcagatgcggggactgtggccgggtgtcgaggatctgagccttaacaagttggcgacgtccctgggcgcgtctggacancgcgctgcggctnatcttctccatcttcctgggctacccgttggctctgttttatcggcattaccttttctacaaggg

SEQ ID NO: 1149 - DNA, 290 bp, Rattus norvegicus
atcaattatgtgaagggacatgcagacagcctagcttcatggtgctgtgggtagaactgaggatccccctggccagaccccagcacggccatgtcttccccaaggatcatgttcctagaggtcgcgcccctggtcctcctcaagtggctgtgcacagcagctctctggaggcgtttggaacactctgccctcacacatgggactgctcttcctgaagcccacactgctcgtgggaaacatggaaaggaaggcgtgtcgtgtgtgctcagtagattcccaaagccacctct

SEQ ID NO: 1150 - DNA, 483 bp, Rattus norvegicus
  misc_feature 263: n = A,T,C or G
tcgagcggccgcccgggcaggtacctgctgccccgctgcttcactcctggggaggcactgctggtattgggtggcattagcttcgtcctcaaccagctcatcaagcgctctctgactgaaagccagggggacccagtggacttcttcctgttggtggtggtggtggggatggtgctcatgggtgtctttttcagcaccctctttgtcttcatggattcgggcacctgggcctcttccatcttcttccacctcatgacctgtgngctgggccttggtgtggttctgccctggctgcactggctcattcgtaggaaccccctgctctggcttcttcagttcctcttctacacagaaactcgcatctacctcctagcctattggtccttgctggccaccatggcctgcctggtggtgctgtaccagaatgccaagcggtcatcttctgagtccaagaagcacaaggctcctaccattaccagaaag

SEQ ID NO: 1151 - DNA, 369 bp, Rattus norvegicus
agcgtggtcgcggccgaggtacttcaaccccataggcgcccatgcctctggccgcatcggcgaagatcctcagggtatccccaacaacctcatgccctatgtctcccaggtggcaatcgggcgacgagaggccctgaatgtctttggtgatgactacgctacggaggatgggacaggcgtgagggattacattcatgtggtggatctggccaagggccatatagcagccttgaagaagctgaaggagcagtgtggttgccggatctacaacctgggcacgggcacaggctattcggtcctgcagatggtccaagccatggagaaggcctcagggaagaagatcccgtacctgcccgggcggccgctcga

SEQ ID NO: 1152 - DNA, 246 bp, Rattus norvegicus
agcgtggtcgcggccgaggtccataaaggctgatgataagctgatttctgaggaaggggtagacagtctgactgtgaaggaattgcaggcagcgtgtcgagcacggggcatgcgagcacttggtgtcacagaagaccgtctgaagggccagctgaaacagtggctggacttgcacctgtatcacgagatccctacatcattgctcatactgtcccgggccatgtacctgcccgggcggccgctcga

SEQ ID NO: 1153 - DNA, 811 bp, Rattus norvegicus
tcgagcggccgcccgggcaggtactcctctgaggactacatcaagtcaggagctctccttgcctgtggtatcgtgaattctggggttcggaatgagtgcgatcctgccctggcactgctttccgactacgttttccataacagcaataccatgagacttggctccatcttcggactaggtttggcctatgctggctctaatcgggaagatgttctaacactgctgctacctgtaatgggagattccaagtccagcatggaggtcgcaggtgtgacggctctggcttgtgggatgatagcagtggggtcttgcaatggagatgtcacttcgaccattcttcagaccatcatggagaaatctgagactgagctcaaggacacctacgctcgttggcttcctcttggcctgggcctcaatcacttggggaagggcgaagccatcgaggcgatcctggctgccctggaggttgtgtcagaaccgttccgcagctttgccaacactctggtggatgtgtgtgcctatgcaggttccgggaacgtgctgaaggttcagcagctcctccacatctgcagtgagcacttcgactctaacgagaaggaagaagacaaggacaagaaggaaaagaaggacaaggacaagaaggaggcccctgccgacatgggagcacatcagggagtagctgttctgggaatcgcacttattgctatgggggaagagattggtgcagagatggcattgcgaacttttggtcatttgctgagatatggggaacctaccctccgtcgggctgtacctcggccgcgaccacgct

SEQ ID NO: 1154 - DNA, 1059 bp, Rattus norvegicus
  misc_feature 54, 62, 67: n = A,T,C or G
acggattttaaaccatatcatggctgtcaccacacatgccctggacattggtgncatgacgnctttnttctggatgtttgaagaaagggagaagatgttcgagttctatgagcgggtgtctggagcccgtatgcatgctgcttatatccgaccaggaggagtgcaccaggacctacctcttgggcttatggatgacatttatgaattttccaagaacttctctcttcggattgatgaggtggaggagatgctgaccaacaatagaatctggcgaaataggacagtcgacattggggttgtatctgcagaagatgcactgaactatggattcagtggagtgatgctccgaggctcaggcatccagtgggacttgcggaagacccagccatatgatgtttacgaccaggtggagtttgatgttcctattggttctcgaggggactgctacgataggtatctgtgtcgtgtggaagagatgcgccagtcccttcgaatcatcgaacagtgtctgaacaagatgccgccgggggagatcaaggttgatgacgccaaagtgtccccacctaaacgagcagagatgaagacgtccatggagtcactaattcatcactttaagctgtatactgagggctaccaagttcctccaggagccacatacaccgccattgaagctcctaagggcgagtttggggtgtacttggtatctgatggcagcagccgaccttatcggtgtaagatcaaggctcccggttttgcccacctggcaggtttggacaagatgtctaaaggacacatgctggcagatgtcgtagccatcataggcacccaggatattgtatttggagaaatagaccgatgagcaaaagcacagcctgtgagctcccttgcctgtcagctgcttcatcgagcgaggcctttgtgtggtgggaaacgaggctgtgtttcagcaaacatacatgtactcgttgacttagctgcacaggctttctgtgcatgtactagaaaaggagaaattatattaaattagccacctttggcccctaaaaaaaaaaaaaaaaa

SEQ ID NO: 1155 - DNA, 798 bp, Rattus norvegicus
  misc_feature 794: n = A,T,C or G
aagacctggtaagtatacacaatgaagaagaaaacgcatttatactggacactttacaaaagcgatggaaaggcccggatgatcttctgctaggcatgttttatgacactgatgatgcaagtttcaagtggtttgatcagcaaataagacattcgacagtggccagatgaggatgttgaggacctagttgacacctgtggttttctgtatgccaagacaggtgaatggagaaaaggaaattgtgaaatgtcttctgtgacaggaacactttgcaaaacagcaatcccatatgacaagaagtatttatcagataaccacattttaatatcgactctggtgatcgctagcacagtgactctggcagttttgggagcggtcatttggttcctctatagaaggagcgcacgctctggcttcacctctttctctcctgcaccacaatcaccttacagtgatggctgtgctctggtagtttcggaagaagatgaatactctgttcagctggactgagagtttgggaacatcagacgagcacactgaacaccttgacaagaaataatttcctatgcaagattgtcatgtaaaatttgccacggaaaactgaaccttttatggtattccttattcttctaacaatattttcatgtattcaatgtgacaaaacataaaccttctgattaaaaggaaaaaaagtaggtttcagaaaaggaaccagcacagagctaacttacaggttttcttaagtagttttcatttgagtaaatgaaagctacagtacctgcccgggcgccgcntcga

SEQ ID NO: 1156 - DNA, 1221 bp, Rattus norvegicus
tcgagcggccgccacgggcaggtggcgtgcgcgtaggctgaaactcggaaacaagctcctatccatctgttggaaacctttaagtcacaggatgagtctgcagtggactgcagttgccaccttcctctacgcagaggtctttgctgtgttgcttctctgcattcccttcatttctcccaaaagatggcagaagatttttaaatctcggctggttgagttggtagtgacctatggcaacactttctttgtggttctcatcgtcatccttgtgctgttggtcattgatgctgtacgtgagatccggaaatatgatgatgtaacagaaaaggtgaacctccagaacaatccaggtgccatggagcacttccacatgaagcttttccgtgctcagaggaatctctatattgctggcttttccttgctgctgtccttcctgcttagacgcctggtgactctcatctcccagcaggccacactgctggcctccaatgaagcctttaaaaagcaggcagaaagtgccagtgaggcagccaagaaatacatggaggagaatgatcagctaaagaagggaactgctgaggatggaggcaagttggatgttgggagtcctgaaatgaagttagaggagaacaagatcctgaagactgatctgaagaagctaaaagatgagctggccagcaccaagaaaaaacttgagaaagctgaaaacgaggctctggctatgcagaagcagtctgagggccttaccaaagaatatgaccgtctgctagaagagcacgccaagctgcaggcctcagtacgtggtccctcagacaagaaggaggagtaaagacttggtttttccctgcctgtagctggcttatacttgacccatgcttactgcttccttggagcccagcctgtccctctggtacttggtttattcccttccatttccccaattttcttccatggcttatagatcattttggccccattacacatactactcttataccaaaaaggacctgattgttgttcattcacagtaattttgccactgttctgcctggccagggcactttccactcctagaagtgtagaaaagcactggtgacctgggctgcacttgtactccattttattttgccatgtatcctaaaagaggctgctgttaagcaggtcaactgttttatcctgaggggaataaatgttgttatgttacaaaaaaaaaaaaaaaaa

SEQ ID NO: 1157 - DNA, 623 bp, Rattus norvegicus
tcgagcggccgcccgggcaggtcgcctgcgtgctctgtgacctttcccattctgtcgcggaatctagtgtggccttgatcccgctgagatgcttcaaagctttattaagaaggtctgggtccccatgaaaccctactatacccaggtttaccaggaaatttgggtaggagtggggttgatgtccctcatcgtttataaaatcaggagtgctgataaaagaagtaaagctctgaaaggctgcagtcctgcgcatgcccatggccatcactaactgctcccccagtccactcaggatgaatacgtcagctgaacttaagcaagctgtgtagatgggaacatggaacatcactgtacagttacctaagtaccgtttacaatgtggcattaataaatgtgtctgagaagcaccactccctgtgaataccactgtctgctcccctgaataaatccttggtaaagcggccggctccatcagaacctctgagacgacttccttagggatcctgaggaccaagaagcagtgtttgctgccctaagattggacatcaggatctagtgttaactttgatattattaactaataatattcaataattatttgccaaatggttttgcttctgcct

SEQ ID NO: 1158 - DNA, 1076 bp, Rattus norvegicus
  misc_feature 36, 48, 53, 62, 63, 70: n = A,T,C or G
ggctgatgacctacgtcggtgctgtttttaacgganttacccttctgnttctngccgagctnntggtttntcagcgtcccaattgtctatgagaagtataagacacagattgaccactatgttgggattgcccgggatcagaccaagtcaattgttgaaaagatccaagcaaagcttcctggaatcgccaaaaaaaggcagaataaacacatggaagccagaagtgcaacagttactaaaacgccatttaatagttataacatcgtcacttgtactatgaaggaacttgctcagtgtcagctagagtttggttccaggttgtttgttctttttaatttggtgttctctcccatcctctccctttaccctcagtaccaagcacaagatgtgttagactgaaaaaaagaactgatctcttagaaccctaaagaataaggattgaatcagattgatagaattaatcagaccatagtggttgtggggctttacgtgtactctaaaggaaaagaaaaacgtgtctaggtcctctctccagtttcaaggactgttacagctcccatttataattgtgcccttatttttaagtcaggaaataatgattaacttatgagtaaatagtctggggcaagagtgggatttcttcagtcccaccctcctgccttacacataagcagctactcttcctgctcctcttcgtccttaatgaaagaacttacaggcgagaggtgattccctattcccagaatgccacctgagaagtgccaggggtaaggggacagtggggggagcagtcagagggagggcagcagcagccaccctctgctgctcttcctagggaaggaagggctctgccagctgggagggcagtgcccaagccattggtctgggataccagtgtgagtgttggtttgagaaatcattccagaatgtgcttttccctcttttccctgcccaccttacctcaagtttaataaatatggttgtacttttcttattatgaagtaaatgtctgtaactgctgtacactgctataaacttgttaaagaaaatttggcaaggaaaaaaaaaaaaaaaaa

SEQ ID NO: 1159 - DNA, 1447 bp, Rattus norvegicus
ctgaggtgactttagcctggggctgggagttcgttcccgttactcttggggagcctgaattggtccctcagtgggtaacagtggggtgtgccctgcgggaacagggaaaggacctgtggtgtgcaggccgggtccctgggatcttagcaccctctcttccccccggcagagagcctcggaaaggcttagaggtcactctgtgtagccgagtggcgcggctgtcattgtttctgtctcgcccacgtctaaagcctcttcgcaaactgctcttgtggccccacccagacacatcggccgccattgcctccgagcccaccttagttctcagctctgtatcagaaatgctgctcctttgggaaccacagctaaggaagaaatggcacggttctggaataagaacacgagttccaaccgtcctgtctctccccatttgactatctacaggtggtctcttcccatggcaatgtctgtttgccaccgaggctctgggatagccatgagtggaggggtctctctttttggcctgtcggcactgctgcttcctgggaactttgagtcgtatctgatgcttgtgaagtccctgtgtttggggccagcgctgatccatgcagccaagttcgtgcttgtctttcctctcatgtaccactcattgaatggggtccgacacttgatgtgggacctagggaaaggcctgtcgatttcccaggtccagttgtctggagtgacggtcttggttcttgcagtgctgtcctctgcaggactggcagccatatgaagagctgggattcccacatccgtcctgtgcatcatcacactgatctctattcctgtttgtcactcctccctccagccaccaaggttctcctgatttgtttagatgtcatgtgcttccgatcccctgggggcacagtagagaagcttacagaactgtaatagtagaaagaatccttttccctaggcctaggagccctcattcctctccacttttgactctgatttgtgctgagggtcagctttgtgctgcttcttgctgagacagtggaaacaatgccagttctgtggctgccctgagtgccactgcctgtgggctgcaggcttaaaggacacttctgttcattggtcagctcagggcctttagcacccacacagcgtgactgagagaagagaaatggaggtggaggggatcatcctgcccagctagagggagataaagagcagcgtggatcttgggagctcatgcttgggggaaagacagacagctttccatgtatgaggaagatcaaaaaaaaattgtattaagattgtttcatttttcatttctaggaacatacacctttaatgtcattttttctaatctaaattcatgtaccatctttctttggaaatgattaaagtactactcattttaaaaaaaaaaaaaaaaaaaaaaacattacactacactttg

SEQ ID NO: 1160 - DNA, 903 bp, Rattus norvegicus
caagtgtaaaagctggaggtttattgttatttggtgattaataaatcaaactgcttttgacactgccccaccagtatattaccattcacccgtacaaagtctttcaaccagacagactgaggcgtgaggcagagagcagacatgtgcacactgtgccgacctcctcagtcacgcctccaccccgacctttatccatgttttcttcctggagaaagtgtcagaaaagtgtacagcctggggccaacctgcctctcaaccttttagtatcaagcgacttacagaagttacagaattcaccttctatttcccttgattttacttgtctgaactcattctagattatttaacattataatttcgggcaaccatacaagagagaacacagtgacctaagagaatactgaaccagagtcagtcacatacatcactgaccctaacgttgtattttaactggtcccaaaggaatgtatcaccccaagagtgtgagagtcaggcaagcagaacgtctctggggaaggaagaaaggggctatagaacagccaaacttactgaaaattgttaaaacggctcttttccacccgaccgacactaccgtatgcatagaatcttcacagaatcagagttgccggtattacctagttcaggctggcccaatccagcacagattctgtctcaaccctcccccacccccttccgaggctccgaacagcaagacattaaactacttctttatagaactagccaaacactgagagacgagtggctcactaatcatttaagatccaggtattgcctatggatgagaaagctggtaaacccaagagagctctaccgttatacgccaacaacggaacatgagcactccgtgaagcgagtctcatacccaggctgtaacctggggag

SEQ ID NO: 1161 - DNA, 751 bp, Rattus norvegicus
accctaaaaacactgtcagctttatttaaccttgatatacatttgtacaagcaatttaaaaagactattccacaacgactcagtgggttttacctggtttgaagataatgcagttacaaatgagaggtagaaacaccgtagtaaagacctaaaaatacaaacatcctatacataaacgttcaaattaactgctagaatttcatacagataaataatgtaaaaattacattactttgttcaccaagtaaatgaaaaccattttctctgttaactttaatcagcacactaaagtaagtgtggtgccaaagagcttctgtgcagctatcagagcgcaggtcattatgtcaaagttttgaagtaaaaagattaaaaccggtgaatggtttattcaagtattaaagcaggtaagtaaaagaaaccaaataatatacaacatagaaaccattcttggggagatgttgatctgccatgaccagctatttgtgaactcagggttaacactgagaagtacacattagtctggagagagctgcccatttttctaagggaaaacaaacctcatttcttactattttatgtagaaactccacatcactaacagccattattcatcactttgatttggccctataaaattctcaagagtatttcttgattcatgatagctttctaatactgcccaaatcaacagcctttaataaaactaaggtcacaagaatcgatgaacattctgcatgcacaacaaaaaatg

SEQ ID NO: 1162 - DNA, 685 bp, Rattus norvegicus
catttagacagttttctttaattaacgatgaagacactacaattctaagtaccagacagaattgggagtaaaacaattgaacacaagcatgacactacaaagaaagcttggaagagtgaaacacttcgaaaggaaaaaaaattataaacctggcctggtacccattacatatatacatcatacgttatccacatatatacagtaaatgttttggtagcaacatagaccatgcgtcggtcttttgtacacagatgaagtagcaccgtcgatagcaccaccatcttcagatgataaacccaactacacacagcaaatggaaagatagatgggattcgtttggcccaccctgtagccaagaggtataaggaaagtaactacataagaaagattattctgaaaactatattcgtaggccagtggcaaagttctaaaatggactaaaaaaaaaaatgctaccactacagatgtatatgcaaacagacacattttcctgggtagtgaatttgttctacggtatggcataatggttagtgctggaaaaagggacagcgtggacagagagagatttacatagcaggcaaatggcaaagggataacacacccatctcttggtgtagacatcccaaaggccaagccattacggacaagctatggaagggagataacacctcgccgcgaccacgct

SEQ ID NO: 1163 - DNA, 366 bp, Rattus norvegicus
agcgtggtcgcggccgaggtaccccgtggcccctgacatcaccagaaataaaaacacaccctttaaaggagcaatattacttgaaagaaaagtagatcatttgccagcttaatgtgtctattcaccttaaatgtgtatatgtttccatgactttttatgagtggcaaatatcctgaaaacgagagaggtcgagttgccaatgagaattgttcatcagaactgatagttctctgactctaagatatcactttcaggacaacaagatcatgtttccctttaggttcctggaaagacatgggatttctaggcaaacttgatttcactcattgcctacttgagttccttgttaaatgatggggcaagact

SEQ ID NO: 1164 - DNA, 623 bp, Rattus norvegicus
agcgtggtcgcggccgaggtacaaggtttttaagtttatatataaattgtgtatatatttttttgtttccttttcttgacttttcgtttgtttgtttgtttctgtataaaacccagatgccaccaaatggacattgatagctgcattaaggatcagtagcattaacaaaagttgctttaaaagccattacgtaaaacaagacttgaacattagcgagagggtcgagcagagcagccgtgggaaccaccccgtttccccttggacctcctagtcaattaccctgtgctcttagaacatggactgaccgtgtgcaaaactttttatgtgccaaaattctcagtgactttagctttctccctcctttttgatgccgtactttctgttcgccatgttttgctgtgatgttacatagatagatttgtatgtagttttaatgtcacctataacaaaatgtgtttggtagcagactgtccagaaagcattttaaatgaagaggtctaaacccttaagggccaaaaattctgtatattagattactcttacaatgaaaaagaacacaaagtacaaacaaaaaaaacccattttgcacgcttcatgtgtacctcggccagcgaccaacgcat

SEQ ID NO: 1165 - DNA, 1002 bp, Rattus norvegicus
tttggtccagagctggggaccgaatccagggcctttttgcttgctaggcaagcgctctacgattgagctaaatccccaacccccacctgcagtcattttgaatgcttaggacagcactgattggtgagccaataaacaacagcggagatgtaataacaaggatacatggtgttagcagagacacgggtatccttctgtgctgttaacggcctcgattgactggtcattgtcaggacagtccagagagttaaccatacggagaatcccagctagaactgtgtgtatgtgagttttactatgaagtcctttgaaacaggctggttagtggtggtgcatgtgcctttaatcccagcatttgggaggaagaggcaagcagatctctaaattcaagtccgtcctggtctacaaagtgaattccaagggcctgtctctaaaacagacaaacaacaaacctaccagctctgcccagtgtaacatactccgaagctcagtattcacttgttttcagatgtttggtatatttgtagtcggacagggtgttttcctcagtgtctcgttgaaagcatgcttgcttttctcaacacagctttgacagctctcagaaaagcctctttgtggcttatgctaagattaggattgctttttcttctaaaactcttggcttcctatgttccctgtcagattatgcatgaactaacaaaacaaacttaagttggccttgggaagtatttgaatgaaaaatgtaatggggagtgcttcttagactccctgagcattctgtcccccgtccaggccaccgttcagcttccctgtgacatcagattttgatacagatcacttgtttgtggcaaggagttcttcactgaagtttgtatgtgtatttacagagtaactatttttgagaagtatttattacagtaatccataaataacttttaatcactttaaagtacactgaatgcttatttctgaaataaaatttctagccaaatggttaacgct

SEQ ID NO: 1166 - DNA, 751 bp, Rattus norvegicus
tcgagcggccgcccgggcaggttttttttttttttagaaaacatttatttttatttattacacgaatatgaatttgttaatatttaaaatagaacttctgcaaaatcatctcagaaaatatacatttgtttagatacatacaaaagcagctgaaacccttgggcccacccagactcgctctctgtgtgaacacactgatatccatggattcgtttcaggaccggtggaattttttcctttgatacagggtttctttgtgtagccctggctgtcctggaactcgatctgtaggtcaggctacactcggatctaccttcctcctctgcctctgcctccagagtgctgggatcaaggctgtgccaccacacccactcaggaccagtgaaacttgatcagaatcctccccagtccttgctaactattctcatgagttacttttagggtcccccacattatacccatttccctaactgtagtggctttttactatggtagttatatccagcaaagtatgtgctagataagaaggggaaattaaatggggacttcccaaccatcttgaacagttctgtgatggtgctggtgtgtccggtgcacttataaatgctgtggaaggcgggacagtgcagcaggcagtggcgaaaccctgagccgctggccagagcacaggcggcagcgaaagcagaccaggagcaacaggatagcaagtgggttccaattcctttttactgggatgggggaaggaaagggc

SEQ ID NO: 1167 - DNA, 201 bp, Rattus norvegicus
  misc_feature 6: n = A,T,C or G
agcggntggtcgcggccgagggggcgctcttgtcgctgacacaacacagcacaaaattgggggctcgaaatctgatctttgctcgacaccaatgttcagtgattacgtccaaagaacttttgaggttcatagaaaaggtttcgggtgcaccgtgtgctgttgaatttgtgatgtgttgtacctgcccgggcggccgctcga

SEQ ID NO: 1168 - DNA, 224 bp, Rattus norvegicus
agcgtggtcgcggccgaggtacaaaccactgctggagagcttctcttcagatcctcgacagaccaggatttacagtttctggtacgggctgagcaggctgcgatggtgtagtggccgatgacagagtcatggctgtgaaaaacacctctgcgtatcatggaagtggggcgaacatgccgaagagccttccaagttatcctgccgcgggtaggtcagtctcgaat

SEQ ID NO: 1169 - DNA, 521 bp, Rattus norvegicus
tttttttttttttttttgaggagacacagctttattgtctaaaagccgggccaggaggtttaaaatagggacgtacaagcgcacacaaagtctccagttcatatgtaagccctctccagagttacccacatacatctcaacttcaaatgtgcttgtcctcttcatagcagtcatttccttttagggtctgccactgtcacaaaacagaaccctttccagaacacacaccaccacatacccctagacaccactccctaagtctgacttccgcagtctcgagttctaagcactctgggatccggtctgctcagtggaggcttctgctggtgctgtagagggcatctcaggcattgactcaggtggggggccacttgcttccaggagatttccttgatagagccggcgaaggcgagagagctctctctctggtggctgttgccagctgtaccacgggtaccaaggttcacccgacaacaacgtgggggctggtggagtcacactgacagctccatgtacagtgc

SEQ ID NO: 1170 - DNA, 623 bp, Rattus norvegicus
cagtttgccaggcagtacagcaggaatgagcccctgacctttgcctggctacgccggtacatcaagtggcctctgcttccacctaagaacattaaagacctcatggatcttgaagctgtccatgatgtctttgatctttacctgtggctaagctaccgatttattgatatgtttccagactccagttttgttcggagtctccagaaagaactggatgtcattatccaagaaggtgtgcacaatatcaccaaactgattaaaatctctgagtcacacaagctcttgaatctggagccatcagggagccagtcacgtttgccaggagcctccaagagcccagctagaaggacacgtggcactaaaacagggaataaggcggcagagccacccagccccagtgacaaggagctgccccttgcctctaggctggtgcagcaaggactcctcactgcagacatgctgaagcagcttcagaaggagtggctgacacaacggccagaacaaggcaaagagaaagtggggacacggagaaagaagaaggaccccaactctgattagtctttttttaattttgcaaataaaaatcaattttaaatccttatgcacacaaaaaaaaaaaaaaa

SEQ ID NO: 1171 - DNA, 1150 bp, Rattus norvegicus
cacagggatgtcgctgctgcggtcgctgcgcttcttcccggtcgcgtgtaccggccgctcggcaagggctgtcctgctccagccgtcccagccatggcacacgcttcacgcgggcccctcgttgtcgtcttctgcctccagcaaggagctcctcatgaagctgcggcggacaacaggctactcctttgtcaactgcaagaaggctctggagacttgtggcggggatctcaagcaggcagaggcctggctgcacaaacaggcccagaaggaaggatggagcaaagccgccaagctccatgggagaaagactaaagaaggcttgattggcctgctgcaggaggaaaacacagctgttttagtagaggtaaactgcgagacagatttcgtctccagaaatgtaaaatttcaacagttggtccagcaagtagccctgggaaccatggcacactgtcagaacctgacggatcagctctccacgtacagtaagggcttcctcaactcctctgagctttctgaacttgcagctgggcccgacggggaagggtctctcaaggaccagttggccttagcgattgggacactgggagaaaacatgagtcttaagcgagctgcctgggtgaaggtgccctctgggttctatgtcggctcttatgtgcacggagagatgcagagcccctccctccagaacctggtgctggggaagtacggggccctggtcatctgccagactcctgagcagatcacaaacctggagcaggttggccgccgcttgggacagcatgtggtgggcatggcccctctctcagtgggctccctggatgatgagcctggaggggagacagagacccggatgctgccccagccatatctcctggatccttccatcacactggggcagtatgtgcagccccagggcgtgaccgtagtcgactttgtgcgcttcgaatgtggagaaggtgagcaggtagcagaggctgaataggtggaaatatttaattttcatacctggatttccttataaaaagttattttctaaacctcttcaaccctcagattttttttttttagtttaaaatgaagttatatattcatgggtaaagttattaaatatcaatgtaataaaccatgatcatttatttgcataatactt

SEQ ID NO: 1172 - DNA, 543 bp, Rattus norvegicus
tttttttttttttttttcctattttttttccgtgtgtattttttgttttttaagttttttttttctgtaaaatgtcccggttttccataacttataaacatgatttctatggaggggtggaggggaaagtgacaggcggcccggcgctcctctgctgccctcaggaggacggggacatcaagtctttcctccctgagcctgtacagccgcctctgtgcccctgcctgggcgctcacaatcgaatgcccttcagatcccagaactccctcggggaccccaggcctccagacactgtcccctggcgctgggatcctcgggcatggggtaggtcccctccttcccactgccccaaccccaagagagagggaggaggggagggcagctggcccagcagtggtctgcacaagaaggccaggaggactcagccgatggtgaggccaaagccacacaggaacttattcttgcggtggttcaggaaggcgcagagcgacagtgtcaggggcaagggcggaagcttcttctccagcgtgggaccctcgtgcc

SEQ ID NO: 1173 - DNA, 252 bp, Rattus norvegicus
  misc_feature 202: n = A,T,C or G
gggactacagtgttctctacgttgttcctggtcctgtaagattccagtacgtcttgattgcagctgtgattggaacaattcagattgctgtcatctgtgtggtggtcctctgtatcacaaggaaatgtcccagaagcaacagaattcacagacagaagcaaaatacagggcactacagttcagacaacacaacaagagcatncacacggttaatctagcgggagcatgtttcccagtggccggacaaccgac

SEQ ID NO: 1174 - DNA, 215 bp, Rattus norvegicus
ttaaaggaatctttgaggaagcaagccaggctttaatccacggagacagccacccattgtgtttcatgcgtcccttagcgtcatgagaatgttcgtacttgataagaacttacgagttctgtggtggaacattactttaatcttcataggatgagccctgtaaaaaactagtcccaaaataaatgtatcttcattggcaaaaaaaaaaaaaaaaa

SEQ ID NO: 1175 - DNA, 221 bp, Rattus norvegicus
tatatattttcctgaatgccaaaatggttgagagaaacagtacttgctgtgttggcttacagtggtctagaggtttagaacatgttagtgtcctgaacttccttcagaatttcattcctcttttattcaaaaaactacacaatcagcctgacactgtttgaactcttactaaagctactggattatctgtcatcttgacacatgtgaacctttttccgttt

SEQ ID NO: 1176 - DNA, 402 bp, Rattus norvegicus
ccctggaatatgtggtgtttgaaaggcacttgatgaacccgtatgggagctggagaatgcatgccaagattgtgcccccgtgggcaccccctaagcaaccaattctcaagaccttgatgattcctggtcctcagctgaaaccgtgggaggagtacgaagagacacaaggggaggcccataagcctcaactaacctgatggcatgaatgactcctggggagcctggcagaggtggcgcacacctttaatcccagcactcggaagacagaggcaggtggatctctgtgagttcaagggcagcctggtctacagaacaagttgcagggcagcctgcgctacacagagaaccctgtctcagaaaaaaacaaaagaaaaaaatttaaaaaagacttctgagaggtgc

SEQ ID NO: 1177 - DNA, 377 bp, Rattus norvegicus
aagctcagtggcagaggtgggattgtctgcggctattatgaaggctggagtggagtataaattttatgtagcactcattatagccatactgcctgggcacattgcttgaatgcatgtattctatgtatacttttgtgagatccccaagtccccttggcgatgagtgatggaggttgactttgaaccatcacagtccagtttcttcagtaccaggctatgtagtaagggtcagtacatatttgatacagctaatactttttctgaggctaaggtatggcttggtggtgccataatgtacaatatgtatgaggtccctggttcaggacccagcatcagaagtgtttttttcctaaattggttaaaaaaaaaaaaaaaaa

SEQ ID NO: 1178 - DNA, 541 bp, Rattus norvegicus
  misc_feature 21: n = A,T,C or G
ccacagctgccctgacctctnttcattacctgtggttacacaggtaatgctgggccaacagcatgcaatgggaagtataccagctgaggcagagggagttgaggccagcctgggctacatagtaagtttcaggccagcctgggctacatagtgaaatcaggtctaaggaaaaaatatgaaggaaaaatgaaaggccttttgtcctgcattctgcatttgtttcgtgaatgtttgacctacctaaagttcccttcaagccagatgtgacagtagtggatgccacccagtgtgtaggtgagcaggagtctgtggcattaccctccacccttgccttcgcatccacagagtaacagatgtagctattccagcgttaaaacttgcgggcttgggctggagagatggctcagcggttaagagcactgactgctcttccagaggtcctgagttcaaatcccagcaaccacatgatggctcacaaacatctgtaaagagatccgatgccctcttctggtgtatctgaagacaggtacagtgtacttgt

SEQ ID NO: 1179 - DNA, 61 bp, Rattus norvegicus
ccgctacggggtgtagactgtgtctgaaaatagcgggaaccgcccatgtccccgtgggttc

SEQ ID NO: 1180 - DNA, 530 bp, Rattus norvegicus
  misc_feature 17: n = A,T,C or G
gaataatgttgcatacntaagataggctcacagatgaaaagcacttgtaatcccacacccagctttacacgtgtcagttcttataaggaaaaaaaaggctatgatttagatctaattttttagataatgcagacctaagtatgcagatcgataactccttgttacaagtacccaaatcaatgcaaaggttctcatcaccccagaaagcccttcacgcctcagtctgtgctgcgctgtctccccgcagaggcaaccagtaggctgcttgcctttaacctccatgtgttagctctacctagtctcaaccgtcgtgaaaatgaactcatgtagtatacaccttgtgtctaccttcctccttaagcagactttggaattgatatgtgtttcgtatatcagtaacaagtagtagttttcaataagtagtgtactgtacaaatgtgttctcttgttcctagtattttgattgtttacagcttggggtattgtgaataaacctatggacatggaaacgttaaaaaaaaaaaaaaaaa

SEQ ID NO: 1181 - DNA, 451 bp, Rattus norvegicus
caaccgagtcaggtgggaaaggaaaggttattggatttttaaaggaaaaatttcactttaagaaaataatcatgattggagacggagccacagacatggaagcctgccctcccgctgatgccttcattggctttggaggcaacgtgatcaggcagcaggttaaggacaatgccaagtggtacatcactgactttgttgaactgctaggagaactggaagaatgatctggacttcccggtcactcagaacaactccaccttctcgacgctacacagttgggctcctggaagagtctaggagacagctatttttttctactgtagttccaatattaatatgactactaattacatggagagttttatattctgaattctttgtgtatattcctcggaatattttacctggagctttctgaggtgcatagtaaattaaatgcctttactcttgc

SEQ ID NO: 1182 - DNA, 652 bp, Rattus norvegicus
  misc_feature 588, 598: n = A,T,C or G
aagctagtaaagtcatctacactaacggctgtattgacaagttggtcaactggatacacagcaacctgtttctacttggcggtgtggcattaggcctggccatcccccagctggtgggaatcctgctgtcccaggtccttgtgaatcagataaaagatcagatcaagctgcagctctacaaccagcagcaccgtgctgacccgtggtactgagactccttcctgtgcttcctcaccatggtgacgagcatcctcatggaccagcagtggagggtgctaagagcagcacccagtgcagatttagattccagcccccagagtgaaggcccagtggaaagacgaaatcccaaaggaaggacacagatggctcaggtctcacaaggatgtgcctcatctccccatcccagcctcaatactgcctgagaattattttgtcctgtttgtaaccttgaacatttgagtttatgttttttggtttcctgtgggcacaggtgtggaagcggcagtggtacagaaagccgtagggttactagctgcacacttcgctgaggcacaacagacagctctgttaacgctgctgctgagctangtggacatanagtctgctgccatcgagtactggctgtgtggagcagacactagcaagcctgcct

SEQ ID NO: 1183 - DNA, 437 bp, Rattus norvegicus
gggaagcttttatttattgccttaatactttatttggctgttccgtccctcccagttgtggcatgcaggagaaaagactcctggtctgcagtggagcactggctcctggaacaaagttcctctccctggaagggacaagggctccctggggtcagcaggatgcactgaagagagggtagccatggctctgggtcctctctgaggcctgcgctcaaaagggagcagccctcacgcactgtcctcacattccattcttttgcacttaccttgagctgtgaatgtaaccttgggccaaggcccactctgatttgctcctgaaccatacagctgtggcatttttattttgtcctgtttgtgtgtccatgccccaccctttacactcaaccagcaatagagtgtgagagcaaggcctgtgaatcagataaaggatcgaagtg

SEQ ID NO: 1184 - DNA, 565 bp, Rattus norvegicus
ggccatcaatgttccagctcatatgattggcagagcaaagcactctgctcaacagagtgaatgttgctggtacagtatgctcacctgtgaacgactggccatttttccattcatttggtaagacagaagatgaggatcatttcctggacaagtcaaggtgatcatctccaaagaggtttacagtacttgatgggaatggaatatgaggatgagaaaaagaggagtatcatggagaaggcccaactgggatggacaacagacagctgccaaagtcacgaactctgagattaaagaagagtcgtgtagtgctttcaactctcatttgcagggcagctcactgtgtgtggactctgagctgacatgggagttagcttctttgttccatagattttctatgccataggcaatattattgttcttggaaagttcattatttttttaaattaccttactctgagaaagggattttttgaaggattctgtcatatatctttcgaaaacagaaaatcagtaatatgtatatttttatgtatgttcactggcactttaaaaaaaaaaaaaaaaa

SEQ ID NO: 1185 - DNA, 187 bp, Rattus norvegicus
ccatatgtccttcccatgtgtgagcataactgaatgttcagtgagtgtcgttgaatgtaccactggttatccgaactgaaccaaagatcagcggatccgaggcagtgatggtattgctcacaagcgatactgctgtggttattactgtcatgacttgtgtgtccagtccaagtaaaggtcgctgctg

SEQ ID NO: 1186 - DNA, 680 bp, Rattus norvegicus
tttactgtgtttgggcttggcctacctgtagctttagggtgaagggaaggggccagcgttggtggaccccacacatccatgtgcctggctttggccaagcaggagaggtggtcctaccacaggctttgacttgcctccctgtaccccaggtgagcataaccttgggggccaacagtctgaatgtatctttctccccattttaacctgagctgcctaatgcatagttgggtaaggggtgggacccagggctgaattgtggatcccagggaaagtgccatgcctaggagtgattgtcacctcggtggagcctgactccttcttggtttttgccatataagcacttacacaaagaagctcttgggtgttggggctcctactgccttggctgccctctctctctcccctccctgcctgtgtcgtttttctttgtctgctgtccctgaaggagatggccaccctttgagcctaagagagctgttttaggcagatcctctacttggggcttttctggagctgctgatggatagtatctgtccagggaccttgtttcaaagggaatgggcggccagcaaggcatccccacagctactaagaacgttttcttgtttttaaaccatcacatcttcatttcacattggaataaagtgagtttttgaaacctgcaaaaaaaaaaaaaaaaa

SEQ ID NO: 1187 - DNA, 197 bp, Rattus norvegicus
ttgtgatgtgtttgtacagcctaattatgtttcccgaggagttctgggggagatgttacctgcggtttattcgctttctgagacaggctaactgcataagtgtacagagctatggtgtgtgcaacatcagttgaagctactttaaaaactaacaaatggaaaatacatttggtaaagtctaaaaaaaaaaaaaaaaa

SEQ ID NO: 1188 - DNA, 574 bp, Rattus norvegicus
attcggcacgaggctgagctctatcaagttccagtcctcggagtgactgtgcccatcatgtggttctacctcctcatgaatgtcgtgactcaaaacgtgtgcatccggggtgtgttcatccttaccacagagtgcagctccctcaccgtcacactggtcgtgactctgcgaaagttcgtgagcctcatcttttctatcctgtacttccagaaccagttcaccctgtggcactggctgggcactgtgtttgtcttcaccgggaccttaatgtacacagaggtgtggaaaaacctaggggccacaaaaagtcagctgcaaaaggacgacaagaaggactgaggtctgcccggacagacagtcgctgttatgtgagagtggcctcggctgcaggtctggccatcatttcacctgggctgaagccaaattaccccagtattgaagcagagcttcttctgacaggatgggatggcagcatttgtagactccacgtaggcatccctgagatagaataaacagaacaaacaaggcttccaggcagactgtcgggaagcttccgcatttgcttttccctctc

SEQ ID NO: 1189 - DNA, 925 bp, Rattus norvegicus
  misc_feature 229: n = A,T,C or G
ccccttttatcgcgctgcgggcgcggcggcagcggccgtgggggtggagtaaggacaccggcatggcgcggaagaaagtgaaaccccggctgatcgctgagctggcccgccgcgtgcgcgccttgcgcgagcagcggaaccagccgcgagactcgcagctctacgccctagactacgagacgctgacccggccgcactctggtcgccggctgccagtgcgcgcctgggnccgacgtacgtcgcgagagccgccttctacagctgctcgcccgcctccccttgtttggcctgggtcgtctggttacccgcaagtcctggctgtggcagcacgacgagccatgctactggcgcctcacgcgtgtgaggcctgactacacggcgcagaacttggaccacgggagggcctggggtatcctgactttcaaagggaagagtgaggaaacggctcgggaaatcgagcaagtcatgtaccacgattggcggttggtacccaagcacgaggaggaggctttcactgcgttcactgggaaagcagaggacagattgaaccttgtcccctacccacctctgctgcgggccatgatcctcgctgagcgacagaaaaacggggataccagcgtcgaggagccgctcctgaacctggagaggactcgaatgcgcccctgggactaccctgcaaaacaggagactaaagggagagccaagggcaccccagtctaactgccaggattggcagagaggtcctgtgagtcatttgatggacaagtgtctttgactgtgtcagaatctcccctttggtggggagaccctaaagccttgacacatctgccaatgaataatggggcagatgacagattgtgattttcaggcggcccctcgccgattcctccgtctggaaataaactcccgaaatggccaaaaaaag

SEQ ID NO: 1190 - DNA, 632 bp, Rattus norvegicus
gcatcgtgaaggtgcagctgcccgcctacctcaagcagctcccgctccccgacagcattaccgggttcgcccgcctcacagttgcagaatggctccgcttactgcccttccttggtgtacttgcactcctcggctaccttgcagttcgtccattcttcccgaagaagaagcaacagaaggatagcttgattaaccttaagatacagaaagaaaatcccaaagtggtgaacgaaataaacattgaagacctgaatcttacgaaagcagcttattgtaggtgttggcgctccaagacgttccctgcctgtgacgggtcccacaataagcacaatgagttgacaggcgataacgtgggtcctctcatcctgaggaagaaagaagtatagcagtagccacggagacgaacctctggcaacgtttccgcccttgttgtgcatagaaaaagatctttggaagttttaactattggtactggctgaataattattctgccagttattttcttgctacactactgcttatatttggtactttatatattcagtcatttgtacagaaatcaaatggtcaagtctgattctgaaatcaagtttaatgtgtctttcaacaataaagtcagcacttcaaatttt

SEQ ID NO: 1191 - DNA, 193 bp, Rattus norvegicus
ccctccgggttttttcccgtccctttccctttttaaccctcctggattttttttttaaaccccggaagccccttccctttttggggtttttgcccaaaacccctttttttttttttttttttttaccattttttttcccctttgtccttttttttcccttcctggggttaaattaaggttcccttttaatttt

SEQ ID NO: 1192 - DNA, 484 bp, Rattus norvegicus
  misc_feature 469: n = A,T,C or G
ggggatcacctggaccgcagagttgtcctctgatgtgcctagcatggaaaagggccctagtggcctaagaagtactcagggtctctaggctgaggccacaaggagcctgagaacctgcctccagtagggctggacctgaccaccagtccagggtagggagggggacagtcttggctctgtcagccccagctcttcccagcagagcacttggaccccagcactgtcagctacaccctggcttgggatcgatggcttctctcctgatttggaccacagccttaggatccagaagcagcctctttctaatccctgtctgtgagaagagcttgaccttgtccccggccccagagcactgtcatggtgtgtatgcatatgcacatctgtgcagataatgcacacaggccagcacaaagacctctacagaatgatgttcacccctgccccaataaagaaatgacagaatccttanaaaaaaaaaaaaaaa

SEQ ID NO: 1193 - DNA, 461 bp, Rattus norvegicus
gtgaaggggatgtggtggctgtatccttcaaattatgaatgaaaacaaagtacagaaaggaaaggagactttaggcaggattatttttgaatgaaagataagactaatggtttctctcccattcccagtccccattggtctgatgtcatgtagcatagtacatctatagcacatggtatttaaagactaatgaatgcaaagagactaatttgggggctgtttcttatatatggtactaggaaatgccttgttggcaaagcacaccttgggtagttgagatctcctatgtttgtatttagcttttcttgtgactgtaacatttcatgtgtaaaataactggatattcttcatatgatggaaataacctgtgaattcaatctttcatcgagtgttttaactcccgtgtacatatatatctcatcaataaatgtggattccaatttcaaaaaaaaaaaaaaaaa

SEQ ID NO: 1194 - DNA, 470 bp, Rattus norvegicus
  misc_feature 18: n = A,T,C or G
ccacgtgctccacctcgntcttttgcgctgcccaggaactgaccttgtgctccactgcgtgatggcccgctccctgactgagctgtgccatgtgggtcagagagcctgctgctccccgcacacagaggggtgggtggggttgtacagccggaccgtggatcatgagtgtgggttctgatgtcctacacccagtaggagtgtgtggggacactcttcactcctctggtgcgcctggtagaaaggtctgcactattggggattgatttgatttgatttcctaagactccaactgaaacaggacacgttaacttagggtaatgagtaagtctggggaggtgaggagccaaggagtgggtgggcagaggctctcttgggtcttttcttactggcacacttggatgttcacgtgacatccgcccgatcacacacctgtaataaactttttaggctggcaaaaaaaaaaaaaaaaa

SEQ ID NO: 1195 - DNA, 485 bp, Rattus norvegicus
gcttgtctcgagcgagatggcttcaaggttacttcgcggagtaggcgctttggcggctcaggccctgagggcccacggaccccgtggcgtggccgctacccgctccatggcttctggaggtggtgtccctactgatgaggagcaggctaccgggctggagagggagatcatgatagcagcacagaggggactggatccatacaatatgctacctccaaaggcagcttcgggcaccaaggaagaccccaatctagtcccatccgttagcaacaagagaatagtgggctgcatctgtgaagaggacaactgtactgtcatctggttctggctgcaccaaggcgagagccagcgatgccccaactgtggaacacattacaagttggtgccctaccaaatggtccactgagcccacccctggtttaacatttcagaatgtaaaggaaaacgtctctcaataaagactagccaacgcactggctccttcc

SEQ ID NO: 1196 - DNA, 3415 bp, Rattus norvegicus
ctcgcgggacacagagagagaagcaccggtgcttgtgcctggcgcctgccgagtccccgacgctcgcccgtccgcgccgctgcccgtggcggccgcgtctctgaaccgcggggtcgtgtttgtgtttgacccgcgggcgctggcgcgtggcacgggctgaagcgtgcagcggggcgggggccggcgcacggaggcggaggaagacgagcgggagtccgggcaggcccggcggcgccatggaactgggcccggagcccccccaccgccgccgcctgctcttcacttgcagccccactcctgcgccgcagcccacggggaaggtgcagtttggcgcgtcacgtgctggcggactgtcccctgtcaccaacctgacggtcaccatggaccagctggaagggctgggcagtgactatgagaaaccaatggacgtgagaaatagcagcagtctacagagaatgggctcctctgaatcgactgattcaggtttctgtctagattctcctgggcccttggacagtaaagaaaaccttgaaatttccctgaggagaataaattgcctacctcagaagctcttggggtgtagcccagcgctaaagaggagccattctgattctctagaccacgacatctttcaactcattgaccaggatgaaaataaagaaaatgaagcatttgaatttaaaaagccaataagacctgcatctcgtggctgcctgaatgctcacgttcacgaggaaagtaaggacccctttacacacaggcagaattcagccccagctcggatgctgtcttcaaatgaaagtgacattagtgaatcaggaaatttcagtcctctttttacaccccagtcacctgtgaaagcgagtttgtctgatgaggatgatggcttcatagaccttctggatggagagaatctgaagaatgatgaggagaccccgtcgtgcatgtcaagcctctggaccgctccccttgtcatgagaagacctacaaaccttgccgatcgatgtggactgtttgactccccttccccgtgcagctccaccagcagctgcagcactcgggcagtgaagagagcagaccgatctcatgaggagtctcctcgaggtacaaagcggaggaagagcagtgaggccagtccagtgaaggcagatgttccggagccaacgcagcttccacaccagtctctctccctgacatctttccccaaaggaaccattgagaacattttccacagtgacccaagagaccttataggggatttctccaagggttacctctttcatacggtctctgggaagcatcaggatttgaaatatatttctccagaaattatggcatctgttttgaatggcaagtttgccaatctcattaaagagtttgttatcattgactgccgatacccatatgaatatgaaggagggcacatcaagggtgccgtgaacttgcacatggaagaagaggttgaggagttcttactcaagaaacctatcgtgcccgctgacggcaagcgtgtcattgtcgtgttccactgtgagttctcctctgagagaggccctcggatgtgccgatatgtacgggaacgagataggcttggcaatgaataccccaaactccactaccctgagctgtatgtcctgaaggggggatacaaggagttctttttgaaatgccagtctcactgtgaaccccccagctaccgaccgatgcaccatgaagactttaaagaagacctaaagaagttccgcaccaagagccggacctgggcaggggagaagagcaaaagggagatgtacagtcgcctgaagaagctttgaggccaaatggcagtgacctgagcttccctccgccctgtccctttgtccctttgctgtagagcagtaagcaaaggggccagctatacggcacctggaccctggagaaaaacctgggccttccatgccttgaacctcctacactcccaggttggagcccaggcatcctgccgtcacactcttctgtgagagtccttccctgtcaggactgtctgccaaagctggacaagctcggcacaggctggcacaggctcgagtctagtctggaacgccacgtcaggctgctccgactaagcatcccctgaagaagtgcccaggcctctcatgaggggagagaagccactgaagtgctgctggccaaataccaaagataggctggaaggggagaggtcctcatggatgactctttaatttattcagcctcatcaattattttattattgttttaattcctcaagacttttactttactgcttcaaagtcaaaatactgccattctaggtagagttttatcatcctaggaactacctctacttttaatttaaaaaaaaaacatggggcagggataagaaaaaaggcaaacctgttaagtgtgggcagcgcaaggaactcagtcacccctaggaggcgctgtagactggtattgctgctattcaaagtcaaggactgagatgctggtcagagcctgcaccaaccagatccaggcttggctacaggacataagctaaccttcccagacctacttctgccctttgtgagttcctttggggagagtcttgtctgtactcctggtcccaggtccccgtgacagtgactggtgtgggagttgcaggaaggcacatcaagccacccccaggccagtactggaatgttgaagtgtaccccaaggtgggagtggggaggcatggaaaagtggagtccacagagtaagggaggagcatgcccactgaatgtcctttagaaaaaaaaaaaagtcattttatgagtcagagtatccaatcagtgttgggtgggcacctaagcttgagcagggggcgggaagcccgggctgttacagacgactgtagaatttctcaggagggcgtagtaaattttgaagtcaaaagttctgggtttcatcatgttttaattgagggacagagtggtgaaacacatcagttaccccctaatctaaccccgtggaagtgaggctctggggaatgcctcccatctaaggagctggcccgttttgattctgtcagtgtcctcgggcaccagcctccctgccatctgtgctccattggggtcatgccaggtttttcttaggaagagtctcccctcttaacctctgctttctattctgggggtggggagggaatcaatgatattgaagatggctagttgctttgttaagggtttgagtttgcatttggctataaaacaaatcttgttaaaaatatgtggagagcaagggaatgagcagcctcttcttcggtgtgttgaagtatgtcctagttttcccctggtctggtttgtagagattctgttagttgaatgccttcaaggagaatgaatggctttcagattgtaccagcttagctagcattgttaaccagctgctgcag

SEQ ID NO: 1197 - DNA, 4069 bp, Rattus norvegicus
ggcttccatcctaatacgactcactatagggctcgagcggccgcccgggcaggtctgcccccgtcctgggccgcgatgatggcggccctgtacccgagcacggacctctctggcgtctcctcctcctccctgccttcctccccatcctcctcatcgcccaacgaagtgatggcgctgaaggatgtgcgagaggtgaaggaggagaacaccttgaatgagaagcttttcttgctggcgtgcgacaagggtgactattatatggttaaaaagattttggaggaaaacagttcaggtgacttgaacataaattgcgtagatgtgcttgggagaaatgctgttaccataactattgaaaacgaaagcttggatatactgcagctgcttttggactacggttgtcagaaacttatggaacgaattcagaatccggaatactcaacaacaatggatgttgcaccagttattttagctgctcatcgtaacaactatgagatcctcacaatgcttctgaagcaggacgtggctttgcccaagccccatgctgttggctgtgaatgcacgctgtgttctgcgaaaaacaaaaaggacagcctcagacattccaggtttcgtcttgatatctatagatgtctggccagtccagctctaataatgttaacagaggaggatccaattctgagagcgtttgaacttagtgctgacttaaaggaactcagccttgtggaggtggaattctggaatgactatgaagagctagcccgtcagtgcaaaatgtttgctaaagatttgcttgcgcaagctcggaattctcgtgaactggaagttatcctaaaccatacatctagtgatgagcctcttgacaaacgaggactactagaagaaagaatgaatttaagtcgtctgaaacttgctatcaaatataaccagaaggagtttgtctcccagtcaaattgccagcagttcctgaacaccgtttggttcggacagatgtcaggttaccgccgtaagcccacctgtaagaagataatgactgttttgacagttggcattttctggccagttctgtcactgtgttacttgatagctcccaaatctcaattcggcagaatcattcacacaccgttcatgaagtttattattcatggagcttcatatttcacattcttgctgttactcaatctctactcacttgtctacaatgaggacaagaaaaatacaatggggccagcccttgagagaatagactaccttctcatactgtggattattgggatgatttggtcagacattaagaggctgtggtatgaagggttggaagacttcttagaagaatctcgtaaccagctcagctttgttatgaattccctttacttggcaacttttgccctcaaagtggtggctcacaacaagtttcatgattttgccgaccggaaggactgggatgcgttccaccccacactggtagcagaagggcttttcgcctttgcaaacgttctgagttaccttcggctcttctttatgtacacaaccagctctattttgggcccactgcagatttcaatgggacagatgttacaagattttgggaaatttctaggaatgttccttcttgttctgttttccttcacgattggactgacacagctctatgacaaagggtacacttccaaagagcagaaggactgcgtaggcatcttctgtgaacagcaaagcaacgacaccttccactcgttcattggcacctgctttgctctgttctggtacatcttctccttagcgcatgtggccatctttgtcaccaggtttagctatggggaagaactgcagtccttcgttggggctgtgattgtcggaacttacaatgtcgtggttgtgatcgtgcttacaaagctactggtagcgatgcttcataagagcttccagctgatagcaaatcatgaggataaagaatggaagtttgctcgagcgaagctatggctcagctactttgatgacaaatgcacactgcccccacctttcaacatcattccttctccgaagactatctgctatatgatcagcagcctcagcaagtgggtgtgctcgcacacctccaaaggcaaggtcagacggcagaacagcttgaaggagtggagaaacttaaaacaaaagagagatgagaactaccagaaggtgatgtgctgcctagtgcatcgatacctgacctccatgcgacagaagatgcagagcacagaccaagccaccgtggagaatctcaatgaactgcgccaagatctgtcaaaattccgaaatgaaataagggatttgcttggctttcggacttctaaatatgctatgttttatcccaaaaattagccattttctaaatcttgtagaaataattttctttaataaatctgaaagactgtatttgcatacctttcaattaaatcaataagatatatatgggcataaacaattacacagaagccattctttaaatatttatagcataaacatatgttgtgtaaatatgtatatagagctagttttttaaaacctgtctgtgactttttgtagaagcaaaaccattttgttagcatgctactttgttttcttagttggtcagtgcttacattcgacgtgtgtaagaggggcagctctcagtgtacgcatggcccactccatttatacgcgaagatcagcaaacgcggctaccttaagacacacttgaagagctcatgctgttgaaatctcttgttttaggagttcacacagagttcagtatatattgtttaggagtttagcttcatctaaaataccctactttttcttttgttagaatcttaagcagcagagaaaagtttataataaatatttgaatttaacccagtcatggtgatgaatgcctttaatcccagcactcgggaggcagaggcaggcagatctctgagttcaaggtcagcctggtctacagagtgggttccaggatagccccggctacacagagaaaccctgtcttggaaaaataaaaaacaacaaaaaaaaatttaaattatttatttatgtctatctaaattcacgttggtatttgttgtgtagtatatttacttttacatggttataatttatatttttaattttgttttgacataacattattttatatatatttccctatattaaggtagtttatatgtttaaatatttatagacgtctgtgaattttgaaaaatagtagccatcttttacccatagaatacttgtttctatttataccctcgcagaggtacctcttaagcatttggctaagtttagcttttccttccaatttttcaagttggagtaaaactcatcgttacaaagtagaagctgcttatcttcatgtgcggtcacagtgggcttggccggagagcactgggccttgcttgcagaaggctgctttccgttcactccaaggctcttgagctcctcttccaaagtttctcccacagagcctaccacagcttctacaaaactggcctcgtgcttgcggcttgagatgtaaagcattgtttattcaatttgaaaataaaaagaatttgactgcttttcagtgttcatgtaaaggtggagctgaaggtttccccagctatggcacagacattcctgcagcacgtttggtgagaaattaccttcggaactgaacgtcagctggcattgaggccacagagtgcagacagccctggtctgtgagcgccgcccaccccggggcagctgaagatcccagtgtaggtttcatcttgctttttgcatttgtttttaatgtcccaggtttaagtgttccctcttttgggcaaattcttataaaaatgtttattgtaaaattatatattttgtctacaatgggattatgcgcttccaagttgatattttacatcaggatttttagtcattctaaaaaaaatacctaattattaaaaaatttatagagtacctatgtgtgcatgaattactgacgaggtatattttgaatgacagcatattgtaagaaaagagtgaataaaatttggcattagattataaaaaaaaaaaaaaaaaaaaaaaaaaa

SEQ ID NO: 1198 - DNA, 693 bp, Rattus norvegicus
caatctacaattcacagataggaggaggcccatgacctaggagtagcgatcaactcaaggtccagttctcattatgttattcatggacacccggggcactgctctataatgcgcaaatggatactgacacggatcctgccgactccgctctacagaccgtgcttccacctcgtctgtcttgtgggcaccatatctttagcttgcaatgacatgagtccagagcagacggccacgagcgtgaactgttctagccccgagcgacacacgagaagttatgactacatggaaggaggggatataagggtgaggagactgttctgtcgcacccagtggtacctgaggattgacaaacgaggcaaagtgaaagggacccaggagatgaggaacagctacaacatcatggaaatcatgactgtggcagttggaattgtggcaatcaaaggggtggaaagtgaatactatcttgccatgaacaaacaaggggaactctatgcaaagaaagaatgcaatgaggattgcaacttcaaagaactgattctggaaaaccattacaacacctctgcatcagctaaatggacacacagcggaggggaaatgttcgtggccttaaatcaaaaggggcttcctgtcaaagggaagaaaacgaagaaagaacaaaaaacggcccactttcttcctatggcaataacttaa

SEQ ID NO: 1199 - DNA, 1412 bp, Rattus norvegicus
tggtctctgcttctctggatcccgaaggagggcagaaggaagaaaacggctcaatgatgagggtgattcgagtgggcacccggaagagtcagctggctcgcatacagaccgacactgtggtagcgatgctgaaaaccttgtaccctggcatacagtttgaaatcattgctatgtccaccacaggggacaagattcttgatactgcactctctaagattggagagaagagcctgtttaccaaggagctagaaaacgccctggaaaaaaatgaagtggacctggttgttcactccctgaaggatgtgcctaccatactacctcctggctttaccattggagccatctgcaaacgggaaaacccttgtgatgctgttgtttttgagggaaagtttattggaaagaccctggaaaccttgccagagaaaagtgccgtggggaccagctccctgaggagagtggcgcagctacagagaaagttccctcacctggaattcaagagtattcggggaaacctcaacacccgcctacggaagctggatgagcagctggagttcagtgccattatcctggctgtggctggcctacagcgcatgggctggcagaaccgggtgggccagatcttgcacccagaggaatgcatgtatgctgtgggtcagggagccctggcggtggaggtccgagccaaggaccaggatatcttggacctagtgggtgtgttgcatgatcctgaaactctgcttcgctgcattgctgaaagggattttctgaggcacctggaaggaggctgtagcgtgccagtagcagtgcatacagtgatgaaggatgggcaactgtacctgactggtggagtctggagtctagatggctcagatagcatgcaagagaccatgcaggccaccatccaggtccctgttcagcaagaagatggtccagaggatgacccacagttggttggaatcactgcccggaacattccaagaggagcccagctagctgctgagaacctgggcatcagcctggcaagcttgttgctcaacaaaggagctaagaacatcctagatgttgcacggcagcttaatgatgtgcgctaactggcgacgtcggcacaggaaccgaaccccagctgtcactccagtgcctatgtctggctgtcaagtgccctgtgctccttaacaaggggaatgattatcccaggagattgaacagagttgttgagacttcggccttggaagatatgcctcaacttggggcctccatgactgcctttccctcagtagtttgtgggcttcatctctttagagaaagtccatgccaatcttttatgtaaccaatgccactaatcagttcagaatgtggttctcctggagttgggggaagatatgaataaacccaaagccctttaaccgtaaaaa

SEQ ID NO: 1200 - DNA, 499 bp, Rattus norvegicus
acccccaatgtatccgttgtggatctgacatgccgcctggagaaacctgccaagtatgatgacatcaagaaggtggtgaagcaggcggccgagggcccactaaagggcatcctgggctacactgaggaccaggttgtctcctgtgacttcaacagcaactcccattcttccacctttgatgctggggctggcattgctctcaatgacaactttgtgaagctcatttcctggtatgacaatgaatatggctacagcaacagggtggtggacctcatggcctacatggcctccaaggagtaagaaaccctggaccacccagcccagcaaggatactgagagcaagagagaggccctcagttgctgaggagtccccatcccaactcagcccccaacactgagcatctccctcacaattccatcccagaccccataacaacaggaggggcctggggagccctcccttctctcgaataccatcaataaagttcgctgcaccctc

SEQ ID NO: 1201 - DNA, 504 bp, Rattus norvegicus
gtgtatcaggatggtttccagggcaacaccttatgaaccaaagagaggcctaccattagccgtgaagccggtgtgttaaggtgatttgtaagacagctgctgtgaactttgatgttaccaacacaggctgatctttaaaacaataacaattgtaatcattatgatcagttctttccaaatttgatagctatgcatatataatttctaaataagtgtctaaattggaaaacaatgtctaatgccagtgaccaattaatggtcataaaatggaataattcttctctgaagtagctggtgagtaactgtggaccagttaattggatatgctcggtcagttgtctgctgtgaaaaattaactttttcatggcaattagtgtgacaatttctaaattgccctatgccgtgctcactctttgatttctaattgtaagcgaaatgaactattttggaacggagtgcgctttcatatacaggaaactgtttccaaggaaacactttgtaatt

SEQ ID NO: 1202 - DNA, 1076 bp, Rattus norvegicus
cacacagcaaacatgacccagcagccgcctgacgttgaggaggatgactgtctttctgaataccaccacctcttctgtccggaccttctccaggacaaagtggcttttatcactggtggtggttctgggattggcttccggatcgccgagattttcatgaggcatggctgccacactgtcatcgtcagcaggagtctgccgagagtgtccgaggctgctaagaagttggttgctgccactggaaagcggtgtctccctctgtctatggatgtccgagttcccccagctgtcatggctgctgtggaccaagcgctgaaagaatttggcaaaatcgacatcctcattaactgtgctgcagggaactttttatgccctgccagtgcattgtctttcaatgcctttaagactgtggtggacattgacacccttggcaccttcaatgtgtctcgtgtgctttatgagaagttcttccgggaccatggaggagtgatcgtgaacattaccgccaccctcagtatgcgggggcaggtgctgcagctccatgcaggcgctgccaaggcggctgtggatgctatgacgcgacacttggctgtggagtggggtccccagaatatccgtgtcaacagcctggctcctggtgccatcagcggcactgagggtctgcggagattaggaggccccaaggccagttcgaaatttaagtatctttcaagtcctattccaagactcggaaccaagacagaaatcgcccacagcgtgctgtacctagccagccctctggcttcctatgtctcagggattgtgttggtggttgatggtggtagctggatgacgctcccaaatgacattgggcgactgctagagtttgaatcctcctctgctaagctgtagtgtttgaagagcacacccaaggcttcaagcatgttaaagcaacagaatcaactgaactacgtcctctaccccaagataccttttttgacacataaacattgattgccttaagaaagttgtactgaggaggccgtgttcttccatggggaggcttccctgtctcacatagtctatagtcacacgaa

SEQ ID NO: 1203 - DNA, 5609 bp, Rattus norvegicus
ccagcagatttctgggttcatataaaacaacaaaatacaatcaaaatgcatcaccaacatacacccaattgacatgctggaatcttagggtggtcttgcagagacaaagacaagagaagagctgttgggattgatttcaccatcctaacagcttctggctgtctcacaccagggtttgagacctaccgacaggactcgtagggcatacacaggaaatttggccttggcatcagtggtgctggaagcctgtgatatgacagtaggcctctgaagctattctggtgtatcactctgccccttctccttctgtgtttggagccaacatctggaggagcctcgaggcctgccaagcagccgaagtcctggcttagttctggcttcgtgttcttctctgagaaaagtgtgttctttctgattctgctctcctattgctggcaccacgccggtggtagttgaaggtgttggttctgcaagagtgaagtacctgatggtgccacagatgcccttacttaacatcatcgtttgtaaatgaatcagtgatctctcttgagcctcggtggccttctttttcagaacgttgcctccaaagtgtatcctccctttggcctggaagttctgtggctatcccatactactggggtctctgctttccagttggaaggggactactgggagagaggaaggggctgctggaagcgaagaagaaggaaaaaagagctgaaggagggtgcgcccctcccactgccgcctcccccatccctcccactcctctggggacccccattctccgtgacgttgtccaggaccacttcgaccctgtcgcccccagctcccccccgccgcaccccagccccgagcatggggacggcgctggtccagcatgggggctgctgtctcctctgcctgtcgctgctgctgttgggctgctgggcagagctgggcagtgggctggagttcccaggcgctgagggccagtggacgcgcttccccaagtggaacgcgtgctgcgagagtgagatgagcttccagctgaagacacgcagcgcccgcggcctcgtgctctacttcgacgacgagggcttctgcgacttcctcgagctcatcctgacacgcggcggccgcttgcagctcagcttctccatcttctgcgccgagcccgccacgctgttggccgacacgccagtcaacgacggcgcctggcacagcgtgcgcatccgccgccagttccgcaacaccactctctacatcgaccgcgctgaggccaagtgggtggaggtcaagtccaagcgcagggacatgacggtgttcagtgggctgttcgtgggcggcctgccgcctgaactgcgagccgctgcgctcaagctcaccctggcctcggtgcgtgagcgggagcccttcaagggctggatccgtgatgtcagggtcaactcgtcccaggcgctgccggtggacggcagcgaggtcaagctggacgaagagccgcccaatagcgggggcgggagcccgtgcgaggcgggcgatgagggcgacggcggcgtgtgcctcaacgggggcgtgtgctccgtggtcgacgaccaggccgtgtgtgactgctcgaggaccggtttccgtggcaaagactgcagccaagaagacaacaatgtagaaggtctggcgcacctgatgatgggcgaccaaggtaaaagtaaaggaaaagaagagtatattgccacattcaagggatctgagtacttctgctacgacttatcccaaaaccccattcaaagcagcagcgacgaaataactctgtcctttaaaactcttcagaggaatggactgatgcttcacacagggaaatcggctgattatgtcaaccttgccttgaaaaatggagctgtctctctggtcattaatttgggatcaggggcctttgaagcgctagtagagcccgtgaatggaaagtttaatgataatgcctggcatgatgtgaaagtcaccaggaatctgcgtcagcactcaggcattggacacgctatggtgacaatatcagtggatgggattcttaccacaacgggctacacgcaagaagattacaccatgctggggtctgatgactttttctatgttggaggcagccccagcacagccgaccttccagggtcaccagtcagtaacaactttatgggctgtctcaaagaggtcgtatataaaaataatgatgtaagactggagttatcgcgacttgccaagcaaggagatcctaagatgaagatccatggtgtggtggcttttaagtgtgaaaatgtggcaaccttagacccaatcacttttgagaccccagaatctttcatttctttgcctaagtggaatgcaaagaaaacaggctcaatatcatttgatttccgtacaacggagccaaatggcctcatcttgtttagccatggcaagccaagacatcagaaggatgccaagcacccgcagatgattaaggttgacttttttgctattgaaatgctggatggccacttgtacctcctcttagacatgggatcaggtactataaaaatcaaagcccttcagaagaaagtcaatgatggagaatggtatcacgtggatttccagcgagatggacggtcaggtaccatttctgtcaacacacttcgtactccctacacagctcccggtgagagtgagatcctagacctcgatgatgagttgtatctgggtggcttgccagaaaataaggctggcctggtcttccccactgaggtgtggactgctctgctcaactatggctacgtaggctgcatccgggatctattcattgatggccagagcaaagatatccggcagatggcggaaattcagagtactgctggagtgaagccatcctgctcaagggagactgcaaaaccatgccttagcaatccttgcaaaaacaatggcatgtgcagggatggctggaacagatacgtctgtgattgctctggaacaggctatctcggcaggtcctgtgagagagaggcaacggttttgagctacgatgggagtatgtttatgaaaattcagctccctgtggtgatgcacactgaggccgaggacgtttccttacggttcagatcccagcgtgcgtacggcattctgatggcgaccacttctagagactccgcagatacccttcgactggagctagatgcagggcgcgtgaaactcacggtcaatctagattgtatcaggattaactgtaattccagcaaaggtcctgagaccctttttgccggctataacctcaatgataatgaatggcacacagtacgtgtggttcggcgaggaaaaagtttaaagctaaccgtggatgatcaacaagccatgacaggccaaatggcaggtgatcatacaaggctggagtttcataacatagagacaggcatcatcacagaacgacgctatctttcttctgtcccctccaacttcattgggcacctgcaaagcctcacatttaatggaatggcatacattgacttgtgcaaaaatggtgatatagattattgtgaactcaatgccaggtttggattcaggaacatcatcgcggatcctgtcaccttcaagaccaaatcaagctatgttgccttagctacattgcaagcctacacttctatgcatctatttttccaattcaagacaacatccctagatggactaattctgtataacagtggggatggaaatgactttattgtggttgaattagttaaagggtacttacattatgtgtttgacttgggaaatggtgctaacctcatcaaagggagctcaaacaaaccactcaacgacaatcagtggcacaatgtgatgatttcaagggacaccagcaatctccacacagtaaagatcgacacaaaaatcacaacacaaatcactgcgggagccagaaacttagacctcaagagtgacttgtatattggaggagtggctaaagaaacatacaaatcgttgccgaaactggtccatgctaaagaaggctttcaaggttgcctggcatctgtggacttgaatggcaggcttccagacctcatatctgatgctcttttctgcaatgggcaaattgagagaggatgcgaagggcccagcacaacctgtcaagaggactcatgttcaaatcaaggcgtgtgcttgcagcaatgggatggctttagctgtgactgtagcatgacttccttcagtggcccgctctgcaatgaccctgggacgacgtatatctttagcaaaggtggtggacaaattacacataagtggcctcctaatgaccgacccagtacacgagcagacaggctggccatcgggtttagcactgttcagaaggaagcagtgttggtgcgtgtggacagttcctcaggcctgggtgactaccttgagctgcacatacaccaaggaaaaattggagttaaatttaatgttgggacagatgacatcgccattgaggagtccaatgcaatcattaatgatggaaaataccatgtagtgcgtttcacgaggagtggtggcaatgccacgttacaggtggacagctggccagtcatcgaacgataccctgcaggaaacaatgataacgagcgcctggcgattgctagacagcgaattccatatcgacttggtcgagtagttgatgaatggctactcgacaaagggcgtcagctcacaatcttcaatagccaagcaaccataataattggcgggaaagagcagggccagcccttccagggccagctctctgggctttactacaatggcttgaaagttctgaatatggcggcagaaaacgatgccaacatcgccatagtgggaaatgtgaggctggtcggtgaagtgccttcctctatgacaactgagtcgacagccactgccatgcagtccgagatgtccacctcaatcatggagaccaccacaaccctggctaccagcacagctcgacgaggaaagccccccacaaaggagcctatcagccagaccacggatgatatccttgtggcctcggcagagtgtcccagcgacgatgaggacattgacccctgtgagccgagctcaggtgggttagccaaccccacccgagtgggcggccgcgaaccatacccaggctcggcagaggtgatccgggagtctagcagtaccactggcatggtggtggggattgtcgcagcagcagctctgtgcatcctcatcctcctctatgccatgtacaagtacagaaaccgggatgaaggctcatatcacgtggatgagagtcgaaactacatcagtaactcagcacagtccaatggggctgtggtcaaggagaagcagcccagcagtgcgaaaagcgccaacaaaaacaagaagaacaaggataaggagtattatgtctgatctcaagattcgaaaaggacacttgtatagaaatagtcttcattttatctgagacataatataaacttatttactttcctttttatgaagcacatacaaaagaagacagggaatgcgatcaggagggaaaactctttttaaaaaaaaacaaacaagtatgtcatgctcttgtttctcaaaaaaaaaacatacacaaaaaaaaggaaagagagaaaaaaaaaaaaaag

SEQ ID NO: 1204 - DNA, 1544 bp, Rattus norvegicus
gtcggacctgtgctgacctcgctcctccgcgtaccccggcctgcagcagtcgccgccatgagcactggcaccttcgtcgtgtcgcagccgctcaactaccgcggcggggcccgcgtggagccggtggatgcctccggcacggagaaagcgttcgagccagccaccggccgagagatagctactttcaagtgttcgggagaaaaggaagtaaatttggctgttgaaaatgcaaaagctgcctttaaaatctggagtaagaaaagcggcttggagcgttgtcaagtcctcttagaggctgcccggataataaaggaacggagggatgaaattgccattatggagaccatcaacaacgggaagtccatatttgaggctcgcctggatgttgacacttcctggcagtgcctggaatactatgcaggcctggctgcgtccatggcgggagagcacatccagctcccaggagggtcctttggctacaccagaagagaaccacttggggtgtgtttggggataggagcatggaactaccccttccagattgcctgttggaagtctgctccggctttggcttgtggtaatgccatgatctttaagccctctcccttcacgcctgtgtctgctctgctcctggctgagatctacaccaaagccggtgcgcctaacggcctcttcaacgtggtgcaaggtggggctgccacaggccagtttctgtgtcagcatcgtgatgtggccaaagtctccttcactggaagcgtgcccactggcatgaagatcatggagatggccgctaaaggaatcaaacccattactttggaacttgggggcaaatctcctctgatcattttctctgactgtaatatgaagaatgctgtgaagggggccttgctggccaacttcctcacacaaggacaggtgtgctgcaacggcactagagtgtttgtgcaaaaggaaattgctgacgcatttacaaaggaagttgtgaggcagactcagaggataaagattggggacccacttctggaagatacaaggatgggcccactcatcaatgccccgcacctggagcgagtcctcgggtttgtcaggtctgcaaaggagcagggtgccactgtgctgtgtggtggagagccgtatgccccggaggatcctaagttaaaacatggatattacatgacaccttgcattttaactaattgcacagatgacatgacttgtgtaaaagaagagatctttgggccagttatgtccattctaacatttgagactgaagccgaggttctggagcgggccaatgacaccacgtttggactagcagctggggtctttaccagggacattcagagggcgcacagggtggcggctgagctgcaggccggaacgtgctacattaacaactataacgtcagcccggtggagttgccctttggtggatacaagaagtcaggatttggcagagagaacggccgagtgacgattgagtactattcacagctgaagacggtgtgtgtggagatgggggacgtggagtcagccttttgaaa

SEQ ID NO: 1205 - DNA, 897 bp, Rattus norvegicus
cgttctgtggcctgccgggtcagcaccatgagctccattggcactgggtatgacctgtcagcctctacattctctcctgatggaagagttttccaagttgaatatgctatgaaggctgtggaaaacagtagtacagctattgggatcagatgtaaagatggtgttgtgtttggggtagaaaaattagtcctttctaaactttatgaagaaggctccaataaacgtcttttcaatgttgatcgacatgttggaatggcagtggcaggtttgttggcagatgctcgttccttggcagacatagcaagagaagaagcgtccaactttaggtctaactttggctataacattcctctaaaacatcttgcagacagagtggccatgtatgtacacgcgtatacactctacagtgctgttagaccttttggctgcagtttcatgttggggtcttacagtgtgaatgatggtgcacagctctatatgatcgatccatcaggtgtttcatatggttactggggctgtgccattggcaaagccaggcaagctgcaaagacagaaatagaaaagcttcagatgaaggaaatgacctgccgtgatgtagttaaagaagttgcaaaaataatttacatagtacatgatgaagttaaggataaagcttttgaactagagctcagctgggttggtgaattaactaaaggaagacatgaaattgttcccaaagacgtaagagaggaagcagagaaatatgccaaggaatctttgaaggaagaagatgaatcagatgacgacaatatgtaacatttcaccatcctctggtgtccatttctgtgacagttgcatatggctagcaccatggattatatatacccactgaccaattttcattaaattttgtcttat

SEQ ID NO: 1206 - DNA, 4526 bp, Rattus norvegicus
gaattccgcggacgcccacgccccgagcatcctcttctgacgagcgggcgccggcggcatgatgcggctgcgaggctcggcgatgctgcgggagctgctcttgaggccgcctgccgccgtcggaggcgtcttgcggcgcacgcagcccctcggcacgctgtgccggcgcccccggggcgggagccggccggccgctggcctggtggccgctgcgcgactccacccgtggtggggcgggggcggccgcgcgaagggcccgggctcgggcggcctgtccagctcgccctcggagatcctgcaggagctgggcaaggggggcacgccgccacagcagcagcagcagcagcagcagcagccaggggcgtcgccacccgcagccccgggccccaaggacagcccgggggagacggacgcgttcggcaacagcgaaggcaaggagatggtggctgcgggcgacaataaagtaaagcagggtctgttacctagcttggaagatttgctgttctatacaattgcagaaggacaagaaaagatacctgttcacaagtttattacagcactcaaatctacaggattgcgaacatctgatcccaggttgaaagagtgtatggatatgttaagattaactcttcagacaacgtcagatggtgtcatgctagacaaagatctttttaaaaagtgtgttcaaagcaacatcgttttgttaacacaagcatttagaagaaagtttgtcatccctgactttatgtcttttacctcacacatcgatgagttatatgaaagtgctaaaaagcagtctggagggaaggttgctgattatattcctcaactggccaaattcagtcctgatttgtggggtgtatctgtttgtaccgtagatgggcaaaggcattctattggagataccaaagttcccttttgtcttcagtcctgtgtaaagcccctgaaatatgcaattgctgtcaatgacctgggaactgagtatgtgcatcgctatgttgggaaggagccaagtggattaagattcaacaagctctttttgaatgaagatgataaaccacataatccgatggtaaatgctggagcaattgttgtgacttcactaataaagcaaggagtaaataatgctgagaaatttgactatgtgatgcaatttttgaataagatggctggtaatgaatatgtcggattcagtaatgcaacgtttcaatctgaacgagaaagtggagaccgaaattttgcaataggatattacttaaaagaaaagaagtgttttccagaaggcacagacatggttgggatactagatttttatttccagctctgttccattgaagtgacgtgtgagtcagcaagtgtgatggctgcaaccttggctaatggcggtttctgcccaattactggtgaaagagtgctcagtcctgaggccgttcggaacaccctgagcttaatgcactcctgtggcatgtatgacttctcagggcagtttgcatttcatgttggtcttcctgcaaaatctggagttgctgggggtattcttttagttgtccccaacgtcatgggcatgatgtgttggtctcctcctcttgacaagatgggcaacagtgttaaaggaattcacttttgtcacgatcttgtttctctgtgtaacttccataactatgataatttgagacactttgcaaaaaaacttgatcctcggagagaaggaggtgatcaaagggtaaagtcggtgataaacctcctgtttgctgcgtacactggagatgtgtctgccctccgaaggtttgctctgtcagccatggacatggaacagagagattacgactccagaacagccctgcatgttgctgctgcagaaggtcatgttgaagttgtgaagtttttgctggaagcttgcaaagttaaccccttccccaaggacaggtggaataacacccccatggatgaagcactgcactttggacaccatgatgtttttaaaatcctccaggaataccaagttcagtatacacctcaaggggattctgacgatggaaaagaaaaccagactgtccacaagaatcttgacgggttgttataatggtctgaatcgtgagacttacattacttacctagccattgtggaacatggctatggagaacatgtgtgtttctatctggtagtaatgtgtatttacaacatctgtccctgcagtgttaccggagcctccttcattgtgcgcacacgacaaatctgagttctttgggaaaaaaaatagaaatgaagtagcctcccttcacaatgtgagcaatagttacctcgtgcgttgtacaatttgatgtaaaagagtagttaccaatgctagctgaactgtgtggtttccacggtttgtgttttgtacattttcaagccctggtgatgatatatgctcatatgcattaggattgagctttgttgtacagtctgtccatagggtcgatgctgtcattagacgaaaatagtgctacctttaagaactttacacatagatttagtttgagtgtttgagagaccattgcacttgtgtggttgagtgtttaaaatgtctatcacctcacttcacagtgtgactctttaaatattaaaataattactactaactgttcatagaatatgctgattctgattagattttatcagggaatctattaagatatgtttggtgaccaaaatatatgtgtgactgtggttctagcactttgaaacttttcctttccatacaaggcttaggccagcctctctgtggtgtgtagctgtcggtccccctcagctgggaaagagagcactggcttactatgcagttttcaggtctcctcagcaagccatcaagcctcccatttctgccatcagagatagagcttggctgtttatctgaggaagatgagccaaaattacatctcaattagtcatcagtcttaggagtaaagacagtgatgactgcaaggtcttctcagcttctacaataaagaaaaattcagaaatgcttccagttaccaaagttataatgatatatttaggaaaagctacaaataacatttacttttaatcctgatgtcaaatgtctgcatcaagatagcactcctttgtggcattccaggtatcttctcttcctctactgcttaactgttggtgggctagctatattgttcaataagaaaaggacactttattttaaatttagacccaccccttctttgttttggaaaaggcaatttatgattaacttggataataggtaaaaagcaaccttagataattgtaatattgtgagaacgtaattgtctaggagtcccacataacgtaccctattatacctccaagagatgaagggtatgttagtgaggacttttgatactaaccacacttttgcatgcacgcacacacacacacacacacacacacacacacacacacacacacacacacggatttcttggaaaatgctttatgaaattagcaacattctcaactgcacagatactactggttcccacagtaacacagcatcttctgtgaccctcactatctgcactgattgcatccaagctttatgtctggtggctcattattcactccagctgctttgatcctgtttcaaagtcagcttcggccatcccctccattccctagtgttccttcactaagacaaggcaccactaacgtgtttctaagctccagagtctgtggggaggatgtgagtggcagccagccctgtcactgtgttcctccttccacacccctcaggacaggtggtgggtactcggagcatcctccccaggaacctcctccaaggttcaggggtgagcgcgctgcagtcagcggacataccactgtgcagcagcagccggctttccggaattcagcgtgtgacttaaatattgccagtgactttaaggattccctccgataatggtcttgtatattatctgagacaaatgttttcatctctcctcagctcagtgctgcttcatactgtctctgtggcttggttgagtgcgctctttgtcctgggccaggtcttgctctggctgttcgctgctggctgataacagcaaggaccctgtaagtgtgtgaatgagccgctgactgctgccatcagtaaactccaaagacgtctgttctggctttacaaccctaggtgatggttctgtctctcagaaccattacatgatcgtgtggcttcaacgatctctgcataccgctgtccctgctgtcccggttctgacgcccctgtctgctgatgtgctacgcccactactgcctacactgctttagcggcagagctggactcactgtcgatccagacgtctgtcagggacctgataaccgatgtctgccctaggtccctgctggggagtccacagctatgaatgtatttacttctaacatttcccaaaatgaaatcttaaaactataaattgtaagtattctgaaattgggaaatacttattttaaatgagatcaggtagtgttgctttttacagcataataaatatgtgtattg

SEQ ID NO: 1207 - DNA, 1619 bp, Rattus norvegicus
ggcctggcaggttcaaccctcgaactcatctgatggtagatcctgacaccaagtgactgctgacacaaccattgtttcttgggtcacataccagggactgcaatggacctggttctcagtgctgccgactactatttcttcactccctatgtgtatccagccacatggcccgaggacaacatcatccgacaaactgttagtctcctggttgtcaccaacctgggtgcttacatcctctacttcttctgcgcgacccttagctattattttgtctatgaccattcattaatgaaacacccacagtttttaaagaatcaagtctctcgagagatcatgttcactgtcaagtctttgccttggatcagcatccccactgtgtcattgttcctgctggagctgaggggttacagcaaactctatgatgacataggagactttccaaatggctggattcatctcatcatgagcgtgatctccttcctcttcttcaccgacatgttgatctactggattcataggggcctgcaccacagactgctctataagcacatacataaacctcatcatatttggaagatccccacgccgttcgcaagtcatgcttttcaccctgtggacggcttccttcagagtctgccttaccatatctacccctttgtcttcccgctgcacaaggtggtctacttaggtttatatgtcttggttaatgtctggacaatttctattcatgatggcgacttccgggttccccagatcttcaggccgttcattaacgggtcggctcatcacacagaccaccacatgctctttgactataactatgggcagtacttcacactgtgggatagaatcggaggctcttttaaacatccttcctctttcgaagggaaaggaccacatagttacgtgaagaacatgacagaaaaagaatccaacagccttgcagaaaatggctgcaaaagcaaaaaattatgcaatggggagtttacaaagaacgagtagatgatttcccaatcattaactattttaaataaaaaagtaatctgcacacagtcgagatacatagcgaataagtggtgccatttgaatgtcagagtgcttgagtgttgcgctgaggaaaggtcctgacagtcaacatcgggaagaccctggcagcactgtaatctcttggttaattgtccgacattggtccggggacaacttgtgtctttccagccagctggtctgcagcctgtacagccccaacaacatctttcaatatgataggaagaagctggtctgtgtccctttgccttaatccactcatattcattaaggaaaaaataaccattgtgcttaacaatactgagattagccaggaaagccgaccatggagacgctccagtcagggagcggctggctctacagcagggctgggacttgcaggacttcatccacgaaggaacagcagtccaagcaggctgatatgatacatgagtggcaatgtatatgatttacttaatggctggtgtaataagattatattttcttcctataataggcaccttactctctggggcattatcagattttaataataaataaatggtaatttattattcaaaaaaaaaaaaaaaagg

SEQ ID NO: 1208 - DNA, 4614 bp, Rattus norvegicus
aattccgtgggcggcgggcggcggagaagctccgagcggggccgggcggcggcagattggagtcgcgacacagccgccgtccgcttcgggctccacgtagaaggaaccatgctggccgtcggctgcaccctgctggtcgccctgctggccgcgcccgcagtcgcgctggtccttgggagctgccgcgcgctggaggtggcaaatggtacggtgacgagcctgccaggggccactgttaccctgatctgccctgggaaggaagcagcaggcaatgctaccattcactgggtgtactcaggctcacagagcagagaatggactaccacgggaaacacactggttctgagggccgtgcaggtcaatgacactgggcactatttgtgcttcctggatgatcatctggttgggactgtgcccttgctggtggatgttcccccagaggagcccaagctctcctgcttccggaagaacccccttgtaaatgccttttgtgagtggcatccaagcagcactccctctccaaccacgaaggctgtgatgtttgcaaagaaaatcaacaccaccaatgggaagagtgacttccaggtgccttgccagtattctcagcagctgaaaagcttctcctgcgaggtggagatcctggagggtgacaaagtgtaccacatagtgtcactgtgcgttgcaaacagtgtcggaagcaggtccagccacaatgtagtatttcagagtttaaaaatggtgcagccggatccacctgccaaccttgtggtatcagccatacctggaagcctcgttggctcaaagtcagttggcaagaccctgagtcctgggacccaagttactacttgttgcaattcgagcttcgataccgacctgtatggtcaaagaacgttcacggtgtggccgctccaggtggcccagcatcaatgtgtcatccatgatgccttgcgaggagtaaagcatgtggtgcaggtccgagggaaggaggagtttgacattggccagtggagcaaatggtccccggaggtcacaggcactccttggctagcagagcccaggaccactccggcagggatcccggggaaccccacacaggtctctgttgaagactatgacaaccacgaggatcagtacggaagttctacagaagcaacgagtgtcctcgccccagtgcaaggatcctcgcctatacccctgcccacattcctggtagctggaggaagcctggcgtttggattgcttctctgtgtcttcatcatcttgagactcaagaagaaatggaagtcacaggctgagaaggaaagcaagacgacttctcccccaccgtatcccttgggaccgctgaagccgaccttcctcctggttcctctcctcaccccatcagggtcccataacagctctgggactgacaacaccggaagccacagctgcctgggtgtcagggacccacagtgccctaatgacaacagcaacagagactacttattccccagataattgtctggagggtacctggcagctggcacgcaagtttctcactgccggccccgtccaccagggctgggggcggggtgggcggggctgcagcttcacgatcccacaggagccttgcaaaggttctgagtgggagaagactggtgtgctgcacgggcttcgaaagaaggggctgtgaggagcacgagccatcatgaagagagcctgtgatgactctgaatagagacgcccgcccatcagctacacacctgatggtggctctcaagctatcctctcaggaagcctctgggaggggcgacaaaggctgccccagttgcctagctctggctcactggcccaagctgccttttagcttgaactcctaaaatccaagcaccttggccattctcttcctaggccaccgaggccgcggggaagcttggttctactttccttctcaacacctggagaagcagctgcccggtggtggtgactaacgtatcagggcctgatggcttatgaggaatgacaattaattcctcataagcagtttttaaatgtgaatagtaatcctaggcactgctgacttgaggttttattttcttcgatctcaggacttcaggagagaagcagagcagaagtagagagaggatgggtgtccattgtccgtgtggtacttgagggggatacagcctggaaaacacgtttcctgtccccctactctcccagaagaggtagggggtggcgcctcttccagggcagagagtataactactttacctggccttgcccatactggtttcaactggacttgagctactaggaaaaatgacattcatgcaaaaagaaaactttaactagcaagaatgcacttccactttggtttctagaggactgttgctcctcttgagacgctggaagaggccgctcactgtaccctggtgtatgagccctcaccccccaccccagggtaagtgcagtaactttagtctaaacaccgagtcaggtaaaaatcgaggaaaaaacaaccctgtttcctgtaacagaaaagcctttggtttcgttttgtattttgattttttttttgtcttaaaaagtgtaaaaatagtctgtccatactctgcttcagggaatgacctgtgaatactccccaggcgtgggcaggaagggtgtctgcttcctgctacacctcactgccacctcggccttccttgctttacattcaactgagttgcctcagctgctttcccctggggcgctgaaaaagccagtgatgttggtggtcaccgagaagaccacagagccacagagtaatgctgtgattgaagcgagttacgcaaccacagcaccccacatttgctgtattatagaactatgctaggagcttgccttttcacaaaataccaccaccacgagacgtggcagagctcggaagctgtcaccttgtgccatctgcttgccagctccaaggggccactgacttaagcagttattttctttgtgggctttgttcatttcagggcctgttgctgtcttagaaaaagctctgtcggttgacaaaaacatcagacaggtagtcatgtttatttattttttttccttctttgctaagtctttgggactcaagggtagtaaaaaatgctgtgaaaagggaaacattagaaacagcgatcttcggggaataggtgactgtgcccacgcactgttcttcagtccctcacgtggctctgcccgagtgctgttccaagccaggcagagcaggctggcggaagattgaaatccagatagctcgttatctctgagagctaaatagctttgatctccaagctgttattgctttcactattgtaacaggatagcctccccccccatgtcaaaaggatgcttttcccttttgactttttataagctaagtcagtgaagtctgtttcatctgagctccagcttcgttcagttcgcacaggtgtatgccctcagctgcttcgggcctcagatctgtgctagttgaatggttgtcccatccttgggtcatccttaccagagtttctgcagcccacaggtctgccttgtcaacagtaccacttaacaccagcattcagtgcccaggcagccagatgtggagggtttacccagagatgatttaaacatgaccttaaacgtgtatggtagaacgaggggaacccataccagctcaggttctaaagagatctttgattcttctggcattagtgaaatagctttaaactatttcaaggaagaagccttggccacacccacgacatttggtgacaatcctttctctccatgagccttgtctttacaccttctcacctggctgaaagctcacactgaatctttcctatgtccctggtgtcttgggagaaaggaaactggtatgggcttcactgctggaattggcttggagccagcgtgtggcgcagccctggcagggtgggccaggcttagttatggtgtgctggtttaaggaatgcctggcttgcctggttgcttgggttctgagctgcagagtttcctagcagttctttatggctgacctagttggggaagattcccacactcaactgcaggtggaggtggtgagaaagctgttttcatttggagaggcaggatcagcccaagaagctttcagtgggagagcctacagtgaggctgtacctcactgtgggaggaggcaggccagctggctcaggtcctgggactggcactggggagggtctgccaaaggtccctccagcctgtagtcctagcatagtcgggtgccagttccaggaagtttctatggcaaccttagtgctcattaaggaacattgtcagttttgtgaacatatgctcagatggagatcttgttttcagagaaaggactggtacagtgtgtaacaagctggagcagacagagagactttttggcaagagatcacatccgttaagcagaatacctcagtgctacatgtttttgtctttgagacaatgtttttaaggtttttatgctctgttacctgtaagctgatacctaaaactttctgcaaagtcagggtttttcaatgccttttttttttttttgccattgtttgctttaaagtgaagattgtaactgtttgaaataaataatttctaaaactg

SEQ ID NO: 1209 - DNA, 2462 bp, Rattus norvegicus
ttttttttctcttttctttcttttctttttcttttcttttttcacctctccgctttctcatctgctcctgcttttcctctgctcgattcccccagttcgatcccagctatcttcacaagggtgccctcttccctctgaacccatcgccgggcgtaagtgtcaggaggcggcggactcggagattgcctctggagcaggcgatgcgcgccgctgctctgcgcgctgcccgggggaggctggcgggagctggagagctggccagggctgaatggagggaaggggtgcctcgcgtccatggggtctgcttctctcctgaaaggaggctggaccggcgaagtggtctccccgttccccacgcacaatgctaaatggatttacctagtggattcccggtggatggctgtcatgtagaagtgaagaccctccgggaggagctttaaacaatttccaggctccccaaccccggcacacactctcacccgaaactcttggggagtatctctggagaacctggaaccctgcaaacctgggagcagccaccctctctgcgcttgctgttcttcggggctgcctttctggacaagtcccccctgccagctgcattcacctcggctatgtttcggattgtttggggtgtagggtacggcagactccagcacctcgagaagactgtccgaaagagggagaggatgggtgccctggcgcggtgaggcggccagccccgcagcccaccgcgagcagccggattcccggcttcctcgcctcttcttgtgccccaaactttgtctcccgcggcggctgccccttggcgggcgccccgccatgtaccagaggatgctccggtgcggtgccgagctgggatcgcccggaggcggcagtagtggcggcgcaggggggcgcctggccctgctctggatagtcccgctcaccctcagcggcctcctaggagtggcctggggggcatccagtttgggagcgcaccacatccaccatttccatggcagcagcaagcatcattcagtgcctattgcaatctacaggtcaccagcatccttgcgaggcggacacgctgggacgacgtatatctttagcaaaggtggtggacaaattacatataagtggcctcctaatgaccgacccagtacacgagcagacaggctggccatcgggtttagcactgttcagaaggaagcagtgttggtgcgtgtggacagttcctcaggcctgggtgactaccttgagctgcacatacaccaaggaaaaattggagttaaatttaatgttgggacagatgacatcgccattgaggagtccaatgcaatcattaatgatggaaaataccatgtagtgcgtttcacgaggagtggtggcaatgccacgttacaggtggacagctggccagtcatcgaacgataccctgcaggaaacaatgataacgagcgcctggcgattgctagacagcgaattccatatcgacttggtcgagtagttgatgaatggctactcgacaaagggcgtcagctcacaatcttcaatagccaagcaaccataataattggcgggaaagagcagggccagcccttccagggccagctctctgggctttactacaatggcttgaaagttctgaatatggcggcagagaacgatgccaacatcgccatagtgggaaatgtgaggctggtcggtgaagtgccttcctctatgacaactgagtcgacagccactgccatgcagtccgagatgtccacctcaatcatggagaccaccacaaccctggctaccagcacagctcgacgaggaaagccccccacaaaggagcctatcagccagaccacggatgatatccttgtggcctcggcagagtgtcccagcgacgatgaggacattgacccctgtgagccgagctcaggtgggttagccaaccccacccgagtgggcggccgcgaaccatacccaggctcggcagaggtgatccgggagtctagcagtaccactggcatggtggtggggattgtcgcagcagcagctctgtgcatcctcatcctcctctatgccatgtacaagtacagaaaccgggatgaaggctcatatcacgtggatgagagtcgaaactacatcagtaactcagcacagtccaatggggctgtggtcaaggagaagcagcccagcagtgcgaaaagcgccaacaaaaacaagaagaacaaggataaggagtattatgtctgatctcaagattcgaaaaggacacttgtatagaaatagtcttcattttatctgagacataatataaacttatttactttcctttttatgaagcacatacaaaagaagacagggaatgcgatcaggagggaaaactctttttaaaaaaaaacaaacaagtatgtcatgctcttgtttctcaaaaaaaaaacatacacaaaaaaaaggaaagagagaaaaaaaaaaaaaaggaattc

SEQ ID NO: 1210 - DNA, 560 bp, Rattus norvegicus
ggaggtggaggaggaggagggggggggggggaagagggggaggagaaggaggattcattattgcagggattggactcagagaaacagacccagggcatggagacaggtggtgcctaggaggaggaggcggtcctgaggggctgcaccccaggggagggggcggggctgggaatgggatctgcagaaccgccagccatcccagccctgagctgcaacagccatgtccaacaacatggccaagatcgctgaggcccgcaagacggtggagcaactgaagctggaggtgaacatcgatcgcatgaaggtgtcgcaggcggcagcggagctattggctttctgcgaaacgcacgctaaggatgacccactggtgactcctgtccctgccgccgagaatcccttccgcgacaaacgactcttttgcaccctgctctgagcccccaagatagttttatcctcccgcgcagaaatatgaatccaataaacttggtgacttggtggtgcctgccatttaggggaaaatgaggcacggggcaaaaacgtgggggccacctttgtgggga

SEQ ID NO: 1211 - DNA, 1324 bp, Rattus norvegicus
aattcacagctgtctcactttcttccagttcaaccagccctgacagctcccaagccttgagtcacagagacttgggagccactccactcccagcatcgtagagctacagcaggattaagtttacctcaaagatgggagaaatcagggtggataatttcagccttgaagacttcttcagtggagatattgacagttacaattacagttctgacccgccctttactctgtcagatgctgccccatgcccctcagcgaacctagatatcaacaggtatgctgtggttgtcatatacgttctggtgactttgctgagtctcgtggggaactccctggtgatgctggtcatcttgtacaatcgaagcacctgctctgttaccgacgtctacctgctgaacctggccattgctgatctgttctttgccctgaccttgcctgtctgggctgcatctaaagtaaatggatggatttttggctcattcctgtgcaaggtattctcgttcctgcaggagattaccttctacagcagtgttctgttgctagcctgcatcagcatggaccgctacctggccatcgtccacgccacaagtacactgatccagaagagacacttggtcaagtttgtgtgcatcaccatgtggtttctctcactagttctgtccctgcccatcttcattcttcggactactgttaaggcaaacccttctaccgtagtctgctatgagaatataggtaataatacatccaagtggagggtggtactgcgcatcctgcctcagacctatggcttcctcctgccgctgctcatcatgctgttctgctatgggttcacactgcgcacgctctttaaggcccacatggggcagaagcaccgggccatgcgggtcatctttgctgtggtcctcgtcttcctgctctgctggcttccctacaacattgtcctgttcacagacaccctcatgagaaccaagctgatcaaggagacctgtgaacgccagaacgagattaacaaagctttggaagctactgagattcttggcttcctccacagctgtcttaaccccatcatctatgcctttattggccagaaatttcgccatggacttctcaagatcatggctaattatggccttgtcagcaaggagttcttagccaaggagggcaggccttcttttgttggctcttcttcagcgaacacctccactaccctctaagactgtttacttaaactgtggcccctctgggttcccttcttgtccttcaagcatggctcattaccagagactgtgatatttgaattgatgcagttccctctacagctacagga

SEQ ID NO: 1212 - DNA, 927 bp, Rattus norvegicus
atggttggacttcagccatcagaagtgcctcccacaacagttgtaaagttcctgggggccggcactgcagcctgttttgctgatctcctcaccttccccctggacaccgccaaggtccgcctgcagatccaaggggagaacccaggagtgcagagcgtgcagtaccgcggcgtgctcggtaccatcctgactatggtgcgcacagagggtccccgcagcccctacagcgggctggtcgctggcctgcatcgccagatgagttttgcctccattcgaattggcctctacgactctgtcaagcagttctacacccccaaaggaacggaccactccagcgtcgccatcaggattctggcaggctgcaccacgggagccatggcagtgacctgtgctcaacccacggatgtggtgaaggtccgatttcaagccatgatacgcctgggaactggaggcgagaggaaatacagagggactatggatgcctacagaaccatcgccagggaagaaggagtcaggggactgtggaaagggacttggcccaacatcacaagaaacgccattgtcaattgtgctgagatggtgacctatgacatcatcaaggagaagctgctggactctcacctgttcactgacaacttcccctgtcactttgtctctgcctttggagctggtttctgtgccacggtggtggcctccccagtggatgtggtaaagacccgatacatgaacgctcccccaggcaggtaccgaagccccctacactgtatgctgaggatggtggcccaggagggccccacagccttctacaaaggattcatgccctcctttctgcgtctgggatcctggaacgtgatgatgtttgtaacctacgagcagctgaaacgggccttgatgaaagtccaggtactgcgggaatctccattttga

SEQ ID NO: 1213 - DNA, 4845 bp, Rattus norvegicus
ggcagccaccgagagagcgcgctagcagcggctcccgccccgtgcacccgcagctaccgcgccgcggcgagacccagagaccgaccgacggacccgcacaatcgcagcatcctggaggagaacatgcttgccaattcagccagtgtgcggattctcatcaagggaggcaaggtggtgaacgatgactgtacccacgaggcagatgtctacattgagaacggcatcatccagcaggtgggccgtgaactcatgatccctggcggggccaaggtgattgacgccaccgggaaactggtgatccccggagggattgacaccagcacccacttccaccagaccttcatgaacgccacatgtgtggacgacttctaccacgggaccaaggcagccctcgtcggaggcaccaccatgatcatcggtcacgtcctgcctgacaaggagacctccctcgtggaagcctatgagaagtgcagggctctagctgaccccaaggtctgctgtgactatgccctccatgtggggatcacctggtgggcacccaaggtgaaagcagaaatggagacactagtgcgagagaaaggggtcaactccttccagatgttcatgacctacaaggacttgtacatgcttcgagacagtgagctgtaccaagtgttccatgcctgcagggactttggggcgatcccccgggtccacgcagaaaatggggagcttgtggctgagggtgctaaggaggctctagatttgggtatcacaggcccagaaggaattgagatcagccatccagaggagctggaagcggaagccactcaccgtgtcatcaccattgcaaacaggactcactgtcccatctacctggtcaatgtgtctagtatctcagctggtgatgtcattgcagctgctaagatgcaagggaaggtggtgctggccgagaccaccaacgcacacgccacgctcacaggcttacactactaccaccaggactggtcccatgcagccgcctatgtcacggtgccgcccctgagactggacaccaacacttccacctacctcatgagcctgctggccaatgacactctgaacatcgtggcatccgatcaccggccattcaccacaaagcagaaagccatgggcaaggaagacttcactaagatcccacacggtgtgagcggtgtacaggatcgaatgagcgtcgtctgggagaggggagtggttggaggaaagatggatgagaaccgtttcgtagctgtcaccagttctaacgcagccaagattctcaacctgtatcctcgcaagggccgcatcatccctggagccgatgctgatgtggtggtgtgggacccagaagccacaaagaccatctcagccagcacccaggtgcagggtggagacttcaatctgtacgagaacatgcgctgccacggtgtgccactggtcaccatcagccggggacgtgtggtgtatgagaatggcgtcttcatgtgcgcggagggcactggcaagttctgtcccctgcggtctttcccagacattgtctataagaagctggtgcagagagagaagaccttaaaagtgaggggagtggaccgtactccctacctaggggatgtcgctgtggttgtcaaccctgggaaaaaagagatgggaacaccactggcagacactcccacacggccagtcacccggcacgggggcatgagggaccttcatgaatccagtttcagcctctctggttctcagattgatgaccatgttccaaagcgggcctcagctcggatccttgcgccccctggaggcaggtcgagcggtatttggtaaaggctctgaccaggccccccaacaagtgaggctgctccaccaccacctgcctgcacactttccggccacagctgcagtgggtgggagaggttggcctgggcagtgcacaccagtaagggctccaggaaccagggagccctccccttgtctgaacatgattcacggggctttgatccacccctaacaaggcactttgagctgtccctcctgccctgccccttccttccttggccctggggtttctctgggccccagaagcccacactatgcacagcacccaatgcatagcacctggccctacccctcctctcaccgtgacctcctgtgctggctctgggaaggcccagactttagtgctctgccctgctgcccaaccagacaggtgtccagagcactttagcaaatgttttataagtataggccttccctcttcaccccctagaccccatggtgacattttcccaagtcagacaggtgtcaactccccagtcatgcccaaggtgtcccatctctcctgattcaccccagctatacccacaagggtacagtcaggacgccctggatgtggctgtgcttgggacaccctgtgtcctttgctagcctctttcattccctgcccacaccctctgggagtcccagaagggtagctgggtgggcatatgcggctggtgccaggcgcgtgtaaatggttttgttttgcacgtttggtttacgcagtggtttggtttgacttgtttgtgcaccctgtggaaaatgacggtgctttttgtcactagcatagcatagaatcgggaatagattcggtttgtaggagatgctgcactcgccaccaaccagacagtacagggcagaggcaggggcaggctggccccccggccccttccccccaacccttttgcttccagaagccctgtaccatgtctccccgatcccacacctcctaccacccccttctacatccctacattcaaacgatcctggatgctgaccctagaaaccttaaggcagcatctctgctcctggttactactcccaggattgactccatacccacaccctcataccccaacatagtttcctttaacttgcctctgctgggcaaggcctagctgctcctcctgtgagactagtaagaggcctcataactgctgagaaagggagagtaggagagagttggctagccaaccgccagggaaggggcttcaacccacaaggcctagctgtagaatccacccctctgcacaagtgctgtgggatcctgcactcagcactactctcttgttgactactggttggccctgccctgtctcagaagctcttcggaggctctcagaggtggctacacagtctgggaagtggctcagctgtctgcctttgataagcctcacccctgcccctttggcaaatgatttcacttttgtttgagctccacaaacttcccagaggccccagagagtttgtcagtcacccctgcacgtttttgtcccgcttcgagtacatcaaagcacttgcctgtgtcagctgtcacagagtaggcttgacaggtaaactctgaggagcttccgaggtagggtggggcttaccactctcccacatatcacagattaaaaactgaggccccaagagtttaggccccagaagtgtctgtgactgctcttatggccttgactgtctaacctagctatgggaaacagttgtggattgatgtcaggcccaccagatagaatactttcttcctggggcacgttctgccttgctttgcacaagtcaattttatctttgtcgtgaactggcttctgtagtctcttggtttgagcctggactagaaaagtgttgggaacttgtgtgcagttttagttgcgcccagtgtcctcacttaggagctgaagggacaaataacccagagactgaggtagccccaggtaatgaccctggagggtgatgacccttcacaggtaacataagcagtgacattgacccctggttcagtttctatccctctccttctctcccactctcttctcattctcctcttcctccttctttttcttcttcttgagacaaagccttgcctaggtagcctggccttgaactcacagaatgcctgcctttgtttccccaaatactggaattatacacgtaagctaccactcctagctgtacgtcatctttgtctgtttctgcccttgctgggtcatgggccttgggcagatgccaaagatccaaagggtggtagagccagctaggcaggccacctggcatgggccaggagtgctttaccctctctgagtgcctccgcctgagaagtgtatgacctgaaatggtaggagagtacatgttcaaggggccactgtgggccttctacttcatccaccccgcccttctacagtcccaaggccacccttacatagactgtgctcacccaggagcttctagataggaggcttaaagagccaaacaaaccatcatccccccagtgtccactccctgccccatgcagagctccagccacaggtccagtggctgctggctggagcgaaagcggtctctggttgcaccgaatgcagctctcaaactggccttgtacttgctgaataaacactgttgttctcgccttagctgctcttaggtttgtggggttaacttaccagaaaattgtgctactgtgtgtgcgtgtgtgtgtgtgcgcgtgtgtgtgtagtgctaggagtccacagtaggtcgcttgtcaagccaatgccgtgatgagggcatctcttatattgacccagaaaccacagaaccacaaggaagccaaaccccctccagctgctgaggtggcaggcacagtttggggtcagaatggagctgccagcaccccagcacccaagtgaccctcccccctttctgtaaatgtcatggtgctaaggttgtatcaatcctgagacgacacatggccctgtgctttggccaccgtttgaggcaaaacaaaacagcccaacacgttgtgttctggtgcaggtttgtattaaactgtagctacttctc

SEQ ID NO: 1214 - DNA, 3564 bp, Rattus norvegicus
cgctgagtagatcactgttaagtttgagacttgtttcaaactaaaaaatgatgagggatatagcccagtagtaaagttacatgcctagatttctcagtgagtgccttggagcatgactcagtggtggagccctgcctagaatccccagtgagggcctgggttcttgcttgcacccgcctgtgtgctccgtgctccgtgagccccgctgtgagcgagacacgtgaccgtcagtaatcatgaagaatccatttgcgcaccttgccgagcccttggaccctgcacagccaggaaagaaattcttcaacttgaataaattggaggactcaagatatggacgcttaccgttctctatcagagttctcctggaggccgccgttcggaactgtgacgagtttttggtgaagaagaatgacattgagaatatcctgaactggagtatcatgcagcataagagcatagaagtgccgtttaagccagcccgagtcatactgcaggactttacgggcgtgcctgctgtggttgattttgcagcaatgcgcgatgctgtgaagaagttgggaggaaatccagagaaaataaaccctgtctgccccgctgaccttgtaatcgatcattccatccaggttcatttcaacagaagggcagacagtttgcagaagaatcaagacctggaatttgaaaggaatagagaacgatttgaatttttaaagtggggttcccaggccttttgcaacatgaggattattcctcctggctcaggaattattcaccaagtgaatctggagtatttggcaagagtagtgtttgatcaggatggatgttactacccagatagcctcgtgggcacagattctcacaccaccatgattgatggtctgggagttcttggttggggtgtaggtggtattgaagcagaagctgtcatgctgggtcagccaatcagcatggtgcttccccaggtgattggctacaagctgatggggaagcctcaccctctggtaacctccacggacattgtgctcaccattaccaagcacctccgacaagttggggtcgtgggcaaattcgtggagtttttcgggccaggagtggcccagctgtccattgctgaccgagctacgattgccaacatgtgcccagagtacggcgcgacggcagccttcttcccggtcgacgacgttagcatcgcgtacctggtgcagacaggtcgtgaggaagacaaagtaaagcacattaaaaggtatcttcaggctgtaggcatgtttcgagacttcagtgactcctctcaagacccagacttcactcaggtcgtggagttagatttgaaaacagttgtgccttgctgcagtggacctaaaagacctcaggacaaagttgctgtgtctgagattgaaaaggactttgaaagctgccttggagccaagcaaggatttaaaggttttcaagttgctccagaccatcacaatgaccacaagacgtttatctataacgacagtgaattcactcttgctcatggctccgtggtgatcgccgccatcactagctgcacaaacaccagcaatccgtccgtgatgttaggcgcaggattgttagcaaagaaagccgtagaggctggcctgaatgtgaagccttacgtcaaaaccagcctgtctcctgggagtggagtggtcacctactaccttcgagagagtggagtcatgccttacctgtcccagttagggtttgacgtggtgggctacggctgcatgacctgcatcggcaacagtggacccctccccgaacctgtggtggaggctatcacccagggagaccttgtggctgttggggtactgtctggaaacaggaattttgaaggacgagtccatcctaacacccgggccaactacttagcatctcccccactagtaatagcatatgcaattgcaggcaccgtcaggatcgacttcgagaaagagcctttgggagtgaacgcacagggccaacaagtgtttctgaaggatatctggccaactcgagatgagatccaggaggtggagcggaagtatgtcatccccggcatgttcaaggaggtctatcagaagatagagactgtaaacaaaagctggaatgccttagcagccccttcagagaagctgtatgcgtggaaccccaagtctacttatatcaagtcaccgccattctttgaaagcttgactttagatctccagccccccaagtctatagtggatgcctatgtgctactaaatctaggagattccgtaacaacggaccatatctctccagcggggaacattgcaagaaacagccctgccgctcgctacttgacgaacagaggcctgacgccacgagatttcaactcctacggctcccgccggggtaacgacgccatcatggcacgggggacatttgccaacattcgcttgctgaacaagtttctgaacaagcaggcccctcagactgtccaccttccttcaggagaaaccctcgatgtgttcgatgccgctgagcggtaccagcaggctggacttcccctgattgttctggctggcaaagagtacggttcaggcagctcccgagactgggcagccaaaggtcctttcctgctgggaatcaaagctgtcctggcagagagctacgagcgcactcactgcagcaacctggttggcatgggggtgatcccccttgagtatctccccggcgaaactgcagactctctgggactcacgggtcgggaaaggtacacgatccacattcccgaacaccttaagccccgcatgaaggttcagataaagctggacaccgggaagaccttccaggccgtgatgaggttcgacaccgacgtggagctcacttacttccacaatggaggcatcctgaactacatgatccgaaagatggcccagtaggtgctggcctctcaggagacccgcgcttggtgctagacccaatgaggtaccaggcctccgctggtggaggcctgcgagcagccacctctacttctcgtgagggtgctagcaagatgagcaagtgggccctgccattcctggaggctcagcggcaggagtctctagttcggtgatttgttaatcttttatccttttctgtaatccggaatctagaatcatgggaaggtccatagtcccaaagagagctaccttctctttaaagtcactcatcaccggtcattgatttttttcactctgactaatcttcagcagaactagccagtatctcagaagtgtctcctaccctttctgttactctgtctgtctgtgctcagtgacacccttccctggagagcccattcctccgtgtatcacaccagtgttaacgacatagcttcagactctgtcacacttcaaattcatagtaatctgtgtgatcccttccttccaagtgagcgaagaccttgtggcatggctggccgtcccaagtgtttgattacctaccttccaatcaccgtgagttgtcttttaccattttcaacatttgttgacagggtttgaaagtaaccggggagcgagacaggatttctaattgaataagattaaatatattttcatg

SEQ ID NO: 1215 - DNA, 517 bp, Rattus norvegicus
atggatccgctcagagcccagcaactggcagcggagctggaggtggagatgatggccgacatgtacaacagaatgaccagtgcctgccaccggaagtgcgtgcctccccactacaaggaggcagagctgtccaaaggcgagtctgtgtgtctggaccgatgcgtatccaagtacttggacatccatgagaggatgggaaaaaagttgacagagttgtctatgcaggatgaagagctgatgaagcgggtacagcagagctctgggcctgcatgaggccccgggccatgtacacccgtggtgcaccttgccacctctgattaaagtgtccctaatggatgtcacatgtgaaaactgtcatacttaggcccttgagcatctccaggacccctgcgtgtggtagagctctcctggctaaggaaggggacttgtcatgctggtttgtgactgtgaatgtgtgtatatgtatatatcatattaaaacaaatttgtgcaaaaaaaaaaaaaaaaaaaaaaaaaa

SEQ ID NO: 1216 - DNA, 1102 bp, Rattus norvegicus
gcaacgcgggtcttcccgctgttgctgtcggggccacggccgagcacacgaccccggcctgaggtggtggtgggaagcccgccgctgtttgctgcgacctcatggagggtggcggaggaagtagcaacaaatccaccggcgggttagcgggcttcttcggagcgggaggagcgggttactcgaacgctgatttggccggcgtcccgctgactggtatgaaccccctgtctccttacttaaatgtggacccacgctatctcgttcaggatacagatgagtttattttgccaactggagctaataaaacccgaggcaggtttgaactagctttcttcaccattggaggatgctgcatgacaggggctgcattcggggcactgaacgggcttcgtttaggattgaaggaaactcagagcatgccctggtccaaaccaagaaatgtacagattttgaatatggtgactagacaaggggcactttgggctaatactctaggttccctggctttgctctatagtgcttttggcgttatcattgagaaaacacggggtgcagaagacgacttcaacacagtagcagctggaaccatgacaggaatgttatataaatgtacaggtggtcttcgaggaatagcacgtggtggcctggcgggactgacactgaccagtgtctatgcactgtataacaactgggagcacatgaaaggttccctgctccaacagtcactctgaagatgtctgccacctcaggaatgggggacacttcatagtcatccagatcaaggaataagtcagtctggagctgctttctctcttgcacctacaattactttgaacaattggagactctgatttgctgtgacaaagatcatggatgcttagcctggactgcactgcttgccctctgagtggaagccaaacccttggtggctcactgagaatgtgttctcttctcctttggagatgacctcgcacctcctgcccccaaactggaaaaccacttactctccaaatttattaccatgttaattcatttaaaaatctaaaacttaatattgccctgttttccaaataaagggtgaaaatacaaccaaagctaaaag

SEQ ID NO: 1217 - DNA, 2387 bp, Rattus norvegicus
gactttgtcgccaagctgaccaacaatacgcaccagcatgtctttgatgacctcagtggctcagtgtccttgtcctgggttggagacagcactggggttattctcgtcctgactactttccaagtgccactggtaattgtgagttttggacagtccaagttatatcgcagtgaggattacggaaagaattttaaggacattacgaatctcatcaataacaccttcattcggacggagttcggcatggctattggtcccgagaactctggaaaggtgatattaacagcagaggtgtctgggggaagccgaggaggaagagtgttcaggtcatcagactttgccaagaactttgtacagacagacctcccctttcatcctctgactcagatgatgtacagccctcagaattctgattacctgttagctctcagcactgaaaatggcctgtgggtgtccaagaattttggggaaaaatgggaagaaatccacaaagcagtatgtttggccaaatggggaccaaacaacatcatcttctttaccacccatgtgaatggctcctgcaaagctgatcttggtgccctggaattatggagaacatccgacttggggaaaaccttcaaaaccattggtgtgaaaatctactcatttggtcttgggggccgtttcctcttcgcctctgtgatggctgataaggatacaacaagaaggatccacgtgtcaacagaccaaggggacacatggagcatggcacagcttccctctgtgggacaggagcaattctattctattctggcagccaacgatgacatggtgttcatgcatgtagatgaacctggagatactggatttggtacaatctttacctctgatgaccgaggcattgtctactctaagtctctggacagacatctctataccaccacaggcggggagaccgactttaccaacgtgacttccctccgtggagtctatataacaagcacactctcagaagataattccattcagagcatgatcacttttgaccagggaggacggtgggagcatctgcagaagccggagaacagcaagtgcgatgctaccgcaaagaacaagaatgagtgcagccttcatatccatgcttcttacagcatctcccagaagctaaatgttccaatggccccactctccgagcccaatgccgtgggcatagtcatcgctcacggtagtgtgggagacgccatctcggtgatggtcccagacgtgtacatctcatatgatgggggttactcttgggcaaagatgctagaaggaccgcattattataccatcctggactctggaggcatcatcgtggccattgaacacagcaaccgtcctatcaatgtgattaagttctccacagacgaaggccagtgctggcagagctatgtgttcagtcaggagcccgtctacttcaccgggctggcttccgagccgggagccaggtccatgaacatcagcatctggggattcacggagtctttccttacccgccagtgggtctcctacacaattgatttcaaagacatccttgagcgcaactgtgaagagaatgactataccacatggctggcacactccactgaccccggagattacaaagatggctgcattttgggctataaagagcagttcctacggctacggaagtcatccgtctgtcagaatggtcgagactatgttgtggccaagcagccatccatctgtccctgttccctggaggacttcctctgtgactttggctacttccgtccagagaatgcctcagagtgtgtggagcagccggaactgaagggtcatgagttagagttctgtctgtatggcaaagaggagcacctgaccacaaatgggtaccggaaaatcccaggagacagatgccaagggggaatgaatccggcccgagaagtaaaagacttgaagaagaaatgcacaagcaacttcttaaaccccaagaagcagaattccaagtcgagttctgtccctatcatcctggccatcgtgggactgatgcttgtcactgtcgtagcaggagtcctcattgtgaagaagtatgtctgtggcggaaggttcctggtgcaccggtactcggtgcttcagcagcacgcagaggctgacggggtggaggctttggatacggcctcccacgctaaaagcggttatcacgatgattcagacgaggacctcctggaatagctcttctgaggagctgggactgagtgtgcatggagccacagtacctcctacattccctgaggctctgacttggggaaataaatcccccactgcgtcggcccccagctctctttctgccgcttccacccacgcccaaaggacctacactaaagaaagcagggtgggggtgggga

SEQ ID NO: 1218 - DNA, 1705 bp, Rattus norvegicus
gccggtgctgggctctgtagctcggtactccagcctctcgtcatggcctcggaaaagcctcaggacctaatggtcacctgcaccgcgccggtcaacatcgcggttatcaaatactggggaaagcgggatgaagcgctgatcctgcccatcaacccctccctgagcgtcacgctgcaccaggaccagctaaaaaccaccacaactgcggccattagcaaggacttcacagaggaccgcatctggctgaacggtcgtgaggaggacgtggggcagccacggctccaggcctgcctgagagagattcgccgcctggctcggaagcggaggagcacgggagacggggatgccctgcccctcagcctcggctataaggtgcacgtggcgtcagtgaacaacttccccaccgctgcaggcctggcttcctcagcagccggctacgcctgcctagcctataccttggcccgggtctacggggttgagggagacctctcagaagtggcccggcggggctcaggcagcgcatgccgcagcctctacgggggcttcgtggagtggcagatgggggaacaggccgatgggaaggacagcatcgcccggcagatagccccagagtggcactggccccagctccgagttcttatccttgtggtgagtgcagagaagaagccgacgggcagcacagtgggcatgcagaccagcgtggcgaccagtaccctgctcaagttccgggctgagtccattgtgcctgagcgcatgaaggagatgacccgttgcatccaagagcaggacttccaggccttcgcccagctgaccatgaaggacagcaaccagtttcacgccacctgcctcgacaccttcccgcccatctcctacctcaatgacacctccaggcgcatcatccagctagtccaccgcttcaacgcccaccatgggcagacgaaggtggcgtacacatttgatgcgggccccaatgctgtgatcttcactctggaggacaccgtggccgagtttgtggcggcagtaaggcacagcttcccccctgctgcgaatggagacaagtttctcaaggggctgcaggtggcacccgttcttctctccgatgagctgaaaacttcgctggctacggagcccagccctggtggggttcagtacatcattgccactcaggtgggaccaggacctcaagtcctagacgaccctcaccatcatctgctaggcccggatggcctgccacagcgggacctttgatctctcccatgtgcatctggagaaaggggttgctcccgggagctcgggagctcctgtgctgatgggccacgtccaaaggcttgcttgatgacacctaggggtgtctcctgtgatgagcagctgtctgggcagccggggacccctctcaagtgcctcaccttcctgctggctagccgaccttagggaagaggagtcggcgtctctcccaccgaagatgcccccgagggcctctaagcgtgaaggatgagggctcagacagcagtgcctctgttgagactcaggccacagtttctttgagaagcctcctggtgagggtaggggctgtggaacccacaggtagggtccattgtgggtgtggatgtaccacgaaggtgcagttgatggacccgatgaccacaggaataaagtgtgccactgctgcctgccaaaaaaaaaaaaaaaaaaaaaaaaaaaaacc

SEQ ID NO: 1219 - DNA, 3091 bp, Rattus norvegicus
gttcgccacgtgtggagagaagggaaaaactgagccgagagaggggggaaaaaaaccaatgctgatttcggaaagaacgaaggaacttcggtagccctggccgaaccaccgacgcaaggaaggtagcgcttccgcagagcggcagcagttctgactggaggggcgctcgctgggagagacccatcacacctaaggggacagctattgctctgggtgacgactcctaaaaagagaatcggtgcctctacctctccacgtagctctgcttcagaacggggattgcttctccagctccccctggaccatgccactgggtggaagaggaacgctgagaggctgagcgaggaaccagctaggtgacaactcagagcccaggagtaccaagtcactgtaaagcataggcaccgtgaggatgactgtggcgagcactgcggctccctcctatacaacctcagacaccaaccgggttatttccaccttttctgttgtggactatgtggtgtttggcctgttgctggttctctcccttgtcattgggctctatcatgcttgccgaggctggggccgccatactgttggtgagctgctgatggcagaccgaaaaatgggctgccttcctgtggcactgtccttgctggccaccttccagtcagccgtggcgatccttgggggaccagctgagatctaccgatttggaacccagtattggttcctggggtgctcctacttcctggggcttctgatccctgctcacatcttcatccctgtcttctaccgcctgcatcttaccagcgcctatgagtacctagagctccgcttcaataaagcagtccggatctgtgggactgtgaccttcatctttcagatggtggtctacatgggagtggctctctatgcaccgtccctggccctcaatgcagtgactggatttgatctatggctgtcagtcctggccctaggaattgtctgcaacatctacactgcactgggtgggctgaaggctgtcatctggacagatgtgttccaaacgttgatcatgttcctagggcagctggtggttatcattgtaggagcggccaaagtgggcggcttggggcatgtatgggctgtggcttcccagcatggcctcatctctgggattgagctggatcctgacccctttgtacgtcatactttctggactttggcctttggcggcgtcttcatgatgctctccttatatggagtgaatcaggctcaggtgcagcgctacctcagttcccactcagagaaggctgctgtgctctcctgctatgcagtgttcccttgccagcaagtggccctctgcatgagctgcctcattggtctggtcatgtttgcctattataagaaatatagtatgagcccccaacaagagcaagcagcccctgaccagttagtcctctattttgtgatggacctcctgaaagacatgccagggctgcccgggctcttcgttgcttgcctcttcagtggatctctcagcaccatatcctccgcattcaattcactggccactgtcacaatggaagacctgatccagccctggttccctcagttgactgaaacccgggccatcatgctctctcgaagccttgcctttgcctatgggctagtttgcctgggaatggcctatgtttcctctcatctgggatcagtgctccaggcagcactcagcatctttggcatggttggagggccactgctgggactcttctgccttgggatgttctttccgtgtgccaaccctcttggtgccattgtaggcctgttgacgggactcaccatggccttctggattggcattgggagcatagtaagcaggatgagttctgctgcagcatcccctccccttaatggatccagctccttcctgcccagcaatctaactgtcgccactgtgaccaccctgatgccttctaccctgtccaagcccacaggactgcagcagttctattccctgtcctatttatggtacagtgcgcacaactccaccacagtcattgcagtgggcctgattgtcagtctgctcactgggggaatgcggggccggtccctgaaccctggcaccatttaccctgtgttgccaaagctccttgcactcctgcccttatcctgccagaagcggctttgctggagaagccacaaccaggatatccctgtggtcaccaacctgtttccagagaagatggggaacggagcgctgcaggacagcagagacaaagagaggatggctgaagatggccttgtccatcagccatgcagccccacctacattgtccaagagacgtccctgtgacctgtgacggacctctcactgcagagcagtggccagagatactctggagtgcagagctgagtcactgcatgagttccgcagcactggggtggatgacctagctcacagcaaaggaccttgatctttaatgtttcaccgccgtgggagctgtcgcatgcaagggacagacagtttttccttatcccttgccagtcttcttttaggatcaggtttgcaaggtacagaatcacagcacacgtggggaaatatactgaggaaagggtggcttttgattaagtgaccagggttctttggggtgaataggaacatttcttacaactccccttgagcaagtttggcaggattgaccagctccagcatttagcatgaagtcctcagccctctggtgattccctcactctcatgtcaacctgggttatctcaagccagtgtgggcctgtggtcttcaggttctctgtaagactcaagtctcctctcattctacctacctctgtttgtgagagggaggctttggagcgcttgggtctcagcacttagtgcatctacttggtgtatagaccctcgctctcttcaggtggtacatgagagacaggtacatgagagaggtcaccaggacctcttatgcagtgtgctatcctctaaactcctaagctaggccaccctggtgtcattctgtcatctgtgcaattcttatttcctttgggagtttcctcctcatgcattttgttcctagggaataaaaatagccattagacctgaaaaaaaaaaaaaaaa

SEQ ID NO: 1220 - DNA, 2386 bp, Rattus norvegicus
ctgcaaccggtccccttcggcaccagacacacagctggacgaagaatgctcaggggccgctccttgtctgtgacgtcccttggtgggctccctgcatgggaagctgaaagactccccgtggaagacttattgctttttgaagtttcctgggaagtgaccaacaaagttgggggcatctgtactgtgatccagagcaaagccaaaaccacagccaatgaatggggagagaattacttcctgataggtccgtattttgagcataatgtgaagactcaagtagagccatgcaggcccgccaacgatgccgtcagaaaagctgtggatgccatgaacaaacatggctgccaggtgcattttggaagatggctgatagaagggagtccgtatgtggtgctttttgacatcagctcctcagtgtggaacctggacaggtggaagggagacttctgggaagcatgtggcgttggcatccctcacgacgaccgagaagccaatgacatgctcatatttgggtctttaactgcctggttcttaaaggaggtgacggaccatgcagacggtaaacacgtcattgcccaattccatgaatggcaggctggaactgggctgatcctttctcgtgccaggaaactccccatcgccacaatatttacaacccatgccacactgctggggcggtatctctgtgcagcaaatattgacttctacaaccagcttgataagttcaacatagacaaagaggccggggagaggcagatttatcaccgctactgcatggagcgggcttccgtgcactgtgcgcacgtgtttaccacagtgtcagaaatcacagccatcgaggcggacgacatgctgaagaggaagcctgatgtggtgactccaaacggcttgaacgttaagaagttttctgcggtgcacgaatttcaaaatctccatgccacatacaaggccaggatacaggattttgttcgaggtcatttctatggccacctggacttcgatcttgaaaagacgttatttcttttcattgctgggaggtatgagttctccaacaagggagcagacatcttcctagaatccttatccaggctcaatttcctcctaaggatgcataagagtaacgtcactgtggtagtgtttttcatcatgcctgccaagacaaacaatttcaacgtggaaaccctgaagggccaggcggtgcggaaacagctgtgggacactgtgcactgtatgaaggaaaagtttggcaagaaactctacgatgggttattaagaggagaaatacccgacatgaatagtattttggatcgagatgacttaacaattatgaaaagagccattttttcaactcagagacactctttgcctcctgtgaccactcacaatatgatcgacgattccacggatcccatcctcagcaccattcgacgaattggacttttcaacaatcgcacagacagagtcaaggtgattttacacccagaattcctgtcctccaccagccccctactaccaatggattatgaagagtttgtccgaggctgtcaccttggggtatttccatcatactatgagccctggggttacacgccagccgaatgcacagtgatgggcatccccagtgtgactacgaacctctctggtttcgggtgtttcatgcaggagcatgtggctgaccctaccgcgtacggtatttatatcgtcgacagcgtccgctctccagatgattcttgcaaccagctgactcagtttctctatgggttctgtaaacagtcccgccgccaaagaatcatccagaggaaccgcaccgagaggctctcagatcttctggactggagatacctgggcagatattaccagcatgccagacatctgacactgagcagggcttttccagacaaattctacctggagcccacatccccaccaacgacggatggctttaagtatcccaggccctcctcagtaccaccttccccatcaggatcccagacttcaagtcctcagagcagcgatgtggaaaacgaaggggatgaggatgagagatatgatgaggaagaggaggctgagagggaccggctaaacatcaagtcaccattttccctgaaccacatcccaaaggggaagaaaaagcttcatggagaatataagaactgagctcaaatgaaatgattccaaatccacaagaaaatgagctgagcccaagtccatccctgatgcataccgacagatatttacagaatgacgtcggaaatctagaatctgtgtccagatcactgatagtaacttgtagccaccgacatgtgtcaccgtactgtgatggtacttttgttgtctaattggaaatttcaatctgttattgataataaattaccaaatctaaatg

SEQ ID NO: 1221 - DNA, 494 bp, Rattus norvegicus
aagaattcggcacgatggccgagcttggtgaagcggacgaagcggagttacaacgcctggtggccgccgaacagcagaaggcacagttcactgcgcaggtgcatcacttcatggaactatgttgggataagtgtgtggagaagccaggaagtcggctagactcccgaactgaaaactgcctctctagctgtgtggatcgattcattgacactactcttgccatcaccggtcgttttgcccagatcgtacagaaaggagggcagtaggccataccttggaatgacggaagaccaaaagacttgttactaagcagactgaatggccagtggtgaaagacttgtcaacatgtcaggttagcgtcaggcagttaccaagtctgttggtgttaagaagtaacaaagcaaatgttcaagtgaaattttatttattggaattcagtaattccaagttgtatcacaccagttaataaatgtgaagtctccgatcaaaaaaaa

SEQ ID NO: 1222 - DNA, 1192 bp, Rattus norvegicus
cgcagctgctgtgcctgtaggtccgtgccccgcccgtcccagccatgctgtccgctctcgcccgtcctgtcggtgccgctctccgccgcagcttcagcacttcagcccagaacaatgctaaagtagctgtcctgggagcttctgggggcattgggcaacccctttcactcctcctgaagaacagtcccctcgtgagccgcctgaccctctatgacatcgctcacacacctggtgtggcagcagatctgagtcacatcgagaccagagcaaatgtgaaaggctacctcggcccggagcagctgccggactgcctaaaaggttgtgatgtggtggtcatcccagctggagtgcccaggaagccaggaatgacacgagatgacctgttcaacaccaatgctaccattgtggccacattgacggctgcctgtgcccagcactgtcctgaagccatgatttgcatcatttccaacccagttaactccaccatccccatcacagccgaagttttcaagaagcatggcgtatacaaccccaacaagatattcggtgtgacaacccttgacatcgtcagagcaaacacatttgtggcagagctaaagggtttggacccagctcgagtcaatgtgcctgtcattggtggccacgccgggaagacgatcatccccctgatctctcagtgtacccccaaggttgactttccccaagaccagctggccacactcaccgggaagatccaggaggctggcactgaagtcgtgaaggccaaggctggagcaggctctgccactctgtccatggcttatgctggagcccgctttgtcttctccctggtggacgccatgaatgggaaggaaggagtcatcgagtgctcttttgttcagtccaaagagacagagtgcacttatttctctacacccttgctgttggggaaaaaaggcctggagaagaacctaggcattggcaaaatcactccttttgaggagaaaatgattgccgaggccatccctgagctgaaagcctccatcaagaaaggcgaggactttgtgaagaacatgaagtgagtgtgagcctcgagcctccagcagcagcagcagcagcagcatcctaacttattcagcatcatgtcattgaactacttgagagtctaatttgcttgttggagggtgttgtgtcagcatcagcatccttccgg

SEQ ID NO: 1223 - DNA, 1189 bp, Rattus norvegicus
gatagtcacgtggccgcagactgctagcgctctgctacttctaaggaagccaaggtctgactttagcgagacctgaaggacagactctctgctgcgatgggctcttggaagagtggtcagagctacctagcggccgggttgctgcagaaccaagtggcggtggtcaccggcggggccacaggcattggaaaagccatctcccgggagctcctgcacctggggtgtaacgtggtcattgcttcccggaaactggacagattaaccgctgctgtggatgaactgagagcctctcagcctccctccagcagcactcaagtcaccgccatacagtgcaatatcaggaaagaagaagaggtgaataatttggtcaaatctaccttagctaaatatgggaagatcaacttcttggtgaacaacgcagggggccagttcatggctcctgctgaagacatcactgcgaagggatggcaagctgtgattgaaaccaacctgactggcaccttctacatgtgcaaagcagtttacaattcctggatgaaagaccatggcggctctattgtcaatatcattgtccttcttaacaacgggtttccaacagccgcgcacagtggagcggcaagagcaggtgtttacaacctcacgaaaaccatggctttgacgtgggccagcagcggagtgaggatcaactgtgttgctcctgggaccatttactcccagactgctgttgacaactatggcgaactgggacagaccatgtttgagatggccttcgagaatatcccagctaagcgtgttggactccccgaggagatctcccctctggtgtgcttcctactgtcccccgcagcatccttcatcactggacagttaatcaatgtggacggaggccaggctctgtacactcgcaacttcacgataccagatcatgacaactggcctgtgggagctggggactcttcttttatcaagaaggtgaaggaatctttgaagaagcaagccaggctctaagccaaggagacagccacccattgtgtttcctgcgtgccttaacgtcctgagaatgttcgtacttcataagaacttacgatttctgtgggggaaaatcactttaatgttaatagttttatctttgtaaaaaactactcccaaaataaatgtatcttcatgttcaaaaaaaaaaaaaaaaaaa

SEQ ID NO: 1224 - DNA, 3931 bp, Rattus norvegicus
cctggcagtgagagacagtggggagaggagaaagcgggctgctgtccttccaggccactttcgctgcgcgattccgcgagctcccggcaggaggtgaaagtccccggcggggtccggatggcgcagttgcactgcggctgctgagctcgcggccgcctgcgcgcgctgggcgcggggactcgcttcggctagtaactcctccacctcgcggcggacgaccggtcctggacacgctgcctgcgaggcaagttgaacagtgcagagaaggatcttaaagctacacccgacttgccacgattgccttcaatctgaagaaccaaaggctgttggagagatggcagtgacatcccaccacatgatcccggtgatggttgtcctgatgagcgcctgcctggccaccgccggtccagagcccagcacccggtgtgaactgtcaccaatcaacgcctctcacccagtccaggccttgatggagagcttcaccgttctgtctggctgtgccagcagaggcaccaccgggctgccaagggaggtccatgtcctaaacctccgaagtacagatcagggaccaggccagcggcagagagaggttaccctgcacctgaaccccattgcctcggtgcacactcaccacaaacctatcgtgttcctgctcaactccccccagcccctggtgtggcatctgaagacggagagactggccgctggtgtccccagactcttcctggtttcagagggttctgtggtccagtttccatcaggaaacttctccttgacagcagaaacagaggaaaggaatttccctcaagaaaatgaacatctgctgcgctgggcccaaaaggaatatggagcagtgacttcgttcaccgaactcaagatagcaagaaacatctatattaaagtgggagaagatcaagtgtttcctcctacgtgtaacatagggaagaatttcctctcactcaattaccttgccgagtaccttcaacccaaagccgccgaaggttgtgtcctgcccagtcaaccccatgaaaaggaagtacacatcatcgagttaattacccccagctcgaacccttacagcgctttccaggtggatataatagttgacatacgacctgctcaagaggatcccgaggtggtcaaaaaccttgtcctgatcttgaagtgcaaaaagtctgtcaactgggtgatcaagtcttttgacgtcaagggaaacttgaaagtcattgctcccaacagtatcggctttggaaaagagagtgaacgatccatgacaatgaccaaattggtaagagatgacatcccttccacccaagagaatctgatgaagtgggcactggacaatggctacaggccagtgacgtcatacacaatggctcccgtggctaatagatttcatcttcggcttgagaacaacgaggagatgagagatgaggaagtccacaccattcctcctgagcttcgtatcctgctggaccctgaccacccgcccgccctggacaacccactcttcccaggagagggaagcccaaatggtggtctcccctttccattcccggatatccccaggagaggctggaaggagggcgaagataggatcccccggccaaagcagcccatcgttcccagtgttcaactgcttcctgaccaccgagaaccagaagaagtgcaagggggcgtggacatcgccctgtcagtcaaatgtgaccatgaaaagatggtcgtggctgtagacaaagactctttccagaccaatggctactcagggatggagctcaccctgttggatccttcgtgtaaagccaaaatgaatggtactcactttgttctcgagtctcccctgaatggctgtggtactcgacatcggaggtcgaccccggatggtgtggtttactataactctattgtggtgcaggctccgtcccctggggatagcagtggctggcctgatggctatgaagacttggagtcaggcgataatggatttcctggagacggggatgaaggagaaactgcccccctgagccgagctggagtggtggtgtttaactgcagcttgcggcagctgaggaatcccagtggcttccagggccagctcgatggaaatgctaccttcaacatggagctgtataacacagacctctttctggtgccctccccaggggtcttctctgtggcagagaacgagcatgtttatgttgaggtgtctgtcaccaaggctgaccaagatctgggattcgccatccaaacctgctttctctctccatactccaacccagacagaatgtctgattacaccatcatcgagaacatctgtccgaaagacgactctgtgaagttctacagctccaagagagtgcactttcccatcccgcatgctgaggtggacaagaagcgcttcagcttcctgttcaagtctgtgttcaacacctccctgctcttcctgcactgcgagttgactctgtgctccaggaagaagggctccctgaagctgccgaggtgtgtgactcctgacgacgcctgcacttctctcgatgccaccatgatctggaccatgatgcagaataagaagacattcaccaagcccctggctgtggtcctccaggtagactataaagaaaatgttcccagcactaaggattccagtccaattcctcctcctcctccacagattttccatggcctggacacgctcaccgtgatgggcattgcatttgcagcatttgtgatcggagcgctcctgacgggggccttgtggtacatctactcccacacaggggagacagcacgaaggcagcaagtccctacctcgccgccagcctcggagaacagcagcgcggcccacagcatcggcagcactcagagtaccccctgctctagcagcagcacagcctaggtggacagacagacgcccgcccaccgcagccagggcagggcccgatgccagtgctgcgtgtccacagtcagaagtcttgatctgggctccctgtaaagaaagagtgaatttcagtatacagacagccagttctacccaccccttaccacggcccacataaatgtgaccctgggcatctgtcacacgaaagctaagctggtggccttccccaccagcccctcgcaggatgggggtttcaatgtgaaacatatgccagttttgttttgtttttttaatgctgctttgtccaggtgtccaaacatccatcatttggggtggtctgttttacagagtaaaggaggcggtgaagggacgtcagctagtgtgtagagccaaggggagacagctaggattctcgcctagctgaaccaaggtgtaaaatagaagacacgctccatatccagtctcgccctggatgcccccttctgacctgccacaccctacatggtcccctgtgtagcttgctagcctttgtggggaggggctgtcacttaccaccgcaacattcctctcttgggccaatgaacgctaattcctggtcctccatgcacgcacaccaactccaaaagtgccttagtcaagagcatttctcctttcaggcacacagaaactgaaaacggtcgagagagtgggatatcggatttgtgcctgtctccggcattccgtcctaacaatatttaaatatcaggctggtagggttcggtggtcagcgaggggattagcagggtgatgcctgtgtgtggccatatgggcacaaatgcagaacacattgtggggacgatcacttcccccttaaatatggtctatccttccagagttggaacttaagttatatgtggtaggctatattgactccaaattcatcagcctctctgatgggcctgtataaaaacctggagaggcccaggccatctgatgatgtcacctgtcctgccccgaggatgcagagactgggagaagggcgctgactttaaaaagggtttcaggtgaacttct

SEQ ID NO: 1225 - DNA, 2744 bp, Rattus norvegicus
acaaaatggcgccttacagcctactggtcacccggctgcagaaggccctgggtgtgcggcagtaccatgtggcctctgccctgtgccaacgggccaaggtggccatgagccactttgagcccagtgagtacatccgatatgacctgctagagaagaacattaacattgtccgtaaacggttgaaccggcctcttactctctcggagaagattgtgtatggacacctggatgacccagccaaccaggagatcgagcggggaaagacatacctgcgtttacggcccgaccgggtggccatgcaggatgcaacagcccagatggctatgctacagtttattagcagtgggctgcccaaggtggctgtgccatcaaccatccactgtgatcatctgattgaggcccagcttgggggtgagaaagacctacgccgggccaaggacataaaccaggaagtatataatttcctggcaactgccggtgccaagtatggtgtgggcttctggaggcctggatctggaatcattcaccagatcattctagaaaactatgcataccctggagttcttctgattggcactgactcccacacccccaatgggggtggcctgggaggtatctgcattggagtagggggtgctgatgctgtggatgtcatggctgggatcccctgggagccgaagtgtcccaaggtgattggcgtgaagctgacgggcaccctctctggttggacctcacccaaagatgtgatcctgaaagtggccggcatcctcacagtgaaaggtggcacaggtgccattgtggaataccatggacctggtgtcgactccatctcctgcactggcatggcaacaatttgcaacatgggtgcagaaattggggccactacaccagtgttcccctacaaccacaggatgaaaaagtacctgagcaagacaggccgagcagacattgccaacctagcagaagaattcaaggatcacttagtgcctgaccctggctgccagtatgaccaagtgattgaaattaacctcaatgagctaaagccacatatcaatggaccctttacccctgacttggctcacccagtggcagatgtgggcactgtggcagagaaggaagggtggcctctggacatcagagtaggtttgattggcagctgcaccaattcaagctacgaggacatgggacgatcagcagctgtggccaagcaagccctggcgcacggactcaagtgcaagtctcagttcaccatcaccccaggctctgagcagatccgagccactatcgagcgggatggctatgcacagatcctaagggatgtgggtggaatcgttttggccaatgcctgtggcccttgcatcggccagtgggacaggaaagacatcaagaagggggagaagaatacaatcgtcacctcctacaacaggaacttcacaggccgtaatgatgcaaatcctgagacccatgcctttgtcacatccccagagattgtcacagccctggccattgcgggaacccttaagttcaacccagaaactgacttcttaacaggcaaggatggcaagaagttcaagttggaggctccagatgcagatgagcttccccgatcggactttgatccagggcaggacacataccagcacccccctaaggacagcagtggccagcgggtggatgtgagccctaccagccagcgcctgcagctcctggaaccttttgacaaatgggatggcaaagacctagaggaccagcaaatccttatcaaggtcaaagggaagtgcactactgaccacatttctgctgccggcccctggctcaagttccgtgggcatctggataacatctctaataacctgcttatcggtgccatcaacatcgaaaatggcaaagccaattctgtgcgcaatgctgtcacccaggagtttggccctgtacctgacactgctcgctactacaagaaacatggcatcaggtgggtgatgattggagatgagaactacggtgaaggctcaagccgggagcacgcagcactggagcctcgccatctggggggccgagccatcatcaccaagagcttcgcaaggatccatgaaaccaatctaaagaagcagggcttgctgcccctcacctttgctgacccctctgactacaacaagattcatccagtggacaagctgaccattcaaggcctgaaggactttgcccctggcaagcctctgaactgcatcatcaagcaccccaatgggacccaggagaccatcctgctgaaccacactttcaacgagacacagatcgagtggttccgtgcaggcagcgccctcaacaggatgaaggagctgcagcagtgaggagccaggctggctcactgtcccactctggaccctgctggggcaaaggtgcaggcccatgtgcatccacagagcctcatctggtctgtccagcatgaccacctgctctaagatggtgaccagacctgcttcttgccctccctatcctcagcccactgagtgaaccaacatggagggcacttaagatgatggagggcacttaagatgatgtcccagccccgccttcctgttcagtttggtttgtctttgagcaacccatgcaactgtatttatttttgatgacagcactccctctacagaagtttttattctgcctaatcatttcactggtggctgaaggattttagagaaacttgttcttataaggaaaaaaaaaaaaaaaaaaaaaaaaaaaaa

SEQ ID NO: 1226 - DNA, 1450 bp, Rattus norvegicus
gccatgtcgagacgtgacgtggttcttaccaatgttactgttgtccagctacggcgggacccatgcccatgtccatgcccatgtccatgtccatgtccatgtcccgtgatcagaccacctccacctccacccaaggttgaggagcctccgccacccaaggaggagccgccgccaccgccaccaccgcctcctccaccccagatagagccagaggagcctaaagaggctccacctccacctccacctcctccaccccctccccctccccctcctccaccacccccaaagccagctaaagagctaacagtgggcatcaatggatttggacgcattggtcgtctggtgctacgagtctgcatggagaagggcgttcgggtagtagcagtgaatgacccattcattgatccagaatacatggtgtacatgttcaaatatgactccacacatggtagatacaaaggaacggtggaacataagaatggacgactagttgtggacaaccttgagatcaacgtgttccagtgcaaagaacctaaggaaatcccctggagctctgtagggaatccctacgtggtggaagccacaggtgtatacctgtccatagaggcggcttcggggcacatttcatctggtgccaggcgtgtcatcgtcactgcaccttcccccgatgcacccatgttggtcatgggtgtgaatgagaaggactataaccctggctccatgaccgttgtcagcaatgcatcctgtaccaccaactgcctggcccccctcgctaaggttattcacgaacgcttcgggatcgtggaagggctaatgaccaccgtccatgcctacacggccactcagaagacagtggacgggccatcaaagaaggactggcgaggtggccgaggtgcccaccagaacatcatcccatcttccactggggctgccaaggctgtaggcaaagtcatcccagagctcaatgggaagttaacaggaatggcattccgggtgccaaccccaaacgtatcagttgtggacctgacctgccgcctggctcagcctgcttcctacactgctatcaaggaggctgtgaaagcagcagccaagggacctatggctggcatccttgcttatacagaggaccaggtggtctccacggactttaatggcgattcccattcttccatctttgatgctaaggctggaattgccctcaatgacaacttcgtgaagcttgtttcctggtacgacaacgaatatggctacagtcaccgggtagtcgacctcctccgctacatgtttagccgagagaaataaaggcccctccttgctcccctgcgcacctcgcgtacctgccttcggctccccttcaaaagagggcgcacttcgcgctgccgccgggtcaacaatgaaataaaaaccagagtgcgcacagaaaaaaaaaaaaaaaaaaaaaaaaaaaaaa

SEQ ID NO: 1227 - DNA, 3216 bp, Rattus norvegicus
ggtacccaacagcctgaactcagagccccgagagcagagcattcagggcaagcagaaacaccctgcagaggctttccaagaatccctcggcatggcaagacaaggctgtctcgggtcattccaggtaatatccttgttcacttttgccatcagtgtcaatatctgcttaggattcacagcaagtcgaattaagagggcagaatgggatgaaggacctcccacagtgctgtctgactctccatggaccaacacctctggatcctgcaaaggtagatgctttgagcttcaagaggttggccctccagactgtcggtgtgacaacctgtgtaagagctacagcagctgctgccacgatttcgatgagctctgtttgaaaacagtccgaggctgggagtgcaccaaagacagaagtggggaagtacgaaacgaggaaaatgcctgtcactgcccagaagactgcttgtccaggggagactgctgtaccaactaccaagtggtctgcaaaggagaatcacactgggtagatgatgctgcgagaaatcaaagttccgaatgcctgcaggtttgtccgcctccgttaatcatcttctctgtggatggtttccgtgcatcatacatgaagaaaggcagcaaggttatgcccaacattgagaaactgcggtcctgtggcacccatgtcccctacacgaggcctgtgtaccccacaaaaaccttccctaatctatatacgctggccactggtttatatccggaatcccatggaattgtcggtaattcaatgtatgatcctgtctttgatgcttcgttccatctacgagggcgagagaagtttaatcataggtggtggggaggccaaccgctatggattacagccaccaagcaaggggtgagagctggaacattcttttggtctgtgagcatccctcatgaacggaggatcctaaccattcttcagtggctttctctgccagacaacgagaggccttcagtttatgccttctactcagagcagcctgatttttctggacacaagtacggcccttttggccctgagatgacaaatcctctgagggagattgacaagaccgtggggcagttaatggatggactgaaacaactcaggctgcatcgctgtgtgaacgttatctttgttggagaccatggaatggaagatgtgacatgtgacagaactgagttcttgagcaactatctgactaatgtggatgacattactttagtgcctggaactctgggaagaattcgagccaaatctatcaataattctaaatatgaccctaaaaccattattgctaacctcacgtgcaaaaaaccggatcagcactttaagccttacatgaaacagcaccttcccaaacggttgcactatgccaacaacagaagaattgaagacatccatttattggtcgatcgaagatggcatgttgcaaggaaacctttggacgtttataagaaaccatcaggaaaatgttttttccagggtgaccacggctttgataacaaggtcaatagcatgcagactgttttcgtaggttatggcccaacttttaagtacaggactaaagtgcctccatttgaaaacattgaactttacaatgttatgtgcgatctcctaggcttgaagcccgctcccaataatggaactcatggaagcttgaatcacctactgcgtacaaatacctttaggccaaccatgccagacgaagtcagccgacctaactacccagggattatgtaccttcagtccgagtttgacctgggctgcacctgtgacgataaggtagagccaaagaacaaattggaagaactcaataaacgtcttcataccaaaggatcaacagaagctgaaaccgggaaattcagaggcagcaaacatgaaaacaagaaaaaccttaatggaagtgttgaacctagaaaagagagacatctcctgtatggacggcctgcagtgctctatcggactagctatgatatcttataccatacggactttgaaagtggttatagtgaaatattcttaatgcctctctggacatcgtataccatttctaagcaggctgaggtctccagcatcccagaacacctgaccaactgtgttcgtcctgatgtccgtgtgtctccaggattcagtcagaactgtttagcttataaaaatgataaacagatgtcatatggattcctttttcctccctacctgagctcctccccagaagctaagtatgatgcattcctcgtaaccaacatggttccaatgtaccccgccttcaaacgtgtttgggcttatttccaaagggttttggtgaagaaatatgcttcagaaaggaatggagtcaacgtaataagtggaccgatttttgactacaattacgatggcctacgtgacactgaagatgaaattaaacagtatgtggaaggcagctctatacctgtccccacccactactacagcatcatcaccagctgcctggacttcactcagcctgcagacaagtgtgacggtcccctctctgtgtcttccttcatccttcctcaccgacccgacaatgatgagagctgtaatagctccgaggatgagtcgaagtgggtagaggaactcatgaagatgcacacagctcgggtgcgggacattgagcacctcactggtctggatttctaccggaagactagccgtagctattcggaaattctgaccctcaagacatacctgcatacatatgagagcgagatttaactttctgggcctgggcagtgtagtcttagcaactggtgtatatttttatattgtgtttgtatttattaatttgaaccaggacacaaacaaacaaagaaacaaacaaataaaaaaaaaaaccacttagtattttaatcctgtaccaaatctgacatattaagctgaatgactgtgctattttttttccttaattcttgatttagacagagttgtgttctgagcagagtttatagtgaacactgaggctcacaatccaagtagaagctacgtggatctacaaggtgctgcaggttgaaaatttgcattgaggaaatattagttttccagggcacagtcaccacgtgtagttctgttctgttttgaaagactgattttgtaaaggtgcattcatctgctgttaactttgacagacatatttatgccttatagaccaagcttaaatataataaatcacacattcagatttt

SEQ ID NO: 1228 - DNA, 1392 bp, Rattus norvegicus
aggaggctgcaagagggcgggaggcaggagagggcccggagctggtgggccggagcggcggcgccgccatgtccgacagcgagaagctcaacctggattccatcatcgggcgcctgctggaagtgcagggctcacggcctggaaagaatgtgcagctgacagagaacgagatccgtggtctttgcctcaaatcccgggagattttcctgagccagcctattcttctggagcttgaggcgcctctcaagatctgtggtgacatccatggccagtactatgaccttctacggctgttcgagtatggtggcttccctccagagagcaactacctcttcttgggggactatgtggatcggggaaagcagtctttggagaccatctgcttgttgctggcctataagatcaaatacccggagaatttctttctactacgtgggaaccatgagtgtgccagcatcaaccgcatctatggcttctatgatgaatgcaagagacgatacaacatcaaactgtggaagactttcaccgactgcttcaactgcctgcccattgcagccattgtagatgagaagatcttctgctgccacggaggcctgtctccagacttgcaatccatggagcagattagacgtattatgcggcccacggacgtgcctgaccagggcctgttgtgtgatctgctgtggtctgaccctgacaaggatgttcaaggctggggcgagaatgaccgtggagtctcctttacctttggggccgaggttgtagccaagttcctgcacaagcatgatttggacctcatctgcagagcacatcaggttgtagaagatggctatgagttctttgccaagaggcagctggtgacactcttctcagctcccaactactgtggcgagtttgacaacgctggcgccatgatgagtgtggacgagacactcatgtgttccttccagatcctcaagcccgctgataagaataaggggaagtatgggcagttcagtggcctgaaccccggaggccgtcccatcactccaccccgcaattctgccaaagccaagaaatagcctccatgtgctgccctctgccccagatgacggattatttgtacagaaatcatgctgccatgggtcacactggcctctcaggcccacccatcatggggaacacagcgttaagtgtctttcctttattttttaaagaatcaatagcagcatctaattccccagggctccctcccaccagcacctgtggtggctgcaagtggaatcctggggccaaggctgcagctcagggcaatggcagaccagattgtgggtctccagccttgcatggctggcagccagatcctggggcaacccatctggtctcttgaataaaggtcaaagctggattctc

SEQ ID NO: 1229 - DNA, 573 bp, Rattus norvegicus
gcttcctgtccggtgagcgtcgaacgactgaagcggtggcccatagtgcattgcgatggcgggtaggcgtgtgtaggcggagccagggccggaagtagaacggtggcggcggcggtgactctggcagctcgggactcagtgcaagtaccacagactcaaccatgactgttcagaggatcttcaggctctcctctgtccttcggtcagcagtctctgtgcatttgaggaggaacattggtgttacagctgtggcgtttaataaggaacttgatcctgtacagaaactcttcttggacaagataagagagtacaaagcaaagcgactggcgtctggaggacctgttgatactggcccagaatatcagcaagaggtggacagagagctttttaagcttaaacaaatgtatggtaaaggagagatggataagtttcctaccttcaattttgaggatcccaaatttgaagtcctcgacaaaccccagtcctgaggaacatacaaaccatgtggtaatttgtcatgacttagttgtacaattaatctaaaaaattcaaataaacattcacttcacagct

SEQ ID NO: 1230 - DNA, 1213 bp, Rattus norvegicus
agacagactccattctttgtgcagtgaggggctccctgcctcgttgggaggcagcgtagtaaacactgcttcggtgctccagacgcctaagggctttcgttacagcgatgccgaagcgggggaagagagcggcagcggaagacggggaagaacccaagtccgagccagagaccaagaagagtaagggggcagcaaagaaaactgagaaggaggccgcaggagagggccctgtcctgtatgaggaccctccagatcagaaaacgtcagccagtggcaaatctgccacactcaagatatgctcctggaatgtggatgggcttcgagcctggattaaaaagaaaggcttggattgggtaaaggaagaagcaccagacatcttgtgcctccaagagaccaaatgctcagagaacaaactcccggctgaactgcaagagctgcctggactcacccatcagtactggtcagctccatcagacaaagaaggatatagtggtgtgggcctactttcccgccaatgcccgctcaaagtctcttatggcattggtgaggaagaacatgatcaagaaggccgggtgattgtggctgaatttgagtcctttatcttggtaacagcctatgttccgaacgcaggaaggggtctggtaagactggagtaccgacagcgatgggatgaagccttcagaaagtttctaaaggacttggcttcccggaaacctcttgtgctgtgtggggatctcaatgtggctcatgaagaaatagaccttcgtaaccccaaaggaaacaaaaagaatgctggttttactccccaggagcgccaaggctttggggaaatgctacaggctgtaccactggctgacagcttccggcatctctaccccaacactgcctacgcttatactttctggacttacatgatgaatgcccgctctaagaatgttggttggcgccttgattactttttgctgtctcactctcttttacctgctttgtgcgacagcaagatccggtccaaggctcttggcagtgaccactgtcccatcaccctttacctagcactgtgacactcccctcaagtagcttcatgctgggaaatagcctcctctcctccaggagaccagtgcgttatctcttcttcaggtgtttactcccctctaaaccaaacttctggtttcctttaaacaatccaagtgaaataaaagtcctacttttcaac

SEQ ID NO: 1231 - DNA, 552 bp, Rattus norvegicus
atgacctctcagattcgtcagaattattccaccgaagtggaagctgccgtgaaccgcctggtcaacttgcacctgcgggcctcttacacctacctctctctgggcttcttttttgatcgggatgacgtggctttggaaggcgtaggccacttcttccgcgaattggccgaggagaagcgcgagggcgccgagcgtctcctcaagttgcagaacgaacgcgggggccgtgcactcttccaggatgtgcagaagccatctcaagatgagtggggtaaaaccctggaggccatggaagctgccttggccctggagaagaacctgaaccaggccctcttggatctgcacgccctgggctctgcccgcacagaccctcacctctgtgacttcttggaaagccacttcctggataaggaggtgaagctcatcaagaagatgggcaaccacctgaccaacctccgtagggtgcagggcccacaaccagcgcagactggcgtggcccaggcatctctgggcgagtatctctttgagcgcctcactctgaagcacgactag

SEQ ID NO: 1232 - DNA, 2324 bp, Rattus norvegicus
gtgaacgtgtttggcagcggcaactaaattcagaaaacatcatggcagagcaggtggctttgagccggacccaggtgtgtgggatcctgagggaagagttgtaccagggtgatgccttccaccaagctgatacacacatatttatcatcatgggtgcatcgggtgacctggccaagaagaagatttatcctaccatctggtggctgttccgggatggccttctacccgaagacaccttcattgtaggctatgcccgctcacgactcacagtggatgacatccgcaaacagagtgagcccttctttaaagtcactccagaagaaagacccaagctagaggagttctttgcccgtaactcctatgtagctggccagtatgatgatccagcctcctacaagcacctcaacagccacatgaatgccctgcaccagggaatgcaggccaaccgtctgttctacctggccttgccccccactgtctatgaagcagtcaccaagaacattcaagagatctgcatgagtcagacaggctggaaccgcatcatagtggagaagcccttcgggagagacctgcagagctccaatcaactgtcgaaccacatctcctctctgtttcgtgaggaccagatctaccgcattgaccactacctgggcaaagagatggtccagaacctcatggtgctgagatttgccaacaggatctttggacccatctggaatcgagacaacattgcttgtgtgatccttacatttaaagagccctttggtactgagggtcgtgggggctattttgatgaatttgggatcatcagggatgtcatgcagaaccacctcctgcagatgttgtgtctagtggccatggaaaagcctgcctctacagattcagatgatgtccgtgatgagaaggtcaaagtgttaaaatgtatctcagaggtggaaactgacaacgtggtccttggccagtatgtggggaaccccagtggagaaggagaagctaccaatgggtacttagatgaccccacagtaccccatgggtctaccactgctacctttgcagcagctgtcctctatgtggagaatgaacggtgggatggagtacccttcatcctgcgctgtggcaaagctctgaatgagcgcaaagctgaagtgagacttcagttccgcgatgtggcaggtgacatcttccaccagcagtgcaagcgtaacgagctggtcatccgtgtgcagcccaatgaggcggtatacaccaagatgatgaccaagaagcctggcatgttcttcaaccctgaggagtctgagctggacctaacctatggcaacagatacaagaatgtgaagctccctgatgcctatgaacgcctcatcctggatgtcttctgtgggagccaaatgcactttgtccgtagtgatgaactcagggaagcctggcgtatcttcacaccattgctgcacaagattgatcgagagaagccccagcccatcccgtatgtctatggcagccgaggtcccacagaggcagatgagctgatgaagagagtgggcttccagtatgagggtacctacaagtgggtgaaccctcacaagctctgagccctggaaacttacaccatctgcactctgcctcttctggccaccctttctgcatctgcccttctcaccatctaaccctctattaggactattgacctcatattggaaagactttgggaccataggccttagctacacattctagtccctgggcttaggccaccattctgtcctatgctgctgccactgccactaccactaagcccagctacattcctcagataccaggcattcaaaacgcattgcaatgctttcaggaccaccactgtccctatctgagccacccatctttccacaagacctgaatcacctcctcccctcaatcccctgcagaaagaacgcctatcagtctgtccctggactccttaagataggagttaggaacaattgggaggagccttgggccttggagggacaatgaccaaaccacacttccctgagactgtgggcaagctcctcaaaacttaaagtgatcaaggacacccatctgagaggacctgcccatagccacactagccttagtgctacttgacattcctcctcaccagctggaagaactctcatgctgcctagcaatattttgggggccatagatatctcctaaacaattccatagtccatagtcagcctcatccaacccatgggcagcctccttaccaaaggaaggtaagagcagcagctagaattttcctaccccaaccctgccattaaatcctcaaaaaaaaaaaaaaaaaa

SEQ ID NO: 1233 - DNA, 1501 bp, Rattus norvegicus
cagctgctaagcttggtgctgtgagggaagagaaaggctttgtcccattcctagaatgaagctgcttgctaggactctgtacctctgggaggtggggagacaggtagcctcttggagcctgacgtctggccaggagtgtttggtgctcagggaaacatggtgggcttcgatgagggctgtcagaaccagagcagttcatcacaagcctggacattgcatcgccatgggaaggatcatgcgtccggatgatgccaacgtggccggcaatgttcacggagggaccattctaaagatgatcgaggaggctggggtcatcatcagcacccggcactgtaacagccagaatggggagcgctgtgtggctgccctggcccgggtggagcgcactgacttcctgtcgcccatgtgcatcggtgaggtggctcacgtcagcgcagagatcacctatacttccaagcactctgtggaggtccaggtccacgtgttgtcggagaacatcctcacaggtaccaaaaagctgaccaataaggccaccttgtggtatgtgcccctgtcattgaagaatgcggacaaggtccttgaggtgcctcctattgtgtatttacggcaggaacaggaggaggagggtcggaaacgctatgaagcccagaagctagaacgcatggagaccaagtggaggaacggagacattgtccagcccatcctgaacccagagccgaacacagtgagctacagccagtccagcctgatccacctggtggggccctcagactgcactcttcatggcttcgtgcacggaggtgtcaccatgaagctcatggatgaggtggccgggattgtggctgcgcgccactgcaagaccaatatagtgactgcctctgtggatgctgttaatttccatgacaagatccggaaaggctgtgtcatcaccatctctggacgcatgaccttcacaagcaataagtctatggaaattgaggtcctggtggacgctgaccctgtggtggacaactcacagaagcgctaccgggctgccagtgccttcttcacctacgtgtccctgaatcaggagggcaagccgctgcctgtgcctcagcttgtgccggagacggaggacgagaagaagcgttttgaagaaggcaaaggccgctatctgcagatgaaggcgaagcgacagggccatacagagcctcagccctagatgtcttcctccctcccatcctgtcccgtcctgggtcagcacagttgtggcagtagtcctgtgtgcagtcacttagaagtcgcccccttggccaaaccccgatttcctttgagagctggtgttgtgaagtaccgtgtggcagtgttacctgtggcctgttcccaaaacctgtgcaccaaagctttatttatatccctccagtccctgctcccatgttgtcccaaaggccatcgtggacaccagagcacactgactggcctggagaagccagcaccactaataaagctgctgtctggctgg

SEQ ID NO: 1234 - DNA, 510 bp, Rattus norvegicus
tcggcccggggctgcgggagcagggagataccgcggcggcagcgactgctgctgctggacgagcccaggggacaccgcccctgcccgcgattcgtttcagcccagcgctgctccccaggggcctgtgcggactcgcctgcgtgacgtgtcacaatgtctgaccggaaggcagtgatcaagaacgcagacatgtctgaggacatgcaacaggatgccgttgactgcgccactcaggccatggagaagtacaacatagagaaggacattgctgcctatatcaagaaggaattcgacaagaaatataaccctacctggcattgtatcgtgggccgaaattttggcagctatgtcacacacgagacaaagcacttcatctatttttacttgggtcaagttgcaatcctcctcttcaagtcaggctaggtggccgaggtgaaggtgtcagtggcggcggcagcgatggcaagcaggcggcgttgctgggactgttttgcactggggccagcatca

SEQ ID NO: 1235 - DNA, 1679 bp, Rattus norvegicus
gactgataggcgtgtcgggcgggaccagagcgcgccccactcagcgaaagctgccgtccctctttgccttgagcgccgcagccctgagaatcgcatctggcttggaaacagtcctaagactggagtctcgaagaaagccggagacagtcgcgaagaacggaggacgcccagagactcttcggcttcccggaagtggaaccgagcatacccggaaggagctaatcccacctgaagattgctgagcacccgcaggcgttaagcctaacggagtccacgtcatggcggcggatgggacaggtgtagtcggaggaggggctgtcggcggccccctgtccaaggacggtttgctggatgctaagtgcccagaaccaatccccaatcggcggcgctcttcctcgctgtcccgtgacgcgcagcgccgagcctatcagtggtgccgggagtacctgggcggagcctggcgcagagcgcggccggaggagctgagcgtttgccccgtgagcggaggcctcagcaacctgctcttccgatgctcgctaccgaaccacgtgcccagtatgggcggggagccccgggaggtgctgctacggctgtacggggctatcttgcagggtgtagactccttggtattagaaagcgtgatgttcgccattcttgcagagagatctctagggccccaactttatggagtgtttccagagggccgcttggaacagtacctcccaagccggccattgaaaactcaagagctccgggacccagtgttgtcaggagccattgcaacaaagatggcccgtttccatggtatggagatgcccttcaccaaggagccccgctggttgtttgggaccatggagcggtacctaaagcagatccaggacctgccgtccactagccttccccagatgaacctggtggagatgtacagcctcaaggatgagatgaatcacctcaggacgttgctagacgctacaccgtccccagtggtcttctgccacaatgacatccaggaaggaaacatcttactgctctcagagccagacagtgatgacaacctcatgttggttgatttcgagtacagtagttacaactacaggggctttgacattgggaatcatttctgtgagtgggtttacgattacacttacgaggagtggcctttctacaaagcaagacctgcagactaccccactagagaacagcagctccttttcatccgtcattatctggcggaggttcagaaaggtgaggtcctctccgaagaggagcagaagaaacaggaagaagatttgctgatagagatcagccggtatgccctggcctctcatttcttctggggcctatggtccaccctccaggcttccatgtccactatagagtttggctacttggaatacgcccaatctcggttccagttctacttccagcagaaggggcagctgaccagcttcctatcaccttgaggatccaacccccacctcagatttctcctggagcctccggggcaggccctcggagggaggggcaaagagcagaagcccccagagcttgggctgtgcctctaagtgagactgtcgttgaagtagctgacctccgtactcctttcttagtacttgcccaaggggggcatctgacagcccctggggctgtgcacctaaataaatgaacttcacaaatac

SEQ ID NO: 1236 - DNA, 811 bp, Rattus norvegicus
ggaattccgctgctgtcgctaagctaaagtcactgacgtttccgccaccatgctgcccgccgcattgcttcgtcacccaggtctgcgccgtctggtgctccaggcgcgtacgtacgcccaggccgccgcctcacctgcccccgccgctgggcctggacagatgtccttcaccttcgcctccccgacgcaggtgttctttgatggtgccaatgtccggcaagtggatgtgcctacgctgactggagcctttggcatcctggcatcccatgtccccacactacaggtcctacggcctgggctggtaatggttcatgcggaagatggcaccacaactaagtattttgtgagcagcggctccgtcactgtgaatgcggactcctctgtgcaattactagctgaagaagtcgtgacactggacatgctggacctcggggcagcccgggcaaacctggagaaggcgcagtcagagctgtcaggggcagcagatgaggcagcacgggctgagatccaaatccggatcgaggccaatgaagccctggtgaaggccctggagtaggcgtactttgtctgtcacccacagggtaacagaggcaggtcctggggggctgaagtcgccaccagggggcagcagtgctccggttactggcttaaagcttccctggtgctgcctgccaggtcatggagggcttccccaggcttccagagtctgggatccccaggatgcctctggagagctggccttgattgcccctcaaagccacccggacagtcagctggcccagcctatctgcattaaataccacggaattcc

SEQ ID NO: 1237 - DNA, 1972 bp, Rattus norvegicus
caggacccgggacactttgcagacatggagactgtcgttcgcagatgcccattcttatcccgagtccctcaggcctttctgcagaaggcagggaaatctctgctgttctatgctcaaaactgccccaagatgatggaagtcggggccaagccggctcctcggaccgtgtccacttcagcagcacagtgccagcaggtcaaagaaacccctccagccaatgagaaagagaaaactgccaaagccgcagtccagcaggctcctgacgagtcccagatggcacagactccagacggcacacagctcccgcctggacacccgtcaccctctacaagccagagctctgggagcaagtgccctttcctggcagcacagctgagccagacgggcagcagcgtcttccgcaaggccagtctggagcttcaggaggacgtgcaggaaatgcatgctgtgaggaaagaggttgctcaaagcccagtgctccccagcttggtcaatgcaaaaagggatggagaaggtccaagcccactgctgaagaacttccaggacatcatgagaaagcaaaggccagaaagagtgtctcatcttcttcaggataacttgccaaagtccgtttccacttttcaatatgatcatttctttgagaagaaaattgacgagaaaaaaaatgaccacacctaccgagtttttaaaactgtgaaccggagagcacagatcttccctatggcagatgactacacggactccctcatcaccaaaaagcaggtgtcggtctggtgcagcaacgactatctaggcatgagtcgacacccacgggtgtgtggggccgtcatagagactgtgaaacagcatggtgccggagcaggtggaactagaaatatttctggaacgagcaagttccatgtggaactggagcaggagctggctgacctccacggcaaggacgcggcgctcttgttctcttcctgcttcgtggccaacgactccactctcttcaccctggctaagatgatgccaggctgtgaaatttactctgattccgggaaccatgcctccatgatccaagggattcgcaacagtcgagtgccaaagtatatcttccgccacaatgatgtcaaccatctcagagaactgttgcagagatccgacccctcgctccccaagatcgtagcattcgaaactgtccattcaatggatggagcagtgtgccccctggaagagctgtgtgatgtggcccatgagtttggagcgatcacgtttgtggacgaggtccatgcagtagggctctatggggcttcaggtggagggatcggtgatcgggatggagtcatgccaaaaatggacatcatttctggaacactcggtaaagcgttcggctgtgttggaggatacattgccagcacgagtttgctgatcgacaccgtccggtcctacgctgcgggcttcatcttcaccacctccctgccaccaatgctgctggctggagccctggagtctgtgcggatcctgaagagcaatgagggacgtgcccttcgccgccagcaccagcgcaatgtcaagcttatgaggcagatgctaatggacgctggcctcccagtcatccactgccccagccacatcatccctgtgcgggttgccgatgctgctaaaaacacagaaatctgtgatgagttgatgaccaggcataatatctacgtccaggccattaattacccaacagtgcctcgtggggaggagctcctccggatcgcccccaccccgcaccacacaccgcagatgatgaacttcttcctagagaagctgctgctcacgtggaagcgagtcgggctggaactgaagccacattcgtcagctgaatgcaacttctgcaggaggcccttacacttcgaagtgatgagcgagagagagaaagcctatttctcaggcatgagcaagatggtgtctgcccaggcctgactcagttattcacaaaccc

SEQ ID NO: 1238 - DNA, 7140 bp, Rattus norvegicus
gtcctctgacaaggtctgcggccctgtgagctggctctacagagccgagggcggagtcctcagccaggccgagatacggtgaattaaagtcggcaatagatttctgtgaaaatgtcagttcttatatcacagagtgtgataaattatgtggaagaagagaatattcctgctctgaaagctcttcttgagaagtgcaaagatgtagatgagaggaacgagtgtggccagacgccgctgatgctggctgcggagcagggcaatgtggaaatagtgaaagaactgttaaagaatggagccaactgcaatctggaagatctggataactggactgcccttatatcggcatctaaggaggggcacatccacattgtggaggagctgctgaagagcggggccagtctggagcaccgagacatgggtggatggacagctctcatgtgggcgtgctacaaaggcaggaccgacgtggtcgagctgcttctttctcatggtgccaacccaagtgtcactggtttgtatagtgtctacccaatcatctgggcagcgggcagaggccatgccgacatagtgcatcttctactgcagaatggtgcgaaagtcaattgctccgacaagtacggaacaacccccttggtatgggctgcccgaaagggtcatttggaatgtgtgaagcacttgttggccatgggagctgatgttgatcaagaaggagccaattcgatgactgcacttatcgtggcagtgaaaggaggctacacacagtccgtgaaagagattttgaaaaggaatccaaatgtgaacctaactgacaaggatggaaacacagctctgatgatcgcatcgaaggagggacatattgagattgtgcaggacctgctggacgccggaacatacgtgaacatacctgacaggagtggggatactgtattgatcggcgctgtgagaggtggtcatgttgaaattgttcgagcacttctccaaaaatatgctgatatagacattagagggcaggacaataagaccgcgctgtattgggccgttgaaaagggaaatgcgacaatggtgagggatatcctgcagtgcaatccggacacggaaatatgcacgaaggatggtgagacaccactgataaaagccaccaagatgagaaatattgaagtggtggagctgctgctggataagggggctaaggtgtctgctgtggacaagaaaggggacactcccctgcacgttgccatccgagggaggagccggagactggccgaacttcttttacggaaccccaaagatggacggttactctacagacccaacaaagcaggcgagactccctacaacattgactgcagccaccagaaaagcattttaactcaaatatttggagccagacacttgtctcctacggaaacagatggcgacatgcttggttatgatttgtatagcagtgccctggccgatattctcagtgaacccaccatgcaaccacccatttgtgtgggcttgtatgcacagtggggaagtgggaagtctttcttactcaagaaactagaagatgagatgaagacgtttgcaggacagcagaccgagcccctcttccagttctcgtggctcatagtgttcctcaccctgctgctgtgtggcgggctcggcctagtgtttgctttcacggttgatacaaacctcgccatagccatttcattgagtttcctggctctcatatatatattcttcatcgtcatttacttcggtggacggcgggaaggagagagttggaactgggcctgggctctcagtaccagactggcaagacacattgggtacctggagctcctcttcaaactgatgtttgtgaacccacctgaactgccggagcaaactacaaaggctttacctgtgaggtttttgtttacagattacaatagactctccagtgtgggaggagaaacttccttggctgaaatgatcgcgaccctctcagatgcttgtgagagagaattcggctttttggctacccgtctttttcgagtcttcaggactgaagagtctcagggtaaaaagaaatggaaaaaaacatgctgcctcccctcttttgtcatctttctttttattgttggctgcattattgctgggatcacccttctggctatattcagagttgacccgaaacatctgacagtgaatgctatcctcatttctatcgcatctgtcgtggggttggccttcgtgctcaattgtcgaacatggtggcaagtgctggactctctcctgaattctcagagaaaacgcctccatagtgctgcctccaaattacacaagttaaaaagtgaaggattcatgaaagtcctgaagtgtgaggtggagctgatggccaggatggcaaaaaccattgacagcttcactcaaaaccagacaaggctggtggttatcattgacggcctggatgcctgcgagcaggataaagtccttcagatgctggacactgtccgagttctgttttcaaagggcccttttattgccatttttgcaagtgatccgcatattatcataaaggccatcaaccagaacctgaatagtgtgcttcgtgactcaaatataaacggacatgactacatgcgcaatatagttcacttaccagtttttcttaatagtcgtgggcttagcaatgcaaggaaattccttgtaacttcagcaacaaatggggacattacatgctcagacaccacaggaacacaggaggacactgacagaagagtttcacagaacagccttggggagatgacaaagcttgggagcaaaacggctctcaacagaagggacacttaccgcagaagacagatgcagagaaccatcacgaggcagatgtcctttgatctcacaaagctgctggtcactgaggattggttcagtgacatcagccctcagaccatgagacggctactcaatattgtttctgtgacagggcggctactaagagccaatcagattactttcaactgggacaggctagccagctggatcaacctcaccgagcagtggccgtaccggacgtcttggcttatactatatctggaagagactgaaggtctccctgatcagatgaccttaaagaccatctatgagagaatatcgaagaatatcccaacaactaaagatgttgagccgcttcttgaaattgatggagatataagaaactttgaagtcttcttgtcttcaaggactccagttctcgtggctcgagatgtaaagacctttttgccgtgcacagtaaacctggatcccaaacttcgggagatcatcgcagatgtccgagctgcaagagagcagatcaacataggaggcctggcctatcccccgctccctctgcacgaaggccctcctcggccaccttctgggtacagtcagcctgcatctgtctgctcttcagcatctttcaacgggccgttcccaggcggggttgtgtctccacagccccacagcagttactacagcggcttgtccggaccccagcaccccttctacaacaggccattctttgccccatacctttacacgccaaggtattaccctggcggttcccaacatctcatctcacgttcatcagtaaaaacgagtttgcccagagatcagaacaatggcctaccgtgtgactctgggtttaacaaacagagacaggcagccgtccctgccacaggcagctcactgttactgagttcaatgaccgtggatgtcgtatgtgagaaactgagacagatagaagggctggaccagagcatgatgcctcagtactgcacaacaatcaaaaaggcgaacataaatggccgggtattgtctcagtgtaacattgatgagctgaagaaagagatggctatgaactttggagactggcatctcttcagaagcatggtcttagaaatgagaagtgtggaaagccaggtggtccctgaagaccctcgttttctcaatgaaaactccagtgccccagttcctcatggagagtctgctcgccgctcttctcacactgagctgcccctcacggagctttccagccagactccatacaccctgaacttcagctttgaagaactgaacacgcttggccttgatgagggagcccctaggcacagtaacctgagttggcagtcacaaactcgcagaaccccaagtctctcgagtctcaattcccaggactccagtattgaaatttcaaagcttactgataaggtgcaggccgagtatagagacgcctatagagagtacattgctcagatgtcccagttagaagggggcacagggtcgtccacaataagcggcagatcttctccacatagcacatactacataggccagagctcttcagggggctccatccattctactctagaacaggaaagggggaaggagggtgagctaaagcaggaggatgggcggaagtcatttttaatgaagaggggggatgtcatagattactcctcatcaggggtgtccactaatgaggcctcacccctggaccccattactgaagaagatgagaaatccgaccagtcaggtagtaagctactcccaggcaagaaatcctcagaacggcccagtctcttccagacagacttgaagcttaaggggggtggtcttcgctaccagaaactgcccagtgatgaagatgagtcggggacagaagagtcagataacaccccactgctcaaagatgataaggacaaaaaggctgaaggcaaagcagagagagtgtgcaagtccccagagcacagtgccgagcccatcagaacgttcattaaagcaaaagagtatttgtccgatgccctccttgacaaaaaggattcctcagattcgggagtgaggtccaatgagagttctcccaaccactctctccacaatgaggcagcagacgactcccaactggaaaaggcaaacctcatagagcttgaagatgagggccacagtgggaagcgggggatgccacacagtctgagtggcttgcaagatccaattatagctcggatgtccatttgctcggaagacaagaaaagcccttccgagtgcagcctgattgctagcagccctgaagaaagctggcctgcgtgccagaaggcctacaatctaaaccgaacgcccagcactgtgactctgaacaacaacactgcacccaccaacagagccaatcagaacttcgatgagatagagggaatcagggagacgtcccaggtcattctgaggcctggccccagtcccaacccaactgctgtgcagaatgaaaacctgaagagcatggcgcacaagcgaagccagcgctccagttacacaaggctctcgaaagatgcatctgagctacatgcagcctcctcggagagcacaggctttggagaagagagagagagcattctctgatgaggaaggagaagtgaaaagagtgtgacagactttgagttgaccattcctcattactcatcatgtttatgcatcacagacacctgataggtggtcaggcactggaagcagacaggaaagcctgaaagcacagtcaccagtcattttcattgtcaccgtcatcccaggcactttaaagtctcactgccactattacacctttcctggcacacagctaggcagagcgatgagagcaggctgaagacaaaataggtcaaaagtgtatttaaagttgaaagggcttaaatcacaaggaaaaaaacttagagatctcctttataaactattcatgtaccatttgagggaagatacagtgttagatgaagcagaaaccaattttattgttagtgtttaatcttggtgcagatttataagttttagagtagcccagagactaaaagtgaatacttagcaaatggatagccagtgttctatataggaatcattgcttttcagagggcttaaagtttaagtagaaaatatatactcaagaaggcgataaaagctgatgagaaagtgagttagcagaacccaaagccgtgctgggccgcggtgactcattagcagaggaggaggggagggcagtatattcctgggatactctctccagacccagcctggcttctgacatcatccacctgtgccctcaaaaccgtcttagtctgttctgcaactcttaagtgacatacctaactcagctcatggctaaggaaaaaaaattaaagttgtcctggtgattaaactctggacctcccacatctaagtcccgagttgacaaactgcatccccagcccaaacatctgttcttccagagatctggaaagacatgggcataagagtccagtaaactcttaatgaaggtgtcgggaagtgtttcccttaaaggggttagtgacagtgacactagacaagtgacagaatttagtttgctgacattaaatcactgccttctgggccgcaatagtttagtatctgttcctaaatcagcatttgagttctgcgggggttacaaaatggaggcatggttttaagaaggaatttgaaagcatccagggaagcaagaacagagtcggagctggtgtgaccatgacacttcccattattgttagcaaagctaggagaatgaccacatacatttaagtatcatgtaggctagagcgtgcctgtcatcatcatgcattgagaccgtttgtcctttgattatagtgtgtttatgtagaccagtcctagcagtatgtcctgagccatgggcaggattgtagatggcgaggtggcaggtttagtgctcgttgagatgtccatctctgactggacctgtgtggtttacttgtagctgctccgtgaaacactgccttgctgtttgagtgtaattgagcattttcatgaagtgtatatgttgcatgatctttaacaggtatttttagacattaagaacagcatgatattactgacatatgcattagtagtatgcagtatcatgtaatgggtacttcagaggcagtttggtttctttccaggtgagtagttatagctcacagtcatgggaatcctttattcacactgtctgtgaagtcgatgctggagtgccaaatgcacacggagactaggaacaataaagacttgcatgccattctgactcatggagttttattcaatagagcaatgataattcccattctgattaaaaattaaaacacggaa

SEQ ID NO: 1239 - DNA, 60 bp, Artificial Sequence
  oligonucleotide probe
ttaagtctgtgtctgtggcattcgcattgtgagagcagttccttagaacagttctgagag

SEQ ID NO: 1240 - DNA, 60 bp, Artificial Sequence
  oligonucleotide probe
atatgcaccttttgtcctataaatgtcctataaatgcttggggggaggggtaatgttttg

SEQ ID NO: 1241 - DNA, 60 bp, Artificial Sequence
  oligonucleotide probe
tatgaaggtaccagcgaaatccagagactggtgattgccgggcatctgctccggagctac

SEQ ID NO: 1242 - DNA, 60 bp, Artificial Sequence
  oligonucleotide probe
aggggaaagtctgtctcagggagagggaaggtcaaccgctgtgacctgtcagctcagaat

SEQ ID NO: 1243 - DNA, 60 bp, Artificial Sequence
  oligonucleotide probe
tttgtgaagctcatttcctggtatgacaatgaatatggctacagcaacagggtggtggac

SEQ ID NO: 1244 - DNA, 60 bp, Artificial Sequence
  oligonucleotide probe
tgatgggtgtgaaccacgagaaatatgacaactccctcaagattgtcagcaatgcatcct

SEQ ID NO: 1245 - DNA, 60 bp, Artificial Sequence
  oligonucleotide probe
ttgtgacaaagtggacattgttgccatcaacgaccccttcattgacctcaactacatggt

SEQ ID NO: 1246 - DNA, 60 bp, Artificial Sequence
  oligonucleotide probe
atccgtcccttccctgttgccctccaatagaaatgtgaaaactaataatcctacaaaaaa

SEQ ID NO: 1247 - DNA, 60 bp, Artificial Sequence
  oligonucleotide probe
agtctgcggctgcaccctccagtcttattaatctcccgctgctgttcccaggacattgtg

SEQ ID NO: 1248 - DNA, 60 bp, Artificial Sequence
  oligonucleotide probe
gagggaagtgttttctggtaggctttgctttttctgtatgttaaatcaatcaatcaatga

SEQ ID NO: 1249 - DNA, 60 bp, Artificial Sequence
  oligonucleotide probe
ctcgagcttatgcaatgattggtaaagtttttggcaattgtaagaattaggaaatgatcc

SEQ ID NO: 1250 - DNA, 60 bp, Artificial Sequence
  oligonucleotide probe
gtgcggtgcatgatctgattttctgggcgagatgtgaagaagactgggtttgtctttggc

SEQ ID NO: 1251 - DNA, 60 bp, Artificial Sequence
  oligonucleotide probe
gcaacacacatttgtaagggtaaagggttaagtcaagctaactgagacactgaatctctt

SEQ ID NO: 1252 - DNA, 60 bp, Artificial Sequence
  oligonucleotide probe
tgaggaaaggaactcccgaatgtgatctcacacaagcttgggacaagacagagggaaggg

SEQ ID NO: 1253 - DNA, 60 bp, Artificial Sequence
  oligonucleotide probe
gttcttacacctcagatctgtacagttacttttgtactgactgtaataaaacagccaagc

SEQ ID NO: 1254 - DNA, 60 bp, Artificial Sequence
  oligonucleotide probe
gtggttattactgtctgacttgtgtgtccagtccaaataaaggtagctgctgatcaaaaa

SEQ ID NO: 1255 - DNA, 60 bp, Artificial Sequence
  oligonucleotide probe
ggatgatgaatgaaaggaaattggaattctattggaatccagaataaatgctgctctttg

SEQ ID NO: 1256 - DNA, 60 bp, Artificial Sequence
  oligonucleotide probe
gaaagtctgtctttgaccgacatgttgtcctcagctaactgggaactggaataaaggtga

SEQ ID NO: 1257 - DNA, 60 bp, Artificial Sequence
  oligonucleotide probe
ggatttgaagtctgaatggcagaaaaccgcctacctcaaggacaagatgcgaaaagcagt

SEQ ID NO: 1258 - DNA, 60 bp, Artificial Sequence
  oligonucleotide probe
acctttgatgccttttccaccttctacctgaattccagtggcctcatttgtcgccatcac

SEQ ID NO: 1259 - DNA, 60 bp, Artificial Sequence
  oligonucleotide probe
ccccacacagaagactgtcagagtgaacaaaataatatgtattttgatttacttaagtgc

SEQ ID NO: 1260 - DNA, 60 bp, Artificial Sequence
  oligonucleotide probe
acccctgacagatcctgaaaccaagctagggactgactgcatcttgggatcgaggactac

SEQ ID NO: 1261 - DNA, 60 bp, Artificial Sequence
  oligonucleotide probe
tgcttactgttccttcaccctctgtatgtgggcccgcagaaggcacctataaagcccctc

SEQ ID NO: 1262 - DNA, 60 bp, Artificial Sequence
  oligonucleotide probe
atcaggaaagtgactgcatgttcaagaagaaaatggtccctgacttctatgttgacagca

SEQ ID NO: 1263 - DNA, 60 bp, Artificial Sequence
  oligonucleotide probe
gggcccgtatctctgaccacgattgcacttctctttgagaccattaaaccctatgaccaa

SEQ ID NO: 1264 - DNA, 60 bp, Artificial Sequence
  oligonucleotide probe
tgttgacatgagttggattcctcaggaaactttgaatcagatcaataaagcttctccgag

SEQ ID NO: 1265 - DNA, 60 bp, Artificial Sequence
  oligonucleotide probe
ggcgctgagaatatagctcagtcattgcaattcttgctgtgctcgtttgaagatctcatt

SEQ ID NO: 1266 - DNA, 60 bp, Artificial Sequence
  oligonucleotide probe
gccactattcctgcgctaggaagtaagaagagttggaaataaataacagtgatgattctg

SEQ ID NO: 1267 - DNA, 60 bp, Artificial Sequence
  oligonucleotide probe
tttgatttatttctgcatcataaagtggaatcatcactcttgaagatcactgcaaaaccc

SEQ ID NO: 1268 - DNA, 60 bp, Artificial Sequence
  oligonucleotide probe
actcagtttctgtcggacttttagagacagtggaaggattacctcattgagacgtttccg

SEQ ID NO: 1269 - DNA, 60 bp, Artificial Sequence
  oligonucleotide probe
atgcattctaccagcttatccaccaaggcaccaagatgataccctgtgaatttcctcatc

SEQ ID NO: 1270 - DNA, 60 bp, Artificial Sequence
  oligonucleotide probe
gtatttctcaagcagctatctagcagaacattttgagagattctgttagctcagatgttc

SEQ ID NO: 1271 - DNA, 60 bp, Artificial Sequence
  oligonucleotide probe
gatcgtactctccattataccacatgtataacgagccaatatcaaagtaaagatgtaatg

SEQ ID NO: 1272 - DNA, 60 bp, Artificial Sequence
  oligonucleotide probe
caggacgtattctagaagggatcaatggtttgcattcaaaatgatgtagtttgtccaaaa

SEQ ID NO: 1273 - DNA, 60 bp, Artificial Sequence
  oligonucleotide probe
aagtgggcagaatctaagagtaatggtttctactctgtactaattgtcatattgactgta

SEQ ID NO: 1274 - DNA, 60 bp, Artificial Sequence
  oligonucleotide probe
aaagggagtagcttctaaaaacaggaaaatgtcaactaatggacttctcgcttcacgtgc

SEQ ID NO: 1275 - DNA, 60 bp, Artificial Sequence
  oligonucleotide probe
tgtcagatatccatgtataagcactatttggaactgagtctgcgtcctaaattaatgatt

SEQ ID NO: 1276 - DNA, 60 bp, Artificial Sequence
  oligonucleotide probe
tatcctcctctacaaggtcaacaagtatgtcaacttggtcatgtactttctcttcagact

SEQ ID NO: 1277 - DNA, 60 bp, Artificial Sequence
  oligonucleotide probe
gccaggaatctgttgtttctcttctgccaatctactacgattgtatatgtgccgataccg

SEQ ID NO: 1278 - DNA, 60 bp, Artificial Sequence
  oligonucleotide probe
atgatccaagggattcgcaacagtcgagtgccaaagtatatcttccgccacaatgatgtc

SEQ ID NO: 1279 - DNA, 60 bp, Artificial Sequence
  oligonucleotide probe
ttccagaagacttgatgagcagaaaaatacaactctggtgatgtttattttcatacacag

SEQ ID NO: 1280 - DNA, 60 bp, Artificial Sequence
  oligonucleotide probe
gagtaatataaaaggtaccaagaaacatagcacaggattttgctcaatatatatggcctg

SEQ ID NO: 1281 - DNA, 60 bp, Artificial Sequence
  oligonucleotide probe
cttgggtaaggtaaactgtttttccatccatattacaaaaaataaagtgaaacgaggagg

SEQ ID NO: 1282 - DNA, 60 bp, Artificial Sequence
  oligonucleotide probe
agtcttgtcagcacagtcttcaaaacccaggacctaacagtcttaaagaagctgctcgat

SEQ ID NO: 1283 - DNA, 60 bp, Artificial Sequence
  oligonucleotide probe
agtggcttcctatacaaacctcaactacatattacattactcactgtagagctcaccata

SEQ ID NO: 1284 - DNA, 60 bp, Artificial Sequence
  oligonucleotide probe
cagacaacaagctatggcactagaagttaagaaatgttttggtatcatttttacgttctg

SEQ ID NO: 1285 - DNA, 60 bp, Artificial Sequence
  oligonucleotide probe
ccacggttttgtggaaatctgaaaactgtgcaatgtattgagaacactctgtaccatgtg

SEQ ID NO: 1286 - DNA, 60 bp, Artificial Sequence
  oligonucleotide probe
gcaatctactcaagaaattgaatggaaactcagaccaccttaagctctaatgagtgtgct

SEQ ID NO: 1287 - DNA, 60 bp, Artificial Sequence
  oligonucleotide probe
cccgtagctttttggtttctttctgttgcaaaagtgtttggacagaagcagaactgtgaa

SEQ ID NO: 1288 - DNA, 60 bp, Artificial Sequence
  oligonucleotide probe
ttgaggtgtgatggcaatctcaccctgacttctaccttattttaggcacataccttgtgg

SEQ ID NO: 1289 - DNA, 60 bp, Artificial Sequence
  oligonucleotide probe
cagtagaagaatgagagcaataaagtctgattggtacaaaccatcatggatgtttgtttt

SEQ ID NO: 1290 - DNA, 60 bp, Artificial Sequence
  oligonucleotide probe
tagggattgaccgccagcctttggaccatcagtgaaataaaagctttaggtcacctgcct

SEQ ID NO: 1291 - DNA, 60 bp, Artificial Sequence
  oligonucleotide probe
ataatttatgatacactcacatctatggacattctgggatgttttcgttaagatagacgc

SEQ ID NO: 1292 - DNA, 60 bp, Artificial Sequence
  oligonucleotide probe
tcatggacattacgtgcgtcctaaatatttgatgtatgtatacccaagtatgtatatcag

SEQ ID NO: 1293 - DNA, 60 bp, Artificial Sequence
  oligonucleotide probe
actggagactccactacagagaagatgaaagcgtatttttaaatgtagaggcatagtggg

SEQ ID NO: 1294 - DNA, 60 bp, Artificial Sequence
  oligonucleotide probe
caacttcagttagacagttttccttaacaatgactattaccatgtttccttaacaatggc

SEQ ID NO: 1295 - DNA, 60 bp, Artificial Sequence
  oligonucleotide probe
actacaggttgttgtaaaaaatagaagaatttggcattttggaactttgtcccatgtgag

SEQ ID NO: 1296 - DNA, 60 bp, Artificial Sequence
  oligonucleotide probe
gtcacagagagtagattggtctagatggtgaacatgtatatcaaaagtctacacacgttt

SEQ ID NO: 1297 - DNA, 60 bp, Artificial Sequence
  oligonucleotide probe
aaaggagttcattgattattctccaaaatcaactcctgacaactgatgattcgtctgttc

SEQ ID NO: 1298 - DNA, 60 bp, Artificial Sequence
  oligonucleotide probe
ggtcagtttgcgtagtcacccacctatgtttacattttacagaaattactgctctgtaac

SEQ ID NO: 1299 - DNA, 60 bp, Artificial Sequence
  oligonucleotide probe
ctggatcactgctcctccatcctcaacaagtatgatgacaatgtcaaggcttacttcaag

SEQ ID NO: 1300 - DNA, 60 bp, Artificial Sequence
  oligonucleotide probe
agagatacgttatctatttagagttaattaaagatcacaggtacctactgctcagaacag

SEQ ID NO: 1301 - DNA, 60 bp, Artificial Sequence
  oligonucleotide probe
tgggattgactgaatagctcaaacaatatcagtggttaagagatattattcttgcaaagg

SEQ ID NO: 1302 - DNA, 60 bp, Artificial Sequence
  oligonucleotide probe
ctcgagcaatattttttgatacagcatgtatttttacacccatatagtctaaacaccagg

SEQ ID NO: 1303 - DNA, 60 bp, Artificial Sequence
  oligonucleotide probe
gctttgacaagtgtgaggtgttcacctttgatattagccatagaaattaaaaagtatgca

SEQ ID NO: 1304 - DNA, 60 bp, Artificial Sequence
  oligonucleotide probe
atctgaagatgctctttgatgggtctgaacagcagagagaactgaacagcagagagaact

SEQ ID NO: 1305 - DNA, 60 bp, Artificial Sequence
  oligonucleotide probe
caagttaacaggaggttagtgtaattgtacaccatgatattggtggtatttatgctgtca

SEQ ID NO: 1306 - DNA, 60 bp, Artificial Sequence
  oligonucleotide probe
cacgactaacacagatttccagagaactaacattttgaactttgctgtaattctcaagtg

SEQ ID NO: 1307 - DNA, 60 bp, Artificial Sequence
  oligonucleotide probe
tctgtggtttcttatccaaaactccactgactcaaccttaaaactcacaagtgggatcca

SEQ ID NO: 1308 - DNA, 60 bp, Artificial Sequence
  oligonucleotide probe
tccttctggggagagtgtgacctaatttataacaaatacattaagtaccacattatttcc

SEQ ID NO: 1309 - DNA, 60 bp, Artificial Sequence
  oligonucleotide probe
ttcatgtgagattgtactgtagcctttccatagtaaacagcaaaataaaccatttgcaga

SEQ ID NO: 1310 - DNA, 60 bp, Artificial Sequence
  oligonucleotide probe
tagcaatgacacctacaacctagttttcacattattccccttatattcaccctctcaaaa

SEQ ID NO: 1311 - DNA, 60 bp, Artificial Sequence
  oligonucleotide probe
tcatacctaaagtaaatattctaagtggagcccacttgcgatcatcagcctctgtcacga

SEQ ID NO: 1312 - DNA, 60 bp, Artificial Sequence
  oligonucleotide probe
agcttgtaaatggaatgacaatcccaggttgccaaaatctttcattaaatgtgtaagctg

SEQ ID NO: 1313 - DNA, 60 bp, Artificial Sequence
  oligonucleotide probe
taatgataatcgcttggtaatgagtggttagtcgctcttgagtaaatgacttcacctctc

SEQ ID NO: 1314 - DNA, 60 bp, Artificial Sequence
  oligonucleotide probe
atcacaataatgtagttatttaggtacttacacgtgaaattgagcatcatgttggtgtgg

SEQ ID NO: 1315 - DNA, 60 bp, Artificial Sequence
  oligonucleotide probe
ccacactgaatgtagtcttttggtacaagacacatttttaaatcccgaaggaaaatacaa

SEQ ID NO: 1316 - DNA, 60 bp, Artificial Sequence
  oligonucleotide probe
agagcgggtataattgtttcattaatttgtcacagttttactgtaaaggaaagtagaggc

SEQ ID NO: 1317 - DNA, 60 bp, Artificial Sequence
  oligonucleotide probe
ttccagtttagtaaaagttgatgtgactaccttgggtaggcattaagaactcagtgttac

SEQ ID NO: 1318 - DNA, 60 bp, Artificial Sequence
  oligonucleotide probe
gaagccagtccttacgataaactccataatttatggcctgcagtatctcttcttggagcc

SEQ ID NO: 1319 - DNA, 60 bp, Artificial Sequence
  oligonucleotide probe
acattaagctgagtgaccgttaggggctttgagtagtatataactgacttcatgacttcg

SEQ ID NO: 1320 - DNA, 60 bp, Artificial Sequence
  oligonucleotide probe
tggtgtgtgacaactggcatctgtgaaaatgattgtgtttgttacaacagacatgagtgg

SEQ ID NO: 1321 - DNA, 60 bp, Artificial Sequence
  oligonucleotide probe
tggtataagtacactgtggaaaattatacaggcattaaaatcattgtagaccaagactgc

SEQ ID NO: 1322 - DNA, 60 bp, Artificial Sequence
  oligonucleotide probe
ttagagctctctgaatccatgactaaaagactcttctgcaatttctgaagaagcttcgtg

SEQ ID NO: 1323 - DNA, 60 bp, Artificial Sequence
  oligonucleotide probe
ggcgagcctccatcctgagaggagaatgagaaccagtgaactcccagcacatgcgctgag

SEQ ID NO: 1324 - DNA, 60 bp, Artificial Sequence
  oligonucleotide probe
agcccgacttctgaaaatgtgtttcttataaatgctacaaatgcaacaacgttcccagga

SEQ ID NO: 1325 - DNA, 60 bp, Artificial Sequence
  oligonucleotide probe
atctcattggcacttagatatacaaaagctgattgttcaccaaatgaatttctgcttctc

SEQ ID NO: 1326 - DNA, 60 bp, Artificial Sequence
  oligonucleotide probe
ttcctgaacaaaagggtggagtcttcacattccagcactttcccatagggcacctcttcc

SEQ ID NO: 1327 - DNA, 60 bp, Artificial Sequence
  oligonucleotide probe
aaccctaaggtgtttaatggcatctgacatgaaaaaagtttctaaaaacgctgaatacct

SEQ ID NO: 1328 - DNA, 60 bp, Artificial Sequence
  oligonucleotide probe
tgaagttgacttttgaggataccaccgacttttttgaccgtgtagtcatctaccacctgc

SEQ ID NO: 1329 - DNA, 60 bp, Artificial Sequence
  oligonucleotide probe
ttgcctggttaatagttgctgttgctgcacttccgcttctctcccagcgagagcgagaca

SEQ ID NO: 1330 - DNA, 60 bp, Artificial Sequence
  oligonucleotide probe
agctttcccactcatccctatagtggtggagcagacgggtcgaggcgagcgcgcttacga

SEQ ID NO: 1331 - DNA, 60 bp, Artificial Sequence
  oligonucleotide probe
ttcctccatccttgccaagacagctagcaacatcattgatgtgtctgccgcagactccca

SEQ ID NO: 1332 - DNA, 60 bp, Artificial Sequence
  oligonucleotide probe
ttcaggctccatatcttctacatggaaaatatgtcaaagagcagtgacttatgctgagaa

SEQ ID NO: 1333 - DNA, 60 bp, Artificial Sequence
  oligonucleotide probe
ctccatcttcctgggctacccgttggctctgttttatcggcattaccttttctacaaggg

SEQ ID NO: 1334 - DNA, 60 bp, Artificial Sequence
  oligonucleotide probe
ctcgtgggaaacatggaaaggaaggcgtgtcgtgtgtgctcagtagattcccaaagccac

SEQ ID NO: 1335 - DNA, 60 bp, Artificial Sequence
  oligonucleotide probe
tctggcttcttcagttcctcttctacacagaaactcgcatctacctcctagcctattggt

SEQ ID NO: 1336 - DNA, 60 bp, Artificial Sequence
  oligonucleotide probe
gatgactacgctacggaggatgggacaggcgtgagggattacattcatgtggtggatctg

SEQ ID NO: 1337 - DNA, 60 bp, Artificial Sequence
  oligonucleotide probe
aaacagtggctggacttgcacctgtatcacgagatccctacatcattgctcatactgtcc

SEQ ID NO: 1338 - DNA, 60 bp, Artificial Sequence
  oligonucleotide probe
tggagatgtcacttcgaccattcttcagaccatcatggagaaatctgagactgagctcaa

SEQ ID NO: 1339 - DNA, 60 bp, Artificial Sequence
  oligonucleotide probe
cgtccatggagtcactaattcatcactttaagctgtatactgagggctaccaagttcctc

SEQ ID NO: 1340 - DNA, 60 bp, Artificial Sequence
  oligonucleotide probe
cagcaatcccatatgacaagaagtatttatcagataaccacattttaatatcgactctgg

SEQ ID NO: 1341 - DNA, 60 bp, Artificial Sequence
  oligonucleotide probe
acacatactactcttataccaaaaaggacctgattgttgttcattcacagtaattttgcc

SEQ ID NO: 1342 - DNA, 60 bp, Artificial Sequence
  oligonucleotide probe
catcactgtacagttacctaagtaccgtttacaatgtggcattaataaatgtgtctgaga

SEQ ID NO: 1343 - DNA, 60 bp, Artificial Sequence
  oligonucleotide probe
ggtctgggataccagtgtgagtgttggtttgagaaatcattccagaatgtgcttttccct

SEQ ID NO: 1344 - DNA, 60 bp, Artificial Sequence
  oligonucleotide probe
acagtagagaagcttacagaactgtaatagtagaaagaatccttttccctaggcctagga

SEQ ID NO: 1345 - DNA, 60 bp, Artificial Sequence
  oligonucleotide probe
atgtgactgactctggttcagtattctcttaggtcactgtgttctctcttgtatggttgc

SEQ ID NO: 1346 - DNA, 60 bp, Artificial Sequence
  oligonucleotide probe
ggtctttactacggtgtttctacctctcatttgtaactgcattatcttcaaaccaggtaa

SEQ ID NO: 1347 - DNA, 60 bp, Artificial Sequence
  oligonucleotide probe
cccaattctgtctggtacttagaattgtagtgtcttcatcgttaattaaagaaaactgtc

SEQ ID NO: 1348 - DNA, 60 bp, Artificial Sequence
  oligonucleotide probe
aaagggaaacatgatcttgttgtcctgaaagtgatatcttagagtcagagaactatcagt

SEQ ID NO: 1349 - DNA, 60 bp, Artificial Sequence
  oligonucleotide probe
tgtttggtagcagactgtccagaaagcattttaaatgaagaggtctaaacccttaagggc

SEQ ID NO: 1350 - DNA, 60 bp, Artificial Sequence
  oligonucleotide probe
acggagaatcccagctagaactgtgtgtatgtgagttttactatgaagtcctttgaaaca

SEQ ID NO: 1351 - DNA, 60 bp, Artificial Sequence
  oligonucleotide probe
gcccaagggtttcagctgcttttgtatgtatctaaacaaatgtatattttctgagatgat

SEQ ID NO: 1352 - DNA, 60 bp, Artificial Sequence
  oligonucleotide probe
caatgttcagtgattacgtccaaagaacttttgaggttcatagaaaaggtttcgggtgca

SEQ ID NO: 1353 - DNA, 60 bp, Artificial Sequence
  oligonucleotide probe
aatcctggtctgtcgaggatctgaagagaagctctccagcagtggtttgtacctcggccg

SEQ ID NO: 1354 - DNA, 60 bp, Artificial Sequence
  oligonucleotide probe
tttgtgacagtggcagaccctaaaaggaaatgactgctatgaagaggacaagcacatttg

SEQ ID NO: 1355 - DNA, 60 bp, Artificial Sequence
  oligonucleotide probe
tgcacaatatcaccaaactgattaaaatctctgagtcacacaagctcttgaatctggagc

SEQ ID NO: 1356 - DNA, 60 bp, Artificial Sequence
  oligonucleotide probe
tgagcaggtagcagaggctgaataggtggaaatatttaattttcatacctggatttcctt

SEQ ID NO: 1357 - DNA, 60 bp, Artificial Sequence
  oligonucleotide probe
tctgtaaaatgtcccggttttccataacttataaacatgatttctatggaggggtggagg

SEQ ID NO: 1358 - DNA, 60 bp, Artificial Sequence
  oligonucleotide probe
gtggtcctctgtatcacaaggaaatgtcccagaagcaacagaattcacagacagaagcaa

SEQ ID NO: 1359 - DNA, 60 bp, Artificial Sequence
  oligonucleotide probe
atgcgtcccttagcgtcatgagaatgttcgtacttgataagaacttacgagttctgtggt

SEQ ID NO: 1360 - DNA, 60 bp, Artificial Sequence
  oligonucleotide probe
gcctgacactgtttgaactcttactaaagctactggattatctgtcatcttgacacatgt

SEQ ID NO: 1361 - DNA, 60 bp, Artificial Sequence
  oligonucleotide probe
cctaagcaaccaattctcaagaccttgatgattcctggtcctcagctgaaaccgtgggag

SEQ ID NO: 1362 - DNA, 60 bp, Artificial Sequence
  oligonucleotide probe
aggctatgtagtaagggtcagtacatatttgatacagctaatactttttctgaggctaag

SEQ ID NO: 1363 - DNA, 60 bp, Artificial Sequence
  oligonucleotide probe
cctgcattctgcatttgtttcgtgaatgtttgacctacctaaagttcccttcaagccaga

SEQ ID NO: 1364 - DNA, 60 bp, Artificial Sequence
  oligonucleotide probe
cgctacggggtgtagactgtgtctgaaaatagcgggaaccgcccatgtccccgtgggttc

SEQ ID NO: 1365 - DNA, 60 bp, Artificial Sequence
  oligonucleotide probe
ctagtattttgattgtttacagcttggggtattgtgaataaacctatggacatggaaacg

SEQ ID NO: 1366 - DNA, 60 bp, Artificial Sequence
  oligonucleotide probe
caagtggtacatcactgactttgttgaactgctaggagaactggaagaatgatctggact

SEQ ID NO: 1367 - DNA, 60 bp, Artificial Sequence
  oligonucleotide probe
ccccatcccagcctcaatactgcctgagaattattttgtcctgtttgtaaccttgaacat

SEQ ID NO: 1368 - DNA, 60 bp, Artificial Sequence
  oligonucleotide probe
ctgtcctcacattccattcttttgcacttaccttgagctgtgaatgtaaccttgggccaa

SEQ ID NO: 1369 - DNA, 60 bp, Artificial Sequence
  oligonucleotide probe
catctccaaagaggtttacagtacttgatgggaatggaatatgaggatgagaaaaagagg

SEQ ID NO: 1370 - DNA, 60 bp, Artificial Sequence
  oligonucleotide probe
gatggtattgctcacaagcgatactgctgtggttattactgtcatgacttgtgtgtccag

SEQ ID NO: 1371 - DNA, 60 bp, Artificial Sequence
  oligonucleotide probe
tctgaatgtatctttctccccattttaacctgagctgcctaatgcatagttgggtaaggg

SEQ ID NO: 1372 - DNA, 60 bp, Artificial Sequence
  oligonucleotide probe
acagagctatggtgtgtgcaacatcagttgaagctactttaaaaactaacaaatggaaaa

SEQ ID NO: 1373 - DNA, 60 bp, Artificial Sequence
  oligonucleotide probe
gaccttaatgtacacagaggtgtggaaaaacctaggggccacaaaaagtcagctgcaaaa

SEQ ID NO: 1374 - DNA, 60 bp, Artificial Sequence
  oligonucleotide probe
aagccttgacacatctgccaatgaataatggggcagatgacagattgtgattttcaggcg

SEQ ID NO: 1375 - DNA, 60 bp, Artificial Sequence
  oligonucleotide probe
ggtcaagtctgattctgaaatcaagtttaatgtgtctttcaacaataaagtcagcacttc

SEQ ID NO: 1376 - DNA, 60 bp, Artificial Sequence
  oligonucleotide probe
tttttcccgtccctttccctttttaaccctcctggattttttttttaaaccccggaagcc

SEQ ID NO: 1377 - DNA, 60 bp, Artificial Sequence
  oligonucleotide probe
caaagacctctacagaatgatgttcacccctgccccaataaagaaatgacagaatcctta

SEQ ID NO: 1378 - DNA, 60 bp, Artificial Sequence
  oligonucleotide probe
catatgatggaaataacctgtgaattcaatctttcatcgagtgttttaactcccgtgtac

SEQ ID NO: 1379 - DNA, 60 bp, Artificial Sequence
  oligonucleotide probe
tggtagaaaggtctgcactattggggattgatttgatttgatttcctaagactccaactg

SEQ ID NO: 1380 - DNA, 60 bp, Artificial Sequence
  oligonucleotide probe
tagcaacaagagaatagtgggctgcatctgtgaagaggacaactgtactgtcatctggtt

SEQ ID NO: 1381 - DNA, 60 bp, Artificial Sequence
  oligonucleotide probe
agggaatcaatgatattgaagatggctagttgctttgttaagggtttgagtttgcatttg

SEQ ID NO: 1382 - DNA, 60 bp, Artificial Sequence
  oligonucleotide probe
gtctacaatgggattatgcgcttccaagttgatattttacatcaggatttttagtcattc

SEQ ID NO: 1383 - DNA, 60 bp, Artificial Sequence
  oligonucleotide probe
tgaggattgcaacttcaaagaactgattctggaaaaccattacaacacctctgcatcagc

SEQ ID NO: 1384 - DNA, 60 bp, Artificial Sequence
  oligonucleotide probe
aagtccatgccaatcttttatgtaaccaatgccactaatcagttcagaatgtggttctcc

SEQ ID NO: 1385 - DNA, 60 bp, Artificial Sequence
  oligonucleotide probe
tttgatgctggggctggcattgctctcaatgacaactttgtgaagctcatttcctggtat

SEQ ID NO: 1386 - DNA, 60 bp, Artificial Sequence
  oligonucleotide probe
tctgaagtagctggtgagtaactgtggaccagttaattggatatgctcggtcagttgtct

SEQ ID NO: 1387 - DNA, 60 bp, Artificial Sequence
  oligonucleotide probe
tttggaacggagtgcgctttcatatacaggaaactgtttccaaggaaacactttgtaatt

SEQ ID NO: 1388 - DNA, 60 bp, Artificial Sequence
  oligonucleotide probe
ataaacattgattgccttaagaaagttgtactgaggaggccgtgttcttccatggggagg

SEQ ID NO: 1389 - DNA, 60 bp, Artificial Sequence
  oligonucleotide probe
tgggctttactacaatggcttgaaagttctgaatatggcggcagaaaacgatgccaacat

SEQ ID NO: 1390 - DNA, 60 bp, Artificial Sequence
  oligonucleotide probe
agagatctttgggccagttatgtccattctaacatttgagactgaagccgaggttctgga

SEQ ID NO: 1391 - DNA, 60 bp, Artificial Sequence
  oligonucleotide probe
atacaagaagtcaggatttggcagagagaacggccgagtgacgattgagtactattcaca

SEQ ID NO: 1392 - DNA, 60 bp, Artificial Sequence
  oligonucleotide probe
gcatatggctagcaccatggattatatatacccactgaccaattttcattaaattttgtc

SEQ ID NO: 1393 - DNA, 60 bp, Artificial Sequence
  oligonucleotide probe
ctggggagtccacagctatgaatgtatttacttctaacatttcccaaaatgaaatcttaa

SEQ ID NO: 1394 - DNA, 60 bp, Artificial Sequence
  oligonucleotide probe
ggctgatatgatacatgagtggcaatgtatatgatttacttaatggctggtgtaataaga

SEQ ID NO: 1395 - DNA, 60 bp, Artificial Sequence
  oligonucleotide probe
tttaaggtttttatgctctgttacctgtaagctgatacctaaaactttctgcaaagtcag

SEQ ID NO: 1396 - DNA, 60 bp, Artificial Sequence
  oligonucleotide probe
tactacaatggcttgaaagttctgaatatggcggcagagaacgatgccaacatcgccata

SEQ ID NO: 1397 - DNA, 60 bp, Artificial Sequence
  oligonucleotide probe
cccaagatagttttatcctcccgcgcagaaatatgaatccaataaacttggtgacttggt

SEQ ID NO: 1398 - DNA, 60 bp, Artificial Sequence
  oligonucleotide probe
tggctcattaccagagactgtgatatttgaattgatgcagttccctctacagctacagga

SEQ ID NO: 1399 - DNA, 60 bp, Artificial Sequence
  oligonucleotide probe
attgtcaattgtgctgagatggtgacctatgacatcatcaaggagaagctgctggactct

SEQ ID NO: 1400 - DNA, 60 bp, Artificial Sequence
  oligonucleotide probe
tacgagcagctgaaacgggccttgatgaaagtccaggtactgcgggaatctccattttga

SEQ ID NO: 1401 - DNA, 60 bp, Artificial Sequence
  oligonucleotide probe
tcaacccacggatgtggtgaaggtccgatttcaagccatgatacgcctgggaactggagg

SEQ ID NO: 1402 - DNA, 60 bp, Artificial Sequence
  oligonucleotide probe
tgtaaatgtcatggtgctaaggttgtatcaatcctgagacgacacatggccctgtgcttt

SEQ ID NO: 1403 - DNA, 60 bp, Artificial Sequence
  oligonucleotide probe
aaattcatagtaatctgtgtgatcccttccttccaagtgagcgaagaccttgtggcatgg

SEQ ID NO: 1404 - DNA, 60 bp, Artificial Sequence
  oligonucleotide probe
ctctgattaaagtgtccctaatggatgtcacatgtgaaaactgtcatacttaggcccttg

SEQ ID NO: 1405 - DNA, 60 bp, Artificial Sequence
  oligonucleotide probe
tgcacctacaattactttgaacaattggagactctgatttgctgtgacaaagatcatgga

SEQ ID NO: 1406 - DNA, 60 bp, Artificial Sequence
  oligonucleotide probe
agcaacttcttaaaccccaagaagcagaattccaagtcgagttctgtccctatcatcctg

SEQ ID NO: 1407 - DNA, 60 bp, Artificial Sequence
  oligonucleotide probe
attgtgggtgtggatgtaccacgaaggtgcagttgatggacccgatgaccacaggaataa

SEQ ID NO: 1408 - DNA, 60 bp, Artificial Sequence
  oligonucleotide probe
agtttcctcctcatgcattttgttcctagggaataaaaatagccattagacctgaaaaaa

SEQ ID NO: 1409 - DNA, 60 bp, Artificial Sequence
  oligonucleotide probe
atattaccagcatgccagacatctgacactgagcagggcttttccagacaaattctacct

SEQ ID NO: 1410 - DNA, 60 bp, Artificial Sequence
  oligonucleotide probe
ggaattcagtaattccaagttgtatcacaccagttaataaatgtgaagtctccgatcaaa

SEQ ID NO: 1411 - DNA, 60 bp, Artificial Sequence
  oligonucleotide probe
acttatttctctacacccttgctgttggggaaaaaaggcctggagaagaacctaggcatt

SEQ ID NO: 1412 - DNA, 60 bp, Artificial Sequence
  oligonucleotide probe
tgggagctggggactcttcttttatcaagaaggtgaaggaatctttgaagaagcaagcca

SEQ ID NO: 1413 - DNA, 60 bp, Artificial Sequence
  oligonucleotide probe
tatccttccagagttggaacttaagttatatgtggtaggctatattgactccaaattcat

SEQ ID NO: 1414 - DNA, 60 bp, Artificial Sequence
  oligonucleotide probe
tctgactacaacaagattcatccagtggacaagctgaccattcaaggcctgaaggacttt

SEQ ID NO: 1415 - DNA, 60 bp, Artificial Sequence
  oligonucleotide probe
tctccacggactttaatggcgattcccattcttccatctttgatgctaaggctggaattg

SEQ ID NO: 1416 - DNA, 60 bp, Artificial Sequence
  oligonucleotide probe
ctgttttgaaagactgattttgtaaaggtgcattcatctgctgttaactttgacagacat

SEQ ID NO: 1417 - DNA, 60 bp, Artificial Sequence
  oligonucleotide probe
ggggaacacagcgttaagtgtctttcctttattttttaaagaatcaatagcagcatctaa

SEQ ID NO: 1418 - DNA, 60 bp, Artificial Sequence
  oligonucleotide probe
gagctttttaagcttaaacaaatgtatggtaaaggagagatggataagtttcctaccttc

SEQ ID NO: 1419 - DNA, 60 bp, Artificial Sequence
  oligonucleotide probe
ctcaatgtggctcatgaagaaatagaccttcgtaaccccaaaggaaacaaaaagaatgct

SEQ ID NO: 1420 - DNA, 60 bp, Artificial Sequence
  oligonucleotide probe
tgtgacttcttggaaagccacttcctggataaggaggtgaagctcatcaagaagatgggc

SEQ ID NO: 1421 - DNA, 60 bp, Artificial Sequence
  oligonucleotide probe
ttttgggggccatagatatctcctaaacaattccatagtccatagtcagcctcatccaac

SEQ ID NO: 1422 - DNA, 60 bp, Artificial Sequence
  oligonucleotide probe
aaccccgatttcctttgagagctggtgttgtgaagtaccgtgtggcagtgttacctgtgg

SEQ ID NO: 1423 - DNA, 60 bp, Artificial Sequence
  oligonucleotide probe
gacaaagcacttcatctatttttacttgggtcaagttgcaatcctcctcttcaagtcagg

SEQ ID NO: 1424 - DNA, 60 bp, Artificial Sequence
  oligonucleotide probe
tctaagtgagactgtcgttgaagtagctgacctccgtactcctttcttagtacttgccca

SEQ ID NO: 1425 - DNA, 60 bp, Artificial Sequence
  oligonucleotide probe
atgaagccctggtgaaggccctggagtaggcgtactttgtctgtcacccacagggtaaca

SEQ ID NO: 1426 - DNA, 60 bp, Artificial Sequence
  oligonucleotide probe
aaatggacatcatttctggaacactcggtaaagcgttcggctgtgttggaggatacattg

SEQ ID NO: 1427 - DNA, 60 bp, Artificial Sequence
  oligonucleotide probe
atgagttgatgaccaggcataatatctacgtccaggccattaattacccaacagtgcctc

SEQ ID NO: 1428 - DNA, 60 bp, Artificial Sequence
  oligonucleotide probe
gaacagcatgatattactgacatatgcattagtagtatgcagtatcatgtaatgggtact

SEQ ID NO: 1429 - DNA, 2803 bp, Mus musculus
gacacagagagacccaacatacacagacacaacacagacagccatacaccataccacatacatacatatacacaaaatggcgccttacagcctcctggtcacccggctgcagaaggccctgggtgtgcggcagtaccatgtggcctctgtcctgtgccaacgggccaaggtggccatgagccattttgagcccagtgagtacatccgatatgacctgctagagaagaacattaacattgtccgtaaacggttgaaccggcctcttactctctcagagaagattgtatatggacacctggatgacccagccaaccaggagatcgagcggggaaagacatacctgcgtttacggcccgaccgggtggccatgcaggatgccacagcccagatggctatgctacagttcattagcagtgggctgcctaaggtggctgtaccatcaaccatccactgtgatcatctgattgaggcccaggttgggggtgagaaagacctgcgcagggccaaggacataaaccaggaagtgtataatttcctggcaactgcaggtgccaagtatggtgtgggcttctggaggcctggatctgggatcattcaccagatcattctagaaaactatgcataccctggagttcttctgatcggcactgattcgcacacccccaatggtggtggcctgggaggcatctgcattggagtagggggtgctgatgctgtggatgtcatggctgggatcccctgggagctgaagtgtcccaaggtgatcggtgtgaagctgacaggctccctctctggttggacctcacccaaagatgtgatcctgaaagtggcaggtatcctcacggtgaaaggtggcacaggtgctattgtggaataccacggacccggtgtcgattccatctcctgcactggcatggcaactatctgcaacatgggtgcagaaattggggccactacgtcagtgttcccatacaaccacaggatgaaaaagtacctgagcaagacaggccgaacagacattgccaacctagcagaagaattcaaggatcacttagtgcctgatcctggctgccagtatgaccaagtgattgaaattaacctcaatgagctaaagccacatatcaatgggccctttacccctgacttggctcacccagtggcagatgtggggactgtggcagagaaggaaggctggcctctggacatcagagtaggtttgattggcagctgcaccaattcaagctatgaggacatgggacgatcagcagctgtggctaagcaggcattggcccacggactcaagtgcaagtcccagttcaccatcaccccaggctctgagcagatccgtgccactattgagcgggatggctatgcacagatcttaagggatgtgggtggaatcgttttggccaatgcctgtggcccttgcatcggccagtgggacagaaaagacatcaagaagggggagaagaatacaatcgtcacctcttacaacaggaacttcacaggccgtaatgatgcaaaccctgagacccatgcctttgtcacatccccagagattgtcacagctctggccattgcaggaaccctgaagttcaatccagaaactgacttcttaacaggcaaggacggcaagaagttcaagttggaggctccagatgcagacgagcttccccgatcggactttgatccagggcaggacacataccagcacccccctaaggacagcagtgggcagcgggtggacgtgagccctaccagccagcgcctgcagctcctggagcctttcgacaagtgggacggcaaagacctcgaggacctgcaaatcctcatcaaggtcaaagggaagtgcaccacagaccacatttctgctgccggcccctggctcaagttccgtgggcatctggataacatctctaacaacctgctcatcggtgccatcaacatcgaaaatggcaaagccaactctgtacgcaatgctgtcacccaggagtttggccctgtacctgacactgctcgctactacaagaaacatggcatcaggtgggtggtgattggagatgagaactatggtgagggctcaagccgggagcatgcagcactggagcctcgccaccttgggggccgggccatcatcaccaagagcttcgccaggatccacgaaaccaatctaaagaagcagggcttgctgcccctcaccttcgctgacccctccgactataacaagattcatccagtggacaagctgaccattcaaggcctgaaggactttgcccctggaaagcctctgaagtgcgtcatcaagcaccccaatgggacccaggagaccatcctcctgaaccacaccttcaacgagacccagatcgagtggttccgtgcaggcagtgccctcaacaggatgaaggagctgcagcagtgaggagccaggctggctgtcctgacccactctggaccctgctggatgtcacttttgtcacaggtccatgtgcatcatcagagcctaatctggtctgtgcagcatgacctcctgctctaagatggtgaccagacctgcttcctgcctagcctcagcccagtgaaccaccattgagggcgtttaagataatgttccagccccgccttcctgttcagtttggtttctctttgagcagcccatgcaactgtatttatttttgatgacagcactccctctacagaagtttttattctgcctgatcatttcactggtggctgaaggattttagagaaacttgttcttaaaagaaaaaaaaaaagatccatatctattaaaaaaaaaaaaaaa

SEQ ID NO: 1430 - DNA, 1247 bp, Mus musculus
agttttgtatacaatacaaattattgcacatttctaggccatctaagcaaaatttctgtaactaaaaaagtacaataaggattcctaattgtgtagaatcttacagcatctttgataaacatctcagcagaagtgccatttagtctgtgtggaaaataaagaaaaactaactcctggttatctctcttagggacattttaattgtacagacaacataatgtaacaatatctcagcattatataatggctgtaaattacctttccttgtgccgactggaggagcactgtatcatgctctgatgtgtttgctggggcgtcctgctccccgtaggtgtcgtctacgcagcattgagtttattgaaatgtcgctttcactggaagtgcggatgtttcggttctaattgccatataaaagtagagctgtctcttgggtttatcagctttctcattcataggcaatacctcgattttaaatgattagtgagccacttgtttctcaagtgtttggctagttctattaagaaatagttgaatgtcgtgctgttcggagcctcagaagggggtgggggaggggtgaaacagaatctattctggattgggccagcctgaactaggtaatactggcaattaagattctgtgaagattctatgcatatagtagtgtcatttgggtgaaaaagagccgttttaacaattttgagtacgtttggctattctatagcctctttcttccttccccaaagacgttctacttgcctaactctcaaactgttggggtgatacattcctttgggaccagttaaaatacagcgttagggtcggtgacatatgtgactggctctggttcagtattctcttatcttaggtcactgtagtctctcttgtatggttgcccaaaattataatgttaaataatctaaagtgagttcagacaagtaaaatcaagggaaatagaaggtgaattctataacttctgtaagttgcttgatattaaaaggttgagaggcaggttggccccagactgtatacttttctgacactttacctgggaagaaaacatgtacaaaggtcagggtggaggcatgactgaggaggtcggcacagcctgcatgtgtgtgctctctctgccttacgcctcagtctgtggttggaagactttgtactggtgaatggcaatatgcaggtggggcagtgtcaaaagcagtttgatttattaatctccaaataacaataaatctccagctttt

SEQ ID NO: 1431 - DNA, 3124 bp, Mus musculus
gcagagaacaccctgcagaggttttccaagaatccctcggcatggcaagacaaggctgtttcgggtcataccaggtaatatccttgttcacttttgccatcggcgtcaatctctgcttaggattcacagcaagtcgaattaagagggccgaatgggatgaaggacctcccacagtgttatctgactctccatggaccaacacatctggatcctgcaaaggtagatgctttgagcttcaagaggttggacctcctgactgtcggtgtgacaacctatgtaagagctacagcagctgctgccatgattttgatgagctctgtttgaaaacagctcgaggctgggagtgcaccaaagacagatgtggggaagtacgaaatgaggaaaatgcctgtcactgctcagaagactgcttgtcccggggagactgctgtaccaactaccaagtggtctgcaaaggagaatcacactgggtagatgatgactgtgaagaaataagagtccccgaatgccctgcagggtttgtccgccctccgttaatcatcttctctgtggatggattccgtgcatcgtacatgaagaaaggcagcaaggttatgcccaacattgagaaactgcggtcctgtggcacccatgctccctacatgaggcctgtgtaccctacaaaaaccttccctaatctgtatacgctggccactggtttatatccagaatcccatggaatcgttggcaattcaatgtatgaccctgtctttgatgctactttccatcttcgagggcgagagaagtttaaccatagatggtggggaggccaaccgctatggattacagccaccaagcaaggggtgagagccgggacattcttttggtctgtgagcatccctcacgagcggagaatcctaactatccttcagtggctttccctgccagacaatgagaggccttcagtttatgccttctactccgagcagcctgatttttctggacacaagtacggcccttttggccctgagatgacaaatcctctgagggagattgacaagaccgtggggcagttaatggacggactgaaacaactcaagctgcaccgttgtgtgaatgttatctttgttggagaccatggaatggaagacgtgacatgtgacagaactgagttcttgagcaactatctgactaacgtggatgatattactttagtacctggaactctaggaagaattcgacccaagattcccaataatcttaaatatgaccctaaagccattattgctaacctcacgtgtaaaaaaccagatcagcactttaagccttacatgaaacagcaccttcccaaacgtttgcactatgccaacaatcggagaatcgaggatctccatttattggtggaacgcagatggcatgttgcaaggaaacctttggacgtttataagaagccgtcaggaaaatgttttttccagggtgaccacggctttgataacaaggtcaatagcatgcagactgtttttgtaggttatggcccaacttttaagtacaggactaaagtgcctccatttgaaaacattgaactttataatgttatgtgcgatctcctaagcttgaagccagctcccaataatggaacacatggaagtttgaatcacctgctacgcacaaatacctttaggccaaccctaccagaggaagtcagcagaaccaattacccagggattatgtaccttcagtctgattttgacctgggctgcacctgtgatgataaggtaaagccaaagaacaaattggaagaactaaataaacgccttcataccaaaggatctacagaagagagacatctcctgtatggacgacctgcagtgctttatcggactagctatgatatcttataccatacggactttgaaagtggttacagtgaaatattcttaatgcctctctggacttcttataccatttctaagcaggctgaggtctctagcatcccagagcacctgaccaactgtgttcgccctgatgtccgtgtatctcctggattcagtcagaactgtttagcctataaaaatgataaacagatgtcctatggattcctttttcctccctatctgagctcttccccagaagcgaaatatgatgcattccttgtaaccaacatggttccaatgtaccctgccttcaaacgtgtttggacttatttccaaagggtcttggtgaagaaatatgcgtcagaaaggaatggggtcaacgtaataagtggaccgatctttgactacaattacaatggcttacgtgacattgaggatgaaattaaacagtatgtggaaggcagctctattcctgtccctacccactactacagcatcatcaccagctgcctggacttcactcagcctgcagacaagtgtgatggtcctctctctgtgtcttctttcatccttcctcaccgacctgacaatgatgagagctgtaatagttccgaggatgagtcgaagtgggtagaggaactcatgaagatgcacacagctcgggtgagggacatcgagcatctcaccggtttggatttctaccggaagactagccgtagctattcggaaattctgaccctcaagacatacctgcatacatatgagagcgagatttaacttcctgggcctgggcagtgtagtcttagcaactggtgtatatttttatatgggtgttatttattaatttgaaaccaggacataaacaaacaaagaaacaaatgaaaaaaaaaaaaccacttagtattttaatcctgtaccaaatctgacatattaagcctgaatgactgtgctgtttttctcctttaattcttgatgtagacagagttgtgttctgagcagagtttatagtgaacactgaagctcgtgatccaagtagaagcttctacatggtgctgccagttggatattgtgcattgaggaaatactaggtttcccagtgcccagtcaccacgtgtagtcctgttctgtattgaaagactgattttgtaaaggtgcattcatctgcggttaactttgacagacatatttaagccttatagaccaatcttaaatataataaatcacacattcagatttttccctggaaaaaaaaaaaaaaagaaaaaaaaaaa

SEQ ID NO: 1432 - DNA, 1550 bp, Mus musculus
ggtgcagtcggttctgtgctgacctcgctcctccgcattcaccgggctgcagcagtcgccgccatgagtactggcaccttcgtcgtgtcgcagccgctcaactaccgcggcggggcccgtgtggagccggtggatgcttccggcacggagaaagcgttcgagccagccaccggccgagtgattgccactttcgcgtgttcaggagaaaaggaagtaaacttggccgttgagaatgcaaaggctgcctttaaactctggagtaagaaaagtggcctggagcgctgccaagtcctcctagaggctgcccggatcatcaaggagcggaaggatgaaattgccaccgtggagaccatcaacaacgggaagtccatatttgaggcccgcctggatgttgacacttgctggcagtgcctggaatactatgcagggctggctgcatccatggcaggcgagcacattcagctcccaggagggtccttcggctacacccgaagagagccgcttggggtgtgtgtggggataggagcatggaactatcccttccagatcgcctgttggaagtctgctccggctctggcttgtggtaatgccatgatctttaagccttctcccttcacgcctgtgtctgctctgctcctggctgagatctacaccaaagcgggtgcgcctccggggctcttcaacgtggtgcaaggtggggctgccacaggccagtttctgtgtcatcatcgcgaggtggccaaaatctccttcaccggaagtgtgcccactggcgtgaagatcatggagatgtccgctaagggagtcaagcccattactttggaacttgggggcaaatctcctctcatcatcttctcagactgtaatatggagaatgctgtgaagggggccctgatggccaacttcctcacacaaggacaggtctgctgcaatgggactagagtctttgtgcaaaaggaaattgctgataaattcataaatgaggttgtgaagcagactcagaagataaaacttggagacccccttctggaagatacgaggatgggcccactcatcaacgccccacatctggaacgagtcctcgggtttgtcaagttggcaaaggagcagggtgctactgtgctgtgtggtggagaggtgtatgtaccagaggaccccaaattaaaacatggatattacatgacaccttgcattttaactaattgcagagacgacatgacttgtgtaaaagaagagatctttggaccagtcatgtccattttaacatttggaactgaagccgaggttctagagcgagctaatgacaccacttttggactagcagctggggtcttcaccagggacatccagagggcacaccgggtggcggctgagctgcaggctggaacgtgctacattaacaactataatgtcagcccagtggagctgccctttggtggctacaagaagtcaggatttggcagagagaatggccgtgtgacgattgagtactactctcagctgaagacggtgtgtgtggagatgggcgacgtggagtcagccttttgaaa

SEQ ID NO: 1433 - DNA, 1417 bp, Mus musculus
gagcggcggagcggagcggacggcgaggtatcagccgagacaggcggtcggccgggtggcacgaggcggagcgcgggcgtccggggaagctcggagggcgaccagcagtgcgagcgctcggccccggggctgcgggagcagggggataccgcggcggcagcggcctgctgctgcaggacgagcccaggggacaccgcccctgctcgagctttgcttcagcccagcgctgctccccaggggcctgtgcggactcgcctgcgtgacgtgtcacgatgtctgaccggaaggcagtgatcaagaacgcagacatgtctgaggacatgcaacaggatgccgttgactgtgccacacaggccatggagaagtacaacatagagaaggacattgctgcctatatcaagaaggaatttgacaagaaatataaccctacctggcattgtatcgtgggccggaattttggcagctatgtcacacacgagacaaagcacttcatctatttttacttgggtcaagttgcaatcctcctcttcaagtcgggctaggtggccgaggcgaaggtgtccgtggcggcggcagcgatggcaagcaggcggcgttgctgggactgttgcactggggccagcatcaggaagtcctctccaatggctgtgctactgcatggactgtgtactcgatttcatgtgtgtgtcgcagtaaacaaaaaccaaactcctttctgtttagttgcctggggaagaaggctgctttgcgtttgtttttaagacgttaacattatttttttggttgtactgcactaggaaatctctcctacccctccttttctcttctctccctagataaaaataaaaggccctcctcgaagccctaaggactaggagggccgaggaatagaaataggtctgaggtggaagttaagctgcaggtgcctcttgggtggtgggtgctgctgtaggaggccggggaggctgtgaggacagggttaggattggcaaggagaggggcaggaaggtgggggggggggtggtggctctagtaccggggagaatattccacagaactgtgactatggcttggggcaggggtgggtgtgcagtctctaaggggccctaaggtgtgtttgtggtgtgggaatggggagcagactcgtcttgccgtctgtcaggattttaagtaagggctgtgtctttgtgggtcatcttcccatattcttccagccagaagtcgtgttgggaggatgctgggagtagggttagcctgacttcccctttacattctgtctgctccctgcttagccctcgttttttctcattccttcgttctcttagagcagcccctattgttggctggcaagggaatttctggtgactgtagttccttagttaggtcttagcaatcaaaccaaatcaatgcccgtcag

SEQ ID NO: 1434 - DNA, 942 bp, Mus musculus
gttagctgctataagtgccttagttaagatgcccctgtgttataatatgtagtaaatgaagttttggacacaggattctgtgataacctgatgtgactgcagtattctatcaagttctctttgttgttaaatgttcaaggttatagtagaaaaaaaacattcaatcaaacacaatttgccatgaaaggagagaactaaatgtaggcaccagttctgttttctcagagaaggagaagactttctgggacgtacatgtaccaaaatataaatcttgataaccgcagccacaaagccttagtgactttcctctacctggtaagacagagctcttcatgcttttaagaaaagattctgaatgcttcccaccacatctttcttatatttatatgtgttcataaagtactattttgccttacaagaggtatgtgccgacattacaggatttttctactatagtgactccttcacagctttcttaagcctagccctctaaaagctcccttctcatttagatgaaagaaaatgagtatttttgtgattctggtgattgtggtggttgttgttgttgttgttgttgttcccacagatgttcgaaaactcatcttgggtaaattgtttttcaatccacattacaaaaataaagcgaaacaaggagaaaaaaaagcatggaatttactgatttgttatgtgggtttgaaaaataagatattgttttcagttatttataataaagcagtataatgtgtacattgtataatgccaacatgtgtgtagcaatttgatacgcatagctttttgcatttaattaatgcagggcagaaaaattagataactcgaactttgtcttgaagtttctatttcaataaaagctgtgtcatttctatgaaaatgtcttcataggattacattatttcatttaaataaaattgaaaataatgtggc

SEQ ID NO: 1435 - DNA, 1975 bp, Mus musculus
cacgctgcccgccgcggcttcagcggcggcgccgttccctggccgcgcggctccccgacgcacggttcgggcggctcccggcgcggcgcggctgccccggcgttcgggtccccgtggccccgcggctcccgccccgggctgcagggcgcacaggtgggccggtggccgctgggagataggccccccgggggcagcggcggaccatggcgcggagacctggcgtgccggctgcctacggggacgagttctccttcgtcagcccgctggtgaaatacctgctcttcttcttcaacatgctcttctgggtaatctccatggtcatggtggccgtgggtgtctatgccaggctaatgaagcacgcagaagcagccttggcttgtctggcggtggaccctgctatcctgctgatcgtggtgggcgtcctcatgttcctgctcaccttctgcggctgtatcggatcccttcgggagaacatctgccttctgcagacgttctccctctgcctcaccatcgtgttcctgctgcagctggctgctggcatcctgggcttcgtcttctcagacaaggctcgggggaaagtgagcgagatcatcaacaatgctatcgtgcattatcgagatgacctggatctgcagaacctcatcgactttggccagaagaagttcagctgcttggagggatctcctacagagactggtctcagaatatgtacttcaactgctcggaggacaaccctagccgggagcgctgctctgtgccttattcctgttgcttgcccacccccaaccaggcagtgatcaacacgatgtgtggccaaggtatgcaggctctggactacttggaagctagtaaggtcatctacaccaatggctgtattgacaagttggtcaactggatacacagcaaccagttcctgcttggtggtgtggcactaggcctggccatcccccagctggtgggaatcctgctatcccaggtcctcgtgaatcaaataaaagatcagatcaagctacagctctacaaccaacagcaccgagctgacccgtggtactgagaatccttcctgcgcctccttaccatggcgacgagcatctcacggaccagcagcagagggtgctgagagcacccagtgcagatttggattccagcccccaaatgagggcccagtggaaagaagcaagctccagaaggcaggacacagatggctcaggtctccgaaagatgtgcctcatctccccatcctagcctcagcattgtccgaggtttatttcatgctgtttgtaaccttgaacatttgagtttgtgtttttagtttcctctgggcagaggtgtggaaactgcagcggcacagaaagctgtaggattactagctgcatactgaggcacaacagacagctctgttagggctgctgctgagctaggtggacagagtctgctgccagggagtcctggctgtgcacagatactggcagccctgcaggagtccagttggcacaattccacctccagagaggctgggagtgcagcgggcagagcagcgggagcctagggaacctaggggtcggatcgggaccgcagggcacatgggggataggagtgaagggggtatgtttaccaaatgcttgcctagccgcactcccaggtagtcagagtgagctatatcctgctcctccctcgtctccatggaaacaaggctgcaagggcaaggggtataacagcagccaaattcatcctcacccgctctgtaaaatgtttggaaccgtggtccctaaattctgcgtgccggactaagccatacatgcccttgaattcctctctgtctggccttcccgccccagcaagtggggttttctttaacttggcagaggagtggcaccaccacccacccgcatcccctgcaccagaactcagtgtttttacagtgtaagaatcgggaatctggcagaaatggcaataaaagtttgttgacatgggc

SEQ ID NO: 1436 - DNA, 1061 bp, Mus musculus
gtgtggttcaagtccttcctgctctgtgagcttgtgttccagctgcctttctttcccattgcggcatatgccttcttcaaaggaagctgccggtggatccgaatccctgcaatcatctatgcagctcacaccataacgactttaattccaatcctctacacactcctgtttgaggatttctctaaagccgttgctttcaagggacaaagacccgagagtttccgtgaacgactgaccctcgtaggtgtctacgccccctatttaataatccccctcatactcctcctgttcatgcttcggaacccgtactacaagtatgaggagaaaagaaagaaaaaatagggacggccaccagcctggtggggaagaccccacagcacagttgccttttggacaacacaggaaaactgccccaaacatgtttcagcagcatttgaaacaccaacagcagtgcatacaaacaagacagtggtgggagacgtgccaggccttcacctttcagcaggggtgtgaccaagttacagcaaaatggtgccaaagcgctaccacagcactgctaaaaaggccaggtgggaagccggttagctcctgacctggaatgcacacacctgaccaagtcctcacctcgaccttgatagtcaacaaatgagcagtattttgtctctttagcactttttaacatggtttcctgcccacacctccacctctgggagaaaaatatattatagcctcacatgagtccaagccagaaatgggttacagggaaggaaggtgcctccatttctatcttgaacagatagcctgctctgggttattctggtgctggttctatgaacggctctcatgtccctactctggcacctcaccccactgggcttcctagtacgcaggcttgtgagggtgactggactgtccagtgtatgtctgctgcttgttccactgactctacagaaacaaaacccggtgggtgctagacagtgctggctctgcttgcaagccatgttgctgtggttgttacttatgtgtctggtccaaataaaggcagctgctgatttgttgtt

SEQ ID NO: 1437 - DNA, 2012 bp, Mus musculus
gagccggtcacctgacgggcgaccatgtcggacatcggggactggttcaggagcatcccggccatcacgcgctactggtttgctgccaccgttgctgtccccttgatcggcaagctcggcatcatcagcccggcctacttcttcctctggcccgaagccttcctctatcgcttccagatatggaggccgttcactgccaccttttacttccccgtgggcccagggactggatttctgtatttggtcaatttatatttcttatatcagtattctactcggcttgaagcaggagcttttgacgggaggccagcagactatttattcatgcttctctttaactggatctgcatcgttattactggcttagcaatggatatgcagctgctgatgatccctctgatcatgtcagtgctctacgtctgggcccagctgaacagagacctgatcgtgtcgttctggttcggaacgcgatttaaggcctgttacttaccttgggttatccttggattcaactatatcattggaggctcggtgatcaatgagctcattggaaaccttgtcggccatctttatttcttcctgatgttcagatacccaatggacttgggaggaaggaattttctgtccacacctcagtttttgtaccgctggctacccagtaggagaggaggggtgtcaggatttggtgtgccccctgctagcatgaggcgagctgctgatcagaatggcggaggcgggagacacaactggggccagggcttccgacttggagaccagtgaggggcagccctggcctgctcaccagccatgccgagccagatgacagtctcctcccagtgctgggcatgcttagtggccgagctcttgctgccgctcttggacctgacccacactgaatgtagtctttcagtacaagacacatttttaagtcctcaaggaaaatacaagtgttcctcaagtttcatgattttcattcaagtccttactgctatgaagaacaaatatcagctgtgcagatttcaaaactgactcattttctggtgtcttctcttcctccccttccatctgaataatgagctgggcaggaggggttggttaaccaaatccagtcaaagaaccctttcctctcactcatgtccccagagttgcagctagagttgtccacagaagggttttgcctttgacaaacttgctgacttttgccaaagcttggtcacaaagagctgcttcacacatggctctcggccatcacaagcaggactgtaacagtaaggagaagatggagcagctgaggaagctcttcctctgctgtggggcctgcatccgcctgtccgcagtgccgccatttgccgccttctcagatattcatacccaaaggcaccactgagtcagtggtggcccagactgggagtgatgagggttaggactcgttgctaggcacttttctcctctgagccatgtgatcagaaccatagtggagttgctcctgacacaggatgggtttaaataccgcgatccccttgggtttcttccgaggggtgaactgactgtgtgcccagagcatttgtgctgcgctgtgttgtggtaggaggttccagatcacactggccagacacacgtccctggaggcaagcttcgggacactgattccgttccatcctcgttgcggatgtgtgttcaccgagtcggtggagaaaagagtgtcaggctctaaattttttgttcattgttttttgtcccaggccttttctggtcgagtgtttgtgttaatggcaagggaagtacaactcctcagatgtgtgtcgatcagtttttaaggctaatagaggcacatctgaatgagtcactcataattagaggttccaatagctttaggatcatttgcgtttggaggtcattattatcttgagtcatgcatgtatactctttgtgaatcagacctgctcccttttcataggtgggcttttgccagcagagctcagcttatcactaaataaagttttctgaaggcc

SEQ ID NO: 1438 - DNA, 3494 bp, Mus musculus
gccttctgtatattgcctgggcagcgagaggccggtgagtctgcctcgccgcggtggcgatctggtgtacaccgcattaccccaggggtgggcgccgcagcgtcggccacagggtgctgtgcgggggtaggggtcacttcctccgtgagcgagcacaggtccaggcagaggaaagaaactcttgggaggcaattttgactgctctaaggctgctggctttgagccagactggccggctgtgcaaccttaggcaagtcactcacctccttgcaaacctctggcattttggatccatgtcatctgggtttcgagagagatttaaaggcctcgttctctgtacgttatacttctgtgaatgtatcaaggaggtttgtcccaggctcccgaaactggaggaagaggctggaagcacactcagtggagggaggtgaaggagtaattggaagagaagcgcatgtgaagcaatgactttgctttgccctgctacctctagttttcaaagccagttgaataagcttttttgtctccagctaccctggaaaagaaactgtcttttcccttctctttctccaggaaccttcagctgccctatcccatggccaagggtatcgtccctgtggaagaccagccaggaactcaaagcctgaggctggggccagaccccctgctgtccccatcatggtcaatgacccaccagtccccgccttactgtgggcccaggaagtgggccacgtcttggcaggccgtgcccgcaggctgatgctgcagtttggggtgctcttctgcaccatccttcttttgctttgggtgtctgtgttcctctatggctccttctactactcctacatgccgacggtcagccacctcagccctgtgcacttccactacaggtgagaaggctgctccattcaagtagatggatcttaacttgaaaattacttcagggacttgtggagtctctcctctgttgaatcccagtattgaccgagggtgaaatcttattctagtgtgctatcaggacttctgccctcctgagccaaggcttgagcaggtctgggctggtagggctttagggttctaggtctgcctctgctggaaattgtggttaagaactgagaaaaagagcctggtcacgtgtgtaataccagtctggggaggctgagttgggagaattagcatgagttccaggccagcctggaagacaggttgagaacttgtctcaaaggggtctaaaaaaaaaaaaagactaggaaaagaaagtcacttttagccgggcagtggtggtgcatgcctgtaatcccagcacttgggaggcagaggcaggtggatttctgagttcgaggccagcctggtctacagagtgagttccaggacagccaggactgcacagagaaaccctgtctcgaaaaaaaaaaaaaatcacttttagaccaagtagggctcagcgtctgttctgttgaggttgcatgaaacctttgagccaattcaactgccatggcatctaaaaattacactggctttattaacacgtgagctattaggaaatacctcctttgccttttagtgtactgccactcacccccaatggtacattcagtaacccaaggcagtcctactgctaacctagccttcgagttcatatccattttactcacactgccaaagtctctgtatgtctcccagcaatggctatgagacaaattaacatatacagaaaacgcttttatgatcattggtttaaaacctttttttcccctgtcccaaatccctaatcttgtgttgtcatttctaaggtagacccatgtaaacacttagggaacatgaatccttttttaataattatttttgtttcatgtgcattggtgtttcgcctgcccgtgtggttgtgtgaaggtgtcagatcccctgcaactggagttacaggcggtcgtgagctgccacgtggttgctgggaattgaactcaggtcctctgcaagagtaaccagtgctcttgaccaatgggccatctctccagccccaagggagcacgagtcttacatacatggggtatatgtatgtatactgaggtaggagctgtgtaccatatactatgtgcagttttgcgtataatttatctttaaaagacatatccataggtcctttaggatgaatttctttttccaacctagtccagaactgctgaatcagactctttaggagagggaccctaaaatccacatgccctgagatcttcaagggagcctatagaaaccctgagtgtccttcggctcctccctatgggttctgttctcatgaggaagagaatgaaagtcttattaggatctcctgactctagtgtccacttctgttctccatttcctgtaatggggaaaagggatgagtgaggggaggggccctagagactaggtgtgtgagcaggtaggctgggcaggctggcacctcacaaagcattgttcatcccttctcatttaggacagactgtgattcctccaccgcctctctctgctctttccctgttgccaatgtctcactggctaagagtggacgtgatcgggtactgatgtatggacagccatatcgagtcaccttagagcttgaactgcccgaatcccctgtgaatcaagacttgggcatgttcttagtcactgtttcatgttataccagaggtggccgaatcatctccacttcttcacgctcagtgatgctgcattaccgctcgcagctgctccaggtgctcgacacgctgctgttctccagcctcctgctgtttggcttcgctgaacagaagcagctcctggaagtagaactctactctgactatagggagaattcgtatgtgccaacaactggagcaattattgagatccacagcaagcgcatccagatgtatggagcctacctccggatccatgcccacttcactgggctcaggtacctgctgtacaacttccccatgacctgcgccttcgtgggtgtggccagcaacttcacgttcctcagcgtcatcgtgctcttcagctatatgcagtgggtgtggggtgctgtctggccccgccaccgcttctctctgcaggttaatatccgacaaagggataactcacaccacggggccccgcgtcggatctcgcgccatcagccaggtcaggaatctacccagcagtcggatgtgacggaggatggtgagagccctgaagatccctcaggaacagagggccagctgtctgaggaagagaaaccagagaagcggcccctgaatggagaggaggagcaagagccagaggctagtgatggctcctgggaagatgcagctttgctgacagaggccaacccacctacctctgcctcagcatctgcccttgcccctgagactctgggtagcctcaggcaacgcccgacctgctccagttcctgaacaaagggtgaattcctcacattccagcgctttcccatcatacaccttttcccttgctcccttaataaactattttgtggc

SEQ ID NO: 1439 - DNA, 665 bp, Mus musculus
ggaggctagacttccttccggaagtgacccacgtgcttcttatttcgcctgccttggtacccggtaactttttactattgacccgaagttgggggcgttgcgggagctgtgacctgccccaggccgtggactaaagaccaggaggctattctctccacggtgctaagttgacatggatccgctcagagcccagcagctggctgcggagctggaggtggagatgatggctgacatgtacaacagaatgaccagtgcctgccaccggaagtgcgtgcctccccactacaaggaggcagagctgtccaaaggcgagtctgtgtgtctggaccgatgtgtatccaagtacttggacatccatgagaggatgggcaaaaagttgacagagctgtcaatgcaggatgaggagctgatgaagagggtacagcagagctcggggcctgcatgacgccccaggctgtctacacctgaggtgtaccttgccacttgcctgattaaagtgtccctaatggatgtcacatgtgaaacctgtcatacttaggcccttgagcatctccaggacccctgcgtgtagtagagctctcctggctgaagaaggggacttgtcacgctggtttgtgactgtgtatgtgtgtatatgtatatatcttattaaaacaaatttgtgc

SEQ ID NO: 1440 - DNA, 1713 bp, Mus musculus
cagcatctcagttatggcctcagaaaagcctcaggacctaatggtcacctgcacggcgccggtcaacatcgcagttatcaagtactgggggaagcgagatgaagcgctgatcctgcccatcaactcctccctgagcgtcacgctgcaccaggaccagctaaaaacgaccacaaccgttgccattagcaaggacttcacagaggaccgcatctggctgaatggtcgcgaggaggacgtggggcagccacggctccaggcctgcctgagagagattcgccgcctggctcggaagcggaggagcacagaggacggggacactctacccctcagcctcagctataaggtgcacgtggcgtcagtgaacaacttccccactgctgcaggcctggcgtcctcagccgcaggctatgcctgcctagcctataccctggctcaggtctatggggttgagggagacctctccgaagtggctcggcggggctcaggcagtgcgtgccgcagtctctatgggggctttgtggagtggcagatgggggaacaggccgatgggaaggacagcatcgcccggcagatagccccagagtggcactggccccagctccgaatccttatccttgtggtgagcgccgacaagaagcagacgggcagtacagtgggcatgcagaccagcgtggagaccagcaccctgctcaagttccgggctgagtctggtgtgcctgagcgcatgaaggagatgacccgctgcatccaagagcaggactttcagggctttggccagctgaccatgaaggatagcaaccagtttcatgccacctgcctggacaccttcccaccgatctcctacctcaatgacacctccaggcgcatcatccagctagtccaccgcttcaacacccaccaggggcagacgaaggtggcatacacatttgatgctggccccaacgctgtgatcttcactctggaggacactgtggctgagtttgtggcagctgtaagacacagctttccccctgcagccaatggagacaagttcctaaaggggctgcaggtggcacctgttcttctctctgatgagctgaaggccgcgctggcggtggagcccagccctggtggggtccagtacatcattgccactcaggtcggaccaggacctcaagtcctagacgacactcatgatcatctgctaggccaggatggactgccacaacgggacctttgacctcttccacgtccagtgccatttggagaaaggggttgcccactggaactcgggagttggcctgctggtcagcctctcctgaagggctgcttgatgatcgattatactgggggatgtcgagtgtgatgggcagccatctaggcgatcacgggaacccctctcaagtgcctccggttccccgctggtttctgaagggctagctgacccactcgatggaccttccagcactccagacagctgctcatcagggatggggagtcggtgcctcccccctcccccaagatgctctgagggcctcagtaaccatctaagcgtgatggctcagacagcggtgcctctctgctgagactcaggccacagtttctttataaagcctcctggtgagggtaggggctgtcgagcccacaggtagggtccattgtgtgtgtgggtgcctcatgagggtgcagtcagtggacctgaggaccacaggaataaagtgtgctgttcctgcc

SEQ ID NO: 1441 - DNA, 1142 bp, Mus musculus
agcgtggtgaaggtggcaggagcaacgcgggtcttcccgctgttgcttgtcgcggccacgggcgagcatacgtccccggcctgaggtggtggtggcgagcccaccgccgtttgctgcgacctcatggaaggtggcggaagaagtagcaacaaatccaccagcgggttagctggcttcttcggagccggaggagcgggttactcgaacgctgatttggccggcgtcccgctgactggtatgaaccccctgtctccttatttaaatgtggatccacgctatctcgttcaggatactgatgaatttattttgccaactggagctaataaaacccgaggcagatttgaactagctttctttaccattggaggatgttgcatgacaggggccgcattcggggcaatgaacggtcttcgtttaggattgaaggaaacccagagcatggcctggtccaaaccaagaaatgtacagattttgaatatggtgactaggcaaggagcactttgggctaatactctaggctccctggctttgctctatagtgcttttggtgttatcattgagaaaacacggggtgcagaagatgacctcaacacagtagcagctggaaccatgaccgggatgttgtataaatgtacaggtggtcttcgaggaatagcacgcggtggcctggcaggactgacactcaccagtctctatgcactgtataacaactgggtgcacatgaaaggttccctgctccaacagtcactctgaagatttttggcacctcaggaatgggggacacttcatagtcatccagatcaattaataagccagtctggagttgctttctgtcttgtacctacagttactttgaacaattggagactctgatttgctgtgacaaagatcatggatggttagcctggactgcactgcttgcctttcgtgagtggaagccaaccccttggtggctcactgagtatgtgttctcttctcctttggagatgatcttgcaccccaaactggaaaaccacttactctccaaattcaggccatactttttattaccatgttaattcatttaaaaaatctaaaacttaaatgttgccctgttttccaaataaagggtgaaaacagaaccaaagtcataattccaacgt

SEQ ID NO: 1442 - DNA, 1116 bp, Mus musculus
ctggagttgccggaggcatcagcagatcccagccgagccttgagtgaggactgtgatctgccttacgggtcacctcactcaggactcagcgcacgcacgttgcagcagctccagaccccattgctaccggaaagttacaggtaccggaaccgaaaagaccagcgcggcccaggaaccgcggaggaaaacttcccaggatggtctcccactcagagctgaggaagctcttctgttcagcggatgcagtgtgctttgatgttgatagtaccgtcatcagagaagaaggaatcgatgagctggccaaattctgtggtgtggaggccgcagtgtctgaaatgacacgaagagccatgggaggagcattgccttttaaagacgcactcactcagcgcttggcactgatccagccctccagggatcaagtccagaggctcctagctgagcacccgccacatctgactcctggcataagggagctggtaagccgcctccaggagcgtaatgtccaggtgttcctcatctctggtggctttcggagcattgtggagcacgttgctgcaaagctcaatatcccaacaaccaatgtgtttgccaataggctgaagttctactttaatggtgagtacgcaggctttgatgagatgcagccgacagccgagtcgggtgggaaaggaaaggttattcggtttttaaaggaaaaatttcactttaagaaaataatcatgattggagatggagctacggacatggaagcctgccctcctgccgatgctttcattggatttggaggcaatgtgatcaggcagcaggttaaggacaacgccaagtggtacatcactgacttcgtggagctgctgggagaactggaggagtgatcctgacttcccgctcactcagaacaactccaccttctcaaagccacacagttaggctcctgggagaatctaggagacagctatttttttctactgtagttctaatattaatatgactactaattacatggagaattttatactctgaattctttgtgtatattcttacaaacattttacttgtagctttctgaggtgcacagtaaattaaagacttttactcttgaaaaaaaaaaaaaaa

SEQ ID NO: 1443 - DNA, 2106 bp, Mus musculus
atggaactgggcccgagccccccaccgcgccgcctgttcttcgcttgcagccccacgcctgcgtcgcagcccacggggaagatgctgtttggcgcatcagctgctggcggactgtcccctgtcaccaacctgacggtcaccatggaccagctggaaggactgggcagtgactgtgagaaaatggaagtgagaaataacagcagtctacagagaatgggctcctcagaatcgaccgattcaggtttctgtctagattctcctgggcccttggacagtaaagaaaaccttgaaatttccctgacgagaataaattccctacctcagaagctcctgggatgtagcccagccctgaagaggagccactctgattctctagaccaagacacctttcacctcatcgaccaggataaaaataaagaaaatgaagcatttgaacccaaaaagcaatacgacctgcatctttcgtcacatctacaggagagtaaagatctttacacacagaggcagaattcagcccagctcggaatgctatcttcaaatgaaagtgaatcaggaaatttcagtcctctttttactccccagtcacctgtaaaagccactttgtccgatgaggatgatggcttcatagaccttctggatggcgagaatttaaagaatgatgaggagacccctactagcatggtaagcctctggacagctccccttgtcatgaggagacctgcaaaccttgccgatcggttgcgggggctgtttgactccccttccccgtgcggctccagcactcgggcggtgttgaagagagcagaccggtctcacgaggagcctcctcggggtacaaagaggaggaagagtgtgcccagccctgtgaaggcgaaggcggatgttccggagcccgcccagcttccatcccagtctctatccctgatgtcttcccccaaaggaaccattgagaacattttggacagtgacccaagagaccttataggagatttctccaagggttatctctttaataccgtctctgggaagcatcaggatttgaaatatatttctccagaaattatggcatctgttttgaatggcaagtttgccagtctcattaaagagtttgttatcattgactgccgatacccatatgagtatgaaggaggtcacatcaagggtgccgtgaatctgcacatggaagaagaggttgaagacttcttacttaagaaccctattgtgcctactgatggcaagcgtgtcattgtcgtgttccactgtgagttttcctctgaaagaggccctcgaatgtgccgatatgtgagagagagagataggctcggcaatgagtaccccaagctccactaccctgagctgtatgtcctgaaagggggatacaaggagttctttttgaagtgccagtctcactgtgaaccccccagctaccggccaatgcaccatgaagactttaaagaagacctaaagaagttccgcaccaagagccggacctgggcaggagaaaagaggaaaagagagatgtacagtcgcctgaagaagctctgaagccaaatggtagcagcctgagcttctctgccccgtcccttttccctttgtcgcagagcagtaagcaaaggggccagctgtacggtaacctggagaaagacctgggccttccattccttggacctgtctcctacactcccaggttggagcctaggcaccctgccgttacactcttctgttctgtaagagtccttccctgtcaggactgtctgccaagctgacaagcacagcacagactggagtctgcaacaccgtgttagctgctctcactgagcatcccatgaagaaggccttattggtagaccctggcctgtcacaggagagaaaagccgccaagtgctgctggccaaataccaaagataggctgcaagggaggagagggcctcgtggatgactcttaactttaatttattcagcttcatcaattattttattattgttttaattcaagacttttacttttctgcttcattaagtcaaaatactgccattctaggtagagttttatcatcctaggagctacctctacttttaatttaaaaaaaaaaaaaagaaggaatt

SEQ ID NO: 1444 - DNA, 3778 bp, Mus musculus
gcccgggcaggtgttgtcatcgctttggtgcctgtcacttctgtcgccacctcctctgcccccagcactggttctccgtcatgaatcccgatctgcgcaaggagcgggccgccgccaccttcaatccagagttaatcacgcacgtcttggatggtagtccggagaacacccggcgccgtcgagaaatcgagaacttgattctgaacgatccagacttccaacatgaggactataacttcctcactcgaagccagcgttacgaggtggctgttaagaagagtgccaccatggtgaagaagatgagggaatttggcatcgcagaccctgaagaaatcatgtggtttaaaaaactacatatggtcaattttgtggaacctgttggcctcaattactccatgtttatccctaccttgctgaatcagggcaccactgctcagcaggagaaatggatgcacccgtcccaagaactccagataattggcacctacgcccagacggagatgggccacggaactcatcttcgaggcttggaaaccactgccacatatgaccccaagacccaagagttcattctcaacagcccaactgtgacttccattaagtggtggcctgggggrcttgggaagacttccaatcatgcgatagtcctggctcagctcatcactcgaggggagtgctacgggttacatgcctttgttgtccctatccgtgagattgggacccacaagcctctgccaggcatcactgttggggatatcggccccaagtttggttatgaagagatggataatggctacctgaagatggacaattaccgtattcctagagagaacatgttgatgaaatatgcccaggtgaagcctgacggcacgtatgtaaagcctctgagtaacaagctgacatatgggrccatggktttcgtaaggtccttcctcgtgggaagtgcagctcagagtctgtccaaggcatgcaccattgccattcgatacagtgctgtgaggcgccagtctgaaatcaagagaagcgagccagagccccagattttggattttcagacgcagcagtataaactcttcccgctcctggccaccgcctatgccttccactttctcggaagatacataaaggagacctacatgcggattaatgagagcattggccaaggcgacctgagtgagctgcctgagcttcatgccctcacagctgggctgaaggcttttactacctggacagccaatgctggtatcgaagaatgtcggatggcttgcggtgggcacggctattctcacagcagtgggattccaaatatttacgtcacgtttaccccggcctgcaccttcgagggggagaacactgttatgatgctgcagacggccaggttcttgatgaaaatctatgaccaggttcagtcggggaagctggtgggtggtatggtgtcgtacttgaatgacctgccgagccagcgtatccagccgcagcaggtggcagtctggccaactctggtggacattaacagcctggacagcctgacagaagcctacaagctacgtgcagccagattggtagaaattgctgcaaaaaaccttcaggcccaagtgagtcacaggaagagcaaggaagtggcgtggaacttgacttctgtcgaccttgttcgcgcaagtgaggcgcactgccactacgtgaccgttaaggtctttgcagataaactccccaagattcaagacagagccgtgcaagccgtgctgaggaacctgtgtctcttatattctctctatgggatcagccagaaaggaggggattttcttgaggggaacatcatcacaggggctcagatgtcacaggtaaacagtcggatcctggagctgctcacagtgactcgccccaacgctgtggctttggtggatgcctttgactttaaggatgtgacccttggctctgttctcggccgctatgatggcaatgtgtatgaaaacttgtttgagtgggccaaraagtccccmctgaacaagacagaggtccaccaatcttactacaagcacttgaagcccctgcagtcgaagctttgaagtttccccagggacaagtctgagctccacagagcggccgaatctctccttgattcactaatccttgtgaaatcgtcttcagacttgtgtagctatagagcaaatgatgggctggcctttccctctctataagtaaagagaaatgagcagacttagagatgaaatgagaatccagtgttgtaggtgcagtagtagcccaggccgacgtaggacctcgggaagccactgccgcgctgtggcctggctgacgttatttgttctgctgctaatctctgtaggccttgactctggggggaattaacagattttaactactaaatacttagtaattttcacattttcactgctaatcactggatatatgttttttaaacaaaggtgttctatagagctggactttccaggcttgcttgcctatgcactttctgatctaccactaagagcaggagtttgggggccagaaactaattagaaacccagattgtgagtgtgtggcccttacatatgcccctgctgcctgctgtgtgggtgtgtcattcctaccaactgtcacactaacatatcaacaagaggagtccttaaacacccacccaccaagaaagcagcgctccgggactaagctcccactctggtcttcctggcaatggcatgcacccgcccatgacccacttcctgacacagctaagttgcttgtctttacctccaggctttcggccgttgcctggacttcaatcatggtggctgaccttccctttcttgccttgcttctcctcaaagagataatagagacaatgaccagtctttcctcatagactcaagtatggggagagccctcagctatggtattccgtagtaatttaggtgactttgttaagtaaattcctgggacaatccagatttgaagactatcgtcttgttgttgtcataaactattaaaatgcttggtcgctaacaaagtatttgacataaaaataaataaataaatcattcaggccaccttttacaccaggaatcacaggaaagccctgggccccagccatctgctgagtgttagttgagaagatggatcctaagccagctgaagaatgagtgcaggctgtgggggaggttcttgctggagtagctggctttgttggtaagctgtagcagccttacagggtggcgaagcagcccccctttggatgcagagcagcctctacaatcattctgaccttaaaggtagagtatggaccttttgtggtatgtgtgtgtatgcttttttttatgtagtgatttttttttttcttcttgagacagggcccagagttggccttgacctctgatcctcagcctcccagatgctggggttacaggtttgcgctgacatgcctggctagtcggaactctttgttcttaaaagcacagtagagagatcattgtgacctattaagtctgtgtctgtggcattggcatcgtgagaacagttctttcagagcagttctgagaacacagtattaatggagtggaattgactattcaagtcaaagccatcagatttgctgacacaagtcttaacctttctcctggaatcaaggtctgataatccctgaagattgacagtaagcagcatgtcacctgtggggtttctatttgacagtaagtcatattctggaaaaatagcaaataaatttaaatgactaaaaaaaaaaaaaaaaaaaaaaaaaaaaaaaaaa

SEQ ID NO: 1445 - DNA, 1300 bp, Mus musculus
gaggtggctctggaccgggcggccactgcgcagagtggaggtcgttggagtcactcgtcttcttgtagctcctgccagtagctccgtgtcccgcccgccctagccatgctgtccgctctcgcccgtcctgccggcgccgctctccgccgcagcttcagcacttcggcccagaacaatgctaaagtggctgtcctgggagcttctgggggcattgggcaaccctttcactcctgctgaagaacagccccctagtgagccgcctgaccctctacgatatcgctcacacacctggtgtggcagcagatctgagtcacattgagaccagagcaaatgtgaaaggctaccttggaccggagcagttgccagattgcctcaaaggttgtgatgtggtggtcatcccagccggagtgcccaggaaaccaggaatgacacgggatgacctgttcaacaccaacgctaccattgtggccaccctgacggctgcctgtgcccagcactgtcctgaagccatggtttgcatcattgccaacccagtgaactccaccatccccatcacagcagaagttttcaagaagcacggtgtgtacaaccctaacaagatcttcggtgtgacaacccttgacatcgtcagagcgaacacgtttgtggcagagctaaagggtttggatccagctcgagtcaacgtgcctgtcattggcggccacgcggggaagacgatcatccccctgatctctcagtgtaccccgaaggttgactttccccaagaccagctggccacactcaccgggaggatccaggaggctggcacagaagtcgtgaaggccaaggctggagcaggttctgccactctgtccatggcttatgctggagcccgctttgtcttctccctcgtggacgccatgaacgggaaggaaggagtcgttgagtgttcttttgttcagtccaaagagacggaatgcacttacttctctacgcccttgctcttggggaaaaagggcctggagaagaacctgggcattggcaagatcactccttttgaggaaaaaatgattgccgaggctatccctgagctgaaagcctccatcaagaaaggcgaggactttgtcaagaacatgaagtgagaggtgtgagcctcgagcagcagcagcagcagcatcctaacttattcagcatcatgtctttggaaccacttgagaatctagtttgcgttgatggagggtgttgagtcagcatcagcatctcttccaaattatgtctggtctgttgataatgacagtaaagcaggctctgattttctttt

SEQ ID NO: 1446 - DNA, 2642 bp, Mus musculus
gaattccgggctgagtgtggagcccgaggccgagggcgactgctctcgctgccccagtctgccggccgcccggccccggctgcggagccgctctgccgcccgccgtcccgcgtagaaggaagcatgctgaccgtcggctgcacgctgttggtcgccctgctggccgcgcccgcggtcgcgctggtcctcgggagctgccgcgcgctggaggtggcaaatggcacagtgacaagcctgccaggggccaccgttaccctgatttgccccgggaaggaagcagcaggcaatgttaccattcactgggtgtactctggctcacaaaacagagaatggactaccacaggaaacacactggttctgagggacgtgcagctcagcgacactggggactatttatgctccctgaatgatcacctggtggggactgtgcccttgctggtggatgttcccccagaggagcccaagctctcctgcttccggaagaacccccttgtcaacgccatctgtgagtggcgtccgagcagcaccccctctccaaccacgaaggctgtgctgtttgcaaagaaaatcaacaccaccaacgggaagagtgacttccaggtgccctgtcagtattctcagcagctgaaaagcttctcctgccaggtggagatcctggagggtgacaaagtataccacatagtgtcactgtgcgttgcaaacagtgtgggaagcaagtccagccacaacgaagcgtttcacagcttaaaaatggtgcagccggatccacctgccaaccttgtggtatcagccatacctggaaggccgcgctggctcaaagtcagctggcagcaccctgagacctgggacccgagttactacttgctgcagttccagcttcgataccgacctgtatggtcaaaggagttcacggtgttgctgctcccggtggcccagtaccaatgcgtcatccatgatgccttgcgaggagtgaagcacgtggtccaggtccgtgggaaggaggagcttgaccttggccagtggagcgaatggtccccagaggtcacgggcactccttggatagcagagcccaggaccaccccggcaggaatcctctggaaccccacacaggtctctgttgaagactctgccaaccacgaggatcagtacgaaagttctacagaagcaacgagtgtcctcgccccagtgcaagaatcctcgtccatgtccctgcccacattcctggtagctggaggaagcttgcggtttgggttgcttctctgtgtcttcatcatcctgagactcaagcagaaatggaagtcagaggctgagaaggaaagcaagacgacctctcctccacccccaccgtattccttgggcccactgaagccgaccttccttctggttcctctcctcaccccacacagctctgggtctgacaataccgtaaaccacagctgcctgggtgtcagggacgcacagagcccttatgacaacagcaacagagactacttattccccagataatcatctggatggtacctggcagctggcagggcaccacgagatcagcacacaagtttctcatgcgggtcccatccacctggggtgggtggggcgggcggggctgcagcttcactaacccacaagagctctgcacaggttctgagtaggtgcagctggtgctcgataggctctgaaggaaggaaggggctgtgaggaacacaggccattgtgaagacagcttgtgatgactgaatagagatgcccgtcagctccacatctgatagtggctcacaagctgcaccctcaggaggcctcagaaaggggctccaaaggctgccccagctgcctcgctctgcctcactgccccaagccaccttttagctctcgaactcctaaagtccaagcactttgccattctctttccgaggccactgaggccgggtggaagcttggttccgatttccttctcaacatctggaaagcagctgggcccggtggtggtgactaatatctcagggcctgatggtttacgcgagtgacaatttctcacaagcagtttttaaatgtgaatgatgaccccaggcactgctggctgcggaggcttcattttcctcttcgatctcaggacttcaggcgaaaagcggagtgaagtagagagcggatgggtgtccaccgtcctcatggtacttgcgggaggtacagcctggaaaacacgtttcctgtccccctactctcccaggagagggatgatggtagggggtgcctcttccagggcggagagaactactttaccccagccttgcccattctgatttcaactggactggagctactaggaaagtcgacattcatgcaaaaagaaaaaacgttaactagcaagaatgcactttcattttggtttttagagaactgttgcctgtttctctcaagagtctggaagaggccgctcactgcacactactgtatgaaccctcactgcccaccctgcaggaccaagtgcagtaacggtagcccaaacaccaagtcaagtgaaaatcgagggaaaaaaaaaacaaacaagcaacaaaaaaaaaaaaaaccaaaactaaactaaaaaacaaatcacccccccaaaaaaaaacaaaaccaaaaaccaaaaaaaaaaaaaaaaactcgag

SEQ ID NO: 1447 - DNA, 1721 bp, Mus musculus
aattccgggcgctggcagctggacagccgcgagtgggaggacccgcgggcgatccggaggatccccgggtgcccggcgccggttcagtcctcgcccttatctgatggtagatcctgcctccaagtgacagacacaaccattgtttattgggtcacataccaggggctgcgatggacctggttctcagtgccgccgattactacttcttcactccgtatgtatatccagccacgtggcccgaggacaacatcatccgacaaactattagcctcctgattgtcacaaacctgggtgcttacattctctacttcttctgtgcaaccctcagctattattttgtctatgatcattccttaatgaaacacccacagtttttaaagaaccaagtctcgcgtgagatcgtgttcactgtcaagtctttgccttggatcagcatccccaccgtctcactattcctgctggagctgaggggttacagcaaactctacgatgacatcggagactttccaaatggctggattcatctcatggttagcgtcgtatccttcctctttttcacagacatgttgatctacaggattcataggggcctgcaccacagactggtctacaagcgcatacataaaccacatcatatttggaagatccccacgccgtttgcaagtcatgcttttcaccctgtggacggcttccttcagagtctgccttaccatatatacccctttgtctttccactgcacaaggtggtctacttaggtttatatgtcttggttaatgtctggacaatttctattcatgatggtgattttcgggttccccagatcttaaggccatttattaacgggtcagctcaccacacagaccaccacatgttctttgactataactatggacagtatttcacattgtgggatagaattggaggctcttttaaacatccttcctcttttgaagggaaaggaccacatagttacgtgaagaacatgacagaaaaagaatctaacagctttgcagaaaacggctgtaaaggcaaaaaagtaagcaatggagagtttacaaagaataagtagattattgcccaattattaactattttaaataagaaaataatctacacagtcaagatacctagcaaataagtggtgccattggaatgtcagcattgcttgagtgtcatgctgagggatggtcctgacagtaaacagcgggaagacaccaggagcatgtaatcgcttggttaattgtccgacattggtccaggaacaacttgtcttttcagccggctgacctgcagcctgtacagctctgaagcatctttaaatacgatagaaaataagttactcaagaagctggtctgtgtccttttgccttagtccatgcataccattaaggaaaaaaagtaccattgtgctaaacgctactgagactaaccaggaaaccctaaagatgaagatgttcctggccccggagcggctggctccaccgcagtgctggggagttgcaggacttcattcaaataggaatatcagtccaagcaggctgatacgtgagtggcagtggataggatttgcttaatggctgatgtaataagattgtacttcctatacagaggcaccttactctctggggcattatcagattttaataaatgaataaataaatggtattttttttaaaaaaaaaaaaaaaaaaaaaccggaattcctgcagcccgggggatc

SEQ ID NO: 1448 - DNA, 585 bp, Mus musculus
atgcgcaaatggatactgacacggatcctgccaactctgctctacagatcatgcttccacctcgtctgtctagtgggcactatatctctagcttgcaatgacatgagtccggagcaaacggctacgagtgtgaactgttccagccccgagcgacacaccagaagttatgactacatggaaggaggggatataagggtgagaagactgttctgtcgcacccagtggtacctgaggattgacaaacgaggcaaagtgaaagggacccaggagatgaagaacagctacaacatcatggaaatcaggaccgtggcagttggaattgtggcaatcaaaggggtggaaagtgaatactatcttgccatgaacaaggaagggaaactctatgcaaagaaagaatgcaatgaggattgcaacttcaaagaactgattctggaaaaccattataacacctatgcatcagctaaatggacacacagcggaggggaaatgttcgttgccttaaatcaaaaggggattcctgtcaaagggaagaaaacgaagaaagaacaaaaaacagcccattttcttcctatggcaataacctaa

SEQ ID NO: 1449 - DNA, 60 bp, Artificial Sequence
  oligonucleotide probe
tccgactataacaagattcatccagtggacaagctgaccattcaaggcctgaaggacttt

SEQ ID NO: 1450 - DNA, 60 bp, Artificial Sequence
  oligonucleotide probe
attgagggcgtttaagataatgttccagccccgccttcctgttcagtttggtttctcttt

SEQ ID NO: 1451 - DNA, 60 bp, Artificial Sequence
  oligonucleotide probe
ggggcagtgtcaaaagcagtttgatttattaatctccaaataacaataaatctccagctt

SEQ ID NO: 1452 - DNA, 60 bp, Artificial Sequence
  oligonucleotide probe
ttctacatggtgctgccagttggatattgtgcattgaggaaatactaggtttcccagtgc

SEQ ID NO: 1453 - DNA, 60 bp, Artificial Sequence
  oligonucleotide probe
taacatttggaactgaagccgaggttctagagcgagctaatgacaccacttttggactag

SEQ ID NO: 1454 - DNA, 60 bp, Artificial Sequence
  oligonucleotide probe
tctggtgactgtagttccttagttaggtcttagcaatcaaaccaaatcaatgcccgtcag

SEQ ID NO: 1455 - DNA, 60 bp, Artificial Sequence
  oligonucleotide probe
gtgtacattgtataatgccaacatgtgtgtagcaatttgatacgcatagctttttgcatt

SEQ ID NO: 1456 - DNA, 60 bp, Artificial Sequence
  oligonucleotide probe
gtgtttttacagtgtaagaatcgggaatctggcagaaatggcaataaaagtttgttgaca

SEQ ID NO: 1457 - DNA, 60 bp, Artificial Sequence
  oligonucleotide probe
gttgctgtggttgttacttatgtgtctggtccaaataaaggcagctgctgatttgttgtt

SEQ ID NO: 1458 - DNA, 60 bp, Artificial Sequence
  oligonucleotide probe
gggaagtacaactcctcagatgtgtgtcgatcagtttttaaggctaatagaggcacatct

SEQ ID NO: 1459 - DNA, 60 bp, Artificial Sequence
  oligonucleotide probe
aacaaagggtgaattcctcacattccagcgctttcccatcatacaccttttcccttgctc

SEQ ID NO: 1460 - DNA, 60 bp, Artificial Sequence
  oligonucleotide probe
ttgcctgattaaagtgtccctaatggatgtcacatgtgaaacctgtcatacttaggccct

SEQ ID NO: 1461 - DNA, 60 bp, Artificial Sequence
  oligonucleotide probe
ctcatgagggtgcagtcagtggacctgaggaccacaggaataaagtgtgctgttcctgcc

SEQ ID NO: 1462 - DNA, 60 bp, Artificial Sequence
  oligonucleotide probe
ccaaactggaaaaccacttactctccaaattcaggccatactttttattaccatgttaat

SEQ ID NO: 1463 - DNA, 60 bp, Artificial Sequence
  oligonucleotide probe
gaaaaatttcactttaagaaaataatcatgattggagatggagctacggacatggaagcc

SEQ ID NO: 1464 - DNA, 60 bp, Artificial Sequence
  oligonucleotide probe
cattaagtcaaaatactgccattctaggtagagttttatcatcctaggagctacctctac

SEQ ID NO: 1465 - DNA, 60 bp, Artificial Sequence
  oligonucleotide probe
tggcatcgtgagaacagttctttcagagcagttctgagaacacagtattaatggagtgga

SEQ ID NO: 1466 - DNA, 60 bp, Artificial Sequence
  oligonucleotide probe
tcattctgaccttaaaggtagagtatggaccttttgtggtatgtgtgtgtatgctttttt

SEQ ID NO: 1467 - DNA, 60 bp, Artificial Sequence
  oligonucleotide probe
catgtcacctgtggggtttctatttgacagtaagtcatattctggaaaaatagcaaataa

SEQ ID NO: 1468 - DNA, 60 bp, Artificial Sequence
  oligonucleotide probe
ttttgaggaaaaaatgattgccgaggctatccctgagctgaaagcctccatcaagaaagg

SEQ ID NO: 1469 - DNA, 60 bp, Artificial Sequence
  oligonucleotide probe
ctaggaaagtcgacattcatgcaaaaagaaaaaacgttaactagcaagaatgcactttca

SEQ ID NO: 1470 - DNA, 60 bp, Artificial Sequence
  oligonucleotide probe
tggataggatttgcttaatggctgatgtaataagattgtacttcctatacagaggcacct

SEQ ID NO: 1471 - DNA, 60 bp, Artificial Sequence
  oligonucleotide probe
tgaggattgcaacttcaaagaactgattctggaaaaccattataacacctatgcatcagc

SEQ ID NO: 1472 - DNA, 960 bp, Mus musculus
gagaatcatcaaccagaagcatttcaagcgactccagggattgctgggctgtggccgtgtggccatcggtggccagagtgatgagggagagcgctacattgcccccacagtgttagtggacgtgcaggagacagagcctgtgatgcaggaggagatctttgggcccatcctgcccctggtgactgtgagaagcctggatgaagccatcgagttcatgaaccggcgggagaagccactggcgctgtatgccttctccaagagaagccaggttatcaaacaggtgttggcccggaccagcagcgggggattctgtgggaatgatggcttcatgcacatgaccctgtccagccttccttttggaggagtgggaaccagcgggatgggcaggtaccacggcaagttctcctttgacaccttctccaaccagcgtgcctgtctgctgcgcagcccgggaatggagaaaatcaatgacttgcgctacccaccctactccagtcgcaacctcagggtgttgttggtggccatggaggagaggtgctgcagctgcaccctgctgtaagcaggggttttggggtacaggagcctgcctggggcacagcttcagagaagtggcctgccagggccaaggccacagagcagtctgctcagcccttcttggtggagccctctgcctcctggggctcccctttttggacctttgaataagataggctgagggtaggaaggcaggaagggatgcagtgaccatagaatcttcgagaaaacagagcacttctgaactacccaccctctcgtggatagtgttgcaagggagcagtgataatcggcacaggtcatactctgtgaccaggcctgtctgggtcttctcactctcagttttctatctgcacaatggaaataaaacagccttaacaaaacagcctatcgtcgtggaagtattaaactaggagggctgactcc

SEQ ID NO: 1473 - DNA, 2596 bp, Mus musculus
  misc_feature 458: n = A,T,C or G
cgggcggcgaccttgaacctagaaccggagccgcgaacccactgaccccagcaccccagcagtggcgcagtctttacccagcgcgaggggcggagggaccgagtgtccgcaaacagactgggacgatgttagcctttgctgccagaaccgtggtaaaacccctgggcctcctcaagccctcctccttgatgaaggtttctggtcgcttcaaggcccaccaagatgcactgccaaggctgcctgtgcccccacttcagcaatccctggactattacctcaaggcactgcagcccatcgtgagtgaggaagaatgggctcacaccaagcaactggtggatgagtttcagacctcagggggcgtaggggaacgcttacagaagggactggagcgcagggccaagaaaatggagaactggctgtccgagtggtggctcaagacagcctatctccagttaccngacaagcctgtggtcatctactccagcccaggagtgatcctgcccaagcaggactttgtggatctacagggtcagcttcggtttgctgccaaactcatcgagggtgtattggatttcaagtccatgattgacaatgagacgctgccagttgagttcctgggaggacagccgctgtgcatgaaccagtattatcagatcctgtcttcttgccgtgagcccggccccaagcaggactcagtggtgaacttcttaaagtcaaagagaccacccacgcatataaccgtggtgcataactaccagttcttcgagctggatgtgtacaacagtgacggaacaccgctcacctcagatcagatctttgtgcagctagagaaaatatggaattcctcactgcaatccaacaaagagcctgttggcatcctaacctccaaccaccgaaacacctgggccaaggcctacaacaacctcattaaagacaaagttaaccgagagtcagtgaactccatacagaagagcatcttcaccgtgtgcctggacaagcaagtgcctagagtctcagatgatgtctaccgaaaccacgtagcaggccagatgctacatggtggtggtagcaagttcaacagtggcaaccgctggtttgacaagacactgcagttcatcgtggcagaagacggctcctgtgggatggtgtatgagcatgcagctgcagaagggccccccatagttgcacttgtggaccatgtcatggagtatacaaaaaagcctgagcttgtgcggtctcctatggtgcccttgccaatgcccaagaagctgcggttcaacatcacacctgagatcaagaacgacatagagaaagccaaacagaacctcagcatcatgatccaggacctggacatcatgatgctgacgttccatcactttggaaaggacttccccaagtccgagaagctaagccctgatgccttcatccaggtagccctgcagctggcatactacaggatctatgggcaggcgtgtgccacgtatgaaagtgcctctctgcgcatgtttcacctgggccgcactgacaccatccgctcagcctccatagactcgctggcctttgtcaaaggcatgggtgactccacagtgccggagcagcagaaggtggagctgctccggaaggctgtgcaggcccaccgagcctacactgaccgggccatccgaggggaggcctttgaccggcacctgctgggtctgaagctgcaggccatcgaggacctggtcagcatgcctgacatcttcatggacacctcttacgccattgctatgcacttcaacctctctaccagccaggtccctgccaagacagactgtgtcatgttcttcggacctgtggtcccagatggttatggcatctgctacaaccccatggaggcccatatcaacctctccgtgtcagcctacaacagctgtgctgagaccaacgctgcccgcatggctcactacttggagaaagctctgctggacatgcgcaccctactccagaaccaccccagggccaagctctgagcccaggcccagacctgccacttccacagccaaacccactttgggatggacacttgccatggctcacttccttggctccgtgcccccagtttgagccagaaaagcattctctagcaaggcccaacgtccacacaagtgccttccaggccctgtccttagacctgccggagtccatgtgcagggctgagtccagaggctgaacaagactacggcccaggttcccaatgtatcatccactccatgaaccatggagaagagagccagtccagcccatcccttctcacagcaggagccgggaagagttcctttcctcagcctggccaatctcttgtcatctccacagccaggccaaaatctgtcttcattggtaaatgcccaaggaccagcggtgggaggattatctatcagtgagggctctcaacctccccatagctaagggttaagtctttgtagccaaagggacatctgaggcccagcctccaccagcccacctcaaggtgccatctccctgctgccacactctggtgactcttgagccccagacttattgcttccattcagtgtgattcttgctgcagtcatggtgg

SEQ ID NO: 1474 - DNA, 769 bp, Mus musculus
gctccttgtccctccctcctccactgcagcctttctcttagcccgggccacttccttcttctgcctgttcctccccagggcgcggaacgcgagtacagggttcagacccacgcagcagcagctcttccgtgaagaaggaagcaatcggagagcaatgaatgtggaacatgaagttaacctcctggtggaggaaattcatcgcctgggttccagaaatgctgatggaaaattaagtgtgaagtttggggtcctcttccaggatgacagatgtgccaatctctttgaagcgttggtaggaactctgaaagctgcaaaacgaaggaagattgttacatacgcaggggaactacttttgcaaggtgttcatgatgatgttgacattgtattgctgcaagattaatgtggtttgcatggcttggtgtatctgataaactggaataactaagttaaaagactaacgtgaatttccttatgtatttttatagaactttgtaaacaaaggggggcttgttgagaagtcctgtttttataccttgaagcaaaacattacaatgtaaaataaacaaaacctattatttttcttaagaaggtaattgggaaatgtaggtaatgaaacatttttggaggtgtgaaaaagcttttgttctcttaaaccattcttaagacaatttctacaggcacttgacattctgtcaaagcaagaagcaaactgcagaccagctgccatgaaaaatgttgtttatggaataaaaaaaatgtaactgccttc

SEQ ID NO: 1475 - DNA, 969 bp, Mus musculus
tttgtccaggagagacaggaaccagaagccctacatgggaacggccccctgaccttccagccatgcagctctgataagtaggcaggccccatgccgggagagccacagacaagccgggtgattctgatagaaattagttaagcaatcttgtctctggggctcacggcccagctgtgggtgcgagcctctgacagacactgtcgtcaaagccacagtcatggccaacgggaccgacgcctctgtcccgctcaccagctatgagtattacctggactacatagacctcattcctgtggacgagaagaagctgaaagccaacaagcattccattgtcatcgccctgtggttgagcctggctaccttcgtggtgctcctctttctcatcctgctctacatgtcctggtcgggctccccacagatgaggcacagtccccaaccccagccaatatgttcatggactcacagcttcaacctccctctgtgcctccggagggcctccctgcagacaacagaggagccaggaaggagagctggcactgaccagtggttaacgcagcagagtccttctgcctcagccccggggcccctggctctcccctaggaccaggtccaggatggaggtcccagggcatcagctggcctcacactcaagcagtggtgagcctggagacagagcgtctcaactgtagaacggatgatgccagagagccagtcgggctcaagcaaacggtgaactccaaccaacccgggcagctacgtcttttttagggccgtttacaatggccttgaatatagcaggaaactgaccgggacaaaaccaagtttacaaagaggaccatcacacacattgatagtgcagctaggatgcaggagctgccctggacacagctgtctctgttgagcaagcttagcctgcttgctgcttacatttgctttgggggtacacaggaaaataaaatgtgaattagg

SEQ ID NO: 1476 - DNA, 875 bp, Mus musculus
ggctgctgcataccgggctcctgcctcccagtccggcctaggctctaggtgaggagaggtgcggtcggcctgggctgcctaggtggtcggcggctctcgggacctaacggggattcaggctgagggcctgtcgggccaagcagggaagcacccacattcctgacagaataagatggcggcgatggcgcccggaggtggtggcagtggtagcggagtaaatcctttcctcagtgattcggatgaggacgacgacgaggtagcggcaaccgaggaccggcgggcaggacttcggctgggtgccggggtcggcctagatcctggttctgcaggctccctgtcgccacaggaccccatggccctgggaagcagcgcgcggccggggctcgctgtggagatgtccgccgccccggcggctccggggggcagcggggagacccctgcccgattgtcaatcgatgccatcgccgctcagctgttgcgcgatcaatacttgctgaccgccctggagctgcacaccgagctgttggagagcggccgcgagctaccacgactgcgcgattacttctccaatcctggcaacttcgagaggcagagtgggacccccccagggatgggggcgcccgggatccctggcgcctccatcgtcggaggcgctggaggtcgggaaccgagtacgacgtcgggcggaggacagctcagctgttgaatcacactacgaggaaataaaatgtttcttagtaattctttgactcaagaaaaagaacaaacaggaaatgtcagccctctgtactgaagttcaatccactgaagatcttttgtctttgcttttccattattttgtatcattaatatatgctaataaaaagaaggaaatg

SEQ ID NO: 1477 - DNA, 1779 bp, Mus musculus
ggcactttcactctcggtccacctcggtgtcctcttgctgtccagctctgcagcctccggcgcgccctcccgcccacgccatggacgccaaggtcgtcgccgtgctggccctggtgctggccgcgctctgcatcagtgacggtaaaccagtcagcctgagctaccgatgcccctgccggttcttcgagagccacatcgccagagccaacgtcaagcatctgaaaatcctcaacactccaaactgtgcccttcagattgttgcacggctgaagaacaacaacagacaagtgtgcattgacccgaaattaaagtggatccaagagtacctggagaaagctttaaacaagtaagcacaacagcccaaaggactttccagtagacccccgaggaaggctgacatccgtgggagatgcaagggcagtggtggggaggagggcctgaaccctggccaggatggccggccgggacagcactgactggggtcatgctaaggtttgccagcataaagacactccgccatagcatatggtacgatattgcagcttatattcatccctgccctcgcccgtgcacaatggagcttttataactggggtttatctaaggaattgtattacactaaccagttagcttcatccccattctcctcatcctcatcttcattttaaaaagcagtgattacttcaagggctgtattcagtttgctttggagcttctctttgccctggggcctctgggcacagttatagacggtggctttgcagggagccctagagagaaaccttccaccagagcagagtccgaggaacgctgcagggcttgtcctgcagggggcgctcctcgacagatgccttgtcctgagtcactcaacacaagatccggcagagggaggctcctttatccagttcagtgccagggtcgggaagcttcctttagaagtgatccctgaagctgtgctcagagaccctttcctagccgttcctgctctctgcttgcctccaaacgcatgcttcatctgactttcgcttctcacctctgtagcctgacggaccaatgctgcaatggaagggaggagagtgatgtggggtgccccctccctctcttccctttgctttcctctcacttgggccctttgtgagatttttctttggcctcctgtagaatggagccagaccatcctggataatgtgagaacatgcctagatttacccacaaaacacaagtctgagaattaatcataaacggaagtttaaatgaggatttggactttggtaattgtccctgagtcctatatatttcaacagtggctctatgggctctgatcgaatatcagtgatgaaaataataataataataataataacgaataagccagaatcttgccatgaagccacagtggggattctgggttccaatcagaaatggagacaagataaaacttgcatacattcttatgatcacagacggccctggtggtttttggtaactatttacaaggcatttttttacatatatttttgtgcactttttatgtttctttggaagacaaatgtatttcagaatatatttgtagtcaattcatatatttgaagtggagccatagtaatgccagtagatatctctatgatcttgagctactggcaacttgtaaagaaatatatatgacatataaatgtattgtagctttccggtgtcagccacggtgtatttttccacttggaatgaaattgtatcaactgtgacattatatgcactagcaataaaatgctaattgtttcg

SEQ ID NO: 1478 - DNA, 1168 bp, Mus musculus
gagcagtcgcagcgccgggtcccagaatctagtcctacgccacggttttgaccacgcgtgacccgctgcccagccggcccggccatcaggtggtccgtgtgtccctctgacatgtcgtcctgcagccgcgtggccctggtaactggggctaacaaaggcatcggctttgcgatcacgcgtgacctgtgtcggaaattctccggggacgtggtgctcacggcgcgggacgaggcgcggggccgcgcggcggtgcagcagctgcaggcggagggcctgagcccacgcttccaccagctggacatcgacgacccgcagagcatccgtgcgctgcgcgactttctgcgcaaggagtacgggggacttaacgtgctggtcaacaacgcgggcatcgcctttagaatggatgacccaacacccttcgacattcaagctgaggtgacactgaagacgaacttttttgccactagaaatgtctgcactgagttactgcctataatgaaaccacatggtagagtggtgaacatcagcagtctgcaggggttaaaagcccttgagaactgcagggaagatcttcaggaaaagttccgatgtgacacacttacccgaggtggacctggtcgacctcatgaaaaagtttgtggaggatacaaaaaatgaagtccatgagagggaaggttggccagactcggcttacggggtgtcgaagctgggggtgacagtccttacgaggatcctggcccggcagctggatgaaaagaggaaagcggacaggattctgctcaatgcctgctgcccgggatgggtgaagaccgacatggcgagggaccagggctcccggaccgtggaagagggggccgaaacccccgtttacttggctctcctgcctccagatgccactgaacctcacggccagctagtccgtgacaaagttgtgcaaacttggtgaacgtctgctctggggcttgtttgataaacgttagcgggagagatgaatgcagcctggtgtggtctgattctttcccacatcaagggggaaggtccgttcctatctgcggctctgcaaactcagtctgaacaattcgctgtgtccacactctcagctcatcgtgttttcaaccagttaatgtgcctgctttgattttcaaattaaaaagatttgttttatttt

SEQ ID NO: 1479 - DNA, 1859 bp, Mus musculus
  misc_feature 556, 594: n = A,T,C or G
gcttctctgcctctgctacttctgctgaaggaggaggctccatgttgtcccctcagcgaactgcagcggtggcatcgagaggagcaggtgatgccatggaaaatggaaaacctggtccagtgcaggttgttttggttcataaagaacaacattcctttgagctagaagagagagccttggccagcgtcctcctccaagaccatatccgagatcttgatgtggtggtagtatcagtggctggtgcttttcgaaagggtaaatccttcattctggactttatgctgcgatacttatattctcagaaggaaggtggtcattcagactggttgggtgacccagaagaacctctgacaggattttcatggcgaggaggctctgatccagaaactactgggattcagatttggagtgaagttttcactgtgaagaagccatgtggaaaaaaggttgcagttgttctgatggatacccagggggcctttgacagccagtcaactgtgaaggattgtgctaccatttttgctctaagcactatgactagttctgtcacgatttnacatttgtcccgaatattcggaagatgatcttcgcagncatcgctcttcacgaatatgggcgccgtgcatggatgagattttccaaaaccttttcagacactgatgtttttgattcgagattggagtgtcccttatgaatataactatggactgcaaggaggaatggcatttttggataagcgtttacatgtgaaaggacatcaacatgaagagattcagaatgtgagaaatcatattcactcatgtttctccgatgtcacctgttttctcttaccacatccagggctccaggtggccacaagccccaactttgatgggaaattgaaagatattgctagtgaattcaaagagcagttacaggctctaataccatatgtactaaatccatctaaattaatggagaaggagatcaatggttcaaaagtcacctgccggggattgttggaatattttaaggcatatattaaaatttaccaaggagaagatctgcctcacccgaagtccatgcttcaggccactgctgaagccaataatttggcagctgcagcctctgccaaagatatctattacaacaacatggaagagatttgtgggggagagaaaccttatttgtctccagatattttagaagagaagcacctagaattcaaacaacttgctctggaccactttaagaagatcaaaaagatgggtgggaaggatttcagcttccgttaccagcaggaactggaggaggaaatcaaagaactgtatgagaacttctgcaagcacaacggcagcaagaatgtcttcagcaccttccgaacccctgcagttctgttcacaggcatagcagcattgtacatagcctcgggcttcacgggcttcattgggcttgaggttgtggcccagctgttcaactgtatggttggactgctcttaatagcactccttacctgggggtacatcagatattccgggcagtatcgtgagctgggtggagccattgactccggtgcagcatatgtgttagagcaggcttcttcgcatattggtaattctactcaggctgcagtaagggatgccgttgttgggagaccacctgctgataaaaaatctcaatagcatcttaatgggaagatccaacaagagcccagtcagcttctggatttctgccaatgccatcacgggtccaattccagaggaatggcagatctgagaccattctggaagatctgagacagggcactgtaataaatgaactgacttctgctctggtttccaactccacttggcttggaagcagttctttttcttgctgtc

SEQ ID NO: 1480 - DNA, 1417 bp, Mus musculus
  misc_feature 4, 6: n = A,T,C or G
gacncngatcctggaagttctccgtcttttccggttgtttgggcggattaagtcagaagcgcgccttttgaatccgtgaagcaactgtgaagagtcgaggaagcgataaagcggctgacagatccaggggataatttgagcctcacgcgtttgtgactatgtatcgttgtgattatactgtttagatgaaaatgtctggtaaagcacgtgcttctaggaaaaaacctcaacaggtgaaaagaagtttgaaacaaagagccaataaggaagcggatttgccagagaatgaggttggaaacacagcaaaaagaaacagaagtcatgcaaagcatctgtcctctaaagtaacaggacaagcaacgtatgttcatctaaaacgggtaaaaatatcatccagcaagagaacaacctggcaacctcttccaaaggatactgaagagtatttgcaaagtatgatggagtcagtcattcttggaattttattcaacataaaaagaaaagaagaaattcagtgtcatctcaaccagttgaagaaaagactactacaacaatgtgcaacactgaaagtccctccaagaaagttgaactatttaaaggatgtgtcaaaaatgctgaaaatggaaaaggcacaggaaagagcaaatgaagagagcctggcttcactgcaggaagaaatagacaaaatagtagagaccacagagtcaatgactgagagtattcaaagcctaaagaataaaattcaaattttgacaagtgaagtagaagaagaggaacaggaggtgaaacaggtatttcacatagatagcaataaagtacttgctcttccagaactttctcagaaaagtcttaaagcacccatacttcaagaagaaattttggcactaattccaaaccagaatgctcttctgaaggacttggatgttcttcatgattcagccccagtgaagaatgtgtcagcattcattgaagaagcctataagaaacttgactcctaaagagttggattttgttttggtgtttaagccgtgttccatattaacttattgttgataaattgtaaaactcttttttcttttagtaatagtctctcactctgtttgtagcctaggctggctcagcacttattctttctcccatttggccttgaactcccagcaatcctgcctcagcatcctgagtgctgggattaccggggcgagcttcacatctggcccaaaggtgtgcaacttaactggagatctttcttcaaaacaattaacctttgttatctaccttaaaactagcctgtgtgggcttatcattaatatctaatgtcctataaacattgcagttgctaaatctaggaaatttatatatatgtagatatttgctaaaactgtttactgagaattatttttaaaaataaaaaaaaaatgcc

SEQ ID NO: 1481 - DNA, 463 bp, Mus musculus
ggaaatcggaggcagctgcttcaggtgctccatggcggtccttttttggctaccgtccgccttccagagcctttttggccactgtcttacccttcgcccgagctggcaccaccacatcccctctgggggcatgcgcgcttcctgcaagctccgccccctagagggcgtgtctccctctagtggccttgatgggtctctgcagagtgcaggtctgcatttacctgggccgcttccactcatcgcccccaagctactggctgagatcactgcaggctgctctttgcctgggcaacctgctcccctcatgtttgtgggatgggattctcgctttctttatctgcaaaacaaacaagagacccacctttcttaagagctagtttgggagttccgtatattgggtcagttatagggtttttcagatgaaatttctttgcaaagtcattaataaatttaaatcttattc

SEQ ID NO: 1482 - DNA, 1744 bp, Mus musculus
gagctatcagaaaagactggcaggagactaaacctgtgttcgaacctgagtggaaagaaggccttcctgcaagtgggaggacactgcgggccagagccgggactgttcctgctggtgccccgtgagctctcgtggtggtcagccaacagctgcggtgtctgagcagccttgctgagaggaaggagaatggcttgcagtgagttttcctttcacatgccaagtctggaggagcttgctgaaggcatctgtgggcaaactagaattgcagaagtaggaggtgtgccttacttattgcctcttgtaaacaaaaaaaaagtttatgacctaaatgaaattgcaaaagtaataaagctgcccggagcttttatccttggagcaggggcaggtccatttcagacgcttgggttcaattctgagttcatgccaattgttcaaacagcaagtgaacacaaccaacctgtgaatggaagttactttgcccataaaaaccctgcagatggagcgtgcctgctggagaaatacagccaaaaatatcatgattttggatgtgcactactggctaatctttttgccagtgagggccaacctggcaaggtcattgaagtgcaagccaagagaagaacaggagaacttaactttgtgagctgcatgagacagacactggaggagcactatggtgacaagcctgtggggatgggaggcaccttcattgtgcagaaggggaaagtgaaagcccacatcatgcctgcagagttttcttcctgctcactgaactcggacgaagctgtcaatagatggctacacttctatgagatgaaggctcccatggtttgtctacaggttttgtttcaaagaccctggacttgatttgcgacggagcacacacatttctcagtcatcatggagaagtggacactaccactacgatacgaccccagacacagtggagtaccttggatacttctcacctgcacagttcctctatcgcattgatcagcccaaagagacccatgcctttgggagagattaaagcagctgtgtaatggttagctaaggttaagttactaacccagcagctgatagtaattcaaaaatacagtagaggaccagagaggggcggggaggggggcggggagaaagagaggaagaggaagagagagagagagagagaggcattccctagcaagcagccaaggccctaccttaatccccagcacagctaataaaattaatcactacacaaacactatttttatggcatttgaaatgcaaggatgtggacatatgacactcatattaccatattatttaacatcttcatgtgaggggagcgtattgggaacatagatagctaattgagatgctcactttagtaaaccaatcttctgtctttatagcccagcaaagtctaccttctcttcataccacagatatgaatatggacagggaccttccattattcctgctatctaggaataacttacatttgggtggcattactaaatttttcaagttcatctcacaagggctaagggagtattagacacaacagtgtgggatctttgcactgagttttaaaagcccactgtggaaatcagtgcactacgttctcagcactcaggactacccacactcagaagtctgcagttgccttccacagatgttagtagcattgatgagccagctccgcctgaattaggtctctacccaacagtttgtaccttcgtaatactgtttgcaagat

SEQ ID NO: 1483 - DNA, 1503 bp, Mus musculus
ccggtaagctagatgccagccagtgctacacagggagaccctggctcaaactaagtggcctgcttgattcgagttccttctgaagtggttaagcagagggcacaggtgtctgcttcttcaaagaccttgcagatctttttgactatcttaagtgaagagggcattcaaggactgtaccgaggctataaaagcacagttttaagagaggatttaacagtgcgttccatttgtggcttttctttactgttcactgtgtcaaacatcaggaagcagagtccacgcgctgcagtgatgtaatctgctgtctgtggcctcccagagatgtccagtcatccggacattggtcgtgtcaattttaagatgaaaatacttggaaaaaagaacatttagccagccttcctgctgtggctggatttcttactattttgagaaggaccccgtggaatggactttttcctcagtgctaaaacccagcagaaatgtgttctcctcagatgcggctcagggagaggggagaagaattgcacatgtcaggaaagcgccccaggatggcattgttgtgtggagcattgctttcatctctgagatatctcacacctgcttcatttggcacagtgttcccaacaaccagcagacagcctgccagcccaaccccaggcttgcggaagctaacaaggagccatagcaagcaccagtgctgtcgaaaagcccagggtacacaaacttttaggtagacatttgggctgtcagcttcgggcccagctctccagtctaacgctgaatagaagtggtgaacactggatagaactcagaacagcttgcccatgtccccagtctctatcaaaggttgccgaggctggtagcagacatcttacctgctgagatatcctgctgatccttattcttatttcttaaggaggagaattccttatagtctgattcctttctccttggtccagtttcccttgtgggaatccttgaaagccctctgggcgtggcggcggggtcatgtggtggattcttggcagtcagcagtctgcggagcttttgcaggtggctttgcagctgcagtgactacacctctggacgtggctaagacaaggatcatgctggcaaaggcgggttccagcactgctgtggggaacgtgctctctgccatgcacggggtgtggcgctcacagggactagccgggttattcgcaggtgtcctcccgaggatggcagcaatcagcatgggcggcttcatctttctgggcgcctatgaccaggcgcgaagcttgctgttagaggtgggcaggaagagcccatgaagcagacactacatgtccttgcagtccttcctgtgcctggggctccagtgtggctccctgaagatggctgcagagagcagcttaatgaaggccaaagcacaggctcccccaggaaacttttcttggtgaaactggggccaccgtctcagtcctctcaataaatactcccggtaaggccaaggccaggcccttc

SEQ ID NO: 1484 - DNA, 1875 bp, Mus musculus
gtgcagcgggtcccctgctcggctggaccatgggcgtcttggggcggcggtctttgcggttggcgcggagagcggggctccggagcctgactcccaatcccgactctgactcccggcaggccagccccgccaagaaggcccgggtggagcagaacgagcaaggctcgccgctcagcgccgagcagctcgtccgcatccagaggaacaaggccgcggcgctgctcaggctcgccgcccgcaacgtgcctgccggcttcggcgagagctggaagcagcagctgtgcggggagttcgggaagccgtacttcgtcaagctaatgggatttgttgctgaagaaaggaaccaccacaaggtctatccgcccccggagcaggtgttcacatggacccagatgtgcgacatccgagatgtgaaggttgtcattctgggacaggatccctatcacggacctaatcaagctcacgggctctgcttcagtgtccaaagaccagttccacccccgcccagtttggaaaacatttttaaagagctgtctacagacatcgatggttttgttcatcctggccatggggatttgtcagggtgggcccgacaaggtgtcctcctcctcaacgccgtcctcactgtccgcgcccaccaagccaattcccataaggagaggggctgggagcagttcacggacgcggtcgtgtcctggctgaatcagaacctgagtggcctcgtcttcctcctctggggctcttatgctcagaagaagggcagtgtcattgacaggaagcgtcaccatgttctgcagacagctcacccctccccgctgtcggtgtacagagggttcctgggatgcagacatttttctaaagccaatgaactgctccagaagtctggcaagaagcccatcaactggaaggagctgtgacccgcccgcccacaggccgcgtctgcccacagcggtgctttcagctaccgccgccgccaccaaagcttttgctggttaagttctaagttccttgtgtgagcggagaaatgacacggatagatctctataggaccatcatgagccaaccaggacacagaaactgcagctctggcaggcagaacctcttgcctggcactaggtttgaactctccaggcccggccaggtggctgttgagacacacctacttctcagaccagcggacacaccttcggtcccgtgtgctgctctggtgtgggaggagagatctgcacctttggaccagcagtttggtgcctgctgctgtccgctttatcctttagagttagagatttcaaagtgtgtgtgtgtgtgtgtgtgtgtgtgtgtgtgtgtgtgcttcaaaaggcccttttgtctggaaaggaacccttgggtgttggtgagtcctgagaagtctggcttacaactgaatgagcttcctgatcacaaagggggcggggttctccctgggttcacagtagccgctctccaccctgcgtcttgcctttgcaggctccgaagttgagcgaagcaggaatgggatagatttgtttttaagtgagggtgggtgggtttcctggtgcccgtggagttgtttcctcctctctgcagacagcagactgccgcgcttggtgtgtgtggtgctggggatctaactccaaggtgctgtttcttagaggctgagttcacataagttgtctttctgcaacactggagaacgttatttttttttacaaggtaggcaggtacagtaatttctttttcatgcttttctgaaagacaatcttcactgagtttacaagctggattccgtgagtccagctggttagagccgtggcctgcctgaccaggctaataaaagatggttgacaattgaaaaaaaaaaaaaaaaaactcgag

SEQ ID NO: 1485 - DNA, 1059 bp, Mus musculus
gagtcctcacagttgtacctggagacctgccttccagccctgggagatgttttttgtatagcccagtcatacagggccgaacagtccaggacacgaaggcacctggctgagttcactcacgtggaagctgagtgtcctttcctgaccttcgaggacctcctgaaccgtttagaggacctagtgtgtgatgtggtggacagagtcctgaagtcaccagtggcaagcatagtgtatgagctcaacccgaactttaaaccccccaagcggcctttccgcaggatgaactactcggatgctattgagtggctgaaggagcatgatgtcaagaaagaagacgggactttctacgagtttggagatgatattcccgaagcgcctgagagactgatgacagacaccattaatgaaccaatcctgctgtgtcgctttcctgtggagatcaagtctttctatatgcagcgctgtcctgaggatcctcgacttactgaatctgtggacgtgttgatgcccaacgttggtgagattgtaggtggctcgatgcgctcctgggacagtgaggagattctcgaaggctataagagggaagggattgaccccgctccttactactggtatacagatcagagaaaatatggcacctgtcctcatggagggtatggcttgggcttggaacgatttcttagctggattctgaacaggtatcacatccgagatgtgtgcctgtaccctcgatttctccagcgctgcaggccataaccatggggccctcaagcacgaaggaaatgaaaagttaagactgcctctgcaaaagaacaaacgcccaaatcgtcccttgacttcctgttgggggtagtagctttctcttgactttcccattatcagaaaaagcagtaggtatcacttgaacatcaagtgacattgatgctcctttaatgaatatactcattacaaaattttgaggaaatatatgtcatgtcactctttagtatggagatattttattgtgctataggttacaatcattgtattaaataaaccatacatgattatacagttttt

SEQ ID NO: 1486 - DNA, 2295 bp, Mus musculus
ggggaggagagggagggaggagggagagaaagggagaaaggaaggagcaggcgggcgctgcgtgtgtttgagtgtgccagtgcgagtgagtgtgagtgccgggccctgcctctgccgcctcccctgcagaggggcccggtggcctagggagggcgggcgggctgcttggaggcagaggcagcgagaggcggcggcgggcagagccgaggaggaggaggaggagagaggaaagagccgagcagccattgttgagggaaaccttgcaaacaaagaaggctccggactccccgcggccccccgccccccaggccggccccccggcccccagcccccggcccagtggccattgtaactttccccccgggctgtggaccccgcggggcgggcggaggctgtgcatgcgagtctttgtgcggcctgcggagtggagctcccagccagaccggcctgtcccactcgggacatgagctgctgaagttggctccaccttagtcctcacccttgccagggtccctgaggactcccaggcgctccccgcacctcccctgaccccctcagttctcccaggttgttcctcaaagtcattcaagctgtactcgccgaaggagcccccgaacggcaacgccttccctcccttccaccccggcaccatgctggatcgggatgtgggcccaactcccatgtacccacctacatacctggagcctgggatcgggaggcacacaccatatggtaaccaaaccgactatagaatatttgagcttaacaaacggctacagaactggacagaggagtgtgacaatctctggtgggatgctttcacaactgagttctttgaagatgacgccatgctgaccatcactttctgcttggaggatggaccaaagagatataccattggccggaccctgataccacgctacttccgaagcatttttgaggggggtgccacagagctgtactacgtgctcaagcaccccaaggaggcattccacagcaacttcgtgtccctcgactgtgaccagggcagcatggtgacccagcacggcaaacccatgtttacccaggtgtgtgtggaaggccggttgtacctggagttcatgtttgacgacatgatgcggataaagacgtggcacttcagcatccggcaacacagagagctcatccccagaagtatcctggccatgcacgcccaggacccccagatgctggatcagctgtccaaaaacattacccggtgtgggctgtccaattccactctcaactacctccgactctgtgtgatactagagcccatgcaggaacttatgtcccgccacaagacctacagcctcagcccccgagactgcctcaagacctgcctcttccagaagtggcagcgaatggtagcgcctcccgcggagcccgcacgacagcagcccagcaaacggaggaaacggaagatgtcagggggtagcaccatgagctcggggggtggcaacaccaacaacagcaacagcaagaagaagagcccagccagcaccttcgctctctccagccaggtacctgatgtgatggtggtgggggagcccaccctgatgggcggggagttcggggacgaggacgagaggctcatcacccggctggagaacacccagtttgacgcggccaacggcattgacgacgaggacagctttaacaactcccccgcactgggcgccaacagcccctggaacagcaagcctccatccagccaagagagcaaatcggagaatcccacgtcacaggcttcccagtgaaggccctaccacggccacccagcgctctgcctgcctacccctcacagctccagggagcagaagacggaataaagagactgggcgtctgaaatgggcagcctccatccacccacttcagggagggactggactcgctgggggcaggtgccaagatttgccccccagttgccctgggctgggcctggcccctgcagagccttttgggggaagggggtactcatgtggatgcctgtgtggaccctgggcctctgagaaatgtcccgaccctcctctccccagggcatttgccctcgttcttaccccaggttctgggtgccccatcttcctgatttctcccttggatcctggggtttatacctacagcccttaggggctaaatgttggggctgtggttgaacgcccttcccctaggtggctgtcaacagagggtaaaattctgggctcctcccttttgccacttacccagctccaagtttttaaaaaaataatattattaaaaatgtaaattaaaaaaaaa

SEQ ID NO: 1487 - DNA, 318 bp, Mus musculus
tgtgtgccgcacccttcctcccatatgtgattttgtgagattgcctcccagttacggtccctctgcctgcatctgcccccagtggactatgtcatctgaatcgagccagccccaagttcccctccagcctctgtagggccatggctgtgtgttactgttgctgtgctttcattttttaaactgggtttggggtttgatttttatttctgtggggaactttatttttcttggcaaataactaaagttcttgtccatgtaatttctgtggtctctattcagcttgggtttcatgttttaaaataaacaattttaagaaac

SEQ ID NO: 1488 - DNA, 1581 bp, Mus musculus
gccctgcagtttctgctgggcctaagcctccgggctcagtttgaccacagtatctagctatggcggcagtgacctggagtcgggctcgatgctggtgtccgaggtaagcttgcagcctcgactctccggcccaaagtcgccagcgggaattttcgcccgcccacggagccgcccgctttgtcatctggcctggctagcgagacagcaggatattactttgacgatttcccagcgagagagctctaaagagtgacctcgaaggttcttcctctgctgagtcccaaaggtgtcctgcaggtcttcagattacaagtggctaaactgcacttgggcagaccaacaatgagagccagtcagcaggactttgaaaatgcattgaaccaggtgaaactcttgaagaaggacccgggaaacgaagtgaagctaagactctatgcactgtacaagcaggccacagaaggaacctgtaatatgcctaagcctggtatgcttgactttgtcaacaaagccaagtgggatgcatggaatgccctgggcagcctacccaaggaaactgccaggcagaactatgtggatctcgtatccagtttgagttcctcatctgaagccccgagccagggaaagcgtggagctgatgagaaagcccgggagtccaaagacatcctggtaacttctgaagatggtatcacgaagatcacgttcaatcggcccaccaaaaagaatgccatatccttccagatgtatcgggatattatactcgcacttaaaaatgccagcactgataacactgtcatggctgttttcacaggaactggtgactactactgcagtgggaatgacctgactaacttcactagtgccactggggggatagaggaggcagctagcaacggtgctgtgttactgagggactttgtaaacagttttatagactttcccaagcctctggttgcggtagtaaatggcccagctgtgggaatctctgtcacccttctgggactatttgatgctgtctttgcatcagacagggcaacgtttcatactccattcagccaactcggccagagcccggaagcatgctcctcttacacgtttccgaagatgatgggctcagcaaaggcagctgagatgcttctctttgggaagaagctgacagcaagagaggcctgggctcaaggccttgtcactgaagttttccctgagagcacttttgagacagaagtctggaccaggctgaaaacatatgcgaacgtcccgccaaacgccatgagaatttccaaagagttaatcagacaaaatgagaaagaaaagctctacgcagtcaacgctgaagagtgcactactctgcaagcaaggtggctgtcagaggagtgcatgaacgcaatcatgagcttcgtctccagaaaaccaaagctgtgaagaccaccacagcagctagactcctcatagggagcatgggctgggaggtccagtttcgaggactcaaacgacacatgcttctctgtgccttttccttgattaacgtagcaattatgatgagaattcttcacagtactgataaataaaacttttcataaatca

SEQ ID NO: 1489 - DNA, 2060 bp, Mus musculus
attttgctgagcctgtcacttgtgttccaggagccaaaccagcaatgtcttcacctgcacaacctgcagtccctgccccgctggccaacttgaagattcaacataccaagatctttataaacaatgaatggcatgattcggtgagcagcaagaaatttcctgtccttaaccctgcaactgaggaggtcatctgccacgtggaagaaggggacaaggctgatgttgacaaagctgtgaaggccgcaagacaggctttccagattggctccccatggcgcaccatggatgcttcagagaggggccgcctgctgaacaagctggctgacttaatggagagagatcgtctgctgctggctacaatggaatcgatgaatgctgggaaagtctttgctcatgcatacctgttggatgtagagatcagcataaaagcattacagtacttcgcaggctgggctgacaagatccatggccaaacaatacccagtgatggaaacatattcacttatacaaggcgtgaacctattggggtgtgtggccaaatcatcccttggaatggtccattgattatattcacttggaagttaggccctgcccttagctgtgggaacactgtggttgtcaagccagcagagcaaactcctctcacagctcttcacatggcatctttaataaaagaggcagggtttcctcctggcgtggtgaacattgtccctggttatgggccaactgcagggggagccatctcctcccacatggacatcgacaaagtgtccttcacaggatcaacagaggttggcaaattaatcaaggaagctgcagggaaaagcaatctgaagagagtcaccctggagctggggggaaagagcccttgcattgtgtttgcagatgccgacttggacagtgctgttgagtttgcacaccaaggagtgttcttccaccagggtcagatttgtgttgcagcgtccaggctttttgttgaggaatcaatttacgatgagtttgtgaggaggagtgtggagcgggctaagaaatacattctaggaaatcctctgaactccggaataaatcaaggtcctcagattgacaaggaacaacacaataaaatacttggtctcattgagagtgggaagaaagaaggagccaagctggagtgtggtggaggtcgctgggggaacaaaggcttctttgtccaacccacagtcttctccaatgtgactgatgagatgcgcattgccaaagaggagatatttggaccagtgcaacaaatcatgaagtttaaatctatggatgatgtgatcaagagagcaaacaacactacctatggtttagcagcaggagtcttcactaaagacctggataaggccatcactgtgtcatctgctctgcaggctgggatggtgtgggtgaactgctatttggctgtccctgtccaatgcccatttggtggattcaagatgtctggaaatgggcgagaactgggcgaacatggtctttatgaatacactgagctcaagacagttgcaatgcaaatatctcagaagaactcataaagaagccagcagagtaaagagaaactctcagcagtggctccacatctcatacagtcaccagaaagtggtgttttgctataagttcttcttctgttgagttctttaaacgtaaggaattcatcagtattactgttaatcatagaaaagacgtagcttaatctggcagagtcagtgtcttctaatccgtgaacccaattcataacccagaacaaaaggatacattaaggtgcaagctctctgtaactctgtcatgataaggtgctttccattgtagctacttgtctagagtacacacttggcaaggaggaccagtcctgatttaagctctgtcccacactgattccttgaactatgtaccatgcatgataactgaaaagttagctgctctattcctcggggttattcctctgagtgttgtgaaatattttccagaatgccatgactgcttgtcaaatgaaatgcctccctgtaattcgaatgcaaagcttaataaaggcaatctcgcatgat

SEQ ID NO: 1490 - DNA, 1083 bp, Mus musculus
tgagtgtcactgccatctgtagaccatggagggttgctaaagacaaactggccgggcctcggctcgttgactgactgtgtgcttgagatgtggttttcctgagccccgctggtctgtgttgcagctggtggacagcgaggtggtcatgctgtctgcccactgggagaagaagaggaccagcctgaacgagctgcaggggcagctgcagcagctgcccgctctcctgcaggacttggagtctctgatggcaagcctggctcatttagagacaagttttgaagaggtagagaaccatttgctgcacctggaggacttgtgtgggcagtgtgagttagaaagacacaagcaggcccaggcccaacacctggagagctacaagaaaagtaagaggaaggagcttgaagccttcaaagctgaactcgatacagagcacacacagaaggccctggaaatggagcacacccagcaactgaagctgaaggagcggcagaagttcttcgaggaagccttccagcaggacatggaacagtacctgtccacgggctacctgcagatcgcagagaggcgagagcctatgggcagcatgtcatccatggaagtgaatgtggacgtgctggagcagatggacctgatggacatctcagaccaggaggctctcgatgtcttcctgaactccggcggagaggacaacattgtgatgtcccctggtgtggagatggaatccaaccccaatcagaatgaaatgagtcttcagattccaagtccctcagaatcagcatcccagccacctgcctcaccctctgcctgcactgacctggacactgctgatgcccccctcatccagtctgatgaggaggaggtacaggtggacacggccttggtcacattacacactgacagaaagtccaccccaggtgtcagtgatgacagtgaccagtatgactcaactcaggacatttaagtgacttgtcagctgtgcgcagaatcctcctgcaaagccaggtgcttagaggttttcaattttacacacttgctaatgggatgtaagaaccattagagaagcgctcacaataaagcttatgc

SEQ ID NO: 1491 - DNA, 448 bp, Mus musculus
actgaccgtggagtgatacctcgcagtgagcgcagcctttgttctagcttccccgactccgcagcactgtctgcgtgctggacagcttgcttatctgtctgctagcagagatacttcctgctttttcctttgttgttacatatttttatgtttgaaatttaatttttactactgttaatttaagtaaaatttgttccatgtataaattggcattgccagtgaaaatcaacagcctcattcatgacgctgctgaagtgaagtacatttgtgttctgtgttcatgaacttgcaatgaagccgtgtttcttttacgataaagtgcggcttaggctttatttctgtttaataaggctttctaccattgattaaatgaaggaatgtatctttttgaagagatttatattctgtaaataaacattggttgtaacaataaagttgagttctaact

SEQ ID NO: 1492 - DNA, 2153 bp, Mus musculus
gcagtttcagagaccggtggcgattggctgactgattcaacaaatagagcattctctgtgcctggagactttcaaggactgaggcaggcagaagggaagactcagaaagttcaggtccagagcatcagcaaggtactgccctttccagttatgaagctccaggtgttggtgttggtgttgctgatgtcctggttcggtgtcctgagctgggtgcaggcagaattcttcacctccattgggcacatgaccgatctgatttacgcagagaaggacctggtacagtctctgaaggagtacatccttgtggaggaagccaagctcgccaagattaagagctgggccagcaagatggaagccctgaccagcagatcagctgccgaccccgagggctacctggctcatcctgtgaatgcctacaagctggtgaagcggttgaacacagactggcctgcactgggggaccttgtccttcaggatgcttcggcaggttttgtcgctaacctctcagttcagcggcaattcttccccactgatgaggacgagtctggagctgccagagccctgatgagacttcaggacacgtacaaactggatccggacacgatttccagaggggaacttccaggcacaaagtaccaggccatgctgagtgtggacgactgctttgggctgggccgctcagcttacaatgaaggagactattaccatactgtgctgtggatggagcaggtactgaagcagctcgatgctggggaggaggccactgttaccaagtccctggtgctggactacctgagctatgctgtcttccaactgggtgacctgcaccgtgctgtggaactcacccgccgcctgctctctcttgacccaagccacgaacgagctggagggaatctgcggtactttgaacggttgttagaggaagaaagagggaaatcactgtcaaatcagacagacgccggactggccacccaggaaaacttgtacgagaggcccacggactacctgcctgagagggatgtgtacgagagcctgtgtcgaggggagggcgtgaaactgacaccccggaggcagaagaagcttttctgtaggtaccatcatggaaacagagtgccacagctcctcatcgcccccttcaaagaggaagacgagtgggacagcccacacatcgtcaggtactatgatgtgatgtccgacgaagaaatcgagaggatcaaggagattgctaagcccaaacttgcacgagccactgtgcgtgaccccaagacaggtgtcctcactgttgccagctacagagtttccaaaagctcctggctagaggaggatgacgaccctgttgtggcccgggtcaaccggcggatgcaacatatcaccgggctaacggtgaagactgcagagctattgcaggtcgcaaactacggaatggggggacagtacgaaccacactttgacttctcaaggagcgatgacgaagatgctttcaagcgtttagggactgggaaccgtgtggccacgtttctaaactacatgagcgatgtcgaagctggtggtgccaccgtctttcctgacttgggagctgctatttggcccaagaagggcacagctgtattctggtacaaccttcttcgcagtggggaaggtgattatcggacgagacatgcagcctgccctgtgcttgtgggctgcaagtgggtctccaacaagtggttccatgagcgaggacaggagttcttaagaccttgtggaacaacggaagttgattgacgtccttttctctccgctcctccctggcccatagtccaaatcatcttcaagttcaacatgacagcttccttttttatgtcccagctcctgtcaggcaggtcattggaggagccagtgtttgactgaattgagagagtatatcctgagcctagtcctgggtgacctgggccccagactctgaccagcttacacctgccctggctctgggggtgtcttggcatggctgcggtagagccagactatagcacccggcacggtcgctttgtacctcagatatttcaggtagaagatgtctcagtgaaaccaaagttctgatgctgtttacatgtgtgtttttatcacatttctatttgttgtggctttaaccaaaaaataaaaatgttcctgcc

SEQ ID NO: 1493 - DNA, 2432 bp, Mus musculus
  misc_feature 1563, 2068, 2076: n = A,T,C or G
ttgggccgggcagcaggcgtgaggagccggctcccggcgccacccggggcgcgctcgctagggcgccggcctttgggcggcgcgggatagcggcgagagctgctgcgggacctgcgtgtccgccccagggtggctctggctgagggcggcgacatgctggcagataacctagtggaggagttcgagatggaggatgagccgtggtacgaccaccgggacctccagcaagatctccagcttgctgctgaacttggaaagacgctactggatcggaacacagagttggaagattctcttcagcagatgtacacaaccaatcaggagcagttacaggaaatcgagtacctgaccaagcaggtggagcttctacggcaaatgaatgagcagcatgcgaaagtttatgagcagttagatgtcacagcaagagaactggaagaaaccaaccagaagctagttgctgagagcaaggcctcacagcagaaaatcctcagcctgacagaaacaattgaatgcctgcaaaccaacattgatcacctgcagagccaagtggaggagctgaagtcttccagccaaggaagagggaggcagaaggcatgtgaccaggagaaaccagcacccagcttctcctgtctgaaagagctgtatgacctccgccaacactttgtgtatgaccacgtgttcgctgagaagatcacttccttgcagagccaacagagccctgatgaagaagaaaatgagcacctgaaaaaggcagtgacgatgttgcaggcccagctaagtctagagaggaagaagcgagtgagcgtggaggcagagtataaagtggtgctgaaggagaacagtgagctggagcagcagctgggggccacagatgcctaccgagcccgggccctggagttggaggcagaggtggctgagatgcggcagatgctgcaggcagagcatccttttgtgaatggtgtggagaagctggtgcccgactctctgtttgttcctttcaaggagcctagccagagtctgctggaggaaatgttcctggctgctccagaagcacctagaaaaccactcaaacgaagcagcagtgagacggcgctcagcagtttggcaggggatgacatcgtgaaggaccatgaggacacttgcatcaggagggctaaggctgtgaagcagaggggcatctcccttctgcatgaagtggacactcagtacagtgccctgaaagtgaagtatgaagagctactgaagaagtgccacgaggagcaggactcactgtcacacaaggctgtgcagacctctagactactgactagggacctgacaggactggtcacgcagtctgaggcgggggccagtggctgggaacccacccctgtaagcccagagtccatcagttcccccaccactacacctccagaatacaaagcactatttaaggagatatttagttgcatcaagaaaacaaagcaggaaatagatgaacagagaacaaaatacccttctctctcctcttactcgtactgagactccagttgtaactgcttgttttcgctcacttgcctcccngttcagacatgtaagtgcagtctccaaagcttgacgttgctaatgacacctgcctcgttgctttgcttagttggcaaaagcaggaaaagaggtgacagagaatgttgactccaaggtccctaggaaatctcacgatacactggccgctggttggtacactgatttccaggaaaagccccagaagcagtagagggagagccatgtacttgggagtaggctgaagtacctaacagtgtagggtaaagaacagaattggaacagaactaaggctgttgctttcatagcatctcagactacttggaactccaaggactgcctaactaaagtactttcacaaacactaacattcagaaggatgttgagaaagcaagatctaatctgaaatggatgacattaacaagctccttaagcccctgaagttttattgcatctgctagcacttgaatgctgactgacaggcagatcctgatatatccaaattcgaattaataccatttgaaatggnaagtcttnttaacgcctgtttgtatgcccagcattcagctgttttactcaaagctaggcatgtcatagtaattgtcttttcagatggaaactagagaactctcctaggtgtgatctgcactggccacttggcaggcacaagctgcttccttcccctcaggtcttaacccttcccagacctgcagcgattcctgtcgactcccttacacagtattgatcttctgactgtggaaaccaaccttcctctcactttcacacctttaatttaaatctatttaagagaaccatggttctgattgttgtgtatatttttctaaaggctgaataaagctatctatgaatgtgaaaaaaaaaaaaaaaaaaaa

SEQ ID NO: 1494 - DNA, 6156 bp, Mus musculus
cgggcgggtgccgagcttcctatgactccctgaagttgtcgtgctcccctagcgtccgccacccgggacgtgtctctggtccccgtgcatcgtgtgcgtctcccgctccccggcccgcgcaccccgccggcatggacgtacacacccgctggaaagctgcgcgcccaggcgccctgctgctgtcttcgccgctactcctgttcctgctgctgctgtgggcgccgccttcgagccgcgcagctcagccagcagatcttctggagatgctagattttcacaatttgccctcaggggtaacgaaaaccacaggtttctgtgctactcgaagatcttccagcgagccggatgttgcctaccgagtctctaaagatgcacagctcagcatgcccaccaagcagctgtaccctgagtctggttttcccgaggacttctccatcctgacaaccgtgaaagccaagaaaggcagccaggccttcctagtctccatttacaatgagcagggcatccagcagttggggctggagctgggccgctcccctgtcttcctctatgaggaccacacagggaagcccgggcctgaagagtatccgcttttccctggcatcaacttgtccgatggcaagtggcaccgaattgctctcagtgtctacaagaaaaatgtcaccttgatcctcgactgtaagaagaagattacgaagttcctcagccgcagtgaccaccccataatagacaccaatgggattgtcatgtttggctcccggattctggatgatgaaatatttgagggtgacatccaacagttgcttttcgtctctgacaaccgagctgcctatgactactgtgagcactacagccccgactgtgacactgcggtccctgacacacctcagtcacaggaccctaacccggatgaatattacccagaaggagagggtgagacctattactatgagtatccatattatgaagaccctgaagacccgggaaaggagcctgcccctactcagaagccagtggaagctgccagagaaaccacagaggttcctgaggagcagacccagcccctacccgaagcccctacagtgcctgagaccagtgacacggctgacaaggaggacagtctagggatcggggactatgactacgtgcccccagatgactattacactccacccccatatgaagactttggatatggcgagggtgtggagaaccctgaccagcccaccaaccccgactcaggggctgaggtccccaccagcaccactgttacctccaacacctccaatccagctccaggagaagggaaggatgacctgggcggcgaattcaccgaggaaaccatcaagaatctagaggaaaactactatgacccgtactttgaccccgactccgactccagtgtctctccatcagagatagggccaggcatgcccgctaaccaggacaccatctttgaggggattggaggaccccgaggtgagaaagggcaaaagggagaaccagccatcattgagccggggatgctgatcgaggggccccctggccctgaaggccctgctggtcttccaggacctccaggaactacaggtcctactggccaaatgggtgaccctggagaaaggggtccccctgggcgcccaggtcttcctggagctgatggcttgcctggccccccaggtaccatgctcatgctgccgttccggtttggaggcggtggcgatgccggttctaagggccccatggtctctgcgcaggagtcccaggcccaggctatcctccagcaagccaggttggcactgaggggaccagctggcccaatgggtctcaccgggagacctggccccatgggtcctcctgggagtggcggtttgaaaggtgagccaggagacatgggacctcagggtcctcgaggtgtgcaaggcccacctggcccaacagggaagcctggaagacggggccgtgctggaagtgatggagccagaggcatgcctggacaaacaggccccaagggtgaccgtggttttgatggtctggctgggttgccgggagagaaaggccatagaggtgaccctggtccttctggcccgcccggaatcccaggagatgatggagaaaggggtgacgatggagaagttgggcccaggggactgcccggggagcctggaccacgtggtctgcttgggccaaaaggccccccagggcctcctggacctcctggtgtaacgggtatggatggccagcctggcccaaaaggaaatgtgggtccccagggagagcctgggccgccaggacagcagggtaatcctggtgcccagggtcttccaggtccccagggtgccattggtcctccaggagaaaagggtcctttggggaaaccaggtctcccaggaatgccaggcgctgatggacccccggggcaccctggaaaagaaggtcctccaggagagaaaggaggccagggtcctcctggcccccagggtcccattggctaccccggtccacgaggagtcaagggggcagatggcatccgaggtctgaagggcaccaagggggagaagggtgaagacggcttccctgggtttaaaggcgacatgggaataaagggtgaccggggggaaatcggcccacctggtccccgaggagaagatggtcctgaaggtccaaagggtcgaggtggtcccaatggtgatcctggtcccctggggcccactggggaaaagggaaagcttggcgtgcccggattaccggggtacccaggaagacaagggccaaagggttccattggattccctggcttcccgggcgccaacggagagaagggtggcagggggacacctggaaagccaggaccacggggacagagaggcccaacgggcccgcggggtgaacgaggcccacgaggcatcacggggaagcctggccctaagggcaactccggaggtgatggcccagctggccctcctggtgaacggggacccaacggaccccaaggtcccaccggctttcctggacccaagggtcccccgggcccaccaggcaaggacggactccctggacaccctgggcagagaggggagaccggtttccaaggcaagactggccctccagggcccccaggagtggttggccctcagggtcccacaggagagacgggccccatgggtgagcgtggccatcctggtcctccaggccctcctggtgaacagggcctcccaggtgctgctgggaaagaaggaacgaagggtgacccaggtcctgctggcctccctgggaaggatggccctccaggattgcgtggattccctggggaccgagggctacctggccccgtgggagcccttggactcaaaggcagtgaaggcccccctggcccaccaggtcctgcgggttctccaggggagagaggaccagctggttccgctgggcccatcggaattccagggagacctgggcctcagggacctccggggcctgctggagagaaaggacttcctggcgagaaaggtccacaaggcccagctggccgagatggcctccaaggtcccgtggggctccctggaccagccggcccagtgggtcctcctggagaagatggagataagggagagatcggagagccagggcagaagggaagcaagggcgacaaaggcgagcagggtcctcctgggcctaccggtcctcaaggcccgattggacagccaggcccttcgggagcagatggtgaacctggccctcgtggacagcagggcctgtttgggcagaaaggagatgaaggttcaagaggtttcccaggaccccccgggccagtgggattgcagggtttgccaggacctccaggagaaaagggcgagacaggagacgtgggccagatgggccctcctggtccaccaggcccccgaggaccctctggagctccaggtgccgatggaccacagggtcctcctggagggattggcaaccctggtgcagtcggagaaaagggagaacctggtgaagctggagatcctggccttccaggagaaggaggtcccctgggacctaaaggagaaagaggggagaagggagaggctggcccctctggtgctgctggaccccctggacccaaaggccctcctggagatgatggccccaaaggcagccctggccctgtgggctttcctggagatcctggtccccctggagagccaggccccgcaggtcaagacggcccacctggtgacaaaggggacgatggtgaacctgggcagacggggtccccgggccctactggtgaacctggtccatctgggcctccaggaaagaggggtcccccaggccctgcaggccctgaaggcaggcagggggagaaaggagccaagggagaagctggcttagaaggccctcctgggaagactggccccattggcccccaaggggcccctgggaagcctggccccgatggtctccgtggaatccctggtcctgtgggtgagcaaggcctcccaggatccccaggccccgatggtccacccggccccatgggtcctccaggactccctggcctcaaaggagactccggtcccaaaggtgaaaagggccatccaggcctgattggactcatcggccctccgggagagcaaggtgaaaagggtgaccgtggactcccaggcccccagggttcatctggtcctaaaggagatcagggaatcacaggtccttctggcccacttgggcctcctggtcctcctggcttgccgggccctccaggtcccaaaggtgctaagggctcttcgggtcccaccggcccgaagggtgaggcaggccacccaggactccccggcccacctggccctccgggtgaggtcatccagcccctgccaatccaggcctccaggactcggcggaacattgatgccagccagctcctggacgatggggctggggagagctacgtggattatgcagatggcatggaagagatctttggttccctcaactccctgaagctggagattgaacagatgaagcgaccactgggcacccagcagaacccagcccgtacctgcaaggatctacagctctgtcatcctgacttcccagatggcgaatactgggtcgatcccaaccaagggtgctccagggactccttcaaagtctactgcaatttcacagctggagggtccacgtgcgtcttccctgacaagaagtctgagggagccagaatcacttcttggcccaaagaaaacccaggttcctggttcagtgaattcaagcgtgggaaactgctctcctatgtggatgctgaaggcaaccccgtgggcgtggtacaaatgaccttcctgcggctgctgagcgcctctgcccaccagaacgtcacctacaactgctaccagtccgtggcctggcaggatgccgccacaggcagctatgataaggctatccgcttcttgggctccaacgatgaggaaatgtcttatgataacaacccctacatccgtgccctggtggatggctgtgctaccaagaaaggctaccagaagacggtgctggagatcgacacgcccaaagtagagcaagtccccattgtggacatcatgttcaacgactttggcgaagcctcacagaaatttggatttgaagtggggccagcttgcttcctaggctaggagctgctgagcccaccggtctccagagcaacctcgtgacctcagcaccccacctgtgggcgtcctgtgcacggtccatcccggacagtgaacatttctcacccctgcctgcctgactcatctgtgcctcggaccctccgtggcattggaccccatgcccagagagaacaaagggaaagagccgtgtccccacggagccgaatcacatgacctagccacaccacagcctcttgccacccttcagctctcaggataggttcattaaaggtgttaatggaccgttggccgggagtgggggcgggacagtatttgaagatcactttaaaaaaaattcaacttgaagatatgtattccccctgaccttcaaaagatgttctgaggtggtcttgtaaaggtcgccaaagcctccatttttttttaaaacaaccctcaacacatccactcagaggccaaatgtcattccacacgtgcctttccgatggattaaaggtgcttatgtttttgtgag

SEQ ID NO: 1495 - DNA, 1053 bp, Mus musculus
gggcgaattgggtacgcggcccccccccccaaagcagtgctcgaacgagattgcaggggtcatgccgtggggtcgtctctgcgcctcgtccctaccgggatgctgaacctggcggcgctgctgtggcgccggctcctgcgcaagcgctggtgctcgccctggttttcggcctctcgctagtttacttcctcagcagcaccttcaagcaggaagagagggctgtgagagaccggaacctcctccaggttcaagaccgggaacagcccatcccgtggaaggtgcagtttaacctaggcaacagcagccgacccagcaaccagtgccggaactctgtccaaggaaaacacctcctcactgatgagctgggctatgtctgcgagaggaaggacctgctggcgaatggctgttgcgacgtcagcgtccccagcacaaagcagtactgctgtgatgggtgcctggccaatggctgctgtgaagcctacgagtactgcgtctcctgctgcctgcagcccagcaagcaacttctcctggagcgcttcctcaaccgggcagctgtggccttccagaacctcttcatggcagttgaagaccacttcgaactgtgcttggctaaatgcaggacctcctcccagagtgtgcaacacgagaacacgtaccgtgaccccatagccaagtactgctatggagagagcccgcctgaactcttcccggcgtgaggcctgacggagatacacacccagaaccaggctggtccactggagtaaagaaggagaaagccacacaagggtccttgtggctttgggtgtctccagctccctcaccgacagctggagctgatgggcggagctgttctgtagagcaggctggatgaggtcctggcaccttgcaggcccctgggactgctggtcagaggccaggcacttgcttctgttttgctcctaccttgtagttatttattgacttttcagagtggtggaaggtacggtcattttttaatttttttggtgcaggacacctctgcctgtccagatgaatacattggaggaggtgacg

SEQ ID NO: 1496 - DNA, 1845 bp, Mus musculus
gcctctgccactcttgctccgggaccccagagaccccagcgctcctacgattcacagccaccgcgccctcattcccttgttgcagtttttccagccgcagcaagccagcccaccttcgaagccatgtctaccaggtctgtgtcctcgtcctcctaccgcaggatgttcggtggctccggcacatcgagccggcccagctccaaccggagctatgtgaccacgtccacacgcacctacagtctgggcagcgcactgcgccccagcactagccgcagcctctattcctcatcccccggtggcgcctatgtgacccggtcctcggcagtgcgcctggcggagcaggcgtgccgggcgtgcggctgccttcaagactcggtggacttctcgctggccgacgccatcaacactgagttcaagaacacccgcaccaacgagaaggtagaactgcaggagctgaatgaccgctttgccaactacatcgacaaggtgcgcttcctcgagcagcagaacaaaatcctgctgggctgagctcgagcagctcaaagggccagggcaagtcgcgcctgggcgaccctgtacgggggaggaaatgcgggagctgcgccggcaggtggatcagctcaccaacgacaaggcccgtgtcgaggtggagcgggacaacctggccgaggacatcatgcggctgcgagagaaattgcaggaggagatgctccagagagaggaagccgaaagcaccctgcagtcattcagacaggatgttgacaatgcttctctggcacgtcttgaccttgaacggaaagtggaatccttgcaggaagaaattgcctttttgaagaaactgcacgatgaagagatccaggagctgcaggcccagattcaggaacagcatgtccagatcgatgtggacgtttccaagcctgacctcactgctgccctgcgtgatgtgcgccagcagtatgaaagcgtggctgccaagaacctccaggaggccgaggaatggtacaagtccaagtttgctgacctctctgaggctgccaaccggaacaacgatgccctgcgccaggccaagcaggagtcaaacgagtaccggagacaggtgcagtcactcacctgtgaagtggatgcccttaaaggcactaacgagtccctggagcgccagatgcgtgagatggaagagaattttgcccttgaagctgctaactaccaggacactattggccgcctgcaggatgagatccaaaacatgaaggaagagatggctcgtcaccttcgtgaataccaagatctgctcaatgttaagatggccctggacattgagatcgccacctacaggaagctgctggaaggcgaggagagcaggatttctctgcctctgccaaccttttcttccctgaacctgagagaaactaacctggagtcacttcctctggttgacacccactcaaaaagaacactcctgattaagacggttgagaccagagatggacaggtgatcaatgagacttctcagcatcacgatgaccttgaataaaaattgcacacacttggtgcaacagtgcagtaccagcaagaaggaaaaaaaaatcgtatcttaggaaaacagctttcaagtgcctttactgcagtttttcaggagcgcaagatagatttggaatagaaagaagctcagcacttaacaactgacaccccaaaagacgtagaaaaggtttacaaaataatctagtttacgaagaaatcttgtgctaggaatactttttaaagtatttttgaataccattaaaactgcttttttccagtaaatatctgaccaacttgttactgcttcaataaatcttcaaaaatacg

SEQ ID NO: 1497 - DNA, 2196 bp, Mus musculus
ctagcggcggcggcccgaggggatcctcaaggaagacttgcatttagtaagttgtgtataatcagtgcaagcgaaattaaggaaaaatggatatagaaaatgagcagacactgaatgtgaaccccactgaccctgacaatttaagcgactctctcttttctggagatgaagaaaatgctggcactgaagaaataaagaatgaaataaatggaaattggatttccgcatctactattaatgaagctagaatcaatgcaaaagccaaaagacgactgcggaaaaattcatcccgggactctggccgaggagactcagtcagtgacaatggaagtgaagcggttagaagtggagttgctgtgcccaccagtccaaaaggaaggttgctagataggcggtccagatctgggaaaggaagggggctgccaaagaaaggtggtgcaggcggcaagggtgtctggggcacacctggacaggtgtatgatgtggaagaggtggatgtgaaagatccaaactatgatgacgaccaggagaactgtgtttatgaaactgtagttttgcccctggatgagaccgcatttgagaagactctaacaccaattatacaggaatactttgagcatggagatacaaatgaagttgcggagatgttaagagacttaaaccttggggagatgaagagtggcgtgccggtgttggcagtgtccttagccttggaggggaaggccagccaccgggagatgacatccaagctgctttctgacctttgcgggacggtgatgatcacaaatgacgtggaaaagtcatttgacaagttgctgaaggatctccctgagctagccttggacactcctagggcaccgcagttggtgggccagtttattgctagagctgttggagatggaatcttatgtaatacctatatcgatagttacaaaggaactgtagattgtgtacaggctcgagctgctctggataaggctactgtgctcctgagtatgtccaaaggcgggaagcggaaagacagtgtgtggggatctggaggcgggcaacagcctgtcaatcaccttgttaaagagattgatatgctgcttaaagagtatttactctctggagatatatctgaagctgaacactgccttaaggaactggaagtacctcattttcaccacgagcttgtatatgaagccattataatggttttagagtcaactggagaaagtgcattcaagatgatcttagatttattaaaatccttgtggaagtcttctactattaccatagaccaaatgaaaaggggctatgagagaatttacaatgaaatcccagacattaatctggatgtcccgcactcatactctgttcttgagagatttgtggaggaatgttttcaggctggaataatttccaaacaactccgtgatctttgtccatcaaggggaagaaagcgttttgtaagtgaaggagatggaggccgtcttaaacctgagagctactgagcacagcaactcttacagtcttaggtgttaccaagaacagatctcaactgtaagagttgtcagtacaggttttctcttccttttgtttttgttattgttttttttttttttttttttttttaaagaatttgttttgggtacaaggcatttctaaaattttataaacttaagtttaatgggattttttgaaggattttctttctttttctttttctttctttttttttgaggggaaattaatggagggacagaagaggaaccaccgaagtgtgggtgttctgataagctactttctaagtgccatgtttaggacctgatcattccaagtttcacgttcatgtatgactgccgctcctttctttcaaggacagtgttttttgtagtaaaatcactggtttattcaaagctttagttaggggtgagtcaagctactaaaccccatgttggctgctgctgtggaaatgctgtcctttgagagtaaacacacacacacacacacacacactttttgttttaaagaatttttaaaaaaacgagttagtcatgagactttttcatctttccagggaatatattgattggtcttaaatattagacagttaagtaaatggtggctggaacatctatttttctacaaaactggaaaaacgaacccggttctacaagaatgtacagcaaaataaaacatgtgaaacactgt

SEQ ID NO: 1498 - DNA, 1440 bp, Mus musculus
aacgcgcgctctttctccgacagctgctccgggagccccgcgcgccgtgcagttctgtgccttgcctgtctgtcccttccgattgtgcctagcgatgaccacccagcagattgttctccagggcccgggtccctggggtttccgcctcgtgggcaaggacttcgaacaacctctcgccatttcccgggtcactcccgggagcaaggctgctatagcgaatttatgtattggagatttaatcacagccatcgatggggaagataccagcagcatgacacacttggaagctcagaacaaaatcaagggctgcgcagacaacatgacgctcacagtatccaggtctgaacagaagatttggtctcctctagtgaccgaggaggggaaacgtcatccctacaagatgaatttagcgtcggaaccccaagaagtcctgcacataggaagtgcccacaaccgaagtgccatgccatttactgcctcacctgctcccagcacccgggtcatcacaaaccagtacaacagcccaactggcctctactcatccgaaaacatctctaacttcaacaatgctgtggagtcgaagacttcagccagtggggaggaggcaaacagcaggcccgtggttcagcctcatccctccggcagccttatcattgacaaggactctgaagtttacaagatgcttcaggagaagcaagaattaaacgagccccccaaacagtccacatccttcctggttctgcaggagatcctggagtcagatgggaaaggggatcccaacaagccatcaggatttagaagtgttaaagctccagtcaccaaagtggctgcatctgttggaaatgctcagaagctgcccatctgtgacaaatgtggaactggtattgttggtgtgtttgtgaagctgagggatcaccatcgccaccctgaatgctatgtgtgcaccgactgtggcatcaacctgaaacagaagggccatttctttgtagaggatcagatctactgtgaaaagcatgcccgggagcgggtcactccgcctgagggctacgatgtggtcacagtgttccgcgagtgatggagaggacctgccctgtctactgccctccagccagcctgctgcacctggttctcggaatattctggctctctcctccctgacagtcctgtgcttacttagtgttagtcatgcgcaataaacattgggtttcgtctgggctgactgactcccactggcagggtgacatctgcttttatattattgggagatggttttgtccctgtcccttcacccacacctcaatgcaccttcttcacttggagtcttctctgctgcaaatggacattggtccattggaactaagccaaatgtagtatctctgatgttacttggttttacttaataaatttagactttaaagcaaaaaaaaaaaaaaaaaaaaa

SEQ ID NO: 1499 - DNA, 1183 bp, Mus musculus
agtttcccctaaagtcttccctggttgtaggcttcagatggaagcccccagttcttccagctctgcctggaacacgcacagcttctaggctcaatgccttcactatccagccccacgtccccaggctccctcagaataggccagcctcactttgtcctacaggccaccttgcccatgtgggtgtcaggtaggaggtgaggtggcctggagcagcttcccagggtgtttgttcgcaagcactttagcatttctgtttacatgcgaactgccctagctgttcttaccacgcatcttctcggcacagccatcagggccaggcctcatttccctgctacttctggactgggctctgacatctgcttgtccttggtcttctagagccatccatctctgtggtatcctgcaaagggttccgtttcagcctcaatatggcttggggttggagccaactgcacactgggtggtggatgctcagagccaccctctacaggcctagggcccagggaggtgggcaagcactactccagccagcctggccctaacactcttggtactgccgtcctgccatgggccccatcccccttcctgcctggtctttccctttgcacctggactcaggagtgcctgggccattccaagctgggcctgggtgcctggcctccacatgccttgggctggctctgctctccagctgccccactctcttatggttggacagctagacagagcagcaggggtgagggccttgatgtgtccccaagagacactgcattgagtccaggcacaggccagcaacctctgttggttcagaggggtccgactgccaccctctactccagtttccccagttggatctggtggctcacatcggtgctacacaagctagagtagatatatttagagagagaaagatatttttaaggtgaagcccatgattagctgtcctttaatgccgcagaacactccctcttacccccttcctcccacccccacccaaaaaaaatccctggtcatttggatggtctgagtagaccaggcctcggccattgcttctctggaagcggcagagccaatacgctcagccatcagatgtgtaaatatacggctatttcctattttacggttcttcagatttagtacttgtaaataaacacacattagggagagattaaacatttttgcc

SEQ ID NO: 1500 - DNA, 1965 bp, Mus musculus
ggcccctccctttaggaggcgcgcgcccgcacgctcggcgtgcgtgcggctgcggggagtccgtgttcgcgcgcagagagcgagcgcgggcctgatcgttgcgggtaccacgggcgcacgggaggtgtgagccttctaagtagcatatggcaaaacgttaggccaagctgtgacagcccctgtggttaagaacctgtgccttctgaacttctctgctgctgtggatggccccggctgtcttgactgcccttcccaataggatgtcactgagatccctcaagtggagcctgctgctgctgtccctgctgagcttcctggtgatatggtacctcagcctcccccactacaatgtgatcgagcgcgtcaactggatgtacttctatgagtatgagccaatttacagacaagactttcgcttcacgctccgcgaacactcgaactgttctcatcagaacccattcctggtcatcctggtgacctcacgcccctcagatgtgaaagccagacaagcccattagagttacttggggtgagaaaaagtctggtggggatatgaggtgctcacgtttttcttactaggccagcaggctgaaagggaagacaaaacgttagccctgtccttggaggatgagcacgttctctatggtgatattatacggcaagactttctagacacatataataacttgaccttgaaaaccattatggctttcaggtgggtaatggagttttgccccaatgccaagtatattatgaaaacagacactgatgttttcatcaatactggcaatttagtctattatcttttaaacctaaaccactcagagaagtttttcacgggctatcctctaattgataactattcctatagaggatttttccataaaaaccacatttcataccaagagtaccccttcaaggtgttccctccctactgcagcgggctgggctacattatgtccggcgacctggtgcccagggtctacgagatgatgagtcacgtgaagcccatcaagtttgaagacgtttatgttggcatctgtttgaatttgttaaaagtggacattcatattccagaagacacaaaccttttctttctgtacagaatccacttggatgtatgtcagctcagacgcgtgattgcagcccatggcttttcttccaaggagatcatcacattctggcaggtgatgctgaggaacaccacatgccattactaagcccatccatcacccatctaggcaagggaggaaggacactgtagacagggtcagagttagcactgtgggaaactcgggaagttgagcatgctggtttgcctgggctgaaactcatggagctccctagacaggagtcaaggcctgaacttagtgattgctttcacagaatttaacttgggtcgtttaaaggtgacagaggagtcaaacataatgcaaacgaagagttttgctaaccaaatcaaagggtcagacagtctggatggctcaggctgtagattagaatttcttaagatttccctaaaagaaaaactaactagtccacagccagaatacagtgtggagttgtatttattagacagtatagttacataatggttcagtgtgtatcttaagtggttattatgtaaagatatatatatatatttcttgtaaaaagctttacagagttatattgaaaacattcatttgtattgttttcatttgcaaggtactcaatgatatggtacgtaagagttatcaaatcaagtattatttaatgtcatttcaattttctaaatgtttaaaggttatgtatggtctcagtattatatgatgaattgcctttcacatttgagctttgttttattcaccactgatcagtttaattaatgtggcgttaatgtgacatcaaaggttattactgactgtccgtaatctgttgaactctgttgcactgtaaacatagagaattaaagcaagaaaattc

SEQ ID NO: 1501 - DNA, 768 bp, Mus musculus
tcccaggcctggtggctctgagtgccctcagcatggcgctgcacacggttcttatcatattgagccttctgccgatgttggaagctcagaacccagaacatgccaacttcaccataggcgaacctatcaccaatgagaccctgagctggctctctgacaaatggtttttcatgggtgcagctttcagaaaactcgagtacaggcaggcaattcaaacaatgcagagtgaatttttttaccttaccaccaacttgataaacgacacaatagagcttcgggagtctcaaacaataggtgaccagtgtgtctataactccacccatctaggattccagagagaaaatgggaccttctccaagtatgaaggaggagtagaaacctttgcccaccttatagtgctgaggaaacatggggccttcatgcttgcctttgacctcaaggatgagaagaaacggggactgtccctctatgccaaaaggccagatatcaccccggagctgcgggaagtattccagaaggctgtcacacacgtgggcatggatgaatcagaaatcatatttgtcgactggaaaaaggataggtgcggtcagcaggagaagaagcagcttgagttggggaaggagaccaagaaagatcctgaggaaggccaggcatgaactcagctctctgaactccgagggctgtccacaggctcaccaaaccccacccctcctgtgcactttgattctgtctctgccacaataaaggtttgctgacatagtcaatatc

SEQ ID NO: 1502 - DNA, 1244 bp, Mus musculus
ttaaagtcatttgtgaatgggtactacagctctcattgacatcagtaaggtagcattacctgtttattctctgctacatcttacagaagaataaactggtgagagtatatattttctatatatatacatatatatatatataaatgtgtatatatatatattgacttgttacatgaaaatgttaaaattggtttttaaaggtaatgtaaataatgatttccttaatgaaaaaatacatattttgtattgttctaatgcaacagaaaaaccttttaatttctttggttcctgtatattccatgtattaagtgtaaatataatcagacaggtttaaaaaaatgtgcatgtatgtatacagttgcaagtctggacaaatgtataaaataaaccttttattttaaatctgcgtacctgctgcatgacgacaagtgcatgggggaccctgtgcatctgtgcattcgacagaaaccgtcattaagtcagggcagatggatcatccaacacgacagtattccatttccggacatgacctctgtggcttatgctttgtgagaaaatgtgcttcgaattcaagggtcttaatttttttttctttttaatcaaccactttcaacattaaagaactcacagagcaacttcacaactcttcaaatcccattggaaacataaccaggaatagtccagtgttcctaaatgctggaatataggcacattaccgttcatggtaagaatcttgggtttacagccagttttgatgcagcctgcttagtgatattaatttgccatttttattattaaatttgatttctttatgtgatgtaatgaattgtacataccgcagtgtgaatttttttttaaatcttttagtgtttacttcctgcagtgaatttgaataaatgagaaatgcattgtctttaacttgaaatggcttcttttttgtgggctttctctggtttttaggttttccattaatgttaaagtccaaggtcatagagagaaaaaggaaaaaagcaatagacatgtattttgtctgtctcagaaaaatgaagggggaaaaaaataagcaactgattagcaagttagtatatttagaaacctgtaattaaagtatagctcaaaatgacagctggcctgtggtctgtcttccatttctcagtatgtaactgaatgaccactacatggttttgttttttttttttaaactgaagtttgtacagtgttccaaaataaagttaattagatac

SEQ ID NO: 1503 - DNA, 670 bp, Mus musculus
tcataagccgcaggcccttcaccatccctcaggtgctgagaaccaaaatgcctggcgaagtgcaggaggaggagtgggatgaagaggatgaggtggaagaggaggcccccaagccagaccatttcatccaggatcctgcagtgctgagggaaaaggctgaagccaggcgcatggccttcctcgccaggaaggggtatcggcctgagaactccacggcagtaacaggcggcccccggggccatgggcaaagccgggaaacaacccaggaacgcaggaagaaagaagccaacaaggcagccagagccaaccacaaccgtagaaccatggctgaccgaaaaagaagcaaaggcatgattccatcctgagaccacaagctgcctggacgagggacgccttcaaggcagctctgccctcatgaccctcaagacctaccagccagccgtgagcgccttcttgtcaaacacacagtgccttatcctttggtggaggaacccagtgccatcaagcaggctgtctcccagctgtgctggcgggaaaggatggggatgccgaaccaaagtgtctttcatcttgtgcagcgaggcaccacctccggaagtcctggatggcaggagacctgtatattcagaagcaacgaaaggcccatgaataaagtttctgaccctccggc

SEQ ID NO: 1504 - DNA, 2543 bp, Mus musculus
ccagcacatcccggtgcttcttctcaggcgcagcagctttcctctgcggcagccgcacctcgccaaacggcgtagtgctgcaggctcgcccgagttgctgcttgctgcctctgctgccgctgccgcgggccgccctgcgcggaccgtaggctgcgcagacgccacctccgatcctgtatcgctgcgggcgcctcggcgcgccctgtgatccgcaatcctgcggcgggcggcatgggataatgcggccatggtgcgccgagatcgcttgcgcaggatgagagagtggtgggtccaagtagggctcctggctgtgcccttgctggctgcgtacctgcacatcccgccccctcagctctcccctgctctgcactcatggaagacttctggcaagtttttcacctacaaaggcctacgcatcttctaccaagattctgtcggtgtggtcggaagccctgagatagttgtgcttttacatggctttccaacatccagctatgactggtacaagatctgggaagggctgaccctgaggttccatcgagtgatcgcccttgatttcttaggctttggcttcagtgacaagccgagaccacatcagtactccatatttgagcaggccagcatcgtagagtcccttctgcggcacctggggctccagaaccgcagaatcaacctgctgtctcacgattatggagatatcgttgctcaggaactgctgtacaggtacaagcagaatcgatctggccggctcaccataaagagtctctgtctgtcgaatggaggtatctttcctgagacgcatcgtcctctccttctccaaaagctcctcaaagacggaggtgtgctttcccccatcctcaccaggctcatgaatttcttcgtgttctctcgaggtctcactccagtctttggaccgtatactcgacccactgagagtgagctgtgggacatgtgggctgtgattcgcaacaatgacggcaacctggtcatcgacagtcttttacagtacattaatcaaaggaagaaattcagaagacgctgggtgggagcgcttgcttctgtgtccatccccattcattttatctatgggccattggatcctataaatccgtatccagagtttttggagctgtacaggaaaacgctgccgcggtccacagtgtcgattctggatgaccacattagccactacccacagctagaggatcccatgggcttcttgaatgcatatatgggcttcatcaactccttctgagctggaaagagtagcctccctgtattacctcccccattctcgtatctgtgtgtattccacttagaaatgcccaaaagaggtcctggccatcaaatactatcctttcatcaaagtccatttccttcacattggtgaacaaactacaggaatcaggcagctggaactctatagggtgacacaatagtccacctcatctctaagggtgacatgataatcctctcatttctgtgacatctgaccaaataaatagagctgctgttgttttgtgttattaggacattctgactaataacacttttcatttatgtagaaaaacagcattagatattcttttttggtgttaaatacctcaaaaaacccccaaaacataataacaacaaaaacccagtttctgtggactttattaaaatatttagaagtgctcccttccggcccaatcctaactggaatacagagtgagggaggagcttgctatctccctttcaggatctgttacagtttatgagagggatcatcttgtcactcctttacatttagtttcatcggctgcttctaacagacatttttgttaaaacagacattggcttagggggctggggaagtagctcagtggtagtgtgcctgcctagcatgttaaagcccttgggttcagttcccagcactctccccaccccagcccatcgaacctaaatagacattggcgtaaatacagtgttctgagtatgagtctaagactgatttgcatactcatgtatatatttacaaacagttggcccttgctaagaagaaaacctcattatatatagaatttgtgaataaacaggttgaaattatttgcagaatttcctaaaactgccaggcattaagaactgcatctgtgccagagatttactgttactgtttagaaagtccaagctgaatagtaaataacagcctaggggcagctcctccagggctgacgtggaggggaagggacatgtaagtgcggaatgaatgtccattggctcctctatgatggccgctcagcatcccgctggctgttcagaaaggctttctcatataactcctgtacttaaacaggcaagtttccagagacattaagaacaaattctgaaagacctaagagcaaatggtgctgaatacttttttaagccacagttttaacttagttaaagcagcattattgattattttaaattcgttttttaaattagaaatttcaagtatagcaactttgaaactggaatgaatgagtgtttattttctattaataaaaacaaactgtgac

SEQ ID NO: 1505 - DNA, 1540 bp, Mus musculus
ggagaagccggcgtccgcggagcgggttttcaggctacgaggaagtaccatttaggtccagcagcgcggcaggaatggaggagtttgggatctcccctggccagcttgtggcagtgttctgggacaagtcatctcctgaggaagccctaaaaaagctggtggctagactgcaagagttaactggcagcgagggccaggtattcatggaaaacgtcacccagctgttgcagtcttcgcataaggaatccagcttcgatgtcattctgtcgggtgtagtcccaggaagcacctctctgcacagtgctgaggttctggctgagatggcccggatcctccggccagggggctgtctttttctgaaagaaccagtggagacagctgaagttaacaatgacaaaatgaagacggcctctaagctatgttcagccctgactctttctggcctcgtggaaataaaagagttgcagagggaggccttaagccctgaggaggtacagtccgtgcaggagcacctgggctaccacagtgacagcctgcgctcagtccgtgtcactggcaagaagccaaactttgaagtgggttcttctagccagctaaagcttcccaacaagaagtcttcttcagtgaagcctgttgtggatcctgctggtgccaagctctggaccctctcagcaaatgacatggaggatgacagtgtggatctcattgactcagacgagctgcttgatccagaggatttgaagaggcctgacccagcctccctgaaggctccttcatgtggggaagggaaaaagaggaaggcctgtaagaactgcacctgtggcctcgcagagtaactggagcgggagcagtccaaggcgcagagctctcagcccaagtcagcctgtggaaattgctacctgggtgacgctttccgctgtgccaactgcccctacctcgggatgccagccttcaagcctggcgagcaggtgctcctgagcaatagcaatctccaggatgcctaggagggacctcaagcccacacacctcctcctccagcaactcctgtcctcagctcctcccacggcctcctcccacctctggattcaggcgctctgaaaacactcacagggagaggcttgcagccgagcgagcgagcgaagctgctgtgggcagtggggtggggtgctgctgtgtcttgaaagaccaaggattgaggggacctgtctcttagtgttaggggaagagggtggatgcgcctaaggaactctgctcctggtgttacagtgctgtccctctccacccttgagtatttatgctgagtaagctccaggctccgctcagtgatgctgccacctgctggacttcctcaggatgtagttcttggagccatgggttagctgtcaaagggcctcaggggcaccaaagaagtcactcccccagttgtgatccatcttgtgtccctctgcctttctcacctcaccccgttttactgtagtgttgtatctgtgtcctgttgtcatttctgttaaatggtattaaacttttgtgtttttatgtc

SEQ ID NO: 1506 - DNA, 1328 bp, Mus musculus
  misc_feature 35: n = A,T,C or G
aatcgccgatgtggtggagaagattgcgccactgntggtccacatagagctcttttgagacaccccctgtttggccggaatgtgccgctgtccagtggctcgggcttcatcatgtcagaagccggtttgatcgtcaccaacgcccacgtggtctccagctccagcactgcctccggccggcagcagctgaaggtgcagctgcagaatggggatgcctatgaggccaccatccaggacatcgacaagaagtcggacattgccacgattgtaatccaccccaagaaaaagctccctgtgttgctgctgggtcactcagcagacctgcggcctggcgagttcgtggtggccatcggcagcccctttgccctgcagaacaccgtgacaacgggcattgtcagcactgcccagcgggatggcaaggagctgggtctccgggactcagacatggactatatccagaccgatgccatcatcaattacgggaactcaggaggacccctggtgaacctggatggcgaggtcatcggcatcaacacgctcaaggttgcagctggcatctcctttgccatcccctcagatcgcatcacacgcttcctctctgagttccaaaacaagcatgtgaaagccctctcaccagcactgcactgagagcaggggccttcctcctgcttgccccctcctttgcggccctgccagccacacacaaggaccccagtacagccaagactggtcccatgaagaactgcaaccgaggagcctcgttctgttccaagtggccctatatgaagatgacaggagcaggcagagcctgtcccttccaggaatccgagacaccttctggtgaatagtgggaactagctgccttttctcttggccggtaggaagctcagaactagaccagggttcctagaccattggtagccttggctctttgtctagtggccagggctttccagtttagcttgtttatggggtcggaacaccacccacatacactggcctatgggtgattactgtgctggaaatgggccagcggccttttgtcccctagctgtctcatcttttctcagacaagaagtccccggggcaggatctgctcctctgtggcagagcaactatcctagtcacagtgacctggtcactcagcctgggctctgcggaaatgctcacacccatcccagagttatgttatcacccaaggacagtgcttacctactacaagagggtctgacgaggcttagctaagtggggtccattgacttaaagtccttctgaaatttgtgcttatttatgcttttccatttttaaataaaaacatcagatgatct

SEQ ID NO: 1507 - DNA, 933 bp, Mus musculus
gcgtctctgctgcttttgtgctctccctcccgccatggccagccttaaggatctcgaagggaagtggcgcctgatggaaagccacggctttgaggagtacatgaaagagctaggagtaggactggctcttaggaagatggctgccatggccaagccagactgtatcattacgtgtgatggcaacaacatcacggtcaaaaccgagagcacagtgaagacgactgtgttctcttgtaacctgggagagaagtttgatgaaacgacagctgatggcagaaaaactgagacggtctgcaccttccaagacggtgccctggtccagcaccagcaatgggacgggaaggagagcacgataacaagaaaactgaaggatgggaagatgatcgtggagtgtgtcatgaacaatgccacctgcactcgggtctatgagaaggtgcaatgagggcttcctcgtcatcctggacaggagttagctgccagagtgaatatgctcaattcagtgagcggtcaaatgcaacaaacagcttcacttctttggttttatttttcatgactgttgagttctctttatcacaaacactttacatggaccttcatgtcaaacttggtttacccaggatcattcctttggttagtaaataaacgtgttagtgctaatttatgatatgtgtgtgggttcttcaaggaattgaaaattggtgatacattataacacttagaaattgaaaagtctctggtattcttaggggatcccttatgactggatatatcctagcaacttgtagacgtggccagcttcttttgcagtgaatacatgccccgtcatttaagcttgccttaaatcgtttgaactttgtcaactcaataattgagactattcctatcgaatgatagctacataaattttatagaataaagggagatccaagctta

SEQ ID NO: 1508 - DNA, 1082 bp, Mus musculus
gattgctggccaccacctcctccctagccgcagcccagctcaacccgcggcccgccgcgctgtcgctgcagtcatggctgctgacggggtggacgaacgttcgcctctgctgtcagcatcccattcgggaaatgtcacacccacagccccgccgtacttgcaggaaagcagccccagagctgaactcccacctccgtatacagccatcgccagtccaggaacaagtggtattcccgtgatcaactgtcgtgtgtgccaatctctaatcaacctggatggtaaacttcaccagcatgtggttaagtgcacagtttgcaatgaagctacgccaatcaaaacccccccaacagggaagaaatatgttagatgcccttgtaattgtctactcatttgtaaggatacatctcggcgaataggatgtccgagacccaactgtcgacgcataattaaccttggccccgtaatgctcatttctgaagagcaaccagcccaacctgcattgccgatccagccagaaggcacaagggtagtgtgcgggcactgcgggaacacattcctgtggatggaactgaggttcaacactctggcaaaatgcccacactgcaaaaaaatctcctcggtaggtagcgcccttccccggagacgctgctgtgcgtatgtcaccatcggaatgatatgtattttcattgcagttggattaactgttggcacacaagatttttcaaggcgatttcatgcaacctatgtgtcttgggcaattgcttatctgctaggtttgatttgccttatccgagcttgttactggggcgcaatcagagtcagttatccagagcacggctttgcttaagtctcctcatgaatccttgatgcaggcgagagtgtccagtagtccttgagaagctctgctggacgccttcaaatcatttatcctcctggattccatcctggtttgtatagtagtctcaagaatttgtgagtcttttctgaacagacgctcactgaagtacattatatgcaagttcattttgctgctaggttttcagacttggaaaaataaagctgtgtctctgttcttttaaatc

SEQ ID NO: 1509 - DNA, 4579 bp, Mus musculus
ggagcaagtggcagtgctgggtgttgggaccgtggctgtcactgcgctggagcatccctgagcttttgaacagagccgactagtcagcagtgcagcagccgcaactccacgccgctctcatctgtctcgtgtctccgctcaggcgatccttcctccgagactccgcacaaagcacattttccaaagcagtgcaagggagcgcccagccgcgtgcaggcggacgcacccttcctgtcctttgttccggggggatctgctgctgctcttctccccaagtcggagtctttcctccaggggtggcgggtcgccgaatacagctacgaagatgccgttggaactgacccagagccgggtacagaagatctgggtgcccgtcgatcaccgaccctcgttgcccagatcctgtgggccgaagctgaccaactccccaaccgtgattgtgatggtggggctcccagcccggggtaagacttacatctccaagaagctgactcgctacctcaactggataggtgttccaacgaaagtgttcaatgtgggagagtatcggcgtgaggctgtgaagcagtacagctcttacaacttcttccgccctgacaatgaggaagccatgagagtccgaaaacagtgtgccttagctgccctgagagatgtcaaaagctacctgacaaaggaaggtggacagattgcagtttttgatgccaccaatacaactagagaaagaaggcacatgatccttaattttgccaaagaaaatgacttcaaggcatttttcatcgagtcggtctgtgacgaccctactgttgtggcctccaacatcatggaagttaaaatctccagcccggattacaaagactgcaactcagcagaagccatggacgacttcatgaagagaatcaattgctatgaagccagctaccagcctcttgaccctgataaatgtgacagggacttgtcactcatcaaagtgattgatgttggccggaggttcttggtgaacagagtgcaggaccacatccagagccgaattgtatactacctgatgaacatccacgtgcagccccgtaccatctacctgtgtcggcatggcgagaatgagtacaacttgcagggcaagattgggggcgactcaagcttgtccagcagaggcaagaagttcgccaatgccctgagcaagttcgtagaagaacagaatctgaaggacctccgtgtgtggaccagccagctgaaaagtaccattcagaccgcggaggccctgaggctcccctacgagcagtggaaggcactcaacgagatcgatgctggtgtgtgtgaggaactaacctatgaggagatcagagatacctaccctgaggagtacgcactgcgtgaacaggacaagtactactatcgctatcccacgggagagtcctaccaggatcttgtccaacgcctggagcctgtgatcatggaattagagcgccaagagaatgtattggtcatctgtcaccaggctgttctacgctgcctactagcctacttcctcgacaagagtgcagaggagatgccatacctgaaatgtccgctccacactgtcctgaaactgacacctgtggcatatgggtgccgggtggagtccatttacttgaatgtagaatcggtgagcacacaccgggagaggtcagaggatgcaaagaagggacctaacccgctcatgcgacgcaatagtgtcaccccactagccagtcccgagcccaccaaaaagcctcgcatcaacagctttgaggagcgtgtggcttccacttctgctgccctgccaagctgcctgcccccggaagtgcccacgcagctgcccggacaaaacatgaagagctcccggagcggtgccgactcttcccagaagcactaaagccgagatgtgggttccattccatttccacagcctgccttgtgcctgctcatcttctcgaggccaagtgatcgcaaggacttctggactcgggagaatggaggtcggcatgttgaagagtagaagcccttccccccactgaaatgttggggtggcaaagacaactaggaagttgtacagatcccagcttcctgtgtagagcagcagaccttcctacgctctgttctctttcgacttccagggctgtctgacctctcaggcccttccaaagcttggggagggctatagttctagaggaggtgagatcagacccctaagtgggggccccggacaccgccacgctgttttgttttgtttctttggatcctggcctggcatgtcgatagtcagaagataagagtggcagggaaccctgagattcagagttagaccccacttgccagaggctcagggacaagttgcacattctcatgtggcttttatgcatcttggcctaggaggaggcctcagagacaagaggcttgggcattgctgcattgggtatgggatttctcctcctgaggaaaccttgagctgaggcctactggtcagctgagcaatgacttgccctgactcctctacaggtccacatgtcttctgggtcccaagttaagggacagactggttgtatcagtggaaggaaggatttttcagaaaaaaataaccagggctcccctcctcccagagtcccttaggccttctgttcttcaccttgggcctggaggcacctgagtagattctgttgttggctgtttgtttgcacttttccttctttctttccttccttccttccttccttccttccttccttcctccctccttccttctcttcttctctccttccttccctccctccccacacctcacttcaagaacctagggtgctggcccttggaggcttgcagcttctgaatgggaggagttggggtgtctttaagatggggagtctaagagccttcaacttcactcccattgttcaagaagggacggtggcccaaggaaggctcatgtcaggccgcctgctcagagctgtccgcatattttggccaagtgtctgctgctgtatgcctcataccaccatgctggccatcttgaggagtcacccccagtgtagaaaagcatccttgtcggctttatggcattggcgacatttttgcatgggttgaaaagtagcgctaatgtctttgtcttcctgtttctcccctttgtccacccatgttctgggggaggacgggacatcccaagcctggaagcaaccaatgggaaactcagcagtgtcagcccaaaggaccctttatgacgatgctgcacaactagggccgaaggtcactctttactttctgcttccttcctgggagtcctagggatcctctcttccccagctcaggggacaacagatcctggggtgacacaggtcatgcttcagacactttaaagtcaccttgtgttttcatagctaactactcaaacatttggcccagcccactaccctttatatctgtggttcaccaggatatagatagatgatagatagaaagatagatagatagatagatagatagatagatagatagatagatagatagatgatagatatctccatctgaagacttggacttttttctctatggcttgagtcttgacaaggatatatgaactgcagacgtgggctgacatgtgtgcaggctgataatatctttggacctgaagatctgcagcgttgatttgggggatggggttgggggtggggtagggaacaggataagaactgtgtagcccaaactagcctcaaactcatggccgtcctcctgtctcagcctctcaaatgttagctgttcgggttataagcatgagccaccaccacaccacgcctggtactatggctttgtacctaaatgtggtttcttcgatgcttcctcctgaccatatccattttatggttatagaaccagcttttacaacatagagactctcaaggctgagacaggtaggggtggtcatgtgtgaccagcctaagtcaatacatcaagagaaagctttgcccaatgtgatttcacattctgtgaacacctatgaataagatcaggcccaggagatcttgatgcgggtggaacatgcatccttcaaaagccagtgacttggtggatggggtgggcagcacccatagaacttccactctcccacccaaaacagcaaaataaaatggggaccaatgtttttaacgttgcatatttgttttgggggtaaatttctcccctttccttcaacaatgggcactacccttgatttatggggagaagaaaaactgttggaaccacaccaatgatattttcatttgtaatacttgaagtttatttttttattattttgatagcagatgtgctatttatttatttaatatgtataagggagcctaaaactagaaagctgtctagattggctttaattgttcattggttcggggcctttcaatgtgtgactgatgacttcttcatgttctgtgtcattgtctctgtccgtgacctaggaagaagctttgcaagctttttaacgggacacgccttcctttcagacatctgtgtagtttgcagttgcaagaacaataaaaacctggttgagatacgaaaaaaaaaaaaaaaaaaaaaaaaaaaa

SEQ ID NO: 1510 - DNA, 260 bp, Mus musculus
tgtcatcatgccaagccgcttttgtgctctgctatgcgctcaagagaatattcgagcgtgagttttatgtggcccgtgtggatatccctgccatagagtaggattatgagatggttggggcagaaagtggtgaaggagacgatgaggttgaggaattttaaatcatttcttccattctatacttttgtatctcttcttactcttactttgtactctaattttcctaaactgtcaataaaggtgtttccgttgttagttgc

SEQ ID NO: 1511 - DNA, 2745 bp, Mus musculus
cccggccgcgcagggcaaaggtggtggcgctccgctgcgtggttggttgctgtgcaagcgcgatttctggtttctggtggtgaaggtggcctgacctaaaggtgcagctgctggtgggcaggtgtgctgatgtcaacagactatgagctttcagaatctctggagagagtacaaagttctgatggttatggtaccattaattgggttcatacatttggggtggcacagaatcaaaagcagccctgtcttccaagttcctaaggacgataccactgagctggatagtctgggacttgcaagtccaccaaagagccaaacctaggagaagtagccatcttgcagttttcagaaagaagcaactttgaatctgaacttgataataaaagaagaaatgaaaaaccccagttggattagaaagaactggcttcttgtggctggggtgactttcataggcgtccatcttggaacatactttatacagagagttgcaaaagagtctgtgagggctgaggccagaggcagacaaaagaatattgaagaatgaagcaaaataaagactttggattattaatgtcattaaattaatctatgctggttattgtctgaaaccacttgattttgtagctggtaatgctgcatgtgcagactcatacctggagaccagtctttaatgttcaaacacatgacagtgcaataaaatgaaagccatatgaacaaactaaagctgccttcacaagttacacctgaagcaggatgtctcggttagaagctaagaagccatcgttgtgtaaaactgaaccattgacaagtgagaaagtcaggtccacactttctgtcttgaaaggagtcatagcctcatgctatggcccttcagggaggctgaagcagctacacaatggattgggaggttgtgtgtacacaacctcacagtcctcagccctgcttcgaaacctttcagtcacccatcccgtattaaagatcctaacgtcatccgtgcagaatcacgtgtcctgcttcagtgactgcggcttattcacagccattctgtgctgcaacttgattgaaaatattcaaagactagatttgacacccgcaactgctattaaattaaataaatacctcttgagtctctgtaccagttatctcaagtctgaagcctgtagttgtcgaatcccagttgacttcagaagtacacataccttcctcagcttggtacacagtatcttaacaagcaaaccagcctgtatgctcaccagaaaggaaacagatcacataggtgctttgattttgaaagcttttttacttacaattccagaaagtacagaagaacgaatggttttagggaagagtataattgttcccttaaagggccaaagagttacagattctactgtattacctggactactcattgaagcatcagaagttcaattaaggaggttattacccactcaaaagttcttcagtgagcgccacgttatggccatcgacagagttggggtgactctgatggaatctctaagcaaagtgacaggagcaacgcctattggttctctaaacccaatagtttctactacttatggaagtgtgaaagatgtgtgctctgcaagatttggctccaaacatttttttcatcttcttcctaatgaggccactgtctgcaccttgcttctctgcagcagaaatgacaccgcctgggaggagctgaagctcacatgtcaaacagcaatgcacgtcttgcagttaacaatcaaggaaccgtgggttttattgggaggtggctgtacagaaacacacttggctgcatatgtcagacacaaggttcatcacgaggcagaagctattgtcagagatgatgggtgtactcaggcaaagctgcatgttgctgctgaagcattttgcagtgctctggagtccgttgctggctctttggaacatgatggtggtgaaatcctcattgacacgaagtatggacacctttggtcctgtcaagcagattctgcctctgttggtaactggtcagatacgctgtcacggtgtggctgtggtttgtacaacagccaggaagagctcagctggtctgtcttaagaagtacttatcatccttttgcaccacaaacctgccttccacaggcagctttgggctcagccagtaacctgactgtggactgcttcactgccaagctgagtggcttacaggtggctgtagagacagccaatttgattttagatctttcatatgtcattgaagataaaaactaacataagagaatggcatatatatgttctgaagcaaactagttgaggtgtctaagagagcatactgttctctcccaaaggcctgttctccataggtgaacagatgacctgtaaaagtatacttgtatacttaaggaagattatggttgttaaatagaaatgtatagactaataaaaattcttgatgcctttattttcatcaccatcaccccacttttggtgtcctcacacacatttaagtttggaggtttatgaacactaaataataggtcacctaggaaaatggaaattgccttgatgctgcttctccaagttgttccaagaaagggtgccctgtacctttccactggcaggacattaccattgttagttctgtacactagctttttgtaaagcttgatccttccttgatgatacattgctgctcttattttaaatattgaatgaatttattggtatattttaataaaatgatctgtgttccct

SEQ ID NO: 1512 - DNA, 4552 bp, Mus musculus
ccaatggcagccccaccgcaggcctgagcacaggcgccattgtgggcatcctcattgtcatcttcgtcctgctcctggtggtcatggacatcacctgctacttcctgaacaagtgtggcctgctcatgtgcatcgctgttaacctgtgtggcaaagctgggcccggagccaagggcaaagacatggaggagggcaaggctgctttctcgaaagatgagtcaaaagaacccattgtggaggtccgaacggaggaagaacggactccaaaccatgatggggggaagcacacagagcccaacgagaccacgccgctgacagaacccgagctgcctgccgacaccacagccactgtcgaggacatgctgccttctgtcaccaccgtcaccactaactctgacactatcaccgaaacctttgccactgctcagaacagccctaccagtgagaccactacactgacctccagtattgccccaccggccacaactgtgccagactcaaattctgtgcccgctggtcaggccaccccttccaagggtgtcactgcttcatcctcgtccccagcctcagcccccaaagttgctcctctggttgacctgagtgatactccaacttcagctccctctgctagcaatctgtcctccactgtcttggctaaccaaggagctgtactcagtcctagcacccctgccagtgcgggagagacctccaaggcccctccagccagtaaggcctcccctgctcccacccccactccagctggggcagccagccccttagcagcagtagccgcccctgccacagatgccccccaggccaagcaggaagcccccagcaccaaaggtccggacccagagcccacccagcctggcaccgtgaagaacccacctgaggcagccacagcccctgctagcccgaagagcaaggctgcaaccacaaacccttcccagggcgaggacttaaaaatggacgaagggaacttcaagaccccagatattgaccttgcaaaggatgtttttgcagccctgggctctcctcgtcccgccactggggccagtggacaagcctctgagcttgctccttcacctgcagacagcgctgtgcctcccgcaccagcaaagaccgaaaagggccctgtagaaacaaagtctgagcccccggagtcagaagccaagccagcgccaactgaagtcaagacggtccccaacgatgccacacaaacaaaagagaatgagagcaaagcatgatgggtaccaagcaacaagcaaagatcaaaatgaaaagtgacacagcggcttcaccagagcatccccaaataatccccccccctctctctctctcacatacacacacacacacacacacacacacacacacacacacgcacacacaaacacattcctctagtgtcttttgcctttaaaaacaaaaccagataaacaacacgggaatgcctttttgtagggttctagaaagggctcctgtgtcttacactcacttgttaagaaaaaaaagagacaaaaaggttaaacccacagccaaactaggacactccgttccctgaaaccatttaaaattcagacaaaagggccccagattaagaatctaggaagctcagatcgaaaaagaaagaaaagaaagaaagaaagaaagaaagaaagaaagaaagaaagaaagaaagaaagaaagatagatctaggctcggggaggctgcaattggtattacccaattggcacagatcagtttcagaaaaaaatgcttccaagaacttagactaaggaatgaaccaagcccacagttatttttatactttcagtcaagttggaactctgtcgaacctcacaaataagttatactttccgttcagtttgtgtttgttccatatgcggagtgtggcactctggctagctgagttcagttcccacggggactcctgtttcttaggaagcatgccaaatgccagcttattccagttcttttgcttttgattttttttcctctactctttcttttctttccctttcttccctgttttttcaagtttgcttccagtgtttacaagttgacagactacgtttgactttggttgtgtttaatgtccctgtataaaatagcttcccccccccccgccccctgttttttctttaagcaacaggtaccccgtagaggcaggtagaatcctcacaggttgcttttagcattgggtgaaggttacaaaagatgattgtttacagtggctctatccccctaaccatcccctgccctacccctgaggattctgattcattacagtttttacctgtgtcaactgggcgagagcctccttctgaatgatttgcctttttttttttttgttaattctgtttcttagggggagatgggggatgttagaccacttttggattagctgccacctgcctgtgtctgtgacactggacctactgcccaggtgtctgcgcacccttcctctgaaggactcctttggctttgttgaatgaagcagagaagattgtatagttggggctggggctggtcttggtgaacacacttttctttttttttcttttttcttttttttttttccttttttttttttttttttttttttaccccagacacctcctttttgtagaaagccaaataaaatatatacataccacttcctttagagcccagaatctagattgaacggaagagcgcgtgtgcttcagggaagtagtgtctccttttggaaatctatggaagtaaagtgacatcggccttctgttcagttaggcaacatttgtaaaaaaaacaaatatcgtctggagttataatacaactctcctggatcggaaaccaagtggggggaaaatacagaaactttcaggggatgggaggggggagaagggaaaagccagccctttgtatagaaattttgcttttgttttttcattctgctttagaacgcaagcttgtgcactgtggatgcgtgaatattttagtgtgaaacgtgtttttgtcatagtattgaataaaacttcaacatagtttggttgtggaaggtatagcagatagttcagaaaagaaaaaaaaaaaaacacaaacaacttattcaggaaacaaaacaaaacaaacaaatcccaaaaggaaaaaaaaggaatcaaggccttttaataggcaataaaacagagtgacactgatgaagaggacgctaagccaacagacgtcccccgacagcacgtgttcctttcccaagtacaaagtgacaagaggttagggtggccagacgcacccgtgttcactctgtgggccacatcccccagggttctgacacttctgcagtgtgaccagtggtgatgctaggttataatttcaaactgtgaaaaataatggtctcgtcctttactcagtgtggggttattttgcattttctcagctcccggggatgggaatggaggatcccagaacactcactcagcccagcccagcccctttgcattccagggcctgcacagatccacagttcacgtacagggtcctcaggaagagctatcgggtagacaactctgagggcacttagcagaatgggagagctgggtagcacccgagccaggtccttgcggtgaggggcagactccttgggccacagctgttccggggaatcgctttcccatatggtgaagtcggcggctggaccggctctgcgagggcacactgtacctcctggaaatggtgtactccactgtttgtggttggtatacattgagctcaactctgatgataagaagagacaagaggtatggccaactccaaaataatgtggcccagagtagctgacgctcagaacactggccacacatttgctggaagccaagaccgcccacactttgatatgcctctctctttatacatatgtttgtctcgccatgcatgggttttcctttcttcctttttctgtttctttttatttttaaacagcagtagtctctctgatatcaaagagggagacagtgtatccccccctattcttttatgtgaagaaataagtatttagttttctgtagggttttttggttttgggggggggttgtttgtttgtttgttgttttagtttttggaaggagggatggactccaccagtgtcagtgtcggtgtgtcttatgtctatgtggcatacattgtatcacataaagaccagcatggccaagttccgtgggaaggttacccaggtgccaccagtggggtctcccagtcctgaagggccaaggtgtatccaacaggattctatgtcctcattttctatgggacctcccatgcccagggtctcaccctcagctgtccgtctggatggtggtgatcacacctccattaacatccttacccagcattctgtacttcgggggccttctctcttgttataaaaactttttactgagtgaaacatcaacaccacctttgtttccattctcactgctgtaaatactgagtactaactgagaattttgactttgcattctgtcagaatacttgtgttcaataaaagttgaaagaaaaaaaaaaaaaaaaaaa

SEQ ID NO: 1513 - DNA, 1311 bp, Mus musculus
agccaccctggggagggcccagaggaggctcaagtgaggactcggagaccgcagagctacagttcagttgcagcttgagtctgcctccctgatagagaaacggaatcaagaccagctgtgagacggaggctgaaagacacagagcacttcagagaacctacttcataagaccagcaactcgacgccgggtgaaaattaccatctccgcactgcacctccagcctctctcgtcttcctgtgggtctcagctcagacaggggtccccttctcctcggctccagccagaagtcaaggcttggtctgctgcttcaggtccacccacaactccacaatggcccccaggtctgtgctggagaccatacaatcagtgctacagaagaatatggtgcgagagtttctggcagagttcctgagtacctatgtcatgatggtgtttggccttggttccgtggctcacatggttttaggagaaaactctggcagctatctcggtgtcaacttgggttttggattcggagtgaccatgggagtccatgtagcaggcggcatctctggggcccacatgaatgccgcagtgactttcaccaattgtgcactaggccgaatgacctggaagaagttccctgtatatgtgctgggtcagttcctgggctccttctcagctgcagctaccacctacttaattttctatggtgccattaaccactttgcaggcggagacctgttggtgacaggttccaaggccactgcaaacatttttgccacctatcttcctgaatacatgacactgtggcggggcttcctggatgaggcattcgtgactgggatgctgcagctgtgtctcttcgccatcaccgacaagaagaacagtccagcacttcaagggaccgagcccctcgtgataggcatccttgttaccgtccttggggtgtcgctaggcatgaactccggatatgcaatcaacccatcccgtgacctgcctccccggttgttcactttcattgctggctggggcaaacaagtgttcagagccggaaacaactggtggtgggtgccggtggtggcaccacttctgggcgcctacctaggtggtattgtatacctgggtttaattcaccccagcataccacaggatcctcagagactggagaattttacagcaagagaccagaaggtaactgcatcatacaagaatgcagcttctgcaaacataagtggctctgtgcctctagagcacttctaagtagagcttctctttaaccacaaccgtactgcaataaagcacaccacctatcaaaaaaaaaaaaaaaa

SEQ ID NO: 1514 - DNA, 1825 bp, Mus musculus
aatggccctaggactgagcgcctgctttgttctgagtgcttattaacccagcaggcctatgaacttggtcccccagactggaaagccaaaacagggttttctagttctgagtctagcaggaacacctcttcccaactccctaaattctggagcagggatgtaaatccagagagaacacttgggctgcctactacagactaaggcagattctggttgctacaaggaagaggtaggcacccgcttccttggttcttcaggctcttatggatgtgggactgaatggattcagtgaagttaccactctgttgtctcttccctccttgaaacataccttgcagctactctggcaggaaccaggcagaagagagggaggacagctatttggcagggactgtgctacatggtgtcttcctgctgttgacaagggtgggcaaatggcaagttagaacacctgggaggggcttgcacatttacctgctatcagtgccacttttgtcaagagactggcatactgtgcccacagtgggcacctgtatgttaatagcttttcttgatctatgcctttgacacatgttcccttccatggaaagtgggtgattcagtttattcagaacttgagttgaaggtaaactgcctaggataaagcctgctcaatcactgaatataaaaagggctgccagtgctctgttctcccccaaacaagcaccagaagagacatgtccagtgggcggaagtctattacgtggtcctgctaacctgcagttagtgcttcggaaagatcttgcccctagctcctgtccacacatcttggtcttgttcttgtagccccatatgagaaggctggctgcagtgagagcgaactcccattccttagcaggattccagcacaagttaggttgctctgtgaaatgggtgggccgagggcaggagtggtcactcagggcactggtctctctcccatgcttctgagtagctggctttgttcagctttgccaggaaggtcagactgtgtcataattgttattaaacacagaaaatgagccaacttttttctggcccttgctgactattgttctttgagttgtcctgacatagcccttggggaaattggggaggcagccaaagacctgcagtgtccttgctgacaatgtcttggatcctggtccccagcacctgctttgtgtcctgacctcagtgtggacggctttgttctcagggggcccgactgctgagaagtacggctgggggtgatttgaacagtctgcctttggtgtgcttcctgtctcccaggaacagctgaagcgactatcctggtgctaagtgagggtcacctgctactgcggccaactatgaaagcgaactaagaaatagcatattctgtcacatagacctatgtgtggccctagctggcctcctacctgcctggtcgactcactgtgtagaccaggctggcctcagacttgggtgctcttcctgcctctacctcccaagcactgagttacaggcatgggccacaactggctggagtgtagaaatccttcaccctgggaaacattggaatagaaagacagcctttgcttttggtgtgggctgtgtgtggtgggaggtgcgaggatgacctcttctgtctgagtctcgggcctcttaaggtcccccatggggatgctgctatttccaagatgcaaattgcacatttcctagattttgtatctgcaaatatggataagggatgggatgagggacaaaactgcttgtgtagtttgaatgggcctcggcggtacttccaatcttttaactgttcctaaataaaaatgtacagacactt

SEQ ID NO: 1515 - DNA, 316 bp, Mus musculus
gagagtttctgagcactcagggactggctaggaatgatttatagtggggctgagggtaaaagaggttgcgctcctgtctcgctcccgagcttggaaagggaaggacttgggaagagcggcatcttcctcaaacacgagacttagtttccccagtcctactacattcatcgactccttttctgtgagcctcagactgaggctggaggccacctttgtcggttttcaggtctctcccatgagatggagaagcccttcagattcctagacttgtagagggcaacactttttattacaataaaaacatataacaaaacgc

SEQ ID NO: 1516 - DNA, 1943 bp, Mus musculus
gcggcctccaaccggtcttgtcactgcgctgcctctgctccaccttctctggccctggccgctagtgctcagagtgcctgcagtccgcctgtagcatgtgtggcatctgggccctcttcggcagcgatgactgcctttccgtgcagtgtctgagtgcgatgaagatcgcgcacagggggccagatgcatttcgctttgagaatgtcaatggatacaccaactgctgctttggctttcaccgcttggctgtggttgacccgctgtttggaatgcagccgataagagtgaggaaatacccttatttgtggctctgttacaatggtgaaatctacaaccacaaggcgctacagcaacgttttgaatttgaatatcagaccaatgtggatggtgagattatcctccacctctatgacaaaggaggcatcgagaaaaccatctgtatgctggacggggtgtttgcattcatcttactggacactgccaataagaaagtatttctgggcagagacacctatggagtcaggcccttgtttaaagccatgacagaagatgggtttctggctgtgtgttcagaagctaaaggccttgtttccttaaaacactccaccactcccttcttaaaagtggagcccttccttcctggacactatgaagttttggatttaaaaccaaatggcaaagttgcgtctgtggaaatggtcaaataccatcactgtacggatgaaccattgcatgccatctatgacagcgtggagaaactcttcccaggctttgacctagagaccgtgaagaacaatctgcgtatcctttttgacaacgctatcaagaaacgcttgatgacagaccggaggattggctgccttttatcagggggcctggactcgagcttggttgctgcctctctgctgaagcaactcaaggaggcccaagttcagtatcctctccagacatttgctattggcatggaggacagccccgatctcctggccgctagaaaggtggcaaattatattggaagcgagcatcatgaagtcctttttaactctgaagaaggcattcaggccctggatgaagtcatattttccttggaaacttatgatattacgacagttcgggcatctgtgggcatgtatttaatttccaagtatattcggaagaacacagacagcgtggtgatcttctccggagaggggtcagatgaacttacacagggctatatatatttccacaaggctccttcccctgagaaggccgaggaggagagtgagagactgctgaaggaactctacctgtttgatgttctccgggccgaccgcactactgctgcacacggtctcgaactgagagtcccctttctggatcatcggttttcttcctattacctgtctctgccgccagatatgagaattccaaaaaatggcatagaaaaacatctcctgagagagacttttgaggactgcaacctgctacccaaagagattctctggcgacccaaagaagccttcagtgatgggatcacctcagtcaagaactcctggttcaagattttgcaggactatgttgaacatcaggttgatgatgagatgatgtctgcagcctcccagaagtttcccttcaatactcccaaaactaaggaaggctacttctaccgtcagatctttgaacgccattacccaggccgggctgattggctgactcattattggatgcctaagtggatcaatgctactgacccttctgcccgcactctgacccattataagtcagctgccaaagcttaggcactctctacactcttgtgtaaaagtaaatgtttcttccggctctgaaggtcgagacagcgacacaatcagaaagaatgagactcagccatcagtcacccaggcttacttaggcatgaaaagaaataaaagtttcacatctgaaaaaaaaaaaaaaaaaaa

SEQ ID NO: 1517 - DNA, 3571 bp, Mus musculus
ctttagggagcctcccaggcagccagcaagcgcggagagcgcactgggatgggacttgaaggcggcttctcaggacacggcgctggcgcgggattcttgttcgcgtccggggatcggtgcccaaggagctctgcggtcctctgcggggcgaggcggcggaccacggagactgacactcacagctgctcccctgtctctcttcccgggtgtcggcggcggtgctgcagctgcagccctgctcctcttgaagatggagaagatgttggtggggtgcttgctgatgcttgggcagctcttccttgtcctcccagttgacggcagagagcgtccccaagccaggttcccttccagaggccgtcatgtccggatgtatccgcagactgcactgctggagagttcctgtgagaataagcgggcagatctggtgttcatcattgacagctcccgaagtgtcaacacctatgactatgcaaaggtcaaggagttcattctggatatcctgcagttcttggacatcggtcctgatgttacccgagtaggtctgctccaatatggcagcacggtcaagaacgagttctccctgaagacctttaagaggaagtctgaggtggagagggctgtcaagagaatgaggcatctatccactggcaccatgacagggcttgccatccaatatgccctcaacattgccttctcagaagcagagggggccaggcccttgcgggaaaatgtgccacgcatcataatgattgtgactgatgggaggcctcaggactcggtggctgaggtagctgccaaggcccggaacacaggcatcctgatctttgccatcggtgtcggtcaggtggacctgaatacactaaaggccattgggagtgagccccacaaggaccatgtcttcctggtggccaatttcagccagattgagtccttgacctcagtgttccagaacaaactgtgcacagtccacatgtgcagcgtcttggaacacaactgtgcccacttctgcctcaacacacctggctcgtacatctgcaagtgcaagcaagggtacattctcagcacggatcagaagacttgcagaatccaggatttgtgtgccacagaggaccatggttgtgagcagctgtgcgtgaacatgctgggttcctttgtctgccagtgctacagtggctacaccttggccgaggacgggaagcgatgtacagctatggactactgtgcctcagaaaatcatggatgtgaacacgagtgtgtaaatgctgaaagttcctacctgtgccggtgccacgagggatttgctcttaacagcgataagaaaacatgctcaaagattgactattgtgcctcttcaaatcacggatgtcagcatgagtgtgtcaatgcccagacgtctgctctctgccgctgcctgaaaggcttcatgctaaatccagacaggaaaacttgccgaaggatcaactactgtgcactgaacaaaccaggctgtgagcatgagtgtgtgaacacagaggagggtcactactgccgctgccgtcagggctacaatctggaccccaatggcaagacctgcagccgggtggaccactgtgcacagcaggaccatggctgtgagcagctgtgcctgaacacagaggagtcctttgtctgccagtgctcagaaggcttccttattaatgatgacctcaagacctgctccagggcagattactgcttgctgagcaaccatggttgtgaatactcctgcgtcaacacagacaaatcctttgcctgccaatgtcctgagggtcatgtgctccgaagcgatgggaagacctgtgcaaaactggactcttgtgctttgggggaccatggttgtgaacattcatgtgtaagcagtgaagactctttcgtgtgtcagtgctttgaggggtacattcttcgtgacgatgggaagacctgcagaaggaaagatgtctgccaggatgttaaccatggatgtgagcacctttgtgtgaacagtggcgaatcatacgtctgcaagtgtctggaggggttcaggctggctgaggatgggaagcgctgcaggaggaagaatgtctgcaagtcaacccagcatggctgtgagcacatgtgtgtgaacaatgggaactcctatctgtgcaggtgctcagagggctttgtcctagctgaggatggaaagcactgcaagagatgcactgaaggcccaattgacctggtctttgtgattgatggatccaagagccttggagaagagaactttgagactgtgaagcactttgtcactggaatcatagattccttggcagtttcccccaaagctgctcgtgtggggctgctgcagtattccacacaggtccgaacagagtttaccctgaggggcttcagctcagccaaggaaatgaagaaagccgtgacccacatgaaatacatgggcaaaggctctatgactgggctggccctgaaacacatgtttgagagaagttttacccaagtagaaggggccaggcccccctccacgcaggtacccagagtagccatcgtgttcaccgacggacgggctcaggatgatgtctctgagtgggccagtaaagccaaggccaatggtatcactatgtatgccgttggggtaggaaaagccattgaggaagaactacaggagattgcctctgagcccattgacaagcatctcttctacgctgaagacttcagcacaatgggcgaaataagtgaaaagctgaaagaaggcatctgtgaagctctagaagactctggtggaagacaggactcagcagcatgggacctgccacagcaggcccaccagccaacagaacctgagccagtcaccataaagatcaaagacctactttcctgttctaattttgcagtgcaacatagattcctgtttgaagaagacaatctttcacggtctacacaaaaacttttccattcaaccaaatcttcaggaaaccctttggaagaaagccaggaccaatgcaaatgtgaaaaccttatactgttccagaacgttgcaaatgaagaagtaagaaaattaacccagcgcttagaagaaatgactcaaagaatggaagctttggaaaatcgcctaaaatacagatgaagaccagaattgcttttatgtatatttgtacaccatcttaaaaaggattttgacaaaggtggtagagcctcccaccataagcagacctacaagctgtaaagcaaaatacaaccagtacaggagacactggattgcttgactgctggacagagaaaatggagacactgaggtgtctaaattcatgagggtggggggaaggaatcctgaattctgagtttaccatgagaataaataagctgcgcagtgtagtgttccacggtgtactgtggacataatttccttctactgcaacactgaaatttcattttcggcagaaaactgactccacaaattgctattttttgtactggaatttaccttgatgtgtatatggacatgtgcataagtcacagagacatatgttctgtaataagttggatttctacacaatattaaaattcaccattccag

SEQ ID NO: 1518 - DNA, 4115 bp, Mus musculus
cgtattcagctgcccaggcagaggagaatggggtctccacagcctgaagaatgaagacacgacagaataaagactcgatgtcaatgaggagtggacggaagaaagaggcccccgggccccgggaagagctgagatcaaggggccgggcctcccctggaggggtcagcacatccagcagtgatggcaaagctgagaagtccaggcagacagccaagaaggcccggatagaggagccctctgccccaaaggccagcaagcagggccggagcgaggagatctcagagagtgagagcgaggagaccagtgcgcccaaaaagaccaaaaccgagcaggagctccctcgcccgcagtctccctcggatctggacagcttggatgggcgcagcattaacgatgacggcagcagcgaccctagagatatagaccaggacaaccgaagcacatcccccagcatctacagcccgggcagcgtggaaaatgactcggactcatcctctggcctgtcccagggccccgcccgcccctaccacccacctccactcttccctccttcccctccaccaccagacagcactccccgacagccagagtctggctttgaacctcatccttctgtgccgcctactggatatcatgctccgatggagccccccacatcgagattattccagggcccaccacctggagctcctcccacacacccacagctctaccctgggaatgctagtggaggtgttttatctggaccccccatgggtcccaaagggggagccgctgcctcctcagtgggtgcccctagcggaggcaagcaacaccccccacccactaccccaattccaatatcaagttctggggccagtggtgctcctccagcaaagccacccagtgctccagtgggtggtgggagcttaccttctgcaccaccaccagcttctttcccccatgtgacaccaaacctgcctcctccacctgccctgagacccctcaacaatgcctcagcctctcctcctggcatgggggctcagccaatccctgggcatctgccctctccccatgccatggggcagggcatgagtggacttcctcctggcccagagaagggtccaaccctggccccttctccccaccctttgcccccagcttcttcctctgcccctgggcctccaatgcgatatccatattcatcctccagtagctctgccgcagcctcttctagttcctcctcctcctctgcctcccagtaccctgcttcccaggccctgcccagttatcctcattccttccccccaccaactagtatgtctgtctctaatcagccacccaagtacacccagccttctctcccatcccaagctgtgtggagccagggtccacctcctcctcctccctatgggcgcctcttgggcaacaacaacacccatccaggccctttccctcctactgggggtcaatctacagcccacccagcagcccctacacatcaccatcaccagcagcagccacagcaacaacatcatcatggaaactctggggcccctccacccggagcgtatcctcaccctctagagagcagtaactcccatcatgcacacccttacaacatgtcaccctccctggggtctttaaggccctaccccccaggggcagcacacctgcctccacctcatggccaggtgtcctataaccaagcaggtcccaatggtcccccagtttcttcttccaactcttccgggtcttcctctcaagcctcctattcatgttcacacccctcttcatcccagggcccccaaggagcatcctaccccttcccaccagtccctccagtcaccacctcctcagctaccctttccactgtcatcgccaccgtggcttcctcgccagcaggctacaaaacagcttcgccacctgggccccctcagtacagcaagagagccccatccccagggtcctacaagacagccaccccgcctggatacaaaccggggtcaccaccctccttcagaacagggaccccacccggctatcgaggcacctctccgccagcaggcccagggaccttcaaaccaggttcaccgaccgtggggccggggcccctgccacccgcggggccttcaagtttgctatctctgcctccgccacctgcggccccgactacagggccgcccctgaccgccacgcagatcaaacaggagccggcggaagagtatgaacctcccgagagtccggtgcctccggcccgcagcccctcggcccctcccaaggtggtggacgtgcccagccatgccagccagtcagccaggttcaataagcacttggaccgcggcttcaactcgtgcgcgcgcagcaccctgtacttcgtgccgctggagggctccaagctggccaagaagcgcgcggacctggtggagaaagtgcggcgcgaggccgagcagcgcgcgcgcgaggagaaagagcgcgagcgcgagcgggaacgcgaaaaggagcgcgagcgcgagaaagagcgcgagctggagcgcagtgtgaaactggcccaggagggccgtgctccagtggagtgcccatctctgggtccagtgccccatcggcctccctttgagcctggcagcgctgtggctacagtgcccccttacctgggtcctgatactccggccttgcgcactctcagtgaatacgcccgacctcatgtcatgtctcctggcaatcgcaaccacccattctatgtgcccttgggggcagtggacccggggcttctgggttacaatgtcccagccctgtacagcagcgacccagctgcccgagaacgggagcgggaagcccgtgaacgtaacctccgtgaccggctcaagcctggctttgaggtgaaacctagtgagctggaacccctacatggggttcccgggccaggcctggatccctttccccgacacgggggcctggctctacagcccgggccacctggcctgcatcctttcccttttcatccgagcctggggcccctggaacgagaacggctagcgctggcagctgggccagccttgcgtcctgacatgtcttatgctgagcggttggcagctgaaaggcagcatgcagaaagggtggcagccctgggcaatgatccactagcccggctgcagatgctcaacgtgactccccatcaccaccagcactcccacatccactctcaccttcacctgcaccagcaggatgctatccacgcagcctctgcctcggtgcaccctctcattgaccccctggcctcagggtctcaccttacccggatcccctacccagctgggaccctccccaacccccttcttcctcaccctctgcacgagaacgaagttcttcgtcaccagctttttgctgccccttaccgggacctgccggcctccctttctgctccaatgtcagcggctcatcagctgcaggccatgcacgcgcagtcagctgagctgcagcgcttggcgctggaacagcagcagtggctacatgctcatcacccattgcacagcgtgccactacctgcccaggaagactactacagtcacctgaagaaggagagtgacaagccgctgtagagctgcgatccagacagcacccactgctccttcatccagaccttggaggaccaccccaaccttttgaccccaccccacccccagccgaggagagggtgctgcccgcttgcagagctcctgcagctgggtagagggagggagggaagaagggacagacaaggtcagggcccggggttgtgtgcagaggtgggaagtggcaagggtgggggcagaaagtgcacagtatcttggaccaggtccctcctcctatcccctgcttttcttctcctctatgccgaatccttggtggccactgcccctcccctaacccattggtgtgatttttttcatctgttagatgtggctgttttgcgtagcattgtgtgctgccccgccccatccctgtgtgtgcaccccctccctcggcgatatgtgcccttacccgctcccacattaataatttatatatataaatatctatatgatgctctttaaaaaacatcctgaccaaaaccaaccaaacaaaaacatcctcacagttccccagaaaaaaaaaaa

SEQ ID NO: 1519 - DNA, 898 bp, Mus musculus
agccgacatgccgtctggcgagacctctactttgtagactaaggcactgtgcggtgcttcgtttttatatcttcacaacacgtgtgatttcatcaaaaatatacacagagccacatgcccttcgtctctgcctggactcaaggccacccatagctaactagagccactgttttgtttatttgtctgtctgtcttactgcacgaagggacattaggcccacttccattaaagcaaattcttggtgatacaactgttggcactgctaattttttttctttttttttttaatccacattaggtgtttaagaaggacacataacaaactactcaaaactgggcctcttaacttgcagcccccaaaactcccctgagtgtgtggcacattcgctttatgaacattgcaacacaagactccagaaaccacgtctccctgacatcagcacagtttaatgaaaccaaaagctctctagttggcccagtttaacctaacatctgatgtgtttacagccagttaaaaaaaaaaagtaattggacctgtttcagcatgctggcagtgtggcccagtggcacggctcttgtacaacatgcagggatctgtgtttagtccctgaaaagtgtcaggggaaaggttggcactgcaaggcggtgaagacatcgccaggcagccacatcggccacttcctcctggaaagacatcttgtttctttgtgttgccatttgctgttgactgtgtttacacattttcatgtaaaatgtcctgggaataaatgtaactgcataaaatctttgactccttgatctgacagcatatataagaaacaaatacaaatttaatgtctctgcagtaattttattttctgtattattcttacttcaaattaaacctttaaaaaaatcg

SEQ ID NO: 1520 - DNA, 932 bp, Mus musculus
gagcgagcgggcatgagcgcgtccctgagccgggcggcggcggctctgctgcgctgggggcgaagcgctggtggcggtggcctgcccggagccggcgtgcgggcggcgagctcgggcggccaggcggagcagctggacgcgctggtgaagaaggacaaggtggtggtgttcctcaaggggacgcccgagcagccccagtgcggcttcagcaacgccgtggtgcagattctgcggctgcacggtgttcgcgactatgcggcctacaacgtgctggacgacccggagctgaggcaaggtattaaagactactccaactggccaaccatcccgcaagtgtacctcaacggcgagtttgtggggggctgtgacatccttctgcagatgcatcagaatggggacctagtggaagaactgaaaaagctgggtatccgctctgccctggtagatgagaaggaccaagactccaagtgagggccccgggccctcgccgagcagagcgccctctccatcctcggggccagaaaagccttactgcgtggtggtgccctgttgctgtgatgcttgcgctgggcctcctggcagcaagcgggcaggtgcttttactttagtctctggctcagaattccctctggtgaacgtacaaccactgcactgtaaatcaatgtcgcgatcctgtattgctataaccgtgatctgttcttacgttgtctttattctctgccggccggctttgggagtcacttctgattcttgtttgggttgtagagatggtaaagccccctgatgtttttgtaacttcctgtaaaagggaaatgatggacagaggagaaaatgtggtggctagagttgttttgtaaaattaaattgccaacacagacgtgtgtgtgagtcattaaatccagcaagaacagctccataggacgtggagaacc

SEQ ID NO: 1521 - DNA, 2163 bp, Mus musculus
aattcgaagtacctgctgccacagcctcttcagaggagcatctcaagcaaaacgaagagatggccacgaaggagaagctgcaatgtctgaaagacttccacaaagacatcctgaagccttctccagggaagagcccaggcacacggcctgaagatgaggcggacgggaagccccctcagagggagaagtggtccagcaagatcgactttgtgctgtctgtggccggaggcttcgtgggtttgggcaacgtctggcgtttcccgtacctctgctacaaaaatggtggaggtgcgttcctcataccgtattttattttcctgtttgggagcggcctgcctgtgtttttcttggaggtcatcataggccagtacacatcagaagggggcatcacctgctgggagaagatctgtcctttgttctctggcattggctacgcatccatcgtcattgtgtccctcctgaacgtgtactacatcgtcatcctggcctgggccacatactacctattccactctttccagaaggatcttccctgggcccactgcaaccatagctggaacacaccacagtgcatggaggacaccctgcgtaggaacgagagtcactgggtctcccttagcactgccaacttcacctcacccgtcatcgagttctgggagcgcaatgtgctcagcctgtcctccggaatcgacaacccaggcagtctgaaatgggacctcgcgctctgcctcctcttagtctggctcgtctgttttttctgcatctggaagggtgttcgatccacaggcaaggttgtctacttcaccgctactttcccgtttgccatgcttctggtgctgctggtccgtggactgaccctgccaggtgctggtgaaggcatcaaattctacctgtaccctgacatcagccgccttggggacccacaggtgtggatcgacgctggaactcagatattcttttcctacgcaatctgcctgggggccatgacctcactgggaagctataacaagtacaagtataactcgtacagggactgtatgctgctgggatgcctgaacagtggtaccagttttgtgcttggcttcgcaattttttccatcctgggcttcatggcacaagagcaaggggtggacattgctgatgtggctgagtcaggtcctggcttggccttcattgcctacccaaaagctgtaaccatgatgccgctgcccaccttttggtctattctgtttttcattatgctcctcttgcttggactggacagccagtttgttgaagtcgaaggacagatcacatccttggttgatctttacccgtccttcctaaggaagggttatcgtcgggaaatcttcatagccatcttgtgtagcatcagctacctgctggggctgacgatggtgacggagggtggcatgtatgtgtttcaactctttgactactatgcagctagtggtgtatgccttttgtgggttgcattctttgaatgttttgttattgcctggatatatggcggtgataacttatatgacggtattgaggacatgattggctatcggcctgggccctggatgaagtacagctgggctgtcatcactccagctctttgtgttggatgtttcgtcttctcgcttgtcaagtatgtacccctgacctacaacaaagtgtaccggtacccggattgggcaattgggctgggctggggcctggccctttcctccatgctgtgtatccccttggtcattgtcatcctcctctgccggacggagggaccgctccgcgtgagaatcaaatacctgataacccccagggagcccaaccgctgggctgtggagcgtgaaggggccacaccctttcactcccgagtaaccctcatgaacggcgcactcatgaaacccagtcacgtcattgtggagaccatgatgtgaggtccgggccatgtgacaggcgccgctttcctgctgtttactaacgttagattctcataggaccaggtttacagagcttaaaaccagggctggaatctataagcagttttacatacctgccctggttttctctgcccccacccccttgaaatccaaatagtaaaaaaaaaaaccaaggacatcatgcacaaaaacctcttacctattttctctaaagccctaaagcatgtcacttcct

SEQ ID NO: 1522 - DNA, 4317 bp, Mus musculus
cctcctgctgtcccctccctacccttggcttctcgccccgctctgccctctgctaccaacactcgatcccctgctcgggctcgacctccaatctccgagggtcgtgcggccccggatgcccgggccccgagcggtgcccacggcctggcccctgcgatgcgccaggccggcggattggggctgctggcactactcctgctggcgctgctgggccccggcggccgaggggtgggccggccgggcagcggggcacaggcgggggcggggcgctgggcccaacgcttcaaggtggtctttgcgcctgtgatctgcaagcggacctgtctgaagggccagtgtcgggacagctgtcagcagggctccaacatgacgctcatcggagagaacggccacagcaccgacacgctcaccggttctgccttccgcgtggtggtgtgccctctaccctgcatgaacggtggccagtgctcttcccgaaaccagtgcctgtgtcccccggatttcacggggcgcttctgccaggtgcctgctgcaggaaccggagctggcaccgggagttcaggccccggctggcccgaccgggccatgtccacaggcccgctgccgccccttgccccagaaggagagtctgtggctagcaaacacgccatttacgcggtgcaggtgatcgcagatcctcccgggccgggggagggtcctcctgcacaacatgcagccttcttggtgcccctggggccaggacaaatctcggcagaagtgcaggctccgccccccgtggtgaacgtgcgtgtccatcaccctcctgaagcttccgttcaggtgcaccgcatcgaggggccgaacgctgaaggcccagcctcttcccagcacttgctgccgcatcccaagcccccgcacccgaggccacccactcaaaagccactgggccgctgcttccaggacacattgcccaagcagccttgtggcagcaaccctttgcctggccttaccaagcaggaagattgctgcggtagcatcggtactgcctggggacaaagcaagtgtcacaagtgcccacagcttcagtatacaggggtgcagaagcctgtacctgtacgtggggaggtgggtgctgactgcccccagggctacaagaggctcaacagcacccactgccaggatatcaacgaatgtgcgatgcccgggaatgtgtgccatggtgactgcctcaacaaccctggctcttatcgctgtgtctgcccgcccggtcatagcttgggtcccctcgcagcacagtgcattgccgacaaaccagaggagaagagcctgtgtttccgccttgtgagcaccgaacaccagtgccagcaccctctgaccacacgcctaacccgccagctctgctgctgtagtgtgggtaaagcctggggtgcccggtgccagcgctgcccggcagatggtacagcagccttcaaggagatctgccccggctgggaaagggtaccatatcctcacctcccaccagacgctcaccatccagggggaaagcgacttctccctcttcctgcacccgacgggccacccaaaccccagcagcttcctgaaagccccagccgagcaccacccctcgaggacacagaggaagagagaggagtgaccatggatccaccagtgagtgaggagcgatcggtgcagcagagccaccccactaccaccacctcacccccccggccttacccagagctcatctctcgcccctccccacctaccttccaccggttcctgccagacttgcccccatcccgaagtgcagtggagatcgcccccactcaggtcacagagaccgatgagtgccgattgaaccagaatatctgtggccatggacagtgtgtgcctggcccctcggattactcctgccactgcaacgctggctaccggtcacacccgcagcaccgctactgtgttgatgtgaacgagtgcgaggcagagccctgcggccccgggaaaggcatctgtatgaacactggtggctcctacaattgtcactgcaaccgaggctaccgcctccacgtgggtgcagggggccgctcgtgcgtggacctgaacgagtgcgccaagcctcacctgtgtggggacggtggcttctgcatcaacttccctggtcactacaaatgcaactgctatcctggctaccggctcaaggcctcccgaccgcccatttgcgaagacatcgacgagtgtcgcgaccctagcacctgccctgatggcaaatgtgaaaacaaacctggcagcttcaagtgcatcgcctgccagcctggctaccgtagccaggggggcggggcctgtcgtgatgtcaacgaatgctccgagggtaccccctgctctcctggatggtgtgagaaccttccgggttcttaccgttgcacgtgtgcccaggggatacgaacccgcacaggacgcctcagttgcatagacgtggatgagtgtgaggctgggaaagtgtgccaagatggcatctgcacgaacacaccaggctctttccagtgtcagtgcctctccggctatcatctgtcaagggatcggagccgctgtgaggacattgatgaatgtgacttccctgcggcctgcatcgggggtgactgcatcaataccaatggttcctacagatgtctctgtcccctgggtcatcggttggtgggcggcaggaagtgcaagaaagatatagatgagtgcagccaggacccaggcctgtgcctgccccatgcctgcgagaacctccagggctcctatgtctgtgtctgtgatgagggtttcacactcacccaggaccagcatgggtgtgaggaggtggagcagccccaccacaagaaggagtgctaccttaacttcgatgacacagtgttctgtgacagcgtattggctaccaatgtcactcagcaggaatgctgttgctctctgggagctggctggggagaccactgcgaaatctatccctgtccagtctacagctcagccgaatttcacagcctggtgcctgatgggaaaaggctacactcaggacaacaacattgtgaactatgcattcctgcccaccgtgacatcgacgaatgcatattgtttggggcagagatctgcaaggagggcaagtgtgtgaacacgcagcccggctacgagtgctactgcaagcagggcttctactacgatggcaacctgctggagtgcgtggacgtggatgagtgcttggatgagtctaactgcaggaacggagtgtgtgagaacacacgtggcggctaccgctgtgcctgcactccgccggcagagtacagtcccgcacaggcccagtgtctgatcccggagagatggagcacgccccagagagacgtgaagtgtgctggggccagcgaggagaggacggcatgtgtatggggcccctgggcgggacctgccctcacttttgatgactgctgctgccgccagccgcggctgggtacccagtgcagaccgtgcccgccacgtggcaccgggtcccagtgcccgacttcacagagtgagagcaattctttctgggacacaagccccctgctactggggaagtctccgcgagacgaagacagctcagaggaggattcagatgagtgccgttgtgtgagcggacgctgtgtgccacggccaggcggggcggtatgcgagtgtcctggaggctttcagctggacgcctcccgtgcccgctgcgtggacattgatgagtgccgagaactgaaccagcggggactgctgtgtaagagcgagcggtgcgtgaacaccagtggatccttccgctgtgtctgcaaagctggcttcacgcgcagccgccctcacgggcctgcgtgcctcagcgccgccgctgatgatgcagccatagcccacacctcagtgatcgatcatcgagggtattttcactgaaagtggagacagacaagtacatcctttgctcctgaccaaacgagagcatggacccaaggatccttcagggcccacaaatctccttcccacaccccaaacccaaggtgctcctgtctgcagagtgctgtctgctttctcccaagggtgattcctagaaacttcgacatcagatctgcccctttaatttactcttggctttcaaggcaaattgatattcacatccaaagcgggcagcatcaactgcttggcgggttggactgagctgggacccaggatgtgaaatagaatttattgtggctctgattatgtacactagatgtgcctgacctgctgaccaggctcacatggtttgtacaataaatacatccgccgggaaaaaaaaaaaaaaaaaaaaaaaaa

SEQ ID NO: 1523 - DNA, 3227 bp, Mus musculus
cttaagggcaatgatcaagttagagtctagccaaaccatcctttgatgatagctttgttcttttatgctgtatactactaagatggatctcaccctagaatccctgtctctagaaaccttctggccaggggaaatctagaagaccgcattgacggttctggctacagctagtccacacagtgccttgatgtgagtttgaatacagtgtccttcctaggtggattcaaaccctggaaatgacactgtaaggggctggaatttggtgtcatttgtccctactccacagtcttatgctgccatactgggtgagatacacaggctcacgtatttctttggcctcttcttttcttgtcgtgccccacccccatcacatgacataacccagtacttctctgtagggctcttttttgttctggagttttcctggccaggcagcacttgggagtgaaactggaggcggaggtttccaggcaccatccagtgagattgggttttcttgtgctgacagattgggacttgggccaccaaacagcccacattgggactttccagtagaccaaagggcacatgttaatgccaatctgggcaagaagagcatgctttgtaaaagctcatcaattgaggacgactggacttgcccagtaccccagccaagagaagaatttgtctcctagaaacataagaattgagatgcttggctggaccccatggccacttcagcttcaaagcgcaactggcatccccctggagggtagctgattcccatctgatgcagtgaaagtcctgaaagtccccaaggccacctctcagtctctcctcactggaacaatagcctttgtctgctttatttgagggcttgctgtgggtttgaagtgagatgtaggccaactggctgcacaggtgtggccctgttgctgcagggaggaggcccgaggtcacacaggaagcttgctgtggaatgagccctctgtttaccagtctttgtccctgtgtcccaggttagatatcagccatgattatcatcgtggctttgtggctttgctgatcacactggggaagaagtgtaggtgctattgtcctaggatgggtcccgtggcaaccaggacacggaaggcttggatgttgtcagtgactggggggcagggaggagcatttgagcctcgactcacctcccagaagcccacagaagtgaggaaaactgggctctgaccacaggtcagggagctgagctcagtactgtgatcacccaagacatccgagggcaagaggaaatagctgttgcctcttctaagtatacggtcccatcttgggtcagaagaaccaccacagctccttggagacctttggcaatgtccagccctcttgcactgagagctgagccctagctgacccactcacagacgcttcatgtcctggggcagctccttcccaccaatggctaaggcctgtatgtgtggctcccaaccctcagtgaagggctggtctccagcctttatctcccaggacacaaacttgtgtctcttctgatatttactctttttaaacttaaggaccaaatgagacttctctgatttttatccgaacagcctgtcttgggcctggtccaggcagctccataacttctgccctccccgctcctggcctgaagcagcctagtgatgggggcagatccacatcttggccaccccaatccatgcacactagcacctccctcaatatcaccaacttgttacccctaaagggaggtcaaagttgaagcacaggtccctgggacccactgtctgcagaccaggcacacctctcagtgttccacacagcctggctgggggctgctgccaggggaaactgaggaaaggggagaggagggtgagtctccagccctccccccattcctactttctccagagtaactgcttttaactctcttgtctattgaggtttcacttttaaactctttgaagaataacttcaaaccaccattttgtggtttggtcttagaccagcaagcacaggttctcttttggtttttatgtgttggggtgactccagcatcctggcacagagacacttgttgggactcaggtcatctggtccaagcattagagcacacatacactggttttctagttgaccaccctgcaccttgggaatgaatttgatgtgggctgggtctgctgctcggggcttggtcccgatagtacgtgtgcttcgtggagaccacggagtgaggagccaggcccagtgtccactcgggacacattctcagggcaatgggaggagaacccagggctggctccctatgcacagctaaggggtggggagccagggtcatgtaagagatgcaccaccagggagggcttttacgaggcaggattcctcaggcatttgaagcaagtcttccttcctccagtgaatctcctaagattccacttccacccctgtggatgtccatgtgcacaacagcaggcttttatgcctaaagagagactgatcccccttctgcagtccacacagcttctctctgctggcctgcactgccatgggcattcacttgcaggacaactcattggtgagatttgggctagcctttggcaaaaagtcctgcctgggctcacctcctagggcattctaggtgaggagctgaagctcagggcattgtcaatcatggcacaggggaaaagaatgccaactagtgttttattcagtccaagtgtggcctgggagaccccactggcctcaggttccccatgtgtgaagggctagtaccaggctctgccccaatcacagggactactgaaagggatatgagggtgaagagaggccggatgaggcagcagcctgtgtgaggggatagggtcttagcctgagttgctgacccacatagcccacaacaaatgacagtgcaggatatcctgtcttacgtgggtatctctgcgcagtgttaggtccagtcataggtgctgcggggctgcctcttccgaccggtgggagttgatgtgtgtcctgggtgtggtgtcgaggggtggctggggcgccctcaggcctgtgaccctctgtgaagtgatgatttgtgtggcacattcattcctggaccacgtccaggtcaacctgtcgtacctgtggctgcccttgtcccgtgaagtcattatagtttattcagctgcaacaggacaaatgagcaaaagaaccttgaacgagaggtcattaaaggccttttgtgatggagg

SEQ ID NO: 1524 - DNA, 2069 bp, Mus musculus
ggctttcgtgggcccggggtatagcttcgtggcccgcgcgcgcgcttctctccggcgcgggcaccggcgcgagccatggcttcagtttccttgttgtctgcgttggctgtgcggttgttgcgccccacgcacggctgccacccccgcctacagcccttccacctggcggcagtgcgaaatgaagccgttgtcatttctggaaggaaactggcccagcagatcaagcaagaagtacagcaggaggtggaagagtgggtggcctcaggcaacaagcggccacacctcagtgtcattctggttggtgacaatcccgccagtcactcctatgttctcaacaaaaccagggcagcagctgaagtgggaatcaacagtgagacaattgtgaaaccagcctcagtttcagaggaagagctgctgaattcaatcaggaagctgaacaacgatgagaacgtagatggcctccttgttcagctgccactcccagagcacattgatgagaggaaggtctgcaatgccgtttctcctgacaaggatgttgatggctttcatgtcattaacgtggggcgaatgtgcttggaccagtactctatgctgccagcaaccccatggggcgtgtgggagataattaagcgaacaggcattccaaccttagggaagaatgtggtagtggctggcaggtcaaaaaacgttggaatgccgattgcaatgttgctgcacacagatggagctcacgaacggcccgggggtgatgccacagtcacaatatctcatcgatacactcccaaagagcagctgaagaagcacacgatccttgcagacattgtaatatctgccgctggcattccaaatctgatcacagctgacatgatcaaggaaggagcagcggtcatcgatgtgggaataaacagagttcaagatcctgtcactgcaaagcccaaattggttggagatgtggattttgaaggagtcaagaagaaagctggttatatcactcccgtccctggtggtgtgggtcccatgaccgtggccatgctcatgaagaacaccattattgccgcaaagaaagtgctaagaccagaggagctggaagtgttcaagtccaaacagcgcggagtcgccaccaactagcagcactctgagccagcccgagaggctaagcaggccaagaggaatgcagtgtttttaatttattctgtcgaaatggtttaaaatgtttgtatttattgaaagcttaaacgggtggctgtgtgcgcgcatggctctacagaacctcaccaggatgcccatcagttgtcctgcctttgacctggtgatgcacaggagacgtcctcacaccgagagtggatgctgaacttcatcaaaaaaaaaaaaaggtctgccgttttaggctctcatttcccaagtgctattccaatacaagttgatgactcatcttaggtcccaagcctttgagttcaactttcaaaccaaaggaaaccttagtagaggaaatgaagggaaaggaagagaaagcagcacagggtttcaacggcactcccttactctctcgggagtgcagccaggagtgctccgattgccctgaggagagctcagctggctgggcctagctgtccccctgtggcgggtcgtcagggaagggttagagtctccccacttgctgttatcctcctgtgagcttgtcctatctattttaattttctagaatcgaaaaagctcattttataaatgatgtgtgtattatcacgtttggcttttgcagcacatttaaacttttaagtttcagactgttaagagagttgtgtgtctgttttctttggcgggtgctttgaggcctatttgtttttgaaaaacaaaacaaaacttgtgcgtgataatcacgagggcagctcgtgccaccaaagaactgtcagcagctgcctgcacgtctttcacgttaccccgttggctttcctgtaagctatccaggagcttgggttaatataagacttagtcggattttcttattaaagggttttcttgcagttgggttttttgtttgtttttaaataaagctcatctgtcgggtgtgg

SEQ ID NO: 1525 - DNA, 2280 bp, Mus musculus
ggtagccgccctgcgcaccgcctaggcggcgtgctcatgccctgtctgctcccctcgctgctcagagccacccgcgccgcgctgccgctcctgtcgccgccccgagtggtcgcagcgtccgcgtctcagcggctcctcagcgctcccgcgcagcccgccgcctcccggagcagcatggacagcgcggaggagctgctggccccactgcggctagccgtgcgccagcagggagactttgtacggaagttaaaagaagataaagccccacaagtggatgtggacagagcagtagctgagctcaaggcccggaagagggttctggaagcaaaggagctggcattgcagcccaaagatgacatcgtagatagagcaaaaatggaagatacgttgaagaggaggtttttctacgatcaggcttttgctatttatggaggtgtcagtggattgtatgacttcgggccggtaggatgtgctttgaagaacaatatcatccaggcctggaggcagcactttatccaagaggagcagatcctggagattgactgcaccatgctcacccctgagccagttttaaagacctctggccacgtagacaaatttgctgacttcatggtgaaggacgtgaagaacggagagtgcttccgagcagaccacctgttgaaagctcatttacagaaactgatgtcagataagaagtgctctgctgagaagaagtcagagatggaaagtgtcttggcccagcttgataactatggacaacaagaacttgcggatctttttgtgaactataatgtaaaatctcccaccactggcaatgacctgtcccctccggtaccttttaacttaatgttccagaccttcattgggcctggaggaaatatgcctggatatctgagaccagaaactgcacagggaattttcctgaatttcaaacgacttttggaattcaaccaagggaaattgccttttgctgctgcccagattggaaactccttcagaaatgagatctcacctcggtctggactgatccgagtcagggagtttacaatggcagagattgagcactttgtagatcccactgagaaagaccatcccaagttccaaagtgtggccgacctctgcctttatttgtactcagcaaaagcccaggtcactggacagtctgctcggaagatgcgtctgggagatgctgttgaacagggtgtgattaacaactcagtattaggctattttattggccgcatctacctctacctcacgaaggttggaatatctcctgataaactccgcttccggcagcatatggagaatgagatggcccattatgcctgcgactgctgggatgccgagtccaaaacgtcctatggctggattgagattgttggatgtgctgaccgttcctgctacgacctctcctgtcatgctcgagccaccaaagttccactagtagctgagaaacctctgaaagaacccaaaacagttaacgttgtacagtttgagcccaacaagggcgccgtgggcaaggcgtacaagaaggatgcaaagctagtgctggagtatctcagcgcctgtgatgagtgctacatttcagagatggagctgctgctgagtgagaaaggggaattcactattgaaactgaaggaaaaacatttcagttaacgaaagacatggtcagtgtgaagagattccagaaaacactgcatgtggaagaagttgttccgagtgtaattgagccctcctttggcttgggcaggatcatgtataccatattggaacatacattccatgtccgagagggagatgaacagagaacgttcttcagtttccctgctgtggttgctccattcaaatgttctgtccttccactgagccagaaccaagagtttatgccatttgtcaaggaattatccgaagctctgaccaggaacggcgtgtctcataaagtcgatgactcctctgggtctattggaaggcgctatgcaagaactgatgagattggcgtggctttcggcatcactattgactttgatacagtgaacaagacgccccacactgcaactctgagggaccgagactccatgagacagataagggcagaggtctctgagctgcccaatgtggtccgcgatctggccaacggcaacattacctgggctgatgtggaggccaggtacccactctttgaagggcaagagactggcaagaaggagacagtagaggaatgagaacagctggcagcttatgaccatcgtgctaataaataactcatcatgtccacg

SEQ ID NO: 1526 - DNA, 8544 bp, Mus musculus
ctcgagcccgatccgccgtagcccggcgccagcgcccggtgccgccgccgggaggcacctgtgacgaggtcacctgccagcagatgaccgagaccagcccttagtcctaggtgtggtcaagagtgtcttggctccaaagcctacctggaccctaccaccatgtcaggatccacacagcctgtggcacagacatggcgggctgctgagccccgctacccaccccatggcatctcctacccggtgcagatagcccggtcccacacggacgtggggctgcttgagtaccaacaccacccccgtgactacacctcacacctgtcacccggttccatcatccagccacagaggaggcggccctcactgctgtcagagttccagcctgggagtgaacggtctcaggagctccacctgcgccctgagtcccgcacgttcctgcctgagctgggcaagcccgacatagaattcaccgagagcaagcgcccccgcctggagctactacccgataccctgctgcgcccatcacccctgctggccactgggcagccgagtgggtctgaagaccttaccaaggaccgtagcctggcaggcaagctggagcctgtgtcacctcccagtcccccgcacgctgaccctgagctagagctggcgccatctcgactgtccaaggaggagctgatccagaacagattggaccgcgtggaccgtgagatcaccatggtagagcagcagatctccaagctgaagaagaagcagcaacagttggaggaggaggccgccaagccgcccgaacccgagaagcctgtgtcgccaccacccatagaatcaaagcaccgaagcctggtccagatcatctacgatgagaaccggaagaaagccgaagccgcacaccggatcctagaaggcctggggccccaggtggagctgcctctgtacaaccagccgtctgacacacgccagtaccatgaaaacatcaaaataaaccaggcgatgcggaagaagctgatcttgtactttaagcggaggaaccacgcgcgcaagcagtgggaacagcgcttctgccagcgctatgaccagctcatggaggcgtgggagaagaaggtagagcgcatagagaacaatccgcgaaggagggccaaggagagcaaggtgagggagtactacgagaaacagttcccggagatccgcaagcagcgggagctgcaggagcgcatgcagagcagggtgggccagcgtggcagtgggctctccatgtcggctgcccgcagtgagcatgaggtttctgagatcattgatggcttgtctgagcaggagaacctggagaagcagatgcgccagctggccgtgatccgccatgttgtacgacgcgaccagcagaggatcaagttcatcaacatgaatggactcatggatgaccccatgaaggtctacaaggaccgtcaggttaccaacatgtggagcgagcaggagagggacaccttccgtgagaagtttatgcagcaccctaagaactttggcctgattgcctcattcctggagagaaagacggtcgctgagtgtgtcctctattactacctgaccaagaagaatgaaaattacaagagcttggtgaggcggagctatcggcgccgtggcaagagccagcagcagcagcagcagcaacaacagcagcagcagcagcagatggcacggagcagccaggaggagaaggaggagaaggagaaggagaaggaggccgacaaggaggaagagaagcaggatgcggagaacgagaaggaagaactcagcaaggagaagacagacgacacttctggcgaggacaacgatgagaaagaggccgtggcctccaaaggccgcaaaactgccaacagccaaggccgccgcaaaggccgtatcacgcgctccatggccaacgaggccaaccatgaggagacagccaccccacagcaaagttcagagctggcttccatggagatgaacgagagttctcgctggactgaggaagagatggagacagcaaagaaaggcctcctggaacatgggaggaactggtcagccattgcccgcatggtgggctccaagaccgtgtcccagtgtaagaacttctacttcaactacaagaagaggcagaacctggacgaaatccttcagcagcacaagctaaagatggagaaggagaggaacgctcggaggaagaagaagaagaccccagctgcggcgagcgaggagacagccttcccacctgccgctgaggacgaagagatggaagcatcaggcgcaagtgccaatgaggaagagctggcggaggaggcagaagcctcacaggcctctgggaatgaggttcccagagttggggagtgcagtggcccagctgctgtcaacaacagctctgatactgagagtgtcccatccccgcgttcagaagccacgaaggacactgggcctaaacccactggcactgaagcattgcccgctgccacccagccacctgttcctcctccagaagaaccggcagcagcccctgctgagccctccccagtccctgatgccagtggcccaccatccccagagccttccccatcacctgccgcacccccggctactgtggacaaggatgaacaagaagccccggctgctccagctccccagacagaagatgccaaggagcagaagtctgaggccgaggagatcgatgtgggaaagccagaggagcccgaggcctctgaggagcccccggagagtgtaaagagtgaccacaaggaggagaccgaggaagagcctgaagacaaagccaagggcacagaggccattgaaactgtgtctgaggcaccacttaaggtggaggaggctggtagcaaggcagctgtgaccaagggttccagctcaggtgccacccaggacagtgactccagtgccacctgcagtgccgatgaggtggacgaacccgaaggaggtgacaagggcaggctgctgtcaccaaggcccagcctcctcaccccggctggagatccccgggccagtacctcgccccagaagccgctggacctgaagcagctgaagcagcgagcagccgccatcccccctatcgtcaccaaggtccatgagcccccccgggaggacacagtacccccaaagccagttccccctgtgcctccacccacgcagcacctacagccagagggtgacgtgtctcagcagtcgggaggaagtccacgtggcaagtcccgcagcccagtgcctcctgccgagaaagaggcagagaaacccgcattctttccggctttcccaactgagggccaaagctaccgactgagcccccacgctggtcatcggctgccttcccatcctccacgggaggtgatcaagacttccacacgcgctgaccctctcttctcctacacaccccccggtcacccgctgcctctgggcctccacgatagtgcccggcccgtcctgccacgtccccccatctctaaccccccacccctcatctcctctgccaagcatcccggcgtacttgagaggcagctgggtgccatctcccaggggatgtcagtccagcttcgtgtgcctcactcagagcatgccaagcccatgggccctctcaccatggagctgccccttgccgtggaccctaagaagctggggacagcactggctccgccaccagtggaagcatcaccaagggcctcccagtacccgggctgcagacggccccagctacagaggctctatcacccacgcacgcccgcagacgtcctctacaagggtaccatcagcaggatcgtcggtgaggacagcccaagtcgccttgaccgggcacgagaggacaccctgcccaagggccatgtcatctatgagggcaagaaaggccacgtcctatcctatgaaggtggtatgtccgtgtcacagtgctctaaggaggatggaaggagcagctcgggcccaccccatgagactgccgcccctaaacgcacctatgacatgatggagggccgtgtaggcaggactgtcacctcagccagcatagagggactcatgggccgcgccatccctgagcagcacagcccccacctcaaggagcagcatcacatccgaggctccatcacgcaaggcatcccgaggtcctatgtggaggcgcaggaggactacttacggcgggaggccaagctcttgaagcgagaagggacaccacctcccccaccaccacctcgggacctgactgagacctacaagccccggcccctggaccctctgggtcccctgaagctgaagccgactcacgagggtgtggtagcaactgtgaaggaggcgggccgctctatccatgagatcccgagagaggagctgcgccgcacacctgagctacccctggcaccacggcctctgaaggagggttccatcacccagggcaccccactcaagtacgactctggggcaccctccactggcaccaagaaacacgacgtgcgctccatcatcggcagccccggccggcctttccctgccctgcacccgctggacataatggctgacgcccgggcactggagcgtgcctgctatgaagagagtctgaagagccggtcagggaccagcagtggtgcagggggctccatcacacgtggggctccagtcgtcgtgcctgaactgggcaagccacggcaaagcccactgacttacgaagaccacggggcacccttcaccagtcacctgccacgtggctcccctgtgaccacgagggagcccacgccacgccttcaggaaggcagcctcctatccagcaaggcgtcccaggaccggaagctgacatctacaccccgggagatcgccaagtccccacacagcactgtgcccgagcaccaccctcaccccatctccccctatgagcacttgctccggggcgtgactggtgtggacctgtaccgtggtcacatcccattggcctttgaccccacctccataccccgagggatccctctggaagcagcagccgcagcctactacctgccccggcacttggcccccagccccacctacccacacctgtacccaccttacctcatccgcggctaccctgacacggcggccctggagaaccgccagaccatcatcaatgactacatcacctcgcagcagatgcaccacaacgctgcctccgccatggcccagcgtgctgacatgctgaggggtctgtcaccgcgagagtcctcgctggccctcaattattccgctggcccaagaggcattatcgacctgtcccaagtgccacacctgcccgtgctggtgccaccaacgccaggcacccctgccaccgccatcgaccgccttgcctacctccccactgcgcccccacccttcagcagccgccacagtagctcaccgctgtccccaggaggccccactcacctagctaaaccaactgccacatcttcatcggagcgggaacgggaacgtgagcgggaacgagacaagtccatcctcacgtctaccactacagtggagcatgcacccatctggagacctggtacggagcagagcagcggggctgggggcagcagccgccccgcctcccacacccaccagcactcgcccatctccccccggacccaggacgccttgcagcagaggcccagtgtgctgcacaacacgagcatgaagggcgtggtcacctccgtggaacccggcacgcccacggtcctgaggtccacctccacctcttcgcctgtccgcccagctgccacattcccacctgccacccactgcccacttggtggcacccttgaaggggtctaccctaccctcatggagcccgtcctgttacccaaggagacctctcgggtcgcccggcccgagcggccccgtgtggacggtggccatgccttcctcaccaaacccccggcccgggagcccgcctcctcacccagcaagagctccgagccccgatccctagcaccccccagctccagccacacagccatcgcccgcaccccagcaaagagccttgcaccccaccatgccagtccggacccgccggggcccacctcggcctcagatctgcaccgagaaaagactcaaagtaaacccttttccatccaggaattggaactccgttctctgggttaccacagtggagctggctacagccccgatggggtggagcccatcagcccggtgagctcccccagcctgacccacgacaaggggctctccaaacctctggaagagctagagaagagccacttggaaggggagctgcggcacaagcagccaggccccatgaagctcagcgcggaggctgcccatctcccacatctgcggccactgcccgagagccagccctcatccagcccactcctccagactgccccaggcatcaaaggtcaccagagggtggtcaccctggctcagcacatcagcgaggtcattacgcaggactacacccggcaccacccgcagcagctcagtggcccccttcccgcccctctctactcctttcccggagccagctgccctgtgctggatcttcgccgcccacccagtgacctctacctcccaccccccgaccatggcaccccagcccggggatccccccacagtgaagggggcaaaaggtccccagaacccagcaaaacatcggtcctgggcagcagtgaggatgccattgagcctgtgtccccaccagagggcatgactgagccaggacatgctcggagcgctgtgtacccactgctgtatcgagacggggaacagggcgagcccaggatgggctctaagtctccaggcaacaccagccagccgccagccttcttcagtaagctgactgagagcaactccgccatggtgaagtcgaagaagcaggagatcaacaagaaactcaacacccacaaccggaacgagccagaatacaatattggccagcctgggacggaaatcttcaacatgcccgccatcactggagcaggccttatgacctgtagaagccaggcggtgcaagaacacgccagcaccaacatggggctagaggccattattagaaaggcactcatgggtaaatatgatcagtgggaagagcccccgccgctcggcgccaatgcttttaaccctctgaatgccagcgccagtctgcccgctgctgctatgcccataaccactgctgacggacggagtgaccacgcactcacctcgccaggtggaggtgggaaagccaaggtctctggcagacctagcagccgaaaagccaagtcgccagcaccaggcctagcgtccggagaccgacccccttctgtctcctcagtacactcagagggggactgcaatcgccgaacaccactcaccaaccgtgtgtgggaggaccggccctcatctgcagggtccacgccattcccctacaaccctttgattatgaggctacaggcaggtgtcatggcctccccgcccccacctggccttgcggcaggcagcgggcccctagctggtccccaccacgcctgggatgaggagcccaagccactgctgtgttcacagtatgagacactctcggacagcgagtgaccacggattgggggggagcggtgccaggtcccgcacaaggcagaagcagcccagcatggagcagacagctgctgactccggagactgaggaaggagcccctgagtctgcctgccgtccatccgtccgtccgtccactcatctgtccatccagagctggcatcctgcctgtctaaagccttaactaagactcccaccccgggctggccctgcgcagtgaccttacactcaggggatgtttacctggtgctcgagaggggagtggacaggaggggagggacagcgggccaggaggggggggacagcaatcgtgtgtcagtcgcactcgtgcatctggggtcagcggggacccaccacaggctgaccaggcacctccatgccaccgcctcgccccttaccgcatttggaaccaaagtctaactgaactctcgcgtggtcctgcccctctctctgcccccagcccgcttgcctctggacagacagacgttcccagcttatcctgccctaatgctgtcatcatcgcagtctccaaaggccacccagcccacaagactgggagcccatcagaccaggtgggtgacacaaggggcctggctggggcacggatgcttgcaggaactggaccgtttcccggcctgttgctgtggcaacgggagggaaggcacgtgtaaatggtgttggcttacagggtatatttttgataccttcaatgagttaattcagacgtctcacacaaggaaggactcgcccgtgtttctcccgctgtgctttggtctctacctactgtttcagaggcacgtgccagccaaggcggtggcccaccatacgcaggacttgggggtcaggggctccggcacacggcactgtgcccttccccacaccttacttcagcgaaatggacttgatgcgtattctgtggccgctctctgtgcacggcggcattctgtcatttacacatgttgttccaattaaaaagcaaatatactcaagtgaaaaaa

SEQ ID NO: 1527 - DNA, 722 bp, Mus musculus
acacttcctgcagagataagagaccttgtggtttccactgggggtgaattactaggcaagtctgtgatagcagctgccttttcttttttcctcctctcttacccgctgggttttgacacccagcccctggctctcaagtgggtgtgtgcactgagctgccctaagaccgtttccctggatagtctggtctggagctggggcagcagcagctgctgtgaagaagccaactggcaagatgatggaagaaatctccattatggtagcctatgacgcccatgttttcagccagctgcatgatgaagacttcctcactagcctggtggccaccagcaagcccaggtccatggtaccaaccaaaaagctgaagaaatatgaaaaagaatatcaggcgatgcgggagaatcagctgcagcaggaggacccaatggatagatacaagtttgtatatttataggtaactccagctgttgaatttatactgggaatcttcatgagaagctgaaagaaagggaaaaagaaagtggctttctgctttcaaaattgaggaaaataaaccagaaaatgccaaaagtactgttttagcagtgcacgttcacttccacagagacttttaggtgggactgttccaagacactctcgaggatattgcaaacttgtccctgactatagcacatgttaaaaatacaaatttagaagaaaaaataaaaaccaaatggtgtatc

SEQ ID NO: 1528 - DNA, 244 bp, Mus musculus
gttaatgcttcagggagccgttcctgggatatcggggctctggcacctgcactagatccttggtgagactagaagagaagttcgtggtgtctttgttttgtggttgccagcttctggtgaccctgtcacctttgcagtggtcagttcctggatgcagcctttccacctgatctggtggggttcaagttttacactgtactgtactgtaggggtgctgaataaagttgaggtgtgagtttgtttc

SEQ ID NO: 1529 - DNA, 1701 bp, Mus musculus
ggacaccaggaagattctcacactggacttcccttctctgtacccagctcaccatgtccaaacagctgcaggctcgaaggctggaagggatcgatcacaacccctgggtggagtttaccagactgtccaaggagtatgatgtcgtgaacttgggccagggcttccctgacttctcaccgccagactttgctgtgcaagcttttcagcaggctaccactgggaacttcatgctcaaccagtacacctcagcgtttggttaccctccactgacaaagatcctggcaagtttctttggcaagctgctgggacaggagatggacccactcaagaatgtgctggtgacagtgggagcctatggggccttgttcacagcctttcaggccctggtggatgaaggagacgaggtcatcatcatcgaacctgcttttaattgttacgaacccatgacaatgatggctggaggtcgccctgtgttcgtgtccctgaggctgagtcctgctcctaaggggcagctgggatccagcaatgattggcagctggaccccacagaactggccagcaagttcacacctcgcaccaagatcctggtcctcaacacacccaacaaccctctgggaaaggtattctctaagaaggagctggagctggtggctgcactgtgccaacagcatgatgtcctgtgcttctctgatgaggtctaccagtggctggtctatgatgggcacagcacatcagcattgccagcctccctggcatgtgggaacggacactgaccatcggcagcgcaggcaaaagcttcagtgccactggctggaagtgggctggtcatgcgtaccagataacatcatgaagccactgcggactggcaccagaacttatctttactgccccacccaggcccaggctgcagtagcccagtgctttgagcgagagcagcaacacttaggacaaccccagcagttactttttgcagctccacaggccatgggcctgaaccgagaccacatgatccagagcctgcagtcagtgggcctcaagcccttgatcccccagggcagctacttcctcattgcagacatctcagacttcaagagcagcatgcccgacctgcctggtgctatggatgagccctatgatacacgctttgccaagtggatgatcaaaaacaaggggctgtcagccatccctgtctccaccttctatagccagccccatcataaggactttgaccactacatccgattctgttttgtgaaggacaaggctacactccaggccatggataagaggctgtgcagctggaaaggagagccccaagcctgaggcgctcaggcccgcctccaaccccgagacctcagctgtgccttatcacagagatggcgctgcagggcccagatgtgtgactgggcatgtttccaggaaagaggccatctcttgggggtttcagccatcttacccagtgtctggactgctatattgggttgggggctggttctggaactcagtctgcgcctctataggttcttgtagagccttggttgtttctggcctctgcctgggacagtaaaggatggaggatcaggcctggagccccagccccaccttagccctgctgaggctccatggcttctccacttcttctcatgtgacctcacagtgttgctactgttcctaataaagttttaagttatgagaaccctc

SEQ ID NO: 1530 - DNA, 2032 bp, Mus musculus
ggcacgagggtggacactgcgcaaatggggctctccatggaccgcagcccatacgcccgcacgggggaccagcagcgcggctgctggtactacctgcgctatttcttcctcttcgtgtcgctcattcagttcctcatcatcctgggcctggtcctcttcatgatctatggcaatgtgcacgccaccactgagtccagcctgcgcgccacggagatccgcgccgacagcctgtacagccaggtggttggactatctgcctcacaggctaacctgagcaaacagctgaacatcagcttgcttgtcaaggaaacagtcatgcagcaactgttgactacgcgacgtgagatggagcgcatcaacgccagcttccgccagtgccaaggcgacctgatcacctacataaactataatcgcttcatcgccgctatcatcctgagcgagaagcagtgccaggaacagctgaaggaggtcaacaagacctgcgaagctttactcttcaagctgggagaaaaagttaagacactggagatggaggtggccaaggagaaggcagtgtgctccaaggacaaggagagcctgctggcaggaaagcggcaggcggaagagcagctggaggcctgtggcaaagcacgcgaaaggcaacagcaggagcagcaggtgaccgaggagaacctgcgcaaggtgcagtccctgtgcatcccactggaccaggagaagttccaggcggacgtgctgagtgcgtggcgggactcgctgatctaccgtaccttggaaaccctgccctaccactaccagctgatgccggagtacgcgtccctccgtcggacctgcgagagcctgcccgggatcatgccccccaagatagaagagatggcccgcggggtgcgcgccggcattgagcgcgtgacccgtgagaatgcagaactgcggcgccagaagttggagctagagcgcgcggcacagcgcgcgcaggaggcgcgggcgcgcgccgggaccgaggcgcaggcgcgagaaacccagctacgggcggagtgcgcgcgccagacgcagctggctctggaggagaaggcggcgctgcgcgcgcagcgggacaacctagagcgcgaactggaggcgcgtaagcgggagctggagcaactgcgcaccgaggtggatgtgcgcattagcgcgctggacacctgcgtcaaggccaagtcgctgccagccgtcccgccgagagtctcaggcccacccccgaaccctccacccattgatccagctagcctggaggaattcaagaaaaggatcctggagtctcagcggctccctgtagtcaaccctgctgcccaacccagcggttgaggacccagctgccgcaggacgctgggtgccagaatcgcccacctgtggatgggggcagccaggtgcccacagtgctggacacccgccgtgcctgccggcagcctccacccccacgccttctctggcaccccttcactgtcccctgcatccccgccattccccagacactggatttaaggcacacacagctgtgagatgacttcacatcgaccccttgtgcagtgacccggatggtgccccacccacacatgaagcacccacagctcagctgccaccctaggcaactcctccggtttcctatcactctgctcctgacccgggaggtgagaacaggaagcccagccttcagctcccttgggagtttccagcctccctcttaaaggccactagggtttccagatcctatttgagagtctccaggcctcccctgaagggttctagccaccacgcccacaggattcccattaggttttaaagtcttttccagagtccgctggttcccctcctcctcacaaggaagggcctcaattgtagatgagggttccgggtggatcttagagccctagagggaggcttttgcttgtagccccctaaagatattactggcacataataaatatgaaagtcctttgaaaaaaaaaaaaaaaaaaaaaaaaaaaaaaaaaaaaaaaaaaaaaaaaaaaaaaaaaaa

SEQ ID NO: 1531 - DNA, 3014 bp, Mus musculus
ttttcccagacacttttcacgtggggcacaaagaaggctttgaagcagagacttgaaatgcctgtgaagatggtcgcggtcttgggagcctcaacggtactttggatactgtttgcagtctctcaagcttttaaaatcgagatctcccctgaatacaaaacgatcgctcaaatcggtgactccatggccctcacttgcagcactacgggctgcgagtcaccattgttctcatggagaacccagatagacagcccactaaacgcgaaggtgaggacggaggggtccaagtccgttctgaccatggagcctgtcagttttgagaatgaacactcttacctgtgcacagcaacatgtggctctgggaagctggaacgaagtatccacgtggacatctactctttccccaaggatccagagattcaattcagtggccccctggaggttgggaagccggtcacagtcaagtgtttggctccagacatttacccagtttacaggctggagattgatctgttcaagggtgaccagctcatgaacagacaggagttttcttcagaagagatgacaaagtctctagaaaccaagagtttggaagtaacctttactcccgtcattgaggatattggaaaagctcttgtttgccgagctaaattacacattgaccaaattgattctacactcaaagaaagggagactgtcaaagaactacaagtctacatctctcccaggaatacaacgatctctgtacatccctccacaaggcttcaagagggtggtgctgtgacaatgacctgttccagcgagggtctaccagctcctgagattttctggggcaggaagttagataatgaagttctccagcttctctcaggaaatgccaccctcaccttaattgctatgaggatggaagactctggagtctatgtgtgtgaaggagttaatctgattgggagagacaaagcagaagtggaattagttgttcaagagaaaccatttattgttgacatctcccccggatctcaggtggctgcacaagttggggattcggttgttctgacgtgtgctgctattggctgtgactccccttctttttcttggagaacccagacagacagtcccctcaatggggtggtaaggaatgagggggccaaatccacgcttgtgttgagctctgtgggttttgaggatgaacactcttacctgtgcgctgtgacctgtctgcaaaggacactggaaaagagaacccaggtggaggtctactcattccctgaagatccagtaattaaaatgagtgggccacttgtgcatgggagacctgtcactgtcaactgcacagtccctaatgtgtatccctttgaccatctggagattgaattactgaagggggagactacactgatgaagaaatattttttggaggaaatgggcataaagtccctagagaccaaaattttggaaacgaccttcatccccaccattgaagataccgggaaatctcttgtttgcctcgctaggttacacagtggtgaaatggaatctgaacccaaacagaggcagagtgtacagcctctttatgtcaacgttgcccccaaggaaaccaccatctgggtcagcccctctcctatactagaggagggcagtcctgtgaacctgacctgctcaagtgatgggataccagctcccaaaatcctgtggagcagacagctaaataatggggaactgcagcctctttctgaaaatactacactcaccttcatgtctacaaaaagggacgattccggcatttatgtgtgtgaagggattaacgaggctggaattagcagaaaatcagttgaactgattatccaagtctctccaaaagatatacagcttacagtctttccatctaagagtgtcaaagagggagacaccgtcattatctcctgcacttgtggaaatgtgcccgaaacatggataatcctgaagaagaaagcaaagacaggagacatggtattaaagtctgtggatggctcgtacaccatccgccaggcacagctgcaggatgccggcatatacgagtgtgaatctaagactgaagttggctcacaattaagaagtttaacacttgatgtaaaaggaaaagaacataacaaggactatttttcgcccgaactccttgcactctactgcgcatcttccttggtaatacctgccatcgggatgatcgtttattttgcaagaaaagctaacatgaaaggatcgtacagtctggtggaggcacagaaatccaaagtgtagctaacatctgaaatgtttgagaagagacattatttataaaacccagatccttaatactgtttattacagccccgccccctccacaaaccaagccatgcattcagacttcccagaacccttctcagtaaagaaggcaaagtggctgcttgatcccttgctgaatgcaaggagctaaccagaaaagttctgcttgacaagtccccatcgttgaagtgactggaatggtcccatgatgtgtatgtaaataacataaactgtatatatgtaaaataaaattatgccgtcgcgaggttgtttagagtagcagcactccatatgcaggtcagaacgtaatcagagagtgttgcttggactgactgttgtaacttaatgcttcttaggaaagtttaatattaatgttaatgttgactaggcagctaaccagtgtcacctttttatgttttattttcttcaacctaattttattcctatgaattttattaacaatgatttcatgttttttaaaagaagtcagggttctatatttttataggcaaatggtaaagaggtcactgggttgactttcaggtactactttctaattcatggtagaatggctaagtaattttctctacatggtactgtacggtacggggacctgtttcttcattggggtcttgtgtaatgactaacctgatttaaatgcgacttcatttgacttgtcttttataaatactatagtaaagtggaagtttctg

SEQ ID NO: 1532 - DNA, 1303 bp, Mus musculus
cccacgcgtccgcccacgcgtccgctgaggctgagggtactgcggggctgactagaacagagacaatgtttcgagcagcggcgcctgggcagctccggcgggcggcctcattgctccgttttcagagtaccttggtaatagctgagcatgcaaatgattccctagcacccattactctaaatactatcactgcagctggacgtcttggaggtgaagtgtcctgcttagtagctggaaccaagtgtgacaaggtggtacaggatctatgtaaagtagctggcgtagcaaaggttctggtggctcagcatgatgcatacaaaggcctccttccagaggaactcacaccgttgattttggaaactcagaagcagttcagttacacacacatctgtgctggagcgtctgcttttggaaagaaccttctgcccagagtagctgccaaacttaatgttgctccagtttctgacatcattgagatcaagtcacctgacacatttgtgagaactatctatgcaggaaatgcgttgtgtacagtaaagtgtgatgagaaagtaaaggtgttttctgttcgaggaacatcttttgaggctgcagcaacaagtggaggtagtgctagttcagaaaaggcaccaagttcttcatcagtgggaatatcagagtggcttgaccagaaattgacaaaaagtgaccgaccagaactaactggtgccaaagtggtggtatctggtggtcggggtttgaagagtggagagaactttaaactgctgtatgacctggcagatcaactacatgctgcagttggtgcttcccgagctgctgttgatgctggctttgttcccaatgacatgcaagttggtcagacaggaaaaatagtagctccagaactttatattgctgttggaatatctggagccattcaacatttaactgggatgaaggacagcaagacaatcgtggctattaacaaagatccagaagctccaattttccaggtggcagattatggaatagttgcagatttatttaaggtggttcctgaaatgacagaaatactgaagaaaaaataagtcaaaatcatatcttaaggaaactgttgaaagtattcagctgaaatcatagaaattcataatctgaagaaagaaattatgctaacagcagctagaatgccttttgatgaatcaattattatattcctttttaatttttgtggtttcaaacaattattttttgacattttctaattctgaaataaaaaacataataaagttttgtcatcctttaaaaaaaaaaaaaaaaaaaaaaa

SEQ ID NO: 1533 - DNA, 2269 bp, Mus musculus
ttggagggagaactgagcttgaggagcccggacgcgctgaagtgtcagcttgatactcatggacgttggacggaccagaggcagggatggttggctatgacgccaaagcagatgtcaggagtaactccaagttggaggtggcggtggcgggatcagtgtcaggatttgtcacccgtgccctgatcagccctttggacgtcatcaagatccgtttccagctccagattgaacgcctgtgtccaagtgaccccaatgccaaataccacggaatcttccaggcagccaagcagatcctgcaagaggaaggcccaagagcattctggaaaggacacgttccagcccagattctgtccataggctacggagctgtccaatttttggcctttgaagagttgactgagctgctctaccaagccaacttgtaccaaacgcaccagttctcagcgcactttgtgtgcggcggcctgtctgctggcactgccaccctcaccgtacaccctgtggacgtcctgcgtacccgccttgccgctcagggcgagcccaagatctataacaatctgcgagaggccatacggaccatgtataagaccgagggccccttcgtcttctacaaaggcttgactcccaccgtgatcgccatcttcccctacgcgggcctgcagttctcctgctaccgctccttaaaacgtgcctatgactggctcataccaccagacggaaagcaaacagggaaccttaaaaacctgctttgtggctgtggttcgggagttatcagcaagacctttacatatcccctggacctcatcaagaagcgcctgcaggtgggcgggttcgaacatgcccggtctgcctttgcgcaggtgcggagtacaggggcctcctggacctcacccagcaggtactacaggaagaaggcaccggggcttcttcaagggcctgtccccagcctgatgaaggtgcactctccactggcttcatgttcttctggtacgagctcttctgtaacctcttccactgcataacgagggaagacagatagttgtgaggcaggaggggcctaaggaggggcccgacaagacttggctctgagctcatactgaacaatggctgctgcctggttggccttccaggccagctgccgggagcatgaagtcatccggagctgaaggcagaaggacgcaagggccttcgctgaacagaaggaagagagaagggggtgcttgcactgtaaaaagaaggcctaggtggaggaacctggtgcgcatgcgtctcacctccgaccagcccaatccagaaggaactggccatccttttttgcagtcctggctttggggagaatgctcctagtcctgataggaccacactggagtgcagacggggccgggctctttgcacagttctaacctatacaacttggtctgctcctcctaccaacttatttaatagacattaaagtaaaacacgcattccttgtgtcactcctatagcttaggaacacatcccatctgagggaggatgatgggggaggggcctttctggcttgcagccctgaggcagccatgcttgtcagcttagggggagaaccctgtcatgtgggtagcttctgaactcccaggcccaagcctttgtgcctgtgaggctccacaacaggtcagggaggaaactgagacagaggcggtgaagggcagacaggagtggctcctctccttcccctcccactggagtgcaggggccatcaccagctctgcacgcatgctgcacaccatgtcctctaatcccagatgggcctcaggcccagggcatgggatgtccgacagcctggtgaggtgtggtgggcgctgtaggcagagccagggatgcagatgaagagggagcttcctgttcacgagaagaatcacatgactgctgtctttcccatgctccagcctagtggtggggttggtctaaagaaggaagggaggagagacttcttgactttgtgggattccagcccctgccataacttggattgtaatgcctgctgggaatggccctgatcgtgaaaactggggctctgccctgcctgtcagttccactctcccctctgtggtccactgtagccctcccctagtggttcacttttctgatcttggctcctgattctgaagacccagggtcacttgggagggcttctgagatgggtggcccgttggcttcctgggcttggagcagcagaagtgttttgtgaccctattgctggagagatgtgaataaatttatataccagagg

SEQ ID NO: 1534 - DNA, 4669 bp, Mus musculus
gaattctgttatcttcttagaagattcgcagcgcaaggctctcagagggggtgggggggctggcaaaaccctggaagcagaaaagaggagagcagccttgaccagtctcactgctaacatgttgtacctggaaaacaatgcccagactcaatttagtgagccacagtacacgaacctggggctcctgaacagcatggaccagcagattcagaacggctcctcgtccaccagcccctacaacacagaccacgcacagaatagcgtgacggcgccctcgccctatgcacagcccagctccacctttgatgccctctctccatcccctgccattccctccaacacagattacccgggcccacacagcttcgatgtgtccttccagcagtcaagcactgccaagtcagccacctggacgtattccaccgaactgaagaagctgtactgccagattgcgaagacatgccccatccagatcaaggtgatgaccccacccccacagggcgctgttatccgtgccatgcctgtctacaagaaagctgagcatgtcaccgaggttgtgaaacgatgccctaaccatgagctgagccgtgagttcaatgagggacagattgcccctcccagtcatctgattcgagtagaagggaacagccatgcccagtatgtagaagatcctatcacgggaaggcagagcgtgctggtcccttatgagccaccacaggttggcactgaattcacaacagtcctgtacaatttcatgtgtaacagcagctgcgtcggaggaatgaacagacgtccaattttaatcatcgttactctggaaaccagagatgggcaagtcctgggccgacggtgctttgaggcccggatctgtgcttgcccaggaagagaccggaaggcagatgaagacagcatcagaaagcagcaagtatcggacagcgcaaagaacggcgatggtacgaagcgccctttccgtcagaatacacacggaatccagatgacttccatcaagaaacggagatccccagatgatgagctgctgtacctaccagtgagaggtcgtgagacgtacgagatgttgctgaagatcaaagagtcactggagctcatgcagtacctccctcagcacacgatcgaaacgtacaggcagcagcagcagcagcagcaccagcacctacttcagaaacagacctcgatgcagtctcagtcttcatatggcaacagttccccacctctgaacaaaatgaacagcatgaacaagctgccttccgtgagccagcttatcaacccacagcagcgcaatgccctcactcccaccaccatgcctgagggcatgggagccaacattcctatgatgggcactcacatgccaatggctggagacatgaatggactcagccctacccaagctctccctcctccactctccatgccctccacctcccactgcaccccaccaccgccctaccccacagactgcagcattgtcagtttcttagcaaggttgggctgctcatcatgcctggactatttcacgacccaggggctgaccaccatctatcagattgagcattactccatggatgatttggcaagtctgaagatccctgaacagttccgacatgccatctggaagggcatcctggaccacaggcagctgcacgacttctcctcacctcctcatctcctgaggaccccaagtggtgcctctaccgtcagtgtgggctccagtgagacccgtggtgaacgtgtgatcgatgccgtgcgctttaccctccgccagaccatctcttttccaccccgtgacgagtggaatgatttcaactttgacatggattctcgtcgcaacaagcagcagcgtatcaaagaggaaggagaatgagcgcccattgcggggttcttcctgtcttcttccacctcccagcccctacagggcacgcctgcttgatcctcagagccttctcgttagctcttctccttctccttctcagtctggtttctaaagggacggagaattaggaggctgcctgttacctaaagtctgacctgtcacctgattctgattctggctttaagccttcaatactcttgcttgcaagatgcattgacattgctagatagaagttagcaaagaagcagtaggtctctttaagccagtggagatctctcattgacttttataaagcattttcagccttatagtctaagactatatatataaatatataaatatccgatatatattttgggtgtggggggtattgagtattgtttaaatgtaatttaatggaaattggagttgcacttatcatccttctttggaatttgcttgtttcggatggctgagctgtactcctttctcaggggtatcatgtatggtgacagatatctagagttgaatggtctatgtgagtaacaatgacgtataggacctctcctcatcctttggatggttattgtttagcacatcaaacctgtggatgcatccagtgtgtttaccattgcttcctatgaggtaaaactgtatatatgtacacagttttctctgtcagtatattttatgttactggtgtccattccagttaggctggttcactctgtggctattacaagccacattttaggtttgctttgtcacacactataagacagggcattgtctcttgcttttgtttgagaagaggaagcagttgtgttgtggtttgttttgttttatttgttttgttttctggaaactcttaaatggttcaagtcagccttccaaatatctgatgaaatttagcccaatatagcagtagctctttgaaatttaaggcccaacaccctagtatttattagaaaaataaacatttgctgttgttagaatagtcttaaaaataaatttctctgctagattgactaagtaaaatagacattctctgctgttgtgagaatttgggccaattagaatgaatgaaattcgtctagttttcatggggagttgtaatgtctattagaaagattcaggaaaaataagaatgattcagaaatactgaatttccatgaaaaggaaaacagaaagcgattcatcccaccaaactctgaattgaagttccttttgaagggtggagtgatgcttgggaagtggaccttttaaagactttcctatctatgagacactgcatgcacaggcaagtttctctctccccaagggctaaaataagaataatggcttggaaaatacaaattcgtagtgtagttttcacatagcatgagctgaaccactgttatcttcctcttgatcatcaaagcttcattgttttagaaagcagaggtgaagacccagttttccgcctgacactttccaagctagtgtagaccaagacctgtctacaaacccacgacaaaccttttcacctgtttaatccatatccagaaagacttgtttcataccttgggaaagcatgcaacagtattccccttagatattttaaaaacattttgagacaagtatattttttttcctgcctaaaccaagtgttgtttgtatgctaatgagctctacaatcttcccacacattttgttaaatgactttcattgcacatgagctcccattttttattttaaagtgcaaatgggctaataggcctttgacgtgtaatgtatgagttttgccagaaaatcatatcttgtgtatatgcgtgtgtgtgaaattgcttactatgctggttttgtttgttatggctttctctttgggatagttgggttttccagaaccacagatgaaactttttttgttgctatttttatatttttgcagaaacaccgtttagtgagaattcaatgtcaaatatgacatgataccttaattgtaagaagaaggtgggaagggaaagttggtttattaatttttttaaattttgtatgcaaaagcaaatgagtccttaatttcaacattttgttgtgtttaaataatgataagcatcattaacttctgtaacaaactcacagctttacaaattcaatgggtggagaagaaagctgtgtcttagccatgttaggaagacaaatggcttcctgtgtgttgtaagtatttgggctgtttcagcagtgttggtgtggcacaggggactctgtggcatttcagcactatttaggtggcactagggactctgaaattcctgtactgtatctgatgattttggcattagccataggtaggcacagtttgtctcctcacaccagtgtttagtgtgtgaatagccagagctgtggggaagaacacagagaacagacatctgctggatgcctctcagtggagaatgggattccttcacttggtggtgaagcagataggatagaaagcaggattctctttgttaatccagttagcttttgttttcttgatatcccccctgaatacgttgagtatgagagatatgtgggttttttttatttttataattgtacaaaattaagcaaatatcaaatgttttatatactttattaatgttttttttcaaaaggtactttcttatagacatgatacttttttacagcttcagttgcttgtcttctggtatttttgtgttatgggctatggtgagccagaggcaaatctataagccatttttgtttgccaggacatgcaataaaatttaaaaataaatgaaaaaagtcgtacgcggccgc

SEQ ID NO: 1535 - DNA, 5198 bp, Mus musculus
ggagagatcgtaccggggttgcggactccggaggtggccacgccgtccagtccagcccccgcccgatcacccgaagaaccaagccggccctgggcagtgacggggttcgagtgaccatggagagcgccttgactgcccgagaccgggtaggggtgcaggactttgtcctgctggagaatttcaccagtgaggctgccttcattgagaacctccggcggcggttccgggagaacctcatttatacctacatcggtcctgtcctagtctctgtcaatccctaccgagacctacagatctacagccggcagcatatggaacgctaccgtggtgtcagtttctatgaagtaccacctcatttgtttgcagtggctgacactgtataccgggcacttcgtactgagcgtcgggaccaggcagtgatgatttctggagagagtggggcaggcaagacagaggccaccaagagactgctccagttctatgcagagacctgcccagcccctgaacggggtggcgcagtgcgagaccgcctgttgcagagcaaccccgtgttagaggcctttgggaatgccaagactctccgcaacgataactccagccggtttggaaagtacatggatgtgcagtttgacttcaagggtgcccccgtgggaggccacattctcagttacctcctggaaaagtcccgggtggtgcaccaaaatcacggagagcggaacttccacgtcttttaccagctactggaggggggcgaggaggagactctccgtcggctgggcttggaacggaacccccagagctacttgtacctggtgaagggccagtgtgccaaggtctcctccatcaacgacaagagtgactggaaggttatgaggaaggcgctgtccgtcattgacttcactgaggatgaagtggaggacttgctcagcatcgtggccagcgtcctacatctgggcaacatccactttgctgctgacgaggacagcaatgcccaggttactactgagaaccagctcaaatatctgaccaggctccttggtgtggaaggtacaacacttagggaagccctgacccacaggaagatcatcgccaagggggaagagctcctgagcccactgaaccttgaacaggcggcatatgcaagggatgcgcttgccaaggctgtgtacagccggacattcacctggctggtcagaaagatcaataggtcactggcctctaaggacgctgagagccccagctggcgaagcaccacggttcttgggctcctggacatttacggctttgaagtgtttcagcataacagcttcgagcagttctgcatcaactactgcaatgagaagctgcagcagctcttcatcgagctgactctcaagtcggagcaggaggaatacgaggctgagggcatcgcgtgggaacctgtccagtacttcaacaacaagatcatctgtgacctggtagaggagaagttcaagggcatcatctccatcttggatgaagagtgcctgcgtcctggggaggccacggacctgacctttctggagaagttggaggacactgtcaagccccaccctcacttcctgacgcacaagctcgctgaccagaagaccaggaaatctctagaccgaggggagttccgccttctgcattatgctggagaggtgacctacagtgtgactgggtttctggataaaaacaatgacctcctcttccggaacctgaaggagaccatgtgcagctcaatgaaccccatcatggcccagtgctttgacaagagtgagctcagtgacaagaagcggccagagacggtggccacccagttcaagatgagcctcctgcagctcgtggagatcctgaggtctaaggagcctgcctatatccggtgcatcaagccaaacgacgccaagcagccgggtcgctttgatgaggtgctcatccgacatcaggtgaagtacctgggactgatggagaatctgcgcgtgcgcagagctggctttgcctatcgtcgcaaatatgaggctttcctgcagaggtacaagtcactgtgcccagagacatggcccatgtgggcaggacggccccaggatggtgtggccgtgttggtcagacacctcggctacaagccagaagagtacaaaatgggcaggactaagatcttcatccgatttcccaagaccttgtttgccacagaggactccctggaagtccggcggcagagtctagccaccaagatccaggcggcctggaggggctttcattggcgacagaaatttctccgggtgaagcgatcagccatctgtatccagtcatggtggcgtggcacactgggccggaggaaggcagccaagaggaagtgggcagcccagaccatccgtcgactcatccgtggcttcattttgcgccattcaccccggtgccctgagaatgccttcttcttggaccacgtgcgcgcctcatttttgcttaacctgaggcggcaactgccccggaatgttctggacacctcctggcccacacccccacctgccctgagagaggcctcagaactgctacgggaactgtgcatgaagaacatggtgtggaagtactgccggagcatcagccctgagtggaagcagcagctgcagcaaaaggcggtggctagtgaaattttcaagggcaagaaggacaactacccccagagtgtccccagactcttcattagcacacggcttggcacagaggagatcagccccagagtgcttcaatccttgggctctgaacccatccagtatgccgtgcccgtggtaaaatacgaccgtaagggttacaagcctcgcccccggcagctgctgctcacgcccagtgctgtggtcattgtggaggatgctaaagtcaagcagagaattgattatgccaacctaaccggaatctctgtcagtagcctgagtgatagcctatttgtgcttcacgtgcagcgtgaagacaacaagcagaagggagatgtggtgctgcagagtgatcatgtgatcgagacactaaccaagacggccctcagtgctgaccgcgtgaacaatatcaacatcaaccagggcagcataacgtttgcagggggtccaggcagggacggcatcattgacttcacatcgggctcagagcttctcatcaccaaggctaagaatggccacctggctgtggtggccccacggctgaattctcggtgatgaaggcttcagtggacccctcctgactcctgatgcttcgcttagtcccctcctcccctcccagttaccaaagactcaagcttccagacagggatccatggacaccctcaaaacccacctgcaaactcctgcctcctgctcgccccctctcgaggtgatcaggagccagggagctaccccatgagtgggccaggccgggccacagcaatagaaaagcagaggcctgagcaggccaggccagccctctgctgatgccaaatatctaagagaagggaattttaactgaggttttctctgagattttttgatgctttataggaaactatttttttaagaaagccattttcctaccctaaacacactggatgtgtttttccctgcctcgaacagggcaaggaatgtaactgaaagactgactgggctgggctggaaggtcctcttctctggccaagcctctcctcattcccttgtctgtctgtccatccacctgcaccttttgcagcccactatgacctccaccaaaaggctgaggccacctctgcctaccccatattcctgccttaagaatgtccttttaggggctggggtatagcccagtggtagaactggtgctaagcatgtgtgagaccctgggctcaatccccagcattaaaaaataaaaaataggtttttaatattttcaccccagtctgagggcatccctaaagtgggggaaaagtcttaagagtttggaagtcttcagagacagtgtctggtccaggctcctggaatctacagagctggagacagaggcacacagagggagggaagacttgcctagtagaagactgaagcaaatcctaaagtgaagcccgccctcagcacatctcactgcctttcccagggacagggaggcccataaggcaagggtcgcgtctcatgtatgcacctggctctctgaccagcaatcacccttgggagctaccgggtgggagggatcttctgcctgggtctatgccttaggatgacaacctccatacacatacatactttcgacccaatttaagaatggtagggtcttttattggccttgggtgcctctgtgacctgggagcctagggacagggctggccttggaggaactgcaggggcatcacctctttctgctgcttctctccaccccagaggtccttgggtttgcccagctccctctgtgccctctggggctctcagcccactgctgacacttctgcaatccagagaaacactaaataaagcaatatgtatttgccaacacagtcttcctgtgagtgtggaaaaggggccctagaaggtagacatccttaaggggcttggcactacagaagaaaggagacagacctacttaggagcaatagagagaaaccaagttaggtgtggtattgtgagccttagtgctcaggaagcagggacaggaggattggatttcttagttctaggccagcctggtctacaaatcaagttccagggctatatagacaggcacggggctttggatttgggcaaataaatacctggtctggcagcaccgctggactaaggagacctagcatgggcaatataagcccaggggcctgtgctgatgcaagactcaggtggggagggtcagcacttcataaggaagctggtgtttgaggtatctcaggggcttgcttccagttctggggataaagaatccagtccaaagtggctggagcggtaaaggccacttgtcaacaatggccattttattgtcctggggagatctacttctaggtgatcaaaagacattgttaggaaaatgtcttgggggctagagagatggctcagtggttaagagaactgactgctcttctgaaggtcctgagttcaattcccagcaactacacggtggctcacaaccatctgtaatggggtctgatgccttctggtgtgtctaaagggagcaatggtgatgtactcatatgcataaaataaatgaataaataaacaaatctt

SEQ ID NO: 1536 - DNA, 3887 bp, Mus musculus
cccaagatggcggtgtgtggacgtgtacgggggatgttccgcttgtcggcggcgttgccgctgctgctgctcgcggcagcaggggcccagaatggtcacggtcagggccagggtccggggaccaactttgggcccttcccagggcaaggtggaggcggcagcccggccggccaacagccgcctcagcagcctcagttatcgcagcagcagcagcagccgccgcctcagcagcagcagcagcaacagcagcagtcgcttttcgcggcgggcgggctcccggcccggcggggcggagcggggcccggtgggactggcggaggctggaagctggcggaggaagagtcctgccgggaggacgtgacccgtgtgtgccccaaacacacctggagcaacaacctggcggtgctcgagtgcctgcaggacgtgagggagcccgagaacgagatttcttcagactgcaatcatttgttgtggaattacaagctgaacctgactactgatcccaaatttgaatctgtggccagggaggtttgcaagtcaactatttccgagattaaagaatgtgcggaagaaccagttggaaaaggttacatggtttcctgcttggtggatcatcgaggcaacatcactgagtatcagtgtcatcaatacattaccaagatgacggccatcattttcagtgattatcgcttgatctgcggcttcatggatgactgcaaaaatgatatcaacctcttgaaatgtggcagcattcgtcttggggaaaaggatgcacattcacaaggtgaggtggtatcatgtttggaaaaaggcctggtaaaagaggcagaagaaaaagagccgaagattcaagtctcagaactctgcaagaaagccattcttagggtggctgagctgtcctcggatgactttcatttagaccggcatttgtattttgcttgccgagatgatcgggagcgcttttgcgagaatacacaagctggtgaaggaagagtgtataaatgcctatttaaccataagtttgaagaatccatgagtgaaaagtgtagagaagcactaactacacgccagaagctcattgcccaggattataaagtcagttactcattagccaaatcctgtaagagtgacttgaaaaaataccggtgcaatgtggaaaaccttcctcggtcccgggaagccaggctctcctaccttctgatgtgcctggagtcagcagtgcacagagggcggcaggtgagcagtgagtgccaaggtgagatgctggattaccgacgcatgctgatggaagacttctctctgagccccgagatcatcctgagctgtcgaggggagattgaacaccattgttctggattacatcggaaagggcgaaccctccactgtctgatgaaagtggttcggggtgaaaaggggaaccttggaatgaactgccaacaggcgcttcagacactgattcaggagactgaccctggtgcagactaccgcattgatcgagctttgaatgaagcttgtgagtctgtaatacagacagcctgcaaacacatacgatccggagacccaatgattctctcatgtctgatggagcatttatacacagagaagatggtggaagactgtgaacaccggctcttagagctacagtattttatctctcgggattggaagttggaccctgttttataccgaaaatgccagggagatgcttcccgcctttgccatacccatggttggaatgagaccagtgaacttatgccccctggagctgtgttttcttgcctatacagacatgcgtaccgcacagaagagcaaggaaggaggctctcacgagaatgtcgagctgaagtccagaggatcctgcaccagcgagccatggatgttaagctggatcctgccctccaggacaagtgcctcatagacctagggaagtggtgcagtgagaagacggagactgggcaggagcttgagtgccttcaggaccatctcgatgacttagctgtggaatgcagagacatcgtgggcaacctcaccgagttagagtccgaggatatacaaatagaagctttgctgatgagagcctgtgagcctatcattcagaacttttgccacgatgtggcagacaaccagatcgactctggggacctgatggagtgtctgatccagaacaagcaccagaaggacatgaacgagaagtgtgccattggcgtcactcacttccagctggtacagatgaaggattttcgattctcttacaagttcaaaatggcctgcaaggaggatgtgttaaagctttgccccaacataaaaaagaaggtggacgtagtgatctgcctgagcaccactgtgcgcaacgacactctgcaggaggccaaggagcaccgagtatcactcaagtgccgcaagcagcttcgtgtggaagagctggagatgacagaggacatccgtttggaaccagatctgtatgaagcctgcaagagtgacatcaagaactactgttctacagtgcaatatggaaatgctcagattattgaatgtctaaaagaaaacaagaagcagctgagtacccgttgccaccagaaagtatttaagctgcaggagacggagatgatggacccagagctagactatactctgatgagagtctgcaagcagatgattaagcggttctgtccagaagcagattctaaaactatgttgcagtgtttaaaacaaaataagaacagtgaattgatggatcccaaatgcaaacagatgataaccaagcgccagatcacccagaacacagattaccgcttaaaccctgtgctaaggaaggcctgtaaagctgacattcctaagttctgtcatggcatcctgaccaaggctaaggacgattcagagctagaaggccaagttatctcatgcctcaagctgagatatgctgaccagcgcctgtcctcagactgtgaggaccagatccgtatcatcatccaggagtctgctctggattaccgcctggaccctcagctccagctgcactgctcagatgagattgccaatctatgtgctgaagaagcagcagcccaggagcaaacaggccaagtggaagagtgcctgaaggtcaacctgctcaagatcaagacagagctgtgtaaaaaggaagtgttaaacatgttgaaggaaagcaaagcagacatctttgtggaccccgttcttcacacagcatgtgccttggacattaaacaccactgtgcagccatcacccctggccgcgggcgtcagatgtcctgcctgatggaggccctggaagataagcgagtgagattgcagccagagtgcaaaaagcgcctcaatgaccggattgagatgtggagttatgcagccaaggtggctccagcagatggcttctctgatcttgccatgcaagtgatgacatctccctcaaagaactacatcctgtctgtgatcagcgggagcatctgcatactcttcctgattggcctgatgtgtggacggatcaccaagagagtgacacgagagctgaaggacaggtagaggcgcaggcctgaccaccaaggagccaccgcccgggcccgcctgtacagccgtcctgtatagtgtaccctctcactgcgccctctaacggtggcactgacacccacagtagagcagcatcaggtgcccactgcatcttcccatccagacttggccatgtcctcggtgtcctcctcctcctcctcctcccagctgcccttgcagcgtcggcagctggctgctttggtggtagcttttgttggcgaaggtttacctgcctgtagacaattctgtcatacctacagaactgctggtacttccagaccgactcacctgacctgcaactcaaatttttaaaaaaaaaaaaaaaaaaa

SEQ ID NO: 1537 - DNA, 3573 bp, Mus musculus
ggcgaggcgaggcgaggcgcggcgcggcgcggcgcagacaatggaagcggcattggcgaaggccgcggagctccgggcctggcgaggaccggaggccgcgccatgagccccgcagccggacgccccgctgcgccgcgcgcgggccgaggcgagcggcctctgcgagccctgggccgcgccctggggctggcgatgagctgccgaggctgaggatgatggtagattgccagagctccacgcaggagattggggaggagctgatcaacggggtcatctactccatctccctgcgcaaggtccagctacaccaaggagccactaagggccagcgctggctagggtgtgagaacgagtcggctctgaacctctatgagacctgcaaggtgcgcacggtgaaggctggtactctggagaagctggtggaacacctggtgcctgccttccagggcagtgacctttcctacgtcactgtcttcctgtgcacctacagagccttcactaccacccagcaggtgctagacctgctgttcaaaaggtacggtagatgtgacgccctcacggcctcctctagatatggctgcatcctcccctactccagtgaggacggcggaccgcaggaccaactcaaaaatgccatctcctccatcctgggcacctggctggaccaatactcagaggatttctgtcaacctccggactttccctgcctcaagcagctggtggcttatgtacagctcaacatgcctggctcagatctggagcgccgcgctcaccttctcctggcccagctggaggacctggagcccagtgaggctgagtctgaggccctgtccccagctccagtgctgtctctgaagccagcttcacagctagaacctgcactgctgctgacgcccagccaagtggtgacatcaactccagtacgagagcccgctgcggccccagtgccagtgctggcctccagcccagtggtggcaccagctcctgagctagaaccagttccagagccacctcaagagcctgagccatccctagcactggctccagagctggagcccgccgtctcacagagcctggaactggagtcagctcctgtgcccactcctgccttagagccttcctggtctctgcctgaagccacggagaatggactaaccgagaagcctcaccttctgctgttccctcctgacttggtggctgaacagtttactctgatggatgcagaactattcaagaaagtcgtgccctaccactgcctgggctccatctggtcccaacgggcaaagaagggcaaggagcacctcgcgcctaccatccgcgccactgtcgcccagttcaacaacgtggccaactgtgtcattactacctgccttggggaccagagtatgaaggctccggacagggcccgggtggtggaacactggatcgaggtggccagggagtgcagagcgctcaagaatttctcctccctctacgccatcctctctgctctacagagcaatgccatccaccgcctaaagaagacgtgggaagaggtctccagggacagctttcgagtgttccagaaactgtcggagatcttctctgatgagaacaactactccctgagcagagagctgctcatcaaggaaggaacctccaagtttgccacactggagatgaaccctaggagagcccagaggcggcagaaggagacaggagtcatccagggcaccgttccctacctgggcacattcctcactgacctggtgatgctggacactgccatgaaggactatctctatgggagactgatcaactttgaaaagagaaggaaggagttcgaagtcattgcccagatcaagttgctacagtcagcctgcaacaactacagcattgctccggaagaacactttggaacatggttccgagctatggagcgactcagtgaggctgagagctacaccctgtcgtgtgagctggagcccccgtctgagtcggccagcaacaccctgaggagcaagaaaagcacagccattgtcaagcgctggagcgaccgccaggctcccagcacggagctcagcaccagtagcagtgcccactccaagtcctgtgaccagcttcggtgcagcccttacctcggcagcggggacatcaccgacgcgctcagtgtgcactcagctggctcttccagctctgatgtggaggagatcaacatgagcttcgtcccagagtctcctgatggccaggaaaagaagttctgggagtcagcctcccagtcgtccccagagacctctggcatcacgtccgcctccagcagcacctcctcttcgtcagcctccaccacgcccgtgtctaccacgcgcacccacaagcgctccgtctcaggggtctgcagctacagctcctcactgcctctctacaaccagcaggtgggcgactgctgcatcatcagggtcagcctggatgtggacaacggcaacatgtacaagagcatcctggtgaccagccaggataaggctccgactgtcatccgaaaagccatggacaaacacaacctagatgaggacgagccggaggattatgagctggtgcagatcatctcagaggatcacaagctgaagattccagaaaacgccaatgtgttctatgccatgaactctaccgccaactatgacttcatcctaaagaagcggaccttcactaagggggctaaagtcaagcatggagccagctccaccctccctcgtatgaagcagaagggactcaggattgccaaaggcatcttctaaggacgtctcctgggacgggctgactggctggagactaagcacttacagactagagtggccctggccaacaggtacctctgcccacctgccagtccaggctacccccctactccactttcaccctgaacctctcctgctgccgggattgacacctgccactgacaggctgacctggcctctggggaccacttgccgccttcggtgccttctgctctctgaaaccagaggactagctgacttttgccaaggagtgttgccaactgggcatgggaccttgcctgccctggacactatccaccacactttgctgacacctccccaggtgcagatcactgccacccatgctcccggatgctccaggacacacatacacccagcagggctgccgactgcattctctccttgtgcccacaggcactggcctgggactttcatggaggtcctagcctttcctcccacactctagcctttctcaggctgcaccaaagattccaccttcagggcctacagagtgagggagcctcgcccaccaggagcccaagccctcccttggatcagagagagaagccctctcgtgaactgcccggttggtattgaatcccagtccactgaaagtgccattgaccaccgctgcatccgggctgtacaagacgacacgcagtgggaggtttgtggggaggaggaagacaactgaacatttgtataaaacgtaaaaagtttactgattggggtgggacaatatttatttgttgtaaatagaaaatgctagacttgaatattatattaaaatcccgtttctact

SEQ ID NO: 1538 - DNA, 3586 bp, Mus musculus
tcgcgagattggcgcgcagcccggaaggtttcggcggggtcgcacctgttgcgtgactcccccgtagcccggccacaggagccggatccctaattgattcccagaaagtggtgaaagaaccctaggcgaattccgggtccggttttctggggagcacgtggcctgtttcctcttgagtgcaggcttggggtcgcgactccggggtctcctgagtgcgggtgcaggggccagtggcgcgacttcgccccggtgggggccctctcccctcttcagcccggctccctcgctgtgcagactttcgtaggctgccttcctggtccacgcgggacttgggcagcatggcctcagaagctcgaagcggtctgggggcctctccgctacagtctgcccgatccctgccaggcaacgccccttgcctcaagcacttcccgcttgacctgcgcacgtctatggatggcaaatgcaaggagatcgctgaggagttgttcagccgctcactggctgagagtgagcttcgtagcgccccttatgagttcccagaggaaagccccatcgagcagctagaagaacggaggcagcggctggagcgccagatcagccaggatgtcaagctggagccagatattcttcttcgagccaagcaagatttcctgaagacagacagcgactcagacttacagctgtacaaggagcaaggagagggacagggtgacaggggtctttgggaacgtgatgtggtattggaacgggaatttcagcgggtcatcatctctggggaggagaagtgtggggtgccattcacagacctcttagacgcagccaaaagtgtggttcgggcacttttcatccgggagaagtacatggccctatcactgcagagcttctgtcccaccacccgccgttacctgcagcagctggctgagaagcccctggagactcgaacttatgagcagagtcctgatacccctgtatctgctgatgccccagtgcatccccctgcactggagcagcacccgtatgagcactgtgagccaagcgccatgcctggggacctgggcttgggtctgcgcatggtgcgtggtgtggtgcacgtctacacccgcagggaccctgatgagcactgtccggaggtggagcttccataccctgacctacaggaatttgtagctgacgtcaatgtgctgatggccctgatcatcaatggtcccataaagtcattctgctaccgccggctgcagtacctgagctccaaattccagatgcacgttttgctcaatgagatgaaggagctcgctgctcagaagaaagtgccacaccgggacttctacaatatccgtaaggtggacacacacatccacgcctcgtcctgcatgaaccagaaacatctactgcgcttcatcaagcgggccatgaagcggcacctggaggagattgtgcatgtggaacagggccgcgagcagacgctgagagaagtcttcgagagcatgaacctcactgcctacgacttaagtgtggacacgctggatgtgcatgcggacaggaatacctttcatcgatttgacaaattcaatgccaaatacaaccctattggggagtctgttctccgagagatcttcattaaaaccgacaacaagatttctgggaagtactttgctcacatcatcaaggaggtgatggcagacttggaggagagcaaataccagaatgcagagctccggctgtccatctacgggcgttcgagggatgagtgggacaagctggcacgctgggcagtgaaccacaaagtgcactctcccaatgtccgctggctggtgcaggtgccccgcctcttcgatgtgtaccgcaccaagggccagctggccaacttccaagagatgctggagaacatctttctgcccctgtttgaggctactgtgcaccctgccagccacccggagctgcacctctttctggagcacgtggatggttttgatagcgtggatgatgagtccaagccagagaaccacgtcttcaacctggagagtcccctcccagaagcttgggtggaggaggacaaccctccctatgcctactacctgtactacaccttcgctaacatggctatgttgaaccatctgcgcaggcagagaggtttccacacgttcgtgctgaggccgcactgtggggaggccgggcccatccaccacctggtatcagccttcatgctggccgagaacatctcccacgggctgctcctgcgcaaggcccccgtcctgcagtacctgtattacctggctcagatcggcatcgccatgtccccgctcagcaacaacagcctgttcctcagctaccaccggaaccctctccctgagtacttgtcccgtggcctcatggtctcgctgtccacagatgatcccttgcagttccacttcaccaaggagcccctgatggaggagtacagcatcgccacccaggtgtggaagctcagctcctgcgatatgtgcgagctggcccgtaacagcgtgctcatgagtggcttctctcacaaggtgaaaagccactggctgggacccaactataccaaggagggccctgagggcaatgatatccgccgtaccaacgtgccagacatccgagtgggctaccgctatgagacgctatgccaggagctggcacttatcacacaggccgtccaaagtgagatgctggagaccatcccagaggaagtgggcattgtcatgagcccagggccttagtgcacctggtctgtgcagtgctcgtcccatctcagcgacttgactgtgaccgtgattagacccctcccacctgatgtggtctctgcatgtctccgtgctatgtttctgtcctgcatgtcttcgaccatgtcttgcctctgggccacctcagtgaaagcaagtccaggaatctgcttcattattgtctcggctcaggtggtacctggtggctgagatttaagagttggccctgctcgtgacccatctcagaattgtcagaagtctggctgtcctatggtatcctcagtgtccacaggggcttgggatggttgtgtagggctggccccttgagcaccgggaacccaggctttggttagagttcaagttgagtttccctcttgtttatgtggctgtgggacaggaggggctcgttatctctctgctgtggcactggctgctcagcctctgaagttccagctggtctgcgctgggcagagcaggacttaggctcactcacggccctggaggcctggcctgaggggctggcccactgtccctgctgagtcactgcccatcagccccgttcctccccagcccacgtgttcctttgttaccagcccccttgtatccctgtgggagggggcagctgccctgacctgtctcagttggaggctattgcagttggagggtgctggaactgttactagctctggaggtggcaccttctttgggggtttccaggtctttgaccagacccagttcccagccagcctcttgtgttatgttctagaccgaggcctttgctatgaagaacagtgtttcatatgacccattttttcctagtgcatgagaaataaaaagattatttaatt

SEQ ID NO: 1539 - DNA, 1260 bp, Mus musculus
gtttgcacagaatactgggtgtcttctgtcttgaagaaaggcagtgtccccgagtcacacagcacagcaggtagcatcaactagagctagttaatgtgtgttgttttgctcttgggatcgagacttcagtttccaatgtgtggggagtcagaccagaatagatacaggtactttgaaaccactaacccttctttacacggggcacataggccagtccgagttctttcttaacaagatggctgttctggcttggccagcagtctgcatgctgaagctgcaccaaagacaagcgaatgggtcatttctaaagagaccagggagcccactcctcatgggctctccgtggtgaagaacaaagggtaccccaatggcctctcaccatcactgtcctccaggggcctcggacttttagtactcaaggcatgatgtggcagtagctgcttcccctaccactagctgccccctcatggtcgtctgggggacagaggtggtctgtgtttacaagggcagtcaagtccagtcacccatattactcatcaatgttagacgaagccttgagctgaaggaggtgctgtcggctaggcctctactctgggtttcagagagtagtattggtttcagtctggtctcatttccattgccttaacgctgggtggtcagggccccaaggaactctggatctaagctcaggagtacacatagcagctatgggtatgggtgtcctcctctggtgtaactgtgagactaagtgataggaagaagtaaagccttcatagcgagtggatgggatgaggtgtggcacacatccccgggagtgctcgtgggaagtggcctccacagaaggtagtcatcttcatcctctaggacatttaaaacatgctcagtccctggacccagatgatggcttctcagggcaagtcataagttatcaggtccacttgtctggaagaataacaagaaagctgctgctttcgagatcacccgccagaggcggggcacgaggcacactgtgttatactgcatgagccatgaattgggctagaggaagccttgtcatcagatactgaccatagcatgtgacactcagacttctcagctcctgtgcatcccagtgtaggctctgaggccacatggaaactctagatggttctgatcactctagccaccggaggatgaaagggatcttttgcatagcagaggattttatacacaaatatattttgtttgtaatgagccattctcaataaatattctcaccgt

SEQ ID NO: 1540 - DNA, 1106 bp, Mus musculus
attatttccactatgcaaatttctttttaattcagtgaaaagcaactgttatacctcatagtctcttgtttttaattgaccaaaatattccattctattctcacaaggttctgaggtctctgcctgaaaaagcaagtctcaccctatagacactgatgtgcccagcactacgtgccagccattgtgggaacacaagagggtcacctgcccaagggctagggaggaagacctcaagaacacagaggaggtggaaaaggacaaaataggtgccattttagggagaccatggtcagatagggggatgctcagttccttgcagcctcgggcgggcttatgttggcactaaggccattgtggagtgtacttatatgatccctatgctgataggattaccttcctagacatagctagacgcaaagccacatgtgtaaggctgctgagcaaagacagcatcccagcatgggtgtgttcacggtggattcaccacgttgcatatgtaaagtggtccccttggcttacccttcactttgctcatgagattcagaagctggtggtccagcaggggtgagcatttgtgaaatagtaagctgaacttagtggtgagatttcagaacagacttctgtgaagtaagagatgtaaccatgcatctaaaatcagatggccgtgtaactgctcgggcatagaaatggtgggagaacctgtcctgggtacctggcatttcacatgagcccagggatatgtcttggccaaggcacacaagtgtccatggacttggacaggtgccaagggtttttgtctctgttcctatgtgggaggctggctgtgatttacattaatttctgtatttcaaacgaagatgtctgcagatctccattttgatgttacagcctcattgcccaggcagtgggcagtgcccagacaccctttctgactagccactgcattgggcttctgtgattcaaagtagtgtatatatttatttacttctctgactgtggccaacagccaaatgccattttatgttccttgtattcagtccattaccaaagaggtgtttgcactttgtaatgatacctttcagttcaaataaaaggaccacatcgtc

SEQ ID NO: 1541 - DNA, 2010 bp, Mus musculus
aagtgctacccaccgcgttctccccgccgccgcgtggcaatgagcagcccggtcagcaagccgcctcccgagctcctcgagcctaacccagggaagtcctacggcattatggagattgccatcattgcagctgtgatcactgctgtggccttggtcctggtctgcctcctctttctcatgcttcgctacctgtacaggcacaagggtacctaccacaccaatgaggccaaaggcacagagtttgcagagagtgctgatgcagccctgcaaagtgaccctgccctccaggatgctggggacaccagcaagaaggaatactttatctgaggggtagcagacttgacatccctgcaagatgcttctggctgcaggagagaaagtacccccgctgtgtgccaccattatcagcaccaggaagcccccaagggcaccccaagactcttactgcagaacactgggtgcctgccaggaaaccgatacagatgggaggagtcaaggcccagagcactcttccagggactcagtggccacccagtggcattggcttcgcaaggaagagagaacatctggatacccaggtctccctgggcaatgcaggtatcatctcaccagcatggaagtcctcctcagtgtgcatgaggtggtctggacctgggagtgggacgtatagaagtgggacatctagaagctgcctggagatgatggcatcaagtgtcagtcattgacatttgggaagaccagcaaatgccagagctaaaaagcttcttcatccatctcccatgcagctcaagacgattacaaataagtttgaaatgtgactgagcccgttctatatcaaacggcactactctaagtgtctgggaaatgtaaatgccacccattgctggcttttctctggtagaacactgtgtctgtgtgcagcctgcaaggattgtctagctctgtccaaagaagagggggaagggtgacctttcccctcgccagtcccagctacaggaaacaaatggaaagaggatacacagtaaccaggccactggctgaagcactgatttcttgataaacaattttaaaaagagagttgtgctcaacaaccatgagtgaactcggtcatgccagagtcccagtgcaaatgcctctgtgttagaagagactgaagatccccagacctgggtttggctcccggctcctctttattggtcttaggaccttcagccatgtgtttgacctctccagctttaacgttggcctttctcaagtggaaatgatgctgagttgccttacctctggctcctgactcccagcattgtgggcagggacagaagcatcagatgctagccattcgctgccttacagcgtcactaacacactggatgcgtggcttgcctgcctgtgttggccaatagaattcatctttgcaccacctctaaaagccccctgagaagtcactaatttagatttaataacagggaggaaatgaatgaattagccaaccccttgcaggtaagattgccagcggctctgcagtttctctaaggccagcattgctgtattgaaagaccgcccctcaggagccccctcagctgtgctatctccacctagcagccagcaaaaaaggagcctgagacactaatgaggatgcaagcttggtcaagtatggccaccagccaaaggagctatgattcctccgaatgttgtagggaagagaagcagtgattcagttataacaagggccagacgaccccagaatggaggatgtctgtgtcctcatctgtgaagtaaaaggctggccatagttgacacccattaatctagagagaccttatctgaaaccctagcggatgcttgaaacccaaggcagtattaaacccccttgtattcggcttttctgcacatacttatgttgagatttaatttataaattaggcacagtaagaaattaactgcagtaactaacagcacaatggtataactagaactataaagctgtaataaaagattcttgagaccacg

SEQ ID NO: 1542 - DNA, 1138 bp, Mus musculus
gcatcttgctcctgcccctgacaggctcgggtcggggtcacagggacacggagcccgctgtcccgctcttcgcagacaatgctgtcccgggtggtgctttctgctgccgccacagcggccccgtgtctgaagaacgcggccgccctaggtccaggggtattacaggcaacaagggcctttcacacaggacagcctcgccttgcccctctaccacctcttcctgaatatggaggaaaagtgcgtcttgggctgattcctgaggaatttttccagttcctttaccctaagactggtgtaacaggaccttatgtgcttggaactggacttagcttgtattttctatccaaagaaatatatgtgattaccccagagaccttctctaccatatcagtagtagggttgatagtctatgtgattaagaaatatggcgcctcttttggagaatttattgacaaacttaatgaggaaaaaattgctcaactagaagaagtaaagcagtcgagcatgaaacaaatccaggatgcaatcgacatggagaaggccagcaggcactggttcagaagcgccattacctcttcgatgtgcagaggaataacattgccctggccttggaggtcacttaccgggaacggctacataaagcatataaggaggtaaagaatcgcctgggctaccacatctctgtacagaacatgatgcgtcgcaaggaggatgaacacataatagactgggtagaaaagcatgtggtgaagagcatttctgtacagcaggaaaaggagaccattgccaagtgcattgaagatctaaagctgcttgcaaagaaggctcaagctcagccaattatgtgaatttgtctttctcagttgtgatacccagagagagttaaatgggaactagtatatgtgaagaactctttctgtattgctttctattgaaataaaatgatcaaggtccatttagtggcttaaccctattggccagtaaggtatttctgatccttgctctgtatgcggagttatctgatcataatttgaataagcaacttgcagcaacttgctgcccaactgaaattaccaagttataatttaaacttgtaattaactaaagcatcttgcaataaaatgtttgaaacagaaat

SEQ ID NO: 1543 - DNA, 4108 bp, Mus musculus
aacgcagagcctgagccccggagcctgtccctgggcggccatgttgggtttgacagcctccctgaccagctggtcagcaagtcagtcactcagggcttcagcttcaacatactctgtgtgggcgaaactgggattggcaagtccacgctaatgaacacactcttcaacacgacctttgagactgaagaagccagtcaccatgaagagtgtgtgcgcctgcggcctcagacctatgacctccaagagagtaacgttcatctcaagctgaccatcgtggatgctgtgggctttggcgatcagatcaataaggatgacagttacaggcccatagttgactacatcgacgcgcagtttgaaaactatctgcaggaggagttgaagatccgccgttccctctttgactatcacgacacgaggatccatgtttgcctctacttcatcacgcccaccgggcactccctgaagtccctggatctggtgaccatgaagaaactagatagcaaggtgaatataatccccatcattgccaaggctgacaccatctccaagagcgagctccacaagttcaaaatcaagatcatgggtgagctggtcagcaacggagtccagatctaccagtttcccaccgatgacgaggctgtcgccgagattaatgcagtcatgaacgcacacctgccttttgccgtggtgggcagcacagaggaggtgaaggtggggaataagctggttcgagcacgacagtacccttggggtgtggtgcaggtggagaatgagaatcactgtgacttcgtgaagctgcgggagatgctgatccgggtgaacatggaggacctgcgcgagcagacccacagccggcactacgagctctaccgccgctgcaagttggaggagatgggcttccaggacagtgacggtgacagccagcccttcagcctccaagagacatatgaggcaaagaggaaggagttcctaagcgagctgcagaggaaggaggaagagatgcgacagatgtttgtcaacaaagtcaaggagacagagcttgagctgaaggagaaggaacgggagctccatgagaagtttgagcacctgaagcgaatccaccaggaggagaagcgcaaggtagaggagaagcgcagggagctggaagaggagaccaacgccttcaactgccggaaggcggccatggaggccctgcagtcacaggccttgcatgccacttcacagcagcctctgaggaaagacaaggacaagaagaattaaagcacgcacagacatacatgtcgagagcggactttaggctttcatgtgttaaaccgcttgagttacaccttgtgacccttctcccataacatggtgtgaggacggactgggagccggtacagactccagtgtttacagctttgccatgtccccacctgctggcctcaggctgcctgggcctggccagctatccttctctatgcaaatgcgtcaaagccatgactgctggaacccaaaactgacaaggtttattttttccagagccggtggctggtcttccatttacagtgtcactattccttgatggagcagttatgtgcccgctctggtgatggccccagccagtgatgctaggcctaattgttcatcatcaagccggcgactcatgtggtgcctgccctaggcgtggcctgcggtctggcagatccgtgctacagaattcgcctggttcctctctattttaatttttctaacctagagcttaatttcaataactttttcaacagttctaaatttttatttttggcaccagtataaagacaaataatatctatcgctcccattattttcataagtaacacagattccctgatttttttttttaaaaaactaaaaagatctctaaaccttcttacatagaaagcatccctataatctatagggagaggcggggaataaagtgcctattctgccagtgtctgggacttctttatggacagaaggggaccctgatgagaccacgcccggcgtttttactgtgaatgtaaatggaacagcagccccagacccttgtctctgccctagaggtgctacctgtgacagggaccaagtgcatgtgtgttcagtgtttgactccaaaacagctgcctgctccctcagtgtgctcggtggggagagggccgtcacgtcaaggtcattgttactgcttccctggctgagtcacagggcagggaaataaagaagtctggagtgttaggacggtttgagagggaaggagagagagaagaaagacgaaccacttgagactgagactgtcccctccagctgtgctgtacttccaggtgcgcactttaaagaaagtggccaccaggtgtgatggtgcagtcctatagtaaccgagcttgcactcgggaggtaggaagccagaggccagcctcaaggtggccatgtcgaggtgaggccagcttgggctatccgagacgctgtcagccattttgctctgttcctggtagtgtgcagacctcggggttgagaacggggtgaagatgaatgtccttagtgttggtgcagcaccagcctgggctctgggctcctcaccgagactcagaggccacactgatttgtgctgcatccagacccccgtctccctccccaccaccattccttgcttcctgcccagcccgcttcacttctcccgggaccatcctgatatggcggttcattcagaatgacctggaggggaaggtgggtgggcgttctctaaggcacaacaccccaaaggccgactgtacccatgagaggtgcctcacagcaggagactaagatctgttgatgctctgaggaaaactcccccatgaccagggtggattctggcttcaaggctggacacctgaactatttacaaagacagttttaagaatatgaaattaagttcagggccccggaagcttcttgagcgacatagccagtccgcctctggtcatggcagaactgatgctggactttggtatctgaggcagaggtgaactgcaggccagtggctcctcttggggaaattgtgtatgtattcacttaggtcaaagcctgaccttcgagcaacctctcctagccaatatattattccagagaccaggatgacctagcaggcaggtccactggttgtataaaagacaggattgcaggctcacaatccatgcagagaactctgaagccagcaaattgtaccaccatcccccgctgctcaccaaacatgggcgtactggaaggctgttatactcagtgcccgcctttgacctaaagctggccagcatccctggggaaacctgacttgcaatttctagagtttaagatcttcccatcggctgtggcaagctcttcccctgtgtggaattttgttatctttatttagctgaggttaaattaatctctgttgtgcaagaaaaacatgaagcttgcccctcgagggatctactcctgtttttcccgtcatctgttggcttcaggaggactgccataaagtcccattgacatttactcttatgtctttctctggtcattctgttttgtggtacaatcaccgtgtaagttatggtctaaacctgtccttttgagagagaaaaagatactgttgataatcctgtcagctccttaggcacttcggaggctgaggcaggagaatcaaaaattcaaggccacttagcaagaccccatgtcaaaattatatatatatatataatgtatatatatacaatatgctggacatgtgactcatggctagagaatgtgtctagcatgatcggggactaagttctcaccccagcactaaataaataaaaccaagtcaacagccatcaagcagatatatcccaggccgcccaggatgtgtgtcctcccttgtggtgggaggcatgaattctgacccctgtgactgtgcagcctgaccccgcatatgttcctgtgtgtttgtgtggtctccccttgtttggggctcatactgggtaagaggcccaggatagccagcttgcttctctgttatgttaccatgcatttctaaaaccactccagctgttaatctgtttgcgcctccatccatggacttgtttctgttcttttccatccactttgtact

SEQ ID NO: 1544 - DNA, 4116 bp, Mus musculus
  misc_feature 1955: n = A,T,C or G
gcaagccagtaagaaacatcctccatggcctctgcgtcaagtcctgcttcctgccccagaaaacatcggaccagtgtgggaccaagcaagcctgtgtcccaaccccggcggaacatcgtaggctgcaggatccagcatggatggagagagggcaatggccctgttacccagtggaaggggactgtcctggaccaggtgcctgtgaatccttccctgtatcttataaagtacgatggatttgactgtgtttatggactagaacttaataaggatgaaagagtttctgcactggaagtcctccctgatagagttgcaacatctcggatcagcgatgcacacttagcggacacaatgatcggcaaagcagtggagcacatgtttgagacagaggacggctctaaagatgagtggagggggatggtcttggcacgggcgcctgtcatgaacacatggttttacatcacctatgagaaagaccctgtcttgtacatgtaccagctcctcgatgactacaaagaaggcgacctccgcatcatgcctgattccaatgattcgcctccagcagaaagggagccaggagaagttgtggacagcctggtaggcaagcaagtggaatatgccaaagaagacggctcgaaaaggactggcatggtcatccaccaagtagaggccaagccctctgtctatttcatcaagtttgatgacgatttccatatttacgtctacgatttggtgaaaacatcctagatgtcatcacaaactttgccaaatttgtggaactattaaatgtataatttgtagacataaagacttgattgctttccagtttaatgaaagcttagatgtccctgcgaacccacaatctccaccagcagagctgtgttgttctgaatagtgcagactgattcgaacacaaggcatctgtgaggggagtcctccctcttcaaagcatctgtgtgagggggtcttccctcttacaagaaagctgtctgttgggggttacaagcaaggtggtaaacgttaagctagtatcatagtcatttaaacctggatagattgtaaccattttcccttcactctgacactgtcttattctgctgccacaatgcaagcatagtttgttatttttgttactgccttttttgagagattatgtatctatatagctacctgtctagatctgcatctgtgtgcctatgtatatattatacacacacagaggcactcaccgctggctctcctttccttggggattggggtgggggtgataacgttttctccagttcaacaggagtgcttgacccaagtcagtcatatttataatatgcctgctctttgtttaaaattaaatttgggcacaggaagcacacagagacatttaggttgtttaaaaagtcagaatttctgagtaccatttcagtctggaggcttttagctgagtccaggtataaattagccataaacagtcaatgacccacagtagtctttagtaaactgttgagaaatctgggtaaaaggctgccttcaattctaagctttgtttttttgtggtttttgttattatttgtttctgttgtttactctttaatcgtaagtacttttaaaccacgacccaggtccttggttcacatggaataataaagatgtgtttttagatggcacattggtccatttgtacacacctgtcatcgggatcttagtacatggacttaaaaggcaacactacatcaatggtttgtatatgtggtgaattcctgcaagaacagtgcatttgtattagacatgtaagttttcaaggatggcctgttgccttctatcaagttctctgggactttgaattgaattactactattgatacatggttatggtcagaaggcctctcctcccttcctcctcactcctctcctcctagcttgcccacagagaatgttagaccagtatgcttcttgcctgnactgttgtgcagtgtctgttcctgccccaggtgtgctattcacgcaggtttattccctccatgctccggctttgcatgtctatgatgtgtgtgtcgctgggaaggtcatgcttgccagttatgggtggatcgcagctcttcgccatcaagtgcattcaggattattcctgggaggttgcttaaagctgaaatagaactgaaatgcagttggtagactagccaaacatctgcttgctctcactttgttttggaagaaccatggtagcttgtcagctggtagaaagatggtttgtaaaaaccagtttctcacggaggttgaacctatctgtggctggacagtcttggatactgtcaagcaaacaccagaggcttggccaagtatagttacaattacctagttggggttcttcctgatgcaagaaatttttcactgttcgaggcacatggttattggctatccatttagttttcacagaggctgaccaccttacactgctgggtggtcacaactgctcaccatgtgaacatagtacctcagttctgtccttggctgcaatcgttgtgtgctcagtgttttctcataggcaccagggacaggcttctcaaggcagtatgatatacccctagtctttggtgcctctagtatatgtgaccaggtgtcgtcctgcatgtaaatctccgagctgagtctgactcacagcccatgctgtcatctgtggcacaagtgggtgtgagtacgtcctgcatgcactaacggccggaaaacatggcatggtgactagaaagtaaaactccttttgaagtgtcccaaggactgggtcagttagaacctgtctgccactatctgatgacttacattgtggttttctacaagccacctcagttaactttggttccccgtggactcccaggctggaggaggaaagcgtgaggacggggatgattttgatcacgattccatttattgcctttacataaggttgagggaaggggaaggtttggtttgtttgtcttttaattgttttttttttcttttttttttttaattcccccaccccaccctctttcttttggtggcttccaccacccttaatggtgacagactcctgggcctgcaccttggacttccttaggctcacagttcagatctgcatgcattgcttgcattgttctggtatctgaatgttgattcctcatttaggagttcagcattaatttccaaaattttcatggggcttgtggcaacacgggccgtgaatctgtgtataaaatttactggccttcttcacttacctgctctagtatcgtatcgtgtgtgcgtgcgtgtgtgacgtcaggctgccacgtaaacttcagagaagaaccttaaagcagaccatccatttttgcatgctctcttctaagtagaatgttcaatgtaactaaaactaaaattgcatgtcaaagagacctaggttctttctttctttctttctttctttctttcagtttgcttttggtttcctgtatatttgcttactgtgctgttctagtggttgtagggtaaagacgaacaggtgaagcagtcgtagcgccgaccgaagtgattccagttgtatatgtcacgcagcattcgaagggactgtgcacgctctaaagatcacagttgcttctaagccagatttcatttctattcttgttttatgtgccaaaccccaaagtgcattgggcctgaatctctgaacactgtagacccattagaaggaagattgttctgaccgtcacaaattgtagtgcctgaaaacacttaacactgattgtctaagagatgaaagtcctccaaagatgacacaggaaaaatactacaagtaattgtggtggaaatgtctgtgttccttgggaatcgtgcgctctctgtagtttccatcattggtgcagttcgaacgaatgagtagagttcagaggtcttcgtgttcacatttaaaactagataaatgacctcattttcttgagcttgaattcatttttaattttaattttattttatacaacgtgtagacggttccctgttctctgcatttagaagtatacacagtacaactgttaattctgtaagtaatttttataattatgatgtaactcttatccttccttaaaacattaaaataaaccctttatgtgc

SEQ ID NO: 1545 - DNA, 1872 bp, Mus musculus
ggagtggcgcggccccgccgcggccatggaggtctacatcccgtcctttcgccacgaggacagcgatctggagcgcggctacacggtgtttaaaatagaagtgctaatgaacggaagaaaacattttgttgagaaacggtacagcgaattccatgccttgcacaaaaagcttaagaaatgtataaagactccagaaatcccttctaaacacgtcaggaactgggtccccaaagtcttggaacaacggcggcaaggcctggaaacgtatttacaggccgtcattttggagaatgaagagcttcccaaactcttccttgacttcctcaatgtacggcacttgccctctctaccgaaagcagaaagctgtggatctttcgatgagacagagtctgaagagtcaagcaagctgtcccaccagccggtgctgctgttccttggggatccatacgtcttgcctgcagccagcgattttccaaatgtggtcatcgaaggagttcttcatgggatatttttctctcacctgcagcccaggtagaaaccctacccggctggaagaagctgaagtgagtgtcgatgccgatggcaagaaaatcgatatctctaccaagttaaccgaaactctgagacacaatagctctagctagtgggaaaattcacagttccagcttcctttggagcagggacatttctattagaatggtgcttttaaaattagaaactgaaccggggtggggtcagtttaagaccaattatgtgagaagtgaaagggaaattacaagagaggttaggaaaaggaggccacagtggattactgggagtgtcacaaaatagagccagcctctgcttcagtcacactacctgctaattggaaatcatgtcttgagtcacgctgtgatactgaacaacttcggtggccttttgctcagaccttggacaccctcatctttgcgccatgagagttctctcagtgggggatactgtattctggagtgtgggcacctgaagagtatcccggagcccactgtgccggtctgaggatccagttatactgacagtagaacacactttcatttccattacagtggggatgcctcccacctacagattagctgccagcatcagtgctggagatgaaatgggtgttgggaccacccttgagagcactctagaaaggcgctgtatgggaagtctgacctccctcatcctctccctccagtactggaaagtatgagtgcgcctctgaaaaccagctgacacccctggcgaagttccaggggccgttccatatagaaagtacgtactctaaacactaaaatcagactgcaaaattcttgtcctgcaggaatgggacatggggtcacagtggccacaataggagcaaacagactgtttgtggcacggttccctcaatggtgtacacccacgccgctgttcaggttcctcttcactgacatcacgtatggattaaagtgagttagatgctcgatgctgtctctccactggatgtcaaacagacggtcatctttcacttagtgatggggtagagtgcgtatgtcctacctgtgtgtaaatgctgatgaacagcctacttacagctatgaattttcataaatttaaatgtgggaggaaatatttaaaattaaaataccatgtcatgaatttttattagagcctaaacctacagattgaaagcctgctgcaaacttttaaaaaataacatttttatgatggattgtgtaatcacatgttggaaataaagtaaccaagtgttatcaaaaaaaaaaaaaactaaatagtgaagtattatagatacttttttaaatgtttttatgttactagctattttgagttaaataaaaacaaacaaaagtt

SEQ ID NO: 1546 - DNA, 3593 bp, Mus musculus
agatagttcccaaaacatgaggatatttgctggcattatattcacagcctgctgtcacttgctacgggcgtttactatcacggctccaaaggacttgtacgtggtggagtatggcagcaacgtcacgatggagtgcagattccctgtagaacgggagctggacctgcttgcgttagtggtgtactgggaaaaggaagatgagcaagtgattcagtttgtggcaggagaggaggaccttaagcctcagcacagcaacttcagggggagagcctcgctgccaaaggaccagcttttgaagggaaatgctgcccttcagatcacagacgtcaagctgcaggacgcaggcgtttactgctgcataatcagctacggtggtgcggactacaagcgaatcacgctgaaagtcaatgccccataccgcaaaatcaaccagagaatttccgtggatccagccacttctgagcatgaactaatatgtcaggccgagggttatccagaagctgaggtaatctggacaaacagtgaccaccaacccgtgagtgggaagagaagtgtcaccacttcccggacagaggggatgcttctcaatgtgaccagcagtctgagggtcaacgccacagcgaatgatgttttctactgtacgttttggagatcacagccagggcaaaaccacacagcggagctgatcatcccagaactgcctgcaacacatcctccacagaacaggactcactgggtgcttctgggatccatcctgttgttcctcattgtagtgtccacggtcctcctcttcttgagaaaacaagtgagaatgctagatgtggagaaatgtggcgttgaagatacaagctcaaaaaaccgaaatgatacacaattcgaggagacgtaagcagtgttgaaccctctgatcgtcgattggcagcttgtggtctgtgaaagaaagggcccatgggacatgagtccaaagactcaagatggaacctgagggagagaaccaagaaagtgttgggagaggagcctggaacaacggacattttttccagggagacactgctaagcaagttgcccatcagtcgtcttgggaaatggattgagggttcctggcttagcagctggtccttgcacagtgaccttttcctctgctcagtgccgggatgagagatggagtcatgagtgttgaagaataagtgccttctatttattttgagtctgtgtgttctcactttgggcatgtaattatgactggtgaattctgacgacatgatagatcttaagatgtagtcaccaaactcaactgctgcttagcatcctccgtaactactgatacaagcagggaacacagaggtcacctgcttggtttgacaggctcttgctgtctgactcaaataatctttatttttcagtcctcaaggctcttcgatagcagttgttctgtatcagccttataggtgtcaggtatagcactcaacatctcatctcattacaatagcaaccctcatcaccatagcaacagctaacctctgttatcctcacttcatagccaggaagctgagcgactaagtcacttgcccacagagtatcagctctcagatttctgttcttcagccactgtcctttcaggatagaatttgtcgttaagaaattaatttaaaaactgattattgagtagcattgtatatcaatcacaacatgccttgtgcactgtgctggcctctgagcataaagatgtacgccggagtaccggtcggacatgtttatgtgtgttaaatactcagagaaatgttcattaacaaggagcttgcattttagagacactggaaagtaactccagttcattgtctagcattacatttacctcatttgctatccttgccatacagtctcttgttctccatgaagtgtcatgaatcttgttgaatagttcttttattttttaaatgtttctatttaaatgatattgacatctgaggcgatagctcagttggtaaaaccctttcctcacaagtgtgaaaccctgagtcttatccctagaacccacataaaaaacagttgcgtatgtttgtgcatgcttttgatcccagcactagggaggcagaggcaggcagatcctgagctctcattgaccacccagcctagcctacatggttagctccaggcctacaggagctggcagagcctgaaaaacgatgcctagacacacacacacacacacacacacacacacacacacacacacaccatgtactcatagacctaagtgcaccctcctacacatgcacacacatacaattcaaacacaaatcaacagggaattgtctcagaatggtccccaagacaaagaagaagaaaaacaccaaaccagctctattccctcagcctatcctctctactccttcctagaagcaactactattgtttttgtatataaatttacccaacgacagttaatatgtagaatatatattaaagtgtctgtcaatatatattatctctttctttctttcttcctttctttctttctttctttctttctttctttctttctttctttctttctttcttccttccttccttccttccttccttccttccttcctttctttctttctttctttttttctgtctatctgtacctaaatggttgctcactatgcattttctgtgctcttcgccctttttatttaatgtatggatatttatgctgcttccagaatggatctaaagctctttgtttctaggttttctcccccatccttctaggcatctctcacactgtctaggccagacaccatgtctgctgcctgaatctgtagacaccatttataaagcacgtactcaccgagtttgtatttggcttgttctgtgtctgattaaagggagaccatgagtccccagggtacactgagttaccccagtaccaagggggagccttgtttgtgtctccatggcagaagcaggcctggagccattttggtttcttccttgacttctctcaaacacagacgcctcacttgctcattacaggttctcctttgggaatgtcagcattgctccttgactgctggctgccctggaaggagcccattagctctgtgtgagcccttgacagctactgcctctccttaccacaggggcctctaagatactgttacctagaggtcttgaggatctgtgttctctggggggaggaaaggaggaggaacccagaactttcttacagttttccttgttctgtcacatgtcaagactgaaggaacaggctgggctacgtagtgagatcctgtctcaaaggaaagacgagcatagccgaacccccggtggaaccccctctgttacctgttcacacaagcttattgatgagtctcatgttaatgtcttgtttgtatgaagtttaagaaaatatcgggttgggcaacacattctatttattcattttatttgaaatcttaatgccatctcatggtgttggattggtgtggcactttattcttttgtgttgtgtataaccataaattttattttgcatcagattgtcaatgtattgcattaatttaataaatatttttatttattaaaaaaaaaaaaaaaaaaaa

SEQ ID NO: 1547 - DNA, 2060 bp, Mus musculus
acagagtctccatcctccattgaaaattgatgggaaaactattggagttgattttgcaaaaagtgccagaaaagatttggtccttccagatggtaaccgagtcagcgccttctctgtagctagtacagccattgctgctgctcagtggtcatccactcagtctcaaagtggtgaaggaggcagtgttgactatagttacatgcagccaggccaggatggctacacacagtacactcaatactcacaggattaccagcagttttatcagcagcaagctggaggactggagtctgatacatcagctacatcaggcaccacagtgactaccacctcagcagctgtagtatcccaaagtccccaactctataatcagacctccaacccacctggctctccgactgaggaagcacagcctagcactagcacaagtacacaggcccccgctgcttcccctactggtgtagttcctggtaccaagtatgtacctgacacgtctacttatcaatatgatgaatcatcaggatattattatgatcctacaacagggctctactatgaccctaactcacagtactactataactccttaacacagcagtacttgtactgggatggcgagaaggagacctacgtgccagctgcagaggctagctcgaaccagcagactggcctgccttccacaaaagagggaaaggagaagaaagaaaagcccaagagcaaaactgctcagcagattgccaaagacatggaacgctgggccaagagtttaaataagcagaaagaaaattttaaaaacagctttcaacctgtcaattcattgagagaagaagaaaggagagaatctgccgcagcagatgctggctttgctctttttgagaagaagggagccttagctgaaaggcagcaacttctccctgaattggtgcgcaatggagatgaagaaaacccccttaaaagaggtctggttgctgcttacagtggtgacagtgacaatgaggaggagctggtagagagacttgagagtgaggaagagaaactagctgactggaagaagatggcctgcctgctgtgccgacgtcagttcccaaacagagatgccctggtcaggcaccagcagctctccgacttacacaagcaaaatatggacatctaccgaagatccaggctgagcgagcaggagttggaagccttggagctgagggagagagagatgaaatacagagaccgagcagcagaaagacgagagaaatacggaattccagagcccccagagcccaagcgcaagaagcagtttgatgctggcactgtgaattacgagcagcccaccaaagatggcattgaccacagtaacattggcaacaagatgctgcaggctatgggttggcgggaaggctcaggcttaggaagaaagtgtcaaggcatcacagctcccattgaggctcaagtccgactaaaaggagctggcttgggagccaaaggcagtgcctatgggttgtcaggtgccgattcctacaaagatgctgttcggaaagccatgtttgcccggttcactgagatggagtgaaactggggaagcaatgctgagcacagggagcaagccatctcctcagttgctcttactgcctgtctctaagggcatgccttgtgctattaatagttttagggtgaaccacttcattctgaggggttctcctaccttaaatgagctcccttacgtgggtaaacaaccttccttcccacctgagggactgaacagaggggacaatgggctttttatactaaggtgtatatagtgtaaatgtaatgagttttacatgttgtagcctgtgttgtgtccctacatcctggggacttgagaagctcggagtggttgtcaacaccaaagccaccactgtcatttattgttgttatgtcttttcttggcaatagccttgtgtatatttgtatattatacatttgtacagaattttggaagattttcagtctagctgccacgtctggctcctttacaaaagaaataccttcaaaaaaaaaaaaaaaaaaaaaaaaaaaaaaaaaaa

SEQ ID NO: 1548 - DNA, 1267 bp, Mus musculus
tttctcttatcaaagtggcttcttggtcatagtgtctggatagtaccttgcccaaaacccccattgggtttcacgtgcactttaagaagggatgtcctatgttgagatggagatgggaatggagatgggaatggggcagggccagtttcttatgtgtaagagaaaaactagaattgttgactgttctgtagacttacctaactctacacaaataacttgctgaaacttggcaggaaaggaaatcacattaacttttctatccctccttatttggtaaataattttgtaatctattagaagtgctgctgctgccagtcttccctggcacattttcccatgctatagccacacctttttaaatgtcagtactccccccaacccccactccgctatccggtaatttcaccattctggtttactacctggatagcacaactgtattcttataagtaattaggtttatctaaatgtgacaatttctaagtaaccttcatctgctggctactaatttggaacataattttctttgctatttctatccatttaaaagcttaagggccgggagtttcaatgtgaagagtataaattccagctaagagtttgtaaaatgtcttatcttagaattctccccttcaattttaaagtagtaactaagttccagaaagcacttaatcagaacatgtcttggattttaagatgtgtttatttgggatactttattttccctatgcataaaagaaaaatattgctggaatagttctccaactactgtttttagatgagagctgaagcagaagctccaagactagcaatcaaagtaactcttgaggtaattaggatcatgctgttagtcaaagagaactgggagtgcgctgtcacataataatgtactgcacatgccaatgaggtgcacaaagatctgcaatggtgacgctgagaacacaagtgaagtgaagtttgtgtatggagagtatggcaggtcctgagagcttcaagcttcaggagtgttagaactatagttcatagttgtttaaatataatatttcttgtgacaaccaaaatatgttgtggctggtgccaatattttcgttaatgaaatgttgaatgtcgcattacagtctgatcagaattctcagtgtaataagccaggcctaagccattttatagctattggcctaactgtgtaactttttttttcaaaatgttttattataatacttgtcatttctttcacttaatatatgttaattgtcataataaaaagttt

SEQ ID NO: 1549 - DNA, 252 bp, Mus musculus
gggtcgtcgagctttgcaatccaccccccccaacatctcaaacccaaggaggagaagattgaattcctctaggctgcagacctgggcgtcgacttgactccaagttttttctgatcagcctgggagagccccttcagcgttcagccaggattccaaggtggagacaacagaagacctggtgcccaagttgaaggaggtggggcgaatttggagaccatcccctgatattttgcaataaaactgtgcctttcc

SEQ ID NO: 1550 - DNA, 3550 bp, Mus musculus
ggccattaccaatcgcgacccgcgcacacacggcccgggcggcgggcgaagcgggctcccggggcgctgggcgcagggcgcggggcaagccccagcagcgtgtctgcaacggggcgcggcgggcgctccagctccgggatctttctccctcggtcacctccctcgcgtctagggaggtcgtggcactccctgaggagcgcggctgctcggagggcggatcctagaacagaggcgtgagagccggcatgaatggtcatatgtctaaccgctccagtgggtatggagtctacccttctcaactgaatggttacggatcttcaccaccctattcccagatggacagagaacacagctcaagaacaagtgcaaaggccctttatgaacaaaggaagaactatgcccgagacagtgtcagcagtgtgtcggacgtgtcccagtaccgcgtggaacacttgaccaccttcgtgctggatcggaaagatgcaatgatcactgtcgaggacggaataagaaagctgaagttgctggatgccaagggcaaagtgtggactcaagatatgattctccaagtggatgaccgagctgtgagcctgattgacttagagtcaaagaatgaattggagaattttcctctaaacacaatctcgcattgtcaagcagtggtgcatgcatgcagctatgactccattctcgccttggtatgcaaagagccaacgcagagcaagccagaccttcaccttttccagtgtgatgaggttaaggcaaacctaattagtgaagatatcgaaagtgcaatcagtgacagtaaaggtgggaaacagaagaggcggccggaggccctgaggatgattgccaaagcagatcctggcatccctcctcctcccagagctcctgcccctgtgccaccggggactgtcacacaggtggacgttaggagtcgcgtagcagcctggtctgcctgggcagctgaccagggtgacttcgagaagccccggcagtaccacgagcaagaagagacgcccgagatgatggcagcccggatcgacagggatgtgcaaatcttaaaccatattttggatgacattgaattttttatcaccaaactccaaaaagccgccgaagcgttttctgagctttctaaaaggaagaaaagtaagaaaagtaaaaggaaaggacctggagagggcgttttaacactgagggcaaaaccgccacctcctgacgagtttgttgactgtttccagaagtttaaacatggattcaaccttctggccaagttgaagtcccatatccagaacccgagtgcttcagatctggttcattttttgtttactccactaaatatggtggtccaggcaacaggtggccctgaactggccagttcggtactcagcccactgttgacaaaagacacagttgatttcttaaactacacagccactgcggaggaacggaagctgtggatgtcactgggagatagttgggtgaaagtgagagcagagtggccgaaagaacagttcatcccaccttacgtcccgaggttccgcaacggctgggagcccccgatgctgaacttcatgggcgcgcccacagagcaagacatgtatcaactggccgagtccgtggccaacgcagaacaccagcgcaaacaggacagcaagaggctgtccacagagcattccaatgtgtccgactatcctccagccgacggatatgcgtacagtagcagcatgtaccacagaggaccacatgcagaccacggggaggctgccatgcctttcaagtcaactcctaatcaccaagtagataggaattatgacgcagtcaaaacacaacccaagaaatacgccaaatccaagtacgactttgtggcgaggaacagcagcgagctctcggttatgaaagatgatgtcttagagatactcgacgatcgaaggcagtggtggaaagtccggaatgccagtggagactctgggtttgtgccaaataacattctggatatcatgagaactccagaatctggagtggggcgcgctgaccccccatacacacataccatacagaaacaaaggacggaatacggcctgagatcagctgacactccttctgccccatcaccccctccaacgccagcacccgttccggtcccccttccaccttctgtaccagcacccgtttctgtgcccaaggttccagcagatgtcacccgccagaacagcagctccagtgacagtgggggcagcattgtgcgggacagccagagatacaaacaactcccagtggaccgaaggaagtcccagatggaagaggttcaggatgagctcttccagaggctgaccatcgggcgcagtgctgcgcagaggaagttccacgtgccacggcagaacgttccagtgatcaatatcacttatgactcctcaccggaagaagtaaagacttggctgcagtcaaagggattcaatcccgtgactgtcaatagcctcggggtgttgaacggagcacaactcttttctctcaacaaagacgaactgaggtctgtctgcccggaaggtgccagagtctttaaccaaatcactgttcagaaagctgctttggaggacagtaatggaagctccgagttacaagagatcatgcggagacggcaggagaagatcagcgccgctgcgagcgactcgggagtggagtcttttgatgaagggagcagccactgagtccatgaacttccttattcttggtgtggtcgttgaacagtgatggacatgctttgttttaagaagccttgaagggaatgtcaaagctgtcgtcttggtatatgtaatttatcgccatataaggaaacagtatatgcctgagtaagcagaggacccgctgcttctgtgcacattagtttgattaaaactgagaagcgggtaggtgagatggctcagcaagtaaaggtgcttgctgccaagcccaatgacccaagttcgagtccctgggtctacatggtaggagagagctggcttctgcaagttgtcctctgaccaccacacataaataaataacaaatgtaatttacaaacttttaaaagaaaatgtaatttaaaaaaccagacgttctagactgttctgggcttgggaaatatttttttcactttcctaaggtgtactttcctttgctacattaattattgcagccttgttcgatgatctaagtggggatatttgacaatggcagatttattcattgcaacaaggaaagacacagccattgatgaaaaaaaaaagaaagtctcagctttcagtgactgggatacctgctgtccagggaggaggctcagttagactaccctctgcttacttgaggtctgacatgcccaatgagagtgtatttagctttatttaaagttcttaatgccaacagttttaaaaatcacatttaaatgaactgtacaaggtagccagaccttgaatgtatgaatagactatataatatgtcccgagaaactttgttactctcagctctgttgattgcgaaatcttgcatagattatgctttgatttagtttct

SEQ ID NO: 1551 - DNA, 2488 bp, Mus musculus
gagcaaacagacatttccaggagcaattccctcacctccaagccgaccgcgctctaggaatccacattccgttcctttagaagacaaaggcgccccaagagaggcggcgcgaccccagggcgtgggccccgccgcggagcccgcaccgcccggcgccccgacgccggggaccatgtctcccgcccctcgaccctcccgcagcctcctgctccccctgctcacgcttggcacggcgctcgcctccctcggctgggcccaaggcagcaacttcagccccgaagcctggctgcagcagtatggctacctacctccaggggacctgcgtacccacacacaacgctcaccccagtcactctcagctgccattgccgccatgcaaaagttctatggtttacaagtgacaggcaaggctgatttggcaaccatgatggccatgaggcgccctcgctgtggtgttccggataagtttgggactgagatcaaggccaatgttcggaggaagcgctatgccattcagggcctcaagtggcagcataatgagatcactttctgcattcagaattacacccctaaggtgggcgagtatgccacattcgaggccattcggaaggccttccgagtatgggagagtgccacgccactgcgcttccgagaagtgccctatgcctacatccgggagggacatgagaagcaggctgacatcatgatcttatttgctgagggtttccacggcgacagtacaccctttgatggtgaaggagggttcctggctcatgcctacttcccaggccccaatattggaggggatacccactttgattctgccgagccctggactgtccaaaatgaggatctaaatgggaatgacatcttcttggtggctgtgcatgagttggggcatgccctaggcctggaacattctaacgatccctccgacatcatgtcccccttttaccagtggatggacacagagaacttcgtgttgcctgatgacgatcgccgtggcatccagcaactttatggaagcaagtcagggtcacccacaaagatgccccctcaacccagaactacctctcggccctctgtcccagataagcccaaaaaccccgcctatgggcccaacatctgtgacgggaactttgacaccgtggccatgctccgaggagagatgtttgtcttcaaggagcgatggctctggcgggtgaggaataaccaagtgatggatggatacccaatgcccattggccaattctggaggggcctgcctgcatccatcaatactgcctatgaaaggaaggatggcacatttgtcttcttcaaaggagataagcactgggtgtgtgtcgaagcctccctggaacccgggtacgccaaccacattaaggagcttgtccgagggctgccctcggacaagatcgatacagctctcttctggatgcccaatgggaagacctacttcttccggggcaataagtactaccggttcaatgaagaattcagggcagtggacagcgagtaccctaaaaacatcaaagtctgggaaggaatccctgaatctcccagggggtcattcatgggcagtgatgaagtcttcacatacttctacaagggaaacaaatactggaagttcaacaaccagaagctgaaggtagagccagggtaccccaagtcagctctgcgggactggatgggctgcccttcggggggccggcccgatgaggggactgaggaggagacagaggtgatcatcattgaggtggatgaggagggcagtggagctgtgagtgcggccgccgtggtcctgccggtactactgctgctcctggtactggcagtgggcctcgctgtcttcttcttcagacgccatgggacgcccaagcgactgctttactgccagcgttcgctgctggacaaggtctgacccccaccactggcccacccgcttctaccacaaggactttgcctctgaaggccagtggctacaggtggtagcaggtgggctgctctcacccgtcctgggctccctccctccagcctcccttctcagtccctaattggcctctcccaccctcaccccagcattgcttcatccataagtgggtcccttgagggctgagcagaagacggtcggcctctggccctcaagggaatctcacagctcggtgtgtgttcagccctagttgaatgttgtcaaggctctgcacttgaaggcaagaccctctgaccttataggcaacggccaaatggggtcatctgcttcttttccatccccctaactacataccttaaatctctgaactctgacctcaggaggctctgggcatatgagccctatatgtaccaagtgtacctggttggctgcctcccgccactctgactaaaaggaatcttaagagtgtacatttggaggtggaaagattgttcagtttaccctaaagactttgataagaaagagaaagaaagaaagaaagaaagaaaaaaaaaaaaa

SEQ ID NO: 1552 - DNA, 3132 bp, Mus musculus
gaccactttcactctcggtccacctcggtgtcctcttgctgtccagctctgcagcctccggcgcgccctcccgcccacgccatggacgccaaggtcgtcgccgtgctggccctggtgctggccgcgctctgcatcagtgacggtaaaccagtcagcctgagctaccgatgcccctgccggttcttcgagagccacatcgccagagccaacgtcaagcatctgaaaatcctcaacactccaaactgtgcccttcagattgttgcacggctgaagaacaacaacagacaagtgtgcattgacccgaaattaaagtggatccaagagtacctggagaaagctttaaacaagaggctcaagatgtgagaggtgtgagtcagacgcccgaggaacttacaggaggagcctaggtctgaagtcagtgttagggaagggcccatagccacttcctctgctcctgagcagggctgaagccgtttgcaagggacttgctttgcacagttttgctgtactttcacattttattatgtagcaagatacatggtgattttttttttttttcatttagcctgattttccaacgtcattggtgacaggccaaggccactatgttatttcctttgttctggtatccttcccttggaggaccttctctgagtagtggctccccaggtttgtcctttgagctgaggcaggaggctcacccattcttctgaataggaactgggtgttcccaccccccaaggactgcagggctttcccaagctgaggcaggaacgtgaggccagggaagagtgagcttcaccctcatcccacgctgtcctcctcaacccaccatgctcatcattctgtctcatccatccatccatccatccattcatcgccatgtgtccgcaagactgtctccatgaccctgaaaaaggactctcgagatgaaatcctttattcaaatgggacagcaagaaggaaaagccaatgtctggtgtctctccccccgcccctaccctgcgcgcatctatgtcttgtttggaatattgtctcttcaaccccctgttcatgtccttctcactcatgatcgatgtcttgtctgtgcactgtctctaacccaaatgcaaaggctgagtgtgaggtgatggccccgaggtccaggttgtagtcatggaaagagccctgctgtctcccttctcagggggcccattttagacacacaaagcccaaagaaaggtggtttgcaacagtgcttagctcgagcctccatatttccataactgttagcttaaaactgtggggttttaccttcctggaaccaaatgcattcttctgttgaggagtaacaggtctcaattcttttcaattaattttaaaagtcaatcactaagagcatcggctttgggccctgatgggcaggcatttccctggaaagggggtgaactacctacctctcctcaagacagccgaagggtgggattggtgccgctctgggaagcgtggccccaggagttttgtcctctgcagtttttaatgcaagttcactgccactttgacaaaagcccaattagaagccagtctctagttccttaaacaaaacagacagagtaaggaaaggaaggagggtggcagccagctggctggacactcgagaaagacggggaagtaagctacagaaagatagtcttcaaaaacaggtgtttgagagtgaatactctgtagaattgttagtggggtgtgtgtggtggtggtggggggatttctacaaaatagtcctttaagttgagtttacagcagatgaaaaatccaaccagcaaaattttgatcaaatttgaacaaaaacccaaaaacctaaaactgttgagcaggttgcgatgaggagcacagggctagctgcagagctggatcctcaggaggatagcgaattattttcaaccctggaatagaaaccacacactggcttgctgtgcaccagccactttgcatctaatccaagctttgaagggtgttgcttgggaggaaacaaatacagccttccatcttcactccagttagggatcctttcaaagtctccttcacagtgaggaaaaagagaagggtagaaactttagggagccggatttgtgtatcaattcctccgctgacagtcagtttctagatggagacagcctgcttaaagcaaatccgaatttaaataggacatttacatcggaaaagtctctccctaccttaatcccccattctcttgctttcaaaatacaagcacagcagtccttgaatggctgttgacccagggcacctagctgtccctgctggtcctggggctgccagaattcccttgggcgccaagcaacctgccaggtagccagtccctctgttacaagcctttgcatctggatagggaaaggggtggagacatacagtctgctttgtgttgaaacccagatttgtaccctgtgtttatacactgctgctggctcccgaggacagtgggactttagcaaggaagtgcagccgaggggtaaagagccctctggttcattgcctgatcggctttgagagagggtttggagggcaaggggctgcattcctctgagggacttggcctgaggcctttcgggcctctccagtgggttctgtttatcctctcatgggtgattatctcagtggtgtcaccaggggcttcctcccagaagtcagtcatccccaggccgtgcacccttttcagctggatgagagccagggatgcattctctccaaacagctaccctggcccattttaaggtaatctcattcttcaaaatgttccatagaatcctccaaattcccccagcagacttctaccctcgccaagttcccaaaacccactcagcaaagttgccaacctcgacgggctagcagtgtctaagcagcgatgggttcagtgttgtgtgtggtgaatactgtattttgtttcagttctgtctcccagataatgtgaaaacggtccaggagaaggcagcttcctatatgcagcgtgtgctttcttattcttatttttaatatatgacagttatttgagaagccatttctactttgaagtcattatcgatgaaagtgatgtatcttcacctaccattttcctaataaagttctgtattcaaatat

SEQ ID NO: 1553 - DNA, 1489 bp, Mus musculus
  misc_feature 227, 235: n = A,T,C or G
gggggaatcgactgggaagtgccgaggatcgccatctgtttctgcctgcgctccatcccctccgcgccccggagctccagaacccggtctgatcatgagcgtgttgagcggcctggcctccgagccgcgcaccccgctgtccagcaaggccaggatgaaaaggctcccgaggaagagccagaacgagaagtaccggctgaagtacctgcggctgcgcagagcagctnaaggccancggtgtttgaaaatgcttccatctgtgatgaaattgctcgtcttgaggaaaaatttcttaaagcaaaggaagaaagaagatacttgctgaagaagctcctccagatacatgctctaactgaaggggagccacaggccgctgctccttcccacagctccagtttgcccctgccttatggtgtcaccagctctgtgggaactatgcagggagccgggcccagcactggggccgaggaaccatttgcgaagaaatccaagaaggagaagaaagaaaagggcaaggagaacagcaaactggaagttctgaagaaaacatccaagaaaaagaaaatggagggaggtgctcgaaaactggttcgacccattgccctggatccttcaggacagcctgtgttccccatcggactaggggtctgacagtatacagtctggggagatcatcaccaaccgacctggcttccatgatgagaatgccatctatcctgtgggctactgcagtacccgagtgtatgctagcatgaagtgcccagaccagaagtgtctgtatacctgtcagatcaaggacggcggtgtacagcctcagtttgaaattgttcctgaagatgacccccagaataccatcgtcggctcctctgcagatgcctgttatgaagaactgctcagggccatcagtgccacaacagggaaactgatgcccaacccactttcatgcggtgccgacttctttgggttttctcatccaaccatccacaacctgattcagggttgtccagaagctcaaaactgtgtcaattaccagtgggtgaaatttgatgcgtgcaaacccaggaaggggcagctctctcaggaactgccagagaatgatgcaactatgagccttgaagccttccagacacagacgtttgatgatgaccatgatgattccattctgccaggctccctggacctccctgagcttcagcatgaagcctttgtgtcatcttaccagccagagttcctgacacacgaacccttggtgacactgacctgcagcacctgaaatctccatcccagtgtagcccaattcagtcttcagattgaacaggaaaggggtgggccccctgccttctcctcattatgagttttaaacgaaaactcactctgtggaaggaggcagcatctgagaaacagggaagatacacgtttcattgtgggtgttcccagggtaaacctcagttgcttgtactttcagtaataaatatatcctggcagtttc

SEQ ID NO: 1554 - DNA, 577 bp, Mus musculus
gagaggcgcgagcggaagcggccgggaaggtcacttccggcctgggcgcccgtccccctgaccccagggtctgagtcgccgctgccgccgttgccaccatccgagaggcaggcgacaggaagagtgcggcgtgacggccccggggccgcggagggacccagatatggagcttcgagaagaagcttggtctccggggccactggattctgaggaccagcagatggccagtcatgagaacccagcattattaggttgaaaaactcacctgtgggttacgtggagcctaggtgttttgggtaagacccatcctggtccaccaacaccctcctccctgtgcctggtgattccagcctgatgacaagaaagctcatgcgaaggcacagtgggccaagttgtgtgtctgacacctggagcaaacggcattggctttttccatgttaataaattggtgcttacaaaacattgcttcagtgttccttagactttgctgtcatggcccaaggttgttgtcacctccacctgtacactgccacaaacccatttgtgtggggttgcaataaaagtttggcacaatccc

SEQ ID NO: 1555 - DNA, 297 bp, Mus musculus
tttgggtgcttcagggtgtgttggcccctgtttgggtgtgaactcaaggcaaaccgtggtgcttgagtcgtggacggccctgctgacatagatgacaccgatgatgtctgctgatggaagagtcaagcaagcaacagtggctgttttggtcttgagtgtcgagactcatataggttggattttggccagttggaatcaggctcttggagttttgcatgggaattaatgtaatgcttataaatcactcaacaatctcaagtcaaacacaaaaataaaagagaaacatactggccttgg

SEQ ID NO: 1556 - DNA, 240 bp, Mus musculus
actgtcccaccacgctgcgcttttcagcctacgcctacgacatcgaggatgagttatttccaaatttctggacatcagccagctaccatgttccagttgcccttcctgctacggtcatgcctatgtgccttttgtaccatccatttcaagtgtttgtttgcttcgagggaggcccagcattcatgtcaccagtgttattcaatgacaccaacagttgaataaatgccagacacctgtgcc

SEQ ID NO: 1557 - DNA, 550 bp, Mus musculus
ccggccgcgcgcacgtgagcgcgccgctccgcctgtctaattttagctctgaggtgtcagggtcgtgcgagatggtttcctgcatgtctgtgaggagtggaggaggacatgtctgtcatccagagtaaccgggtcaaggatgtgtggttagattggaaaggaagacatctgcttgcatcagctcaactttgaagacagggggtgcactgacccccaccctctctcccatctcacatgaggatgaccagagagggttggtgttcgagatttgccataatgtgtgggatcaggaaccagataaaagtttagtgttgaagaaatgaatgccaggccccttgtaaaattggccccgcagccctgtcatcagaaagtgagctgttcttttgacacacagagttgtttgccatgtcacagtgacctgcattctgttagtgagggagcctcaggtttcacatgggttgtctctgtataagctgtaaaatgatagcctctggcctttatggtattgggaaacttgaagtgtttaatgataaaagtggtttctaatggc

SEQ ID NO: 1558 - DNA, 344 bp, Mus musculus
  misc_feature 193: n = A,T,C or G
tttttttttttttttttgaacctttgagttttattaggaagggtgtccactgtagtgcaggagttagaccaggaagtctatatacctgtgaagtacaattatggatcgggaccctctggagaggtgcaaagccacttgagaagagctgggctgggggagaaacccattgtttctccccctccctataaattanggtcattcagctctgggaaacaggcttgtgtggtacgcaactcctgatgtactacacccccttagtggatggcacccggtcctgcaggaccatgtgaactgcccgcccagcggggttccagtctcttgccggcatgcagggcggggatgca

SEQ ID NO: 1559 - DNA, 1288 bp, Mus musculus
ttgactcagctcctcagcaagtttgggctactgactcgtttctctccattctgccgagcgtctacgcagagcctagctgaagtcctgcagcagcttggggcttcccgtgagctccaggctgttctcagctacatcttccccacttacggagtaactcccagccacaccgccttttccttgcatgctctgctggttgaccactacatacaaggggcatattaccctcgagggggttccagtgagatcgccttccataccatccctttgattcagcgggccgggggcgctgtcctcaccagggccactgtacagagtgtgctgctggactcagctgggagagcgtgtggtgtcagtgtgaagaagggacaagagctggtgaacatctactgcccagttgtcatctccaatgcgggaatgttcaatacctatcagcacttgttgccagagactgtccgccatctgccagatgtgaagaagcagctggcgatggtaaggcctggtctgagcatgctctcaatcttcatctgtctgaaaggcaccaaggaggacctgaagcttcagtccaccaactactatgtttattttgacacagacatggacaaagcgatggagcgctatgtctctatgcccaaggaaaaggctccagaacacattccccttctcttcattgccttcccatcaagcaaggatccaacctgggaggagcgattcccagaccgatccacaatgactgcgctggtacccatggcctttgaatggttcgaggagtggcaggaggagccaaagggcaagcgtggtgttgactatgagaccctcaaaaatgccttcgtggaagtctctatgtcggtgatcatgaaactgttcccacagctggagggcaaggtggagagtgtgactggagggtcaccactgaccaaccagtactatctggctgcaccccgaggagctacctatggagctgaccatgacttggctcggctgcatcctcatgcaatggcttccataagagcccaaacccccatccccaacctctacctgacaggccaagatatcttcacctgtgggctgatgggggccctgcagggggccttgctgtgcagcagtgccatcctgaaacggaacttgtactcagatctgcaggctcttggctcaaaggtcaaggcacaaaagaagaagatgtagtccgttcagagaagagccagaggaaaggcacctccccaacttctcgtggtgtcctccctcctacagcaattccttgcacatataaacaaaaaccattttgtttctg

SEQ ID NO: 1560 - DNA, 399 bp, Mus musculus
atgattgaacccttcttggggacctggaaactggtctccagtgaaaacttcgagaattacgtgagggaactgggagtggaatgtgaaccccggaaagttgcatgtttaataaagccaagtgttagcattagtttcaatggggaaaggatggacatccaagcaggaagtgcatgcaggaacacgaagatctccttcaaattgggggaagagtttgaagagaccactgcagacaaccggaaagtgaagagccttataacttttgaaggtgggtcaatgatccagatccaaagatggcttggcaaacagacaacaattaaaagaagaattgtggatggaagaatggtagtggagtgcaccatgaacaatgttgtcagcactaggacctacgaaagggtgtag

SEQ ID NO: 1561 - DNA, 294 bp, Mus musculus
tcggcaccacttgaggtaatgttatatgaaagcaagagaaaaagaggctgtgaataggatccgaggaaacatatctagtttgcaattcagcccttaggatcaggagttatttcggaatttcagaagcttttccaaggccttgttggagaattgtggcctagtcaccgttaaccctttgggattttgagatttccaattaggccctggcaaggtcatgtgctttttttgatgccaataccttttattggggtgatggagtatttattgccttaacaataaattttttaccaagcc

SEQ ID NO: 1562 - DNA, 471 bp, Mus musculus
ggaggactcagtgccggtgactatggtggccaccgctgggcaagtgcaacagcagcagcgacaccaccagcagggaaaagtgacagtgaaatatgaccataaggagcttcgtaagcggttggtgctggaagaatggatcgtggagcagctgggtcagctgtatggctgcaaggaagaagaaatgccagacgtagaaattgacattgatgatcttcttgatgccaaccgcaaggaggaaagagcttcgaaattacaggaagctctcgtagtctgctataaaccaacagaggaattcatcagagagctgctctcccgaataagagcatgaggaagctgaaccctccgcagaagaagagcgtatgattttgctacagggtaaaattctctcagagatgaagaaagcaacctggaatttggaccccacagatacttttcttaaaaaataaataaataaacatagttgtcttttac

SEQ ID NO: 1563 - DNA, 3970 bp, Mus musculus
gcgagtcttacttcatcatgcctgctgtagcttcagttcctaaagaactctacctcagttcttcactaaaagacctcaataagaagaccgaagttaaacctgagaaaaccagcaccaagaattatatacacagcgcgcagaagatcttcaagacagcagaagaatgcagactagatcgtgatgaggaaagggcctatgtgctttatatgaaatatgtggcagtttataatcttatcaaaaagagacctgatttcaagcaacagcaggattattatctttcaatacttggacctgcaaacatcaaaaaagctattgaagaagctgaaagactctccgaaagccttaaactaagatacgaagaggctgaagttcggaaacaacttgaagaaaaggacagacgggaggaagagcagctgcagcaacagaaaaggccggagatggggagagaggacagcggtgcggcagccaaacgctctgtggaaaatttactggattccaaaaccaaaacccaaaggattaacggcgagaagagtgaaggagctgcagctgcagagagaggagccatcacagcaaaggaactatatacgatgatgatggataaaaacacaagcttaattataatggatgctcgaaaaatacaggattatcagcattcctgtatcttggattctctcagtgttcctgaagaagctatcagtccaggagtcactgctagttggattgaagcaaacctctcagatgattctaaagacacatggaaaaagagggggagtgtggactatgtggtccttctcgactggtttagttcagcgaaagatttgctgcttgggaccactctacggagtctgaaagatgcacttttcaagtgggaaagtaaaactgtcctgcgccatgagcctttggtgttggagggcggctatgaaaactggctgctttgctacccgcagtttacaaccaatgctaaggtcactccaccccctcggagcagagctgaagaggtgtctgtctcattggattttacttatccctcattggaagaaccagttccttccaaacttcctacccagatgccacctcctcctatagaaacaaatgaaaaggcactgttggtaactgatcaagatgaaaagctgagactgtcaacccagccagctctagctggacctggtgcggctcccagagctgaagcctcacccataattcagccagcgcctgctacaaagagtgttccacaggttgatcgtacgaaaaaaccgtcagtcaagttgcctgaagatcatagaataaaatctgaaaatacagatcagagtggaagagttctttctgatcgatccaccaagccagtatttccctctccaaccaccatgttaacagatgaagaaaaggctcgtattcatcaagaaactgcccttcttatggaaaagaataaacaggagaaggaactttgggacaagcagcagaaggaacagaaagagaagctgagaagggaggaacaagagcgcaaagctggaaagacacaggatgcagatgaacgtgactccactgagaatcagcacaaagcaaaggatggacaagagaaaaaagacagcaaacagaccaagacggaagacagagagctttcagcagacggggcccaggaagccacaggaacacaaagacaaagtaagagtgagcatgaagcttctgatgctaaggtacctgtggaaggtaaaaggtgtcccacgtcagaggcgcagaagaggccagcagatgtgtcccctgcatccgtgtcaggagagctgaatgcaggcaaggctcagcgagaacctttgacgagagcacgaagtgaagaaatggggagaattgtgccgggactgcctttgggctgggccaagtttcttgatccaatcaccgggacctttcgttactaccattcccccacaaacacagttcatatgtatccacctgaaatggctccttcgtctgcacctccttccaccccgcccactcacaaagtcaagccccaggtccctgccgagcgggacagggagccatcgaaactgaagcgctcctactcctcaccagatatcactcaggccctgcaggaggaggagaagaggaggccggcagtgaccccgatggtcaaccgggaaaacaagccaccatgttaccctaaagctgagatttcgaggctttctgcttctcagattcggaacctcaatcctgtatttggaggatcaggaccagctcttactggacttcgtaatttgggaaatacttgttacatgaactcaatcttgcagtgcctgtgtaatgctccacatctggctgattatttcaaccgaaactgctaccaggatgatatcaacaggtcaaatttgttggggcataaaggtgaagtggcagaagaatttggtataatcatgaaagcactgtggacaggacagtatagatacatcagtccaaaggactttaaagtcaccattggtaagattaatgaccagtttgcaggctccagccaacaggattcacaagagctgcttctgttcctcatggatggcctgcatgaggatctgaataaggctgacaatcggaagaggcacaaggaagagaacaacgagcacctggatgacctgcaggcggccgagcacgcctggcagaagcacaagcagctcaacgagtccatcatcgtggccctgttccagggccagttcaagtccacagtgcagtgcctcacctgccgcaggaggtcgcgcaccttcgaggccttcatgtacttgtctttgccgctagcatccacaagtaaatgtactctacaggactgccttagattattttccaaagaagaaaagcttacagataacaacagattttactgcagccattgccgagctcggcgggattctctaaagaaaatagaaatctggaaattacctcctgtgctgttagtgcacctgaaacgattttcctatgacggcaggtggaagcagaagctgcaaacatccgtggatttcccattggaaaatcttgacctgtcacagtacgttattggtccaaaaaacagcttgaagaaatataacttgttttctgtttcaaaccactacggcgggctagacggaggccactacacagcctactgtaagaacgcggcaaggcagcgctggtttaagtttgatgaccatgaagtttctgatatctctgtgtcttctgtgaggtcatcagcagcttatatcctcttttatacttccctgggaccacgcataactgatgtagccacatagagaggagtaggctgtcggcttattgacgtctacaaattgcagcctcacatctaatgcttacaaagataatggatcgctgcagctgctatgtagagggattccagaacactggggctgtgctactagcaccatataattcaggccagtgctgtttatcaaaagaaagaaagaaagaaaacagcctgacatttaacaactatcatagtacgcattccttacaggagtcatttatttcaaaacaactttttgagtctgccccaaagttaaaataattcattagtcagacatttattattctcttggtaccaaaccatcataacctccattttcctattcactgctccagcctcttctcatttctagccccagctcagtgcactctgaatgctctagaatgacctagctcagataggaatgtatatgtacatatttattgcactgttgcacatcagactgctggacacagtttaacatagccttctgtgaaagcctagaaaggattttttctttttcttttggcctcttctaggtagctgcaatgctttcttaaggaaatgacagggcaaaactatttttctgttggcttccggctgtatttgtgcactaaatctttattctaaacaaatggaaactttaattttttaaaaataattcatttacatctacattaaaatcctaaaaaaaaaaaaaaaaaaaaaaaaaaaaaaaaa

SEQ ID NO: 1564 - DNA, 484 bp, Mus musculus
tttttttttttttttttgatgtaaacacatatgggcttttattaggagctcaagagcactccatcaccggtgcagtggtcagaagtgagagcctcgagtctaggggtgcagggtatttatggtggttacagcaagcttggggaattccatacaggtcagcaaattaatatttttaaaactgcatttctgctgtaatttgcaggaaccaaacacaggggcaaaaccacctgacaaataggatggctgggttatcttttttctgccagatgtcttagtttatatgtaccttgaccatgctgctgtagactaactggctgttgttaagaggggtggaggatggggggctattgccatcagatgtttgctcaagtggactttgcggttttcctcctgaaattggagttggttgacctttgcaccacctttagctcacccatacctttattttaaaaaaaaaaaaacatgagcggccgccctcgtgccg

SEQ ID NO: 1565 - DNA, 1503 bp, Mus musculus
ggcggggctgcgacccggagacagtgatgggcacgccccgacacggggcctcagcgccggaagacgcgaggaccaaggaccgctacagctcccaagtgccaagttcaagatggggtcccaggtctcggtggatacaggagccgtgcacgtggtgatcgtgggcgggggcttcggagggatagcggctgccagccagctgcaggcgctgaatgtccccttcatgctggtggatatgaaggactccttccaccacaatgtggcagccctccgggcctccgtggagagcgggttcgccaaaaagacattcatttcgtactctgcgaccttcaaggacaacttccgccagggcaaagtgattggcatagacttgaagaaccggatggtgttgctacagggtggcgaggccttgcccttctcacatcttatcctggccacaggcagcaccggacccttccctggcaagtttaacgaggtgtcctgccagcaggcagccatccaggcctatgaggacatggtgaagcagatccagcgctcacaattcatcgtggtggtgggaggcggctctgcaggagtagagatggcagcagagattaaaaccgagtaccctgagaaggaggtcactcttatccactccagagtacccctggccgacaaggaactcctgccctgtgtgcggcaggaagtgaaggagatcctcctccggaagggtgtgcagctgctgctgagtgagcgggtgagcaacctggaggaactgcctcgcaatgagtatcgggagtacatcaaggtggagacagacaagggcacggaggtgccaccaacatggtgattgtgtgcaatgggatcaagatcaacagctctgcctaccgcagtgcatttgagagtaggctggctagcaatggtgctctgaaagtgaacgagttcctccaggtggaaggttacagcaatatttatgccattggtgactgtgccgataccaaggagcccaagatggcctaccacgctggcctgcatgccaatgttgccgtggccaacatcgtcaactccatgaagcagaggccactcaaagcttacaagccaggtgcgctgacattcctcctgtccatgggcagaaatgatggcgtgggtcagatcagtggcttctacgtaggccgcctcatggtgcggctggccaagagcagggaccttctcatctccacaagctggaaaaccatgcggcagtctccaccgtgacagggaggctgcgtgggagtcgagagactgaccaaccaccggcagctttgtccccggctctgctgctgtggacaccagccaggaagctcaccctctctgagggaaggatcaactacctgcaggaagccggccatgtgagaactctacagagcatggcgggactcttcagtgacaggccttgtgttatttctttataaccgtctggatgaatctgtctgtggggaacgcggttgtccagaaggaggaaaatatcgcaataaagggctatgttat

SEQ ID NO: 1566 - DNA, 2102 bp, Mus musculus
agcttcctgcatctggaagcacctggagtggtgagttctagtctctgtgttgcctggattatccttgtcttcaacagggatctggggccactatggcctctggaatagcagactctggggacttggaacacttctttcttgaagcccagagagggtttgaacaagaaaggttatttttgctcagtcccagcgcatcgctgatgggtgactgtcatgagaaagcatgttacacagtattatgggagcacaagggaaacagccttggactactttacactacctgggggaaaattggaaacaatccttagtgtaaacacactcagactcaggagcggagcaagacagtttcgagaagcgctttttccatgacccattttcctgtttttgctgtctgctttctagcacttgagtggctgagtccatttttcagtatctagactatgcttaacttctccaaaagttgcttcatttattaccatgtaaaaggagctggtctctctatttagccaatggcctttgcctatcttcaggtatcaaaaatgtcatccttgtgtctttaggatggtggtttgaggcctggtttcttcaggaagcttgtctggagctggacagtggtcttactgctattccagagcctccctgagaccaaatgcagggagatgccccacccccttggaagtgccggctctcagccttggggacagctgttaggaagtgccgcagggtagggttgccccagggctcagttgccatgtcagtttcgtaccagaagatgccagtccagatgtgcatttggtgtaaatttactggcgggttgcttttgtcctgtatgctggtggaggagtctttaaagcacctggtgatgccggggacatggcttagaacatgtgcctggtgtgtgggactctgggttccagcccagtgattggaaacgaaaatctccaatatgcatggggtcctgttctgccattccctgagagacggcattagtttctcaagcagttagcatcagtgctcaggtaaaagtctcaagaggccccaaggggaatgcacaaatgcacacttagaggctctcatccctggataaatgactcagtggcttcagagctgagaaggagggcttgccctctttccagtttggggacaaaatggcagatgcttgtcccagaggcaaggctccggtgactgagccatcttctcccattccctcatcacggagactgtctttaccctcctctagtgttcctgaggttccagacttctcccagccaccgtggcaggtacccctcatgtcagggactgcctcgtgctgcttttcatctgaacctttacccagcatgcaacgcatggctcctgcctggtgagcctcgtgggctgagaaagccaaagcacagcctccagcgtgtgggtccaaatgcacgtgccacagtagaggagcaccctgcgcttggcgccccgtctggtgggacctaccgatattccaaccgttgacacttttatattttcactacattttatatttttatagactattttatattaaggtttttctagatcctgtacaacttttatataacaagttctattttgtgtgcacgactcccctgtatgtatttatatcaacccgagcctcccagattgcaggtccctcttgtgccaccttttcctcttagccttgactgtccctctcctctgctcacccaggtagcctcaggggctacttctagccgtgataacacccgaacagcagtcactggtcagcatgtacttctctggtgtttgttagctgtggtctgttgatacaggaagtactctgggcagtacccagtcaggttaccacactatgttaccgcacaaacccctctccctcagtacagtgggtgtcctgatgcagcgacctctgggtgggtggctggtcaggaaagtcctcgaagacagaggctagatgcaagcccgatgtatgaggctctgctcctgtgggcaactaggggacttgagggcacactgccaaatgactgtcctttcatatcacagcagcttccctgctcatccttgagttaaatgtagacttgtaaaggaagaaataaactaatttttattgc

SEQ ID NO: 1567 - DNA, 2283 bp, Mus musculus
ggcagctggaccgggagcctcgggcagccggaccagttggcactgggatagatattacgtgcggccgccggccaccatgctccagcggtgcggccggcgcctgctgctggcgctggtgggcgcgctgttggcttgtctcctggtgctcacggccgacccgccaccgactccgatgcccgctgagcgcggacggcgcgcgctgcgtagcctggcgggctcctctggaggagctccggcttcagggtccagggcggctgtggatcccggagtcctcacccgcgaggtgcatagcctctccgagtacttcagtctactcacccgcgcgcgcagagacgcggatccaccgcccggggtcgcttctcgccagggcgacggccatccgcgtccccccgccgaagttctgtcccctcgcgacgtcttcatcgccgtcaagaccaccagaaagtttcaccgcgcgcggctcgatctgctgttcgagacctggatctcgcgccacaaggagatgacgttcatcttcactgatggggaggacgaagctctggccaagctcacaggcaatgtggtgctcaccaactgctcctcggcccacagccgccaggctctgtcctgcaagatggctgtggagtatgaccgattcattgagtctgggaagaagtggttctgccacgtggatgatgacaactacgtcaacctccgggcgctgctgcggctcctggccagctatccccacacccaagacgtgtacatcggcaagcccagcctggacaggcccatccaggccacagaacggatcagcgagcacaaagtgagacctgtccacttttggtttgccaccggaggagctggcttctgcatcagccgagggctggccctaaagatgggcccatgggccagtggaggacacttcatgagcacggcagagcgcatccggctccccgatgactgcaccattggctacattgtagaggctctgctgggtgtacccctcatccggagcggcctcttccactcccacctagagaacctgcagcaggtgcccaccaccgagcttcatgagcaggtgaccctgagctatggcatgtttgagaacaagcggaacgcaatgcacatcaagggaccattctctgtggaagctgacccatccaggttccgctctatccattgccacctgtacccagacacaccctggtgtcctcgctccgccatcttctagcagtcgtggttgaaactctgtccctgggcgcccctggtatccaaagggcccagggacctttattgtatgccctggccttggtgtccgaggctcttcagggctatgtgtatgtgtgtgtatgtctatatttgtgtgtttgtgtggcgtgcccacccgtgttgcagactgctgggcagtcgtgttcttcagggagtggcaggtctgtccctaactacactctgagcaccactccgagggcagttgtgtgggatctgtgtttggatctctgcagtgggggtgggtgaggccttggggctccactcaggggtccgtgggtgctgattgtagcagtctcttatgttggggtgctagcacctatctggagccttccctgtcagctgagctgtgcccagtcctagggaagctgatttgggtagtaaaggcctggaccccttgtgagctctggcccgggcgctgcctggtgccattctggtgaacaatgctcccccaccccctgccctccagggtggaggcgaagtcttcagccccaccctctgatgccctatctttgtctcccacaccaagtggggttcagagctatgaattttatctcctctccaaagtagagagaaagtcgcccatagtgggtgtgcctgtacatattgtgacagtatttttttactgtgctctttcttgaaaggggaggggtgggtgtgaaaggaggtggggggtggttgttttctggggtgggctggagagggtcttattttatcttttctgtggatcagaaaaaagtggaagccagacaggcttggtctttggaaagctggacaatgagtgccttagtactgtatttatgccttccagtatctggaatcctgctcccccccaaccctccccagcaccccaagacttacctcacccccaccacccccaactcctcactcccctacccctgggctgtattctgtgttctttttgcaaagaccttaactaggcaagctaatgatgataagggaaaagctctcagggaattgatgtgttgttgctatggtgacgtccttcctctgaataaaggtgctctttgcagc

SEQ ID NO: 1568 - DNA, 240 bp, Mus musculus
gtcactaatggattcgtatttaccacttttatcttttgacaggcacactttgcatcgaacccctaaactcaatgctcccactatgaatttaattcatatatcagatctatctcaacattagagtagcaatactgcacctggtcatcacaaagataattttttacttttgatagcaataattttttaacaaatcttgttactatgcatgtacatggatggaataaaattccaaattgttgg

SEQ ID NO: 1569 - DNA, 826 bp, Mus musculus
ctggagcccggcgggacctgtccctctgcgctcgctcgggactgtagcccatggccgcccctctgcgtcccgtgccgccacagcccgccccgcgccgcctgccgaccacagctccactaggccatgacacgagcgacgtcctgcagcagatcatggccatcaccgaccagagcctggacgaggctcaggccagaaagcatgccctgaactgccatcggatgaagtctgctctcttcagtgtgctctgcgagatcaaggggaagactggtctctaactggtttggcaacaaaagaatccggtacaaaaagaatacagggaagtttcaggaagaagccaccatgtacacagggaaagcatccacagtcaccaaggcccggcgtcccaggggtcagagcagctgccagtccacacccagcccaggtccctgtggccccttgccactgaccaatggaagtgacgtggttctcactctgcggaccctggccttcctccagccccccactgggggagtctgcctacagcccctggtccatagtaactggcagagggccgccccacagccagcctcatcacctgcgggagagtctggcagcttcaattgggatgctgcatctaattaagtttctggcacctggctgagtgccataggtgactggccctgtgtcctgctgatgacctcagaagtcctggctgcggctttgccctttttcaggccacttgcctccccaccttggtgtgatttttttttttaaagaaacatcagttaagtgactgacagtggactgttcattctgagcacccgattaaagttttgacctgtttgcg

SEQ ID NO: 1570 - DNA, 279 bp, Mus musculus
cccatttcccccagcagcaattccccagaatatttcatgaaatattccaacatcatagcttcgcacagcaacacctttcagccacccctgacgggttccttttcatgagctttccccacacccggcgacccccgcattttcctggactggatactgcagctattcacattttgaccaaccagtgcttttagaagaatgctttcctttttcctacacagaattaaaatataggagattttcccaatttaataatccccttaaataaaggttttccttttg

SEQ ID NO: 1571 - DNA, 2475 bp, Mus musculus
gatactgacactgtagactcaggggagaaacaaagagtccgtgcagacctctggagtgagcagggctgctccttcctctcaggacagctccgagtgtgccggggagaagagaagagaagagacaggcactgggaaagagcctgctgcgggacggagaaggctctcactgatggacttattcacacggcacagccctgtgccttagacagcagctgagagctcaggacgcaagtttgctgaactcacagtttagaacccaaaaagagagagagaatgtggcagatcattttcctaacttttggctgggatcttgtcttggcctcagcctacagtaactttaggaagagcgtggacagcacaggcagaaggcagtaccaggtccagaacggaccctgcagctacacgttcctgctgccggagaccgacagctgccgatcttcctccagcccctacatgtccaatgccgtgcagagggatgcacccctcgactacgacgactcagtgcaaaggctgcaggtgctggagaacattctagagaacaacacacagtggctgatgaagctggagaattacattcaggacaacatgaagaaggagatggtggagatccaacagaatgtggtgcagaaccagacagctgtgatgatagagattggaaccagcttgctgaaccagacagcagcacaaactcggaaactgactgatgtggaagcccaagtactaaaccagacgacaagactcgagctgcagcttctccaacattctatttctaccaacaaattggaaaagcagattttggatcagaccagtgaaataaacaagctacaaaataagaacagcttcctagaacagaaagttctggacatggagggcaagcacagcgagcagctacagtccatgaaggagcagaaggacgagctccaggtgctggtgtccaagcagagctctgtcattgacgagctggagaagaagctggtgacagccacggtcaacaactcgctccttcagaagcagcagcatgacctaatggagaccgtcaacagcttgctgaccatgatgtcatcacccaactccaagagctcggttgctatccgtaaagaagagcaaaccaccttcagagactgtgcggaaatcttcaagtcaggactcaccaccagtggcatctacacactgaccttccccaactccacagaggagatcaaggcctactgtgacatggacgtgggtggaggagggtggacagtcatccaacaccgagaagatggcagtgtggacttccagaggacgtggaaagaatacaaagagggcttcgggagccctctgggagagtactggctgggcaatgagtttgtctcccagctgaccggtcagcaccgctacgtgcttaagatccagctgaaggactgggaaggcaacgaggcgcattcgctgtatgatcacttctacctcgctggtgaagagtccaactacaggattcaccttacaggactcacggggaccgcgggcaaaataagtagcatcagccaaccaggaagtgattttagcacaaaggattcggacaatgacaaatgcatctgcaagtgttcccagatgctctcaggaggctggtggtttgacgcatgtggtccttccaacttgaatggacagtactacccacaaaaacagaatacaaataagtttaacggtatcaagtggtactactggaaggggtccggctactcgctcaaggccacaaccatgatgatccggccagcagatttctaaatgcctgcctacactaccagaagaacttgctgcatccaaagattaactccaaggcactgagagacaccaatgcatagcagcccctttccacatcaggaagtgctcctgggggtggggagggtctgtgtgtaccagactgaagcgcatcacttaagcctgcaccgctaaccaaccaaaggcactgcagtctggagaaacacttctgggaaggttgtggctgaggatcagaaggacagcgtgcagactctgtcacagggaagaatgttccgtgggagttcagcagtaaataactggaaaacagaacacttagatggtgcagataaatcttgggaccacattcctctaagcacggtttctagagtgaatacattcacagctcggctgtcacaatgacaaggccgtgtcctcgcactgtggcagccagtatccagggatttctaagtggtgggcacaggttatcatctggagaagcacacattcattgttttcctcttgggtgctttacatgttcatttgaaaacaacacatttacctatcttgatggcttagtttttaatggctggctactatttactatatggcaaaaatgcccacatctctggaataaccaccaaataagcgccatgttggtgaatgcggagactgtactattttgttttcttcctggctgttaaatatgaaggtatttttagtaattaaatataagttatt

SEQ ID NO: 1572 - DNA, 1023 bp, Mus musculus
aagtactgatgtatcaagggagctttaatcattattgaaattaatgttcacacatcatacactatgaaattcaacagtccatacatgtccatacatgtcattttcctatccatcacacataatcgagagttggctgcattcttgtaaaacacaaatggaaatattgtaagaacaaacctggctccccttagaagaaggctactttggctccattctcttggctgaaactcaaaccaggaaaaaaagatacacacattctctatcaggagaaaataaggtcatttcgactaaatacacagttttaatccccttcttttgactacaaaaaaatttatttttgttgttatttctatttgaacctgttttactgttttaagactgaaagttacttgtatcctgaggcataattttatggccattatgtacctaaataaaaagtgtaacattagtgttacactttggactttgaaacttctagttcaacattgtagataaggatgctctctcctcctccccaaatgtgttatgctatgtcctcacatgtaaaaagaagtgagctgttccatccctcttaggaagagtaaaattgtttcaaagagacattaggtatctgaaattatattgttttccagtctggaaacaattgtccccattaacttaaaaaaaaaaatggaatctttaatttttcagctctgggtggaaatacttcagtttcaaggaaaactgtgacagggcttcctctttaaaagccttggtttatgtcgtcttcaacttcatggacctcctggaatacccttttgagattttatttaagggcatctttgtattgctgtctctgactgtcatggagaattctgtaatcctatggtgtttctggttttatctctaagttctttcatgtgtatcatggtcaatttagataccatttcccctgtttcctgggctctctgtagatcagtggatattaggtttcaatttctgttttctttgatgaagctttcaataaaaaatggaaataaaacc

SEQ ID NO: 1573 - DNA, 1403 bp, Mus musculus
ctgtcttgttacgttggttctctgagcaaatgcacagcaatggcctttccgagtgagctgctcctttaagatgactactccttggttaactttaagatctactccagtatcctgagcagatcttaagtcggtcatgggcccgcttcagtagcaaagcctgcagatcaaaggaaaatggctcttaaaacttgtacctcctggtccccaaaccaagagaacgggtctgttcttctgatcaggaaaatgaactgatgaagcctaaccaggggagacaggtgtcatgttccctgtcactcctgagtcacacatccagaccctccattttgagagtgttgggcttacgggaagcgggcacatgctctgggcttcaagctgcctgtctgaaggctccaggacgctgactcttggatgaggtctggcctcaggtcacccttggcttctgcctgatgctgtctgtgagtgaggagcaagcctttaccagatcctagtgggtgctacctggtcctcagacaagcagtcccataagtaaaactacccactgggccaatggcacatctgtcctgtgttgctgtagtgagcggagctttagggggccgcctgccagccttgcccacccgcctgcctgccgcatgtgtatcctcacaccacaccgctcgctccaaatgagcgctccctcttccattgcccttcaccagccccaggatgatgggatgaggcagtaactagaagggcaggaagcttgaagctcttgcagctgaaaaggttcctgcccagcctgtgcctcaccaggcagaaccagtcagaggcgggtccagacttacatttggaaacttaactcctcagagcttctgcccgcggttgggggattttacacctgctcattaaaaggtgagaaccgcccgccccacgaggactcacaccctgtcaccccagtactaagcagcctcggagcatggtgggagtctccattgctgggtttctgcttcgatttcctttttcctgtagagaaacgtcaaagctgagaaagatggcttccctccctgacctgactgtaaataatgtacttagactgtttttaaatgtgtttcttcccgaaggcttcgtttggctgagggagcctatatcactcgtgtaagttggtatttgggccttttatatttttctaaaaatgtgttttggaccctgtactctaataaatcataggtttctttttaaaaattttcccaaaagttttctccattttcaaaaaccttgttataaaaagtagaactttcacaatgttaaaatactaaatatttggttatagcaacttctcttctaatgagggccaagggtcttttttttttcttttcttttctttttcttttttttttgtacaacaattaataaacgaacttgccgag

SEQ ID NO: 1574 - DNA, 1778 bp, Mus musculus
ggcactcctgccccagcatgcagaaggacgcctctttgagcggcttcctgcctagtttccagcatttcgccactcaggccatccacgtgggacaagagcctgagcaatggaattctcgtgccgtggtgctgcccatttcgttggccaccacatttaagcaggacttcccgggccagtcctcgggttttgaatacagccgctctggaaatccaacaaggaattgcttggaaaaagcagtggctgcgttggatggggcaaagcacagtttggcctttgcatcgggtcttgctgccaccattacgattacccatcttttaaaagcaggagatgaaatcatttgcatggatgaagtgtatggaggcaccaacaggtacttcaggagggtggcatctgaatttggactgaagatttcttttgtagattgttccaaaaccaaattgctagaggcagcgattacaccacaaaccaagcttgtttggatcgaaacacccacaaacccaactttgaagttggctgacattggagcctgcgcacaaattgtccacaaacgtggagacatcattttggttgtagataacaccttcatgtctgcatatttccagagacctttggctctgggtgctgatatttgtatgtgttctgccacaaaatacatgaatggccacagcgatgttgtcatgggtttagtgtctgttaattctgatgacctcaatagtcggcttcgtttcctgcagaattcactaggagcagttccttctccttttgattgttacctctgctgccgaggcgtgaagacactgcaggtccggatggagagacatttgaagaatgggatggcggtggctcgtttcctggagaccaatcccgggtagaaagggttgttatctgggctaccctctcacctcagcatgagctggccaaacgaccagtgctcggctgccagggatggtcagtttctacatcaagggtgctctgcagcatgctaaggcctcctcaaaaatctaaagctgtttactctggcagagagcctgggaggatatgagagtctggctgagcttccagcaatcatgacccatgcctctgtgcctgagaaggacagagctaccctcgggatcaatgacacactgatacgactttctgtgggcctagaggatgaacaggaccttcttgaagacctggatcgagctttgaaggcagcgcacccttaaaagttcgagtcaaagctgtcattccagtgctgccatcaggagcagcatccaaggggccaaatcttcggaataactggacagatcattacggcgcatacgcagaactgcactgaatattttaaggccctaatgagtttacagctgtaaccttccatggatcttcccttaagaactgtcttctgtttatcttctaactaacaggttgttctgttagtatcatttcggtaattttgctatatttgtgtccaaggaagtaagagttgttctgttttgggatcatgttgtcttttttctttcttcagtagcttatgatatattttaatcatgtttacaatgttacaatttagtattgatgttttatgaagttaaattattaaatgaatggtcttaaatccactgtggtggtttttttttgaaaaattatataattaccataagccaaaaatcaaatatttggaatacctactgtgaaattcaagagattaagggttgtacttgatacttgttatttttcttaaataaatctagttatcaagttatttttcttaaataaatctagttatcaaatgt

SEQ ID NO: 1575 - DNA, 4307 bp, Mus musculus
agaggctcaggctgaggcagacgatactgccgtggcgtttggtgagcaacgaaagatgatgaagaaagaaaaccagcatatccctgagacctgggtgccagcgctggcgctgtgctaaggaagttgcgaggctggcccttgcctagccactcatcagtgctgtagtctgcacccgagtttgccccagcctctgagcccctcgtcactgcctgaagatcccctggtcagaatgttaacagtgcatctctgcccgactgctatgggaggtgatcaggtgacactcacttcctgacgtcacgtgggatcttactgacgagaggagctctttcacgtgaacggaagccgagcccctgtgagcgcttgtattgaacatgactcatggagaagaacttggctctgatgtgcatcaggattctattgtcttaacttacctcgaagggttactaatgcatcaggcagcagggggatcaggcactgccattaacaaaaagtctgctggccacaaagaggaagaccagaactttaacctctcgggcagtgcgtttccctcctgtcaaagcaatggtcccactgtcagtacccagacgtaccagggatctggcatgctgcacctcaaaaaagccagactgctgcagtcttccgaggactggaacgcggcaaagcggaagaggctgtctgattccatcgtgaatttaaacgtaaagaaggaagcgttgctggctggcatccttgacagtgtgcctaaaggcaaacaggatagcacattgctggcctctttgcttcagtcattcagctctaggctgcagactgttgctctgtcacagcagattagacagagcctcaaggagcagggatatgccctcagtcacgagtctttaaaagtagagaaggatttaaggtgctatggcgtggcctcaagtcacttaaaaactctgttaaggaaaagtaaaaccaaggatgaaaagtcagatcccaccctccctgacgtgactccaaaccttatcagagatagctttgttgagtcatcccatcccgcagtgggacaaagtgggacaaaggtcatgagtgagcccttgtcatgtgctgcaagattacaggctgttgccagcatggtggagaaaagggcgagtcccgctgcctccccaaagcctagtgttgcctgcagccagttggcgctgctcctgtccagcgaggcccacctgcagcagtactctcgggaacatgctctaaaaacgcagaacgcacatcaggtggcaagcgaaagacttgcagccatggccagattgcaagagaatgggcagaaggacgtgggcagttcgcagctctccaaaggggtgtctggccatctcaacgggcaggccagagcactgccggcaagcaaactggtggccaacaagaataacgctgccacctttcagagtccaatgggtgttgtcccttcctcccccaaaaacacgagctataagaactcactggaaagaaacaacctaaagcaggctgctaataacagtctgcttttgcatctcctcaaaagccagaccatacccacgccgatgaacgggcacagccagaacgagagagcgagcagttttgagagtagcacgcccaccacgattgatgagtactccgataacaacccgagctttacagatgacagcagtggagacgaaagctcgtactccaattgcgttcccatagacctgtcttgcaaacaccggatcgaaaagccggaagctgagcggcccgtttcgctggagaacctaacccagtccttgttaaacacgtgggatcccaagatccccggcgttgacatcaaagaagatcaagatacctcaacaaattccaagctgaattcacaccagaaagtcactcttcttcagttgctgctcggccataaaagtgaagaaactgttgaaaggaacgccagccctcaggtcatccatagtgatgggactaagttcagtcctcagaattacacaaggacttctgtcatcgaaagccccagtaccaacaggactaccccagtgagcactccaccactgtatacagccagccaagcagagtctcccatcaatctttcccagcactctctggtcatcaagtggaattccccgccgtatgcctgcagtactcccgcttccaagctcacgaacaccgtgcctagccacctgatggacctcacgaaaggcaaagagtcccaagccgagaaaccagccccgaatgaaggtgcacaaaattccgccacgttcagtgccagtaaactgttacaaaatttggctcagtgcggattgcagtcttccgggccaggggaagagcagagaccctgcaaacagctgttaagtggaaacccagacaaacctctcggtctgattgatagattaaacagcccacagctctcaaataaaaccaatgcggctgaagagagcaaagccttcagcagtcagcctgccgggcctgagccgggacttcctggttgtgagatagaaaatctcttggaaagacggactgtccttcagttgctcctgggaaattccagcaaagggaagaatgagaagaaagagaaaacccccgcacgagacgaggctcctcaggagcattcggagagggctgcaaatgaacagatactcatggtgaagattaaatccgagccttgtgacgacttccagacccacaacacaaacctgcccttaaaccacgatgccaagagcgcccccttcttaggtgtgactcccgccatccacaggagcacagctgccttaccagtgtcggaggactttaaatccgagcctgcttcacctcaggatttctctttctcaaagaactttctgttgagtcgcttgctgagacagaatcaagagagttacccggcagatgagcaggacaagagtcacagaaacagtgagctgccaaccctggagtcgaagaacatctgcatggtcccgaagaaaaggaagctgtatacggaaccactggagaatccatttaaaaagatgaaaaatactgccgtagatactgccaatcatcatcgcggcccggaagtactctacgggtcgttgcttcatcaggaagagctgaagtttagcaggaatgagctcgattataaataccctgctgggcatagttcagccagcgatggtgaccacaggagttgggccagagagagcaaaagcttcaatgttctcaagcagctgctgctctccgagaactgtgtgcgagatctgtccccacacaggagtgactctgtccccgacacgaaaaagaaaggacacaaaaacaacgcgcccggcagcaaacctgaattcggcatttcttctttaaatggactgatgtatagttccccgcagcctggcagttgtgtgacggatcataggacattttcatacccgggaatggtaaagacccctctgagccctcctttcccagagcacttgggctgtgtggggtccagaccagaacctgggcttttgaatggatgttccgtgcccggtgagaagggacccattaagtgggtcatcacagatatggataagaatgaatacgaaaaagactctccaagactgaccaaaactaatccgatcctctattacatgctccagaagggagggggcaattctgttaccacacaagaaacccaggacaaagacatctggagggagcctgcgtcagccgagagtctctcacaggttacagtcaaagaagagctacttcccgctgcagaaactaaagcttctttctttaatctaagaagcccgtacaatagccatatgggaaataatgcttctcgcccacacagtacaaatggagaagtgtatggacttctgggaaacgcgctcaccataaaaaaagagtcagaataaatgtgtacctgccataccactttgggtctttttaaaatttagtcagtatgaacttgagatctgtataaataagagcatgatttgagaaaagcatggtataactgaaactccttccttttgaaagtattggtcactggtgatgtttaaatatgcatactaatttttgcttaacattagatgtcatgagtaaacaattgaactcgaggttggttgtttactatttctgtatgcatcagataacaactgtgactagcctacgaatgaacctgcttttataatcgtaaataagaggcatacattaaaatgcacaacttcaccagtagtggattgatgcaacttgctgtctttattagggttgttcatttcccatctcagaagccagcctacataacgtgtttgtaagcatccaaactgttagctatttggaagataaccaaattaggaaaaaaa

SEQ ID NO: 1576 - DNA, 2543 bp, Mus musculus
gggcccagcgactctcgggtagcgctgggacgcgccgccgccgcgcccgcccctggaccccccgggctcgacgacacgaggtctccactccagggtagggatccttttaaggcccttctcctgccacctttgatcagcctcactaggaccagaagcagagagagaacccacagactccctcagcctcagcactggggacagcgccttagtaaagtcaagggtcgccttgtgctccgccatcttcattgagaggaaggggctgagaaggatccctgagtccagcctgccatcttccctggccccaaggtggcatggactagcagttgtaagcaatcaaagctgatgcccggtccccaggggggcacaggagcccccaccatgagcctgggcaagctgtctcctgtgggatgggtgtccagttcccatggaaagagacgcctgacagcagacatgatcagccccccacttggggacttccgccacaccatgcacgtaggccgtggtggggatgtcttcggagatacgtccttcctcagcaaccacggaggccgctctggaaacacccaccgctcaccccgaagtttcctggccaggaagctccaacaggttcgcagagtcggggtgccacctcgaaggatggcttccccggctgcaccatcacctgctccgcctcccatctcgcccatcatcaagaacgccatctccctgcctcagctcaaccaggccacctatgacagtctggtgatgggcaagcttagttttgacagcacgccggctagctccacagatggccactctggttacggcctggagtctggcttctgcaccatctcacgcctgccacgcgtggaaaagcacagcaaccgtgaccgtgaccgtgacccggaccattctcaagaccgagagcaaagttctttcccctctgagcctacccctaaccctgagctccgacgctctgactctctcttgtccttccgttttgaccttgaccttgggccctcactcctcagtgagctgctaggggtcatgagcctttcagaagctccagctgctgaaactccagtccctactgccaacccccctgctcctgcagcaaaccctgcccctactgcaaaacccccagcccatgcgataaccactctagatgctgtgacaagccttccagcctctgctgtgacaagccttccagcccctgcggtggcaagctccccatcccgtggacatttccccaatggggtaacttctgtgttgggccctgcggctgaggcaaagcccagtcctgtgggagagggtccccaggtaccctccaacatggcctttgacaggcatggagccagctggggggccagccgggccagctggggggccagccgggccagccgccactacactgagatggatgcccggcgggagctggcaggggtgttaccccaagttcatggctcctgggagagtctgaatgaagactggagcgcgcctccagccagtgtcagggctcctgtgcccacctcggtgcaggtcaatgcctttgagtttgctgatgctgaggaagatgacgaggtcaaggtgtaagggactggccatgggctccaggtcctgtcagcctcggggctcacagaacagaggggctgagttcatttgcctaacagctacaagatgtggtcaacgggagttgccccagatccttcctggtctatgcaaggcaggcatgggtccccgctgacctgacccagctccctccactgtccctaggcccactagcccttcagttataacctacgccaccccctgtggtctgacagtatggtctttgtgccccaggacacttccctagtggggtgggggttggggcaaggaccacatagggccattgtctgtgagtgggactggctgcccctactcattgagagctaccgcagaaggcctccactgtgttctcagtagcgcggttccaggctcctcctcagttcccagagaaaggtcaggcgtgacacaggagcaaatcttctgtgtaccccagacctgcctcccatacctgattgttaaagcttctctgttaagatctgcctgcccaaggaggcaggcccggccacggctgacctgtgctttctcctcctgagagtttggaaagttgaggacccccttctggcgcccccccctctagctaggagagaaggggggccagacgagctaatgagtaaccagcctggaatgttcaacgataagaagcccaggtgggacccttatctgcagttcctggaacaccctggcccaaggtgccaggaaccagtatctgccccataatcccatggggctgcttggcaggtgctcagatcaccgggagggagacaggtccccatgcagagggtggctcaggagcacctcccatccttttttttcagcagtactataccccgtgcctcagtttcctgcccccccccccggtaccaaagccggggtgggggggagcattaacatgcgtggaaaatgctaacagttcttgctgtggaaataataaatgtggatttttttatttgaccttg

SEQ ID NO: 1577 - DNA, 4643 bp, Mus musculus
ctcgtcccacctcctaactgtcgtgctccaaggcttcaaaagcagattctggttcaggtgatcagaggcagaattggaaataatcctcagttggtgatgatccccatgcaacggcgggaggactgcaaagggctggtcttcctgggagtcctcctcgggatgctgtggaaagctggatccacccagatacgctattcggttcccgaggagctggagaaaggctctagggtgggcaacatctccaaggatctggggctgaagtcctgcgagctggcggagcgaggggtccgcatcgtctccagaggtagggctcaacttttcgctctaaaccctcgaagcggcagcctggtcaccgcgggcaggatagaccgggaggagctgtgtatggggtccatcaagtgtcagttaaatctagagattctgatggaagatatagggaaaatatacggagtagaaatagaagtgagggacattaacgacaacgctccctacttccgtgaaagtgaattagaaataaaaatgagcgaaaacgccgccgctgggatgcggttccctcttccccacgcttgggatccagatatcgggaagaactcgcttcagagctaccagctcagcccgaatgctcacttctcactggaggtgcagaacggagctgatggtaacaagtacccagaattggtgctggagagctcgctggatcgggaggaaaaggccgctcatctcctagtcctcaccgcttccgacgcgggagacccggttcgcactggcacagctcgcatccgcgtgatggttgtggatgcgaacgacaacgcacctgcgtttgctcggtccgagtaccgcgtgagctgggagaacgtggctgtgggcactcagctgctgctggtcaacgccaccgacccagacgaaggcgccaatgcggaagtgatctattccttccggtacgtggacgacaaggcagcgaaagttttcaagctggacagtaacttggggacaatatcaacaataggggagctgaatcatgaagaatcggggttctacgagatggaggtgcaagctacagataacgcgggatattctgcacgggccaaggtcctggtcacagttctggacgtgaacgacaatgcccctgaagtagccatcacgtccctcaccaactctgtcccagaaaactctccccaaggtacattaatagcacttttaaacgtaaatgatcaagattctggggaaaatggacaggtaatctgttccatccaagagaatctgccctttaagttagaaaagtcttacggaaactattatagattagtcacagatgcagtcctggaccgagaagaggttcctagttacaacatcacaatgaccgccactgacaggggaagtccgcccctgacaacagaaactcacctcgcactggacatagcagacacgaacgataactcgcccgttttccttcaggcctcatactgggcctacatcccagagaataaccctagaggggcctctatcgcatccgtgaccgcccacgaccccgacagtgacaaaaatgcccaagtcacttactccctagctgaggacacccaccagggcgtgcccctttcctcttacgtttccatcaactcggacactggtgtcctgtacgcactgcattcctttgactacgagcagttcccagacctacaactgcaagtgatagcgcgtgacagcggggacccgccactcagcagcaacgtgtcactgagcttgttcgtgctggatcagaatgacaacgtccccgaaatcttgtaccccactctccctaccgacggttctactggagtggagctagcaccccgctcagcagagcctggctatctggtgacaaaggtggtggcagtggacagagactcaggacagaacgcctggctgtcctaccgtctgctaaaggccagcgagccagggctcttctccgtggggctgcacacgggcgagataagcacggctcgggccctgatggacagagatgctctcaaacagaacctcgtagtgtctgtgcaggaccacggccagcctcctctctctgccactgtcacgctcactgtggcgatcgccgacagcatccccgacgtcctggcagatctagacaatctagaatctccttccacctccgaaacttcagggctcactctctatctggtggtggccgtggcggcggtctccaccgtcttcctggtctttgttctggtgctgctggcgctcaggctgcggcgctggcactcactgcgcctgctccgggctgggggacccggattggctgacgttgcagcctctcactttgtgggcgtagacggagtgcaagctttcttgcagacttattcgcacgaggtctcgctcactgctggctcccgaaagagtcacttgattttcccgcagcccaactatgcagacacgctcatcagccaggagagctgcgagaaaaccgagcctcttttaccatcgggtgattcggttttttctaaagacaatcatgcattaaatcagcaagccccgcccaacactgactggcgtttctctcaagcccagagacccggcacgagcggatcccaaaatggtgatgaaactggcacctggcccaacaaccagtttgatacagagatgctgcaagccatgatcttggcctctgccagcgaagctgctgatgggagctctaccctgggagggggcgctggcaccatgggtctgagcgctcgatacggaccccagtttaccctgcagcacgtgcctgactaccgccagaacgtgtacatccctggcagcaatgccacgctgaccaatgccgctggcaaacgagatggcaaggctccagcaggtggtaatggcaacaagaagaaatcgggcaagaaagagaagaagtaatatggaggccaggccttgaaccacaaggcagcctccctccccagccagtccagctcgtccttacttgtacccaggcctcagaatttcagggctcaccccaggatactggtaggagccagggccatgctccccgttgggaaacagaaacacgtgcccaagccaacaccccctctctataccctagggagttgaatatgcaaagagagttctgctgggtcccccctattcaatcagtgattgtacccacatgggtagcagggtttgtgtgtgtggacatacacacacacacacacacacacacacacaaaccatgccacactcccttagttacagctgaactcctccatcttccaacccaggcaggcttatccatctcctgccgccctctccccaccccacccactccttcagtccctctctttgagcaaggtagctgggctgttggggtgaccggtgagctaagccggctcctagttctgaacggtagggagagtattacaatcttttggcctctccttcagttcagctttcccccaaagcatggtttggtaccagtcttctcttttccttccagagcctgagaccaatgcttaagttttgggggaacaggcaccctccctctggtactgatgatgcttgctggattttgggaaggcattttgctactaagcctcttttcaatgcctggggacaactagtcttttgtttttcattgtttgatgttcccactgcatgctgtgacttccctacacctcaaagaagagactcctttgcatgtctggagacagtagggggtggtaaactaaagggaagttgagagtgtatactgctgggagtggggcagtggacaaaacagcctgttaatagggtcttgcaaggggctctgtatgtacccaggggactggctcaatcctcacattctagccatagacaaacaccaggccagacccctccattctggttcagcctgggcagcttgggctgagccaccaggaccaatggatttaagctgacatttcagtccaagaacacgacttctaagtgagtttaagaccagagaggaaagaggggcctctgtgggtgctgggtactccagaggtgcccttggtgggaggaccagtggtcttagcaggaaggggggcccagcaaggtcattcttggaccctgggtctagtccagtagctagaaaaagggaccaagtggccataaagtcccagccaatgatggggcttttccagtgggcccctgtagacctcaagcccctggcctccaccttaccaggtgccatttcttctcagaaggccactgcccaggcccccaggccgcccccttgtggccagagaacggttaaagccccccagtgcctccttgtgcatagaacttcctctgccctagcccttacagtagtagtagaagatccccctcccccgctggtgtagaatagccaatagtatagtgtggtgtgcttttacgtgatggcgagtgggcagcgggcggtgggctgtacacagccgtctgtcctttgaatctcaatctgcctgcgcggcccgtgctgtgttttgtgctgtgtccacacgctgcggcgacccctccctgtactgacttctctataaaaagcttctcttcgcatagtcacgtagctcctgcccatcccccttccgatatctctcgcaagttttatactctaatatttatatggcttttttcttcgaaaattaaaaataaaaaaatggtttcttctgaaaaaaaaa

SEQ ID NO: 1578 - DNA, 663 bp, Mus musculus
gcgtttttttctatttttattagaactttcccggcttctctttcctctgcactgcattaatgagctcctggattctttggttccttgtctttacatacaggcttggccgtcgagggatcaggttaggagacgggacctcttcatccacaccatggattttgtaggggacatccacagcattggtttctgggtgatcttcagtggcattggtgctagagacattgaggggagcctccaaaggaggccccggagaaggctgcacctgtgtagctacagtgggccccgggagtgtgggcatgaacacatcgatgtcattgtgcttcccgggaggaggctccacacctccgtcctctgtgttgctgaggtttcggggcgggttgcaggacttgcagcaaagcttgttgtagctggggatggagcagtagcgagacaagacttccatcctacagaacattgacttgtcgccttggcactggtcctttgacgagatcttctggataggtgagtcaagatcaggccgggacagccactgaaccacgtagctcttcttggagggatctgagccgattcagggacatggtgcaagcctgcagatccttgccgtctaccgtcgctcctccggcagacaccaatattatcatctgcagtgcgacagagcactgg

SEQ ID NO: 1579 - DNA, 2931 bp, Mus musculus
gggcgggcgggctgtgccgtggcagcgcctgcccgagggagggcggcggcgcggggccaggaccccggcagcaagaggcggcgatcgggccaccggagagtgtgcggcggggcagctgagcggcgggtgccccgccctgctggccggtggggatgcgggaccggctgcccgacctcacggcgtgtaggacaaacgacgatggagacactgctgtcgtcattgtggagaaggatcatttcatggacggtttcttccatcaggtagaggagattcgaagcagcatagccaggattgctcagcatgtagaagacgtgaagaagaaccacagcatcatcctgtctgctccaaacccagaaggaaaaataaaagaagagctggaggacctggacaaagagatcaagaaaactgctaacaggatccggggcaagctgaagtctattgagcagagctgtgatcaggacgagaatgggaaccgaacttcagtggatctgcggatacgaaggacccagcactcggtgctgtcacggaagtttgtggacgtcatgacagaatacaatgaagcgcagatcctgttccgggagcgaagcaaaggccgcatccagcgccagctggagatcactgggaggaccaccactgacgacgagctggaagagatgctggagagcgggaagccgtccatcttcatctcggatattatatcagattcacaaatcactaggcaagctctcaatgagatcgagtcccgccacaaagacatcatgaagctggagaccagcatccgagagctgcacgagatgttcatggatatggccatgtttgtcgagactcagggtgaaatggtcaacaacatcgagagaaatgtggtgaactctgtagattacgtggaacatgccaaggaagagacgaagaaagccatcaaataccagagcaaggccaggcggaaaaagtggataattgctgctgtggcggtggctgtcattgccgtcctggctctaatcattggcttgtcggttggcaaatgattgcgtagatggcgctgggtgcttgcctctccctcagggtggcaaaggtgatgttcgtcctcatttgtgtagtcactttgcttgtgatccttggaattattctcgcaacagcattgtcatagcaaccgtaccccaagagctctttgtcctcggtgactccgaccatacctgcagcttagtcagcatcctgtccttccacgagtgaacctcagactccagggctagcgccgagcactgaggtttttattggtgatgaagaagaaagcaccgcagaggtttcgtaccatgaaacaccgcgagcccagtggatgcgacatgccagcccagagagcctgggtctctctcaaggacaccacagagatttcacaacagtggccttgccttggtagctttgaaataggaatgattgaaaaagcctaatttttaaagacaatgtcagtgttaaaaatgtatgttgtgtgtaattagggtgtgctctgcgctcagctggcagtgctgacgaagagacttcgtgccaggcctgatctctgttcatgtcttgtttgcagaatcatcacagaactgttttgtaaggcatctgtaagttaagttccttaatctattaacatctaaactccctttctaagctagacactgccttgcgaaggacaatgggccagccccgggcaagcatgaacactgccttacagcccctcagggcccttctatagtgccttctggtgaccctgactaggaagtgtgagggtctgaagagccttgaacgttagctcacggaggggacaagcagtcacatgccgcactcatgttactctcccttgttcatgtgagctgatgaagtctcaaggcaaggcgacagtgacgatggagcaaactcggtgctcactaaactcaagagaatggccccgagtacatagccactcctggatggcacctgaaggaccaggtcctcagcccaacacccacgagtgcccagagttcctaagaaaccatgaagtgtgggataaagctgtgcactggtttacacttgtgaatagatggcccagcgaccaagtatgtgaaggataccatgactagtgaactctgccaactgctgactgtgatgagtgctcactctaccccagcctcacttggtgggatatgacgtagccatgccgggtcagaacaccaagtgtgagcaagtgctactgaactatctaaaaaccatgatcctttcagtggtgagtgtgccacactgtcacctcctcacaccttctggtctgacaccccatgtgccgagagctactgcagcaggctgggctgtgggtcctggtctagagttagcctgtagtgcagccactcctggctgatagctcacccttccgcaaccgggagctcacccttcctgcctggaagctcacacttcctgtctgggagctcacccttcttgcctgggagctcacacttcccgtctgggagctcacacttccttcctgggagctcacacttcctgcctgggagctcacccttcccgcctgggagctcacacttcctgcctgggagctctgaagatgaacctgggcctttgcagctcaccctctctgcatcagtcagtgccatcggatttagctgcagagaccatgcgtaccacccaggctcccaccacccacagccaggtgtccctccagtccagcctgagcccttggcctgcagtgtgctcgcagagcgctcaggagacctctcgaccaggcaggcagctgaatctggatttccagtgaatcaggggtgtgtgggtgactgagtcagcactccagatacatctctctgctgacttcatagcctatttaaaaatatatttacagattcccttgttaccttttccaagcatttcttcaaatattttgtgtttacattaaaaagttctcagagatgc

SEQ ID NO: 1580 - DNA, 2306 bp, Mus musculus
acaaaggacctgggagttcaactgaggctgctgctgtcggcctggggatggaccccaagccctgagtggtgttgttggacccaggacctgcaagaagcatgcactaaggcagctgcggaccacactgtgagggagagcaggttgggagcagccccggtgacaccagagccagcctcatccctaggagcttcagagagcatagactgctgccagctgaggccagtgaggcagggctgctcggcggccagtccagcctgagactcgggacctctcctggaggccacggccaggctgtgctgctgatggcaccgtgaggcatgtgaagcgctgctccagggccaagcaggagagaagaggctttcagttcataaagaccaaccagcacactgcaaggaccatgaggccactgtgtatgacctactggtggcttggactgctggccacggtcggagctgctacaggcccagaggctgacgttgagggcacagaggatggttcacagagagagtacatttacctcaacaggtacaagcgggcaggtgagtcccccgacaagtgcacctacactttcattgtgccccagcagcgggtcacaggtgccatttgtgtcaactccaaggagcctgaggtgcacctggagaaccgtgtgcacaagcaggagctggagctgctcaacaatgagctgcttaagcagaagcggcagatcgagacgctgcagcagctggtagaggtagacggaggcatcgtgagcgaggtgaagctgctgcgcaaggagagccgcaacatgaactcgagagtcacgcagctgtacatgcaacttctacatgagatcattcgaaagcgagacaatgcgctggagctctcccagctggagaacaggatcctgaaccagacagctgacatgctgcagctggctagcaagtacaaggacctggagcacaagttccagcacctggctatgctggcacacaaccaatcagaggtcattgctcagctcgaagagcactgccaacgcgtacctgcagccaggcctatgccccagccacccccagcagctccacctcgggtctaccaaccacccacctacaaccgcatcatcaaccagatttccaccaatgagatccagagtgaccagaatctgaaggtgctgccgccctccttgcccaccatgcctgcccttaccagtctcccatcttccactgataagccatcaggtaagtcctttggggagtccagctcccatgcgcctctgagcccctcagcctgggggtacatgtgggcatgtgagtctcaagaaagttgtataatcctctggcaatcctctggggtggctgctggatccagtggagttgggttgatgggagcaagggatggcattgctccaataaggtggtagaaggtagaacccagaagctagaaggtatgggtgtcagctctggtctctgaggggagagaatacagtcctggatactctgaggttttgcacctgccctgtcttagtggctaggtgtctcacctgtgggctctcatgcctgtgtaagcccagagctaactgtctgaagatgtcacatgataaacgctaggctagtgggagagtgctataaagtccaaagttaatgcttctcggggactagggcactggatggaagtttccttcagttaggtgctgcctagttttcaataaggcttccttacactctcagcacacatgtcatgagactctcaagacaccgtaatagaagaatggggtccttgggagcacaccctgggaagtgtaaccaagatactacactgggattttcatgagggtcacttgactagtcctgcagctccttagggacaggatgactaacctgttcacagcctgaagatgctcaggtagagctgggcccctgcttcagacacatggaacagagttacagcttctcgggacgatgtcatgaaaacacaatgtgcaatgatgtcaccaggggttgccaatactgcctgtgccctcctctgacttagtggaaactctggtccctagcctccaggaacccagtgtggggaggtggcaggtgtgtgaaggctctggcaaatcgtcagggtaggggagcaggccggaagagtcctctccagaggcccagttccaggagctgggcttctcctttatctaggcagtgttgttttccacctgtgctaaatctctgaaaaagttaactaaaactatgcatggggtaccaatgtctttgttgacagggagagtttttactgaaaagatcctttgtacctatttcacactttaaaaaaaaaccagtactgagtcg

SEQ ID NO: 1581 - DNA, 1630 bp, Mus musculus
gaggcgaaggcggcgacgacgacggaggcgcggggcgcttgggctgatggcagcggccgggcccggggcggcgctgtccccggggcggtgcgacagcgacccggcctcccccggagcgcagtccccaaaggatgataatgaagataactcaaatgatgggacccatccatgtaaaaggaggcgaatgggctcaggagacagctcaagaagttgtgagacttcaagtcaagatcttagcttcagttactacccagcagaaaacttaatcgaatacaaatggccacctgatgaaacaggagaatactatatgcttcaggagcaagtcagtgaatatctgggtgtgacctccttcaagcggaaatatccagatttagagcgacgagatttatatcacaaggagaaactatacctgagagaattaaacgtcatcacggaaacacagtgcacactgggtttaacagcattgcgcagtgatgaagtgattgacttaatgataaaagaatatccagctaaacacgctgaatattcggttatcctacaagaaaaggaacgtcagagaattacagatcattataaagagtattctcaaatgcaacaacagagtactcagaaagtcgaagccagcaaagtacctgagtacattaagaaagcagccaagaaggcagctgagttcaacagcaacttaaaccgggagcgcatggaagaaagaagagcctattttgacttacagacacatgttatccaagtgcctcaaggaaagtacaaagtgttgccgacagaccgaacgaaggtcagttcctacccagtggctctcatcccgggacagttccaggagtattataagaggtactcaccagatgagcttcggtacttgccattaaacacagccctgtatgagccgcccctggacccagagctcccggcactagatagtgatggagactcagatgatggcgaagatggcggaggggatgagaagcggaagaataaaggcacttcggacagctcctcaggcaatgtgtctgaaggagacagcccccctgacagccaggaggacaccttccacggaagacagaaatcaaaagacaaagtggccactccaagaaaagacggctccaaacgttctgtactgtccaaatcagctcctgggtacaagccaaaggtcattccaaatgctctatgtggaatttgtctgaagggtaaggagtccaacaagaaaggaaaggctgaatcacttatacactgctcccagtgtgataacagtggccacccttcttgcttggatatgaccgtggagcttgtttctatgattaagacctacccatggcagtgtatggaatgtaagacatgcattatatgtggacagccccaccatgaagaagaaatgatgttctgtgatgtgtgtgacagaggttatcatactttttgtgtgggccttggtgctattccttcaggtcgctggatttgtgactgttgtcagcgagctcccccaacacccaggaaagtgggcagaagggggaaaaacagcaaagaggggtaaaataggctttgaccctcatgtttgggatatttggtgccaatttatttacaacactttcatttttatgccaataaaaacttttttgaaatt

SEQ ID NO: 1582 - DNA, 1715 bp, Mus musculus
ggtccgtctcccagggaccatgtcccagctgtgcacaaggctgaagtgaagggccaggagtgggcccagcccagggcagcatgaccaagccgcggctcttccggctgtggctggtactagggtcggctctcatgatccttttgatcattgtatattgggacaacgtgggcaccgcccacttctatctgcacacgtctctctccaggccacacatcctagaaccccttcccacccagggattggtggaggagaacgtgttcacatccgacgtggatgagtttttggatactctccttagttctgacgcaaagcacaacgacctttccaggagaaaaactgagcagcccccggtgcccgcccccagcaagccagtcttgagccacatggaggagaacgtgagaggctacgactggtccactcatgatgcccatcagaaccctgaccgggacaggcagcaggccgagaggaggagcctgctgagagacttctgtgccaacgccagcctggcattccccaccaaggaccgctcttttgacgacatccccaactacgaactgaaccacctgatcgtggacgaccgccacggggtcatctactgctacgtgcccaaggtggcctgcaccaactggaagcgagtgatgatcgtgctgagcgagagcctgctggaccggggcagcccctaccgagaccccctggacatcccccgggaacacgtgcacaacaccagcacgcacctcaccttcaacaagttctggcgccgctacggaaagttctcccgtcacctaatgaaggtgaagctgaagaagtacaccaagttcctgttcgtgcgcgacccctttgtgcgcctcatctcagccttccgcagcaagttcgagctggagaacgaagagttttaccgcaagttcgcggtgcccatgctccgactgtacgccaaccacaccagcctgcccgcctcggtgagtgaggctttcagcgccgggctcaaggtctccttcgccaacttcatccagtacctcctggacccacacacggagaagctggcgcctttcaacgagcactggcgacaggtgtaccgcctctgccacccgtgccagatagactatgacttcgtggggaagctggagacgctcgatgaggacgctgcccagctcctgaggttcctcaaggtagactcccagctccacttcccccccagttatcggaacaggacggccagcagctgggaggaagactggtttgccaacatccccctggcatggaggcaacagctctataaactctacgaggccgactttgttctctttggctaccccaagccagaaaacctgctcagggactgagcccccagaagccctcacgctgcccccaacaaattgaatggctgtcccatgaggccgtcctttgaggatgggaccctgtggcctcctgggttctctcctggcttcctttgcttcctggtgtgacaggcagaggattccacgcctctcgcatctggagaccgtggtacagccaagacccaagcacctcactctccagagttttgcgctccccacccccgcccttttgcaatctggatttgtttactccacagcctgtattcatggaacactgtgttaaatactgttttctaagattaatatatttcagatatatttaatacgaaagtgggaggaagctggagtaaagtgtggcacccgcaaaaaaaaaaaaaaaaa

SEQ ID NO: 1583 - DNA, 2293 bp, Mus musculus
gccgcagagagtgcgggctgcggccaggagcgctggacgcgcggccgcatacggagccgggccgcacgcgcgaggccgcgccaggcgacgcggagtccagtcaccacaggctcggccaggccagcatggtggaccacctgcttccagtggacgagaccttctcgtcaccgaaatgctcagtgggttacctaggggacaggctggccagccggcagccataccacatgttgccctcgcccatctcggaggatgacagcgatgtctccagcccctgctcttgtgccagccctgactcgcaagccttctgttcctgctacagtgcgggtccaggccctgaggcccagggcagcatcttggatttcctcctgtcccgggccacactgggcagtggtggtggcagtggaggtattggagatagcagtggccctgtgacctggggatcatggaggagagcctctgtgcctgtgaaggaggaacatttctgcttccctgaatttctgtcaggggacactgatgacgtctccaggcccttccagcctaccctggaggagattgaagaattcctggaagagaacatggaggctgaggtcaaggaggccccagagaacggtagcagggacctggagacctgtagccagctctcagctgggtcacaccggagccaccttcatccagagtctgctgggagagagcgctgtaccccaccaccaggtggcacgagtgggggtggtgcccaaagtgcaggtgaggggccagcacatgatggccccgtgccggtgctactgcagatccagcctgttgctgtgaagcaggaggcaggtacagggccagcctccccagggcaggccccagagagcgtcaaggtcgcccagcttctagtcaacatccaggggcagacctttgcactcctgcctcaagtggtaccatcctccaacttgaacctgccctcaaagtttgtgcgaattgcgcctgtgcccattgccgccaaacctattggctcaggatccctagggcccggccctgctggcctccttgtgggccagaagtttcccaagaacccagcagcagaacttctcaaaatgcacaaatgcactttcccaggctgcagcaagatgtacaccaagagcagccacctcaaggcccacctgcgtcggcacacaggcgagaagccctttgcctgcacctggccaggctgcggctggaggttttcccgctcagatgagttgtcaaggcaccggcgatctcactcgggtgtgaagccgtaccagtgtcccgtgtgcgagaagaaattcgcgcggagtgaccacctctccaaacacatcaaagtgcatcgcttcccacgaagcagccgcgcagtacgcgccatcaactgagcgcagtggccgcccttccctcccccagctccacgttttgtttttaaatgcaataacttattgcctcttttcagaaggatgtgacaatattaccagccccctcccccttctgaatcttaggaggtatgacccagagccaccatggctgcctttctggggaagacctagagtccctatggtccctgggggctggttccccggtggcccaggtggcccaggcaggcctgtgcccttgtgcctttgtgccttcctgccagctggaagcagtgtttgggggcccttgccctcttcccactgggctccctacctgggccaaagtcaacatcattgctggggaagaagtgttttggctgtgtcaaaatagtagctcccagaggaagcaagccatgctgggaaaaaggaagtgggtcaaaaaagcgtagggctgcactgtgatgtgaggaccgccatatgcaagaggcctttgagggtccaggaggatggccaccctcgctctaggccgtaatgcatgtgcttaaatgcaagacaaatggagccatagccagccgtacccagcctggctcaccctcctccagacaccagacaccagcctcctggttgtggtgagaggagaagggaacaggtctggtggatgccaagcaactagttagtgcctcccagtctgacctagatttgcattcctcatcaggactagaaattagtaccaattgaactagcttgttttgacaggtctatttcacatcctatgaatgtatgtaaataaactgtacataggtacgcatctacataaaatatcttttaataacacgttgacatttgtgtaaatttgaaatttaaaaaaattctataaagttggtgtacatatgttacaattatgtatattttctttggtccttcataaaaaatatatttactttgcc

SEQ ID NO: 1584 - DNA, 959 bp, Mus musculus
gagacaccccagaacctggggagggacagcccagggccaggcttcatgcagtggcacagaagacccacacccctgcagacccacacccctgccccagtgagctctggggtgccagacactggtttctatctcatggagctatcagatgagacgtctcgatcggagtcctcagtctcactcggcggtggcggcgggtcgctaagcgggaccgcagtgaaagcaggagactttctagaaaaaaacaccagctgtcaccttggaccaagcaggaaggctgcagacttctaagcttgctttctcatggccttctgaggtacagggggtgccaggcaagggctggggagggaagaagacacttcccttttcaacttgatggggagcagtgcctctcttatcttggggggctctgagaggctcagagatcagaaaagtgcgaagtcacagcacggagatgccccctgagccacgctggggccttagcttcttgtccagcagtaatctggtatgggggtgggggctgctggaccccaaaactcctgggtgcaagcaatcctcttgcctccaaagtggctggggtggagccacagatctcttgtaagcatgcacactatactcagcttgatgtaatttgggagattgggttgggttttttgttgtctttgagacagggcctgtacgcattcctgtctggcctggaactctatacagaggtgaggctggcctggtacttggagtacctgcctgttgcttctatgcatttgaatgacagatatgcgctagcacacctgacttactgtagtttcttggattttgtttgttgttgctatttggtttgtttgggacaaatttttgctgctgtcgtccaggacagcctaaaactcatgacaatccttctgcctctgccttccaagactgaaactgcagacatgtaccactctgcctggtttgcagtaaatttc

SEQ ID NO: 1585 - DNA, 2295 bp, Mus musculus
ggcccgaggagggcagccccagcccgggcgagcgcacgagtgggtacggccgcgcgggtagcgccctgagcctgtcccgcgccgccgcccggccgacagcacagcgcccggggatgccccggcggcccggagcacgctgaggctgcggaaagcgcgactgccaggaactgttgctgctgccgccaccaacccccatggcctacattccggatgggggtgctcctaccgctggggccatccccttgggttctcagtgctgtgtgtgcaaagtggagctgtcagtgagcggccagaacctgctggaccgggacgtcacctccaagtctgaccctttctgtgtcctctttatagaagacaatggcaggtggatggagttcgacagaacagaaacagccgtcaacaacctcaacccagccttctccaagaagttcgtgctggactaccacttcgaggaggtgcagaagctcaagttcgccctgtttgaccaggacaagtccagtgcccagttggatgagcatgatttcctgggccagttctcctgcagcctgggcacgattgtcgtcagcaagaagatcactaggcctctgctgctgatgaatgacaagccagcggggcagggcgtcatcacgattgcagcacaagagctgtcagacaaccgagtcatcacactgagcctggctggcaggaaactggataagaaggacctctttgggaagtcagacccttttcttgagttttacaagccaggagatgatggcaaatggatgctggtccataggacgtaggtgattaagtacaccctggacccggtgtggaaaccattcactgtcccgttggtgtccttgtgtgatggcgacctggagaagcccatccaggttatgtgctacgactatgacagtaatggaggccatgacttcatcggcgagttccagacctctgtgctgcagatgagcgaggctcgggatggtgtcccgctggagatagagtgcatcaaccccaagaagcagaggaagaagaaaagctacaagaactcgggcatcattattctgagatcatgcaagatacaccgaaactactcattcctggactacattctgggaggctgccagctcatgttcaccgttggaatagacttcacagcctccaatgggaatcccctcgacccttcttctctccattatatcaaccccatgggcaccaatgaatacttgtcagccatctgggcagtgggacagatcattcaggactacgacagtgataagatgttccctgctctgggatttggggcccagttaccaccagactggaaggtgtcccatgagttcgctatcaacttcaaccccactaaccctttctgctcaggcgtggatggcatcgcccaggcgtactcagcctgtctgccccacattcgcttctattggcccaacaaacttctccccgatcgtcaaccatgtggcccggtttgcagcccaggccacccagcagcagacagcaacgcagtacttcatcctcctcatcatcaccgacggggtcatcagtgacatggaggagactcggcacgccgtggtgcaggcctccaagctgcccatgtccatcatcatcgtgggtgtgggcaatgctgactttgcagccatggagtttctagacggggacaaccgtcgactgcgctcacacacaggcgaggaggcggcccgagatatcgtgcagttcgtgcccttccgagagttccgcaacgcagcaaaagaaacgctggctaaagcggtgttggcggagctgcctcagcaagtagtgcagtatttcaagcataaaaacctgccccccaccaactcagagcctgcctgagcccatgcccagccgcagcatgccagctgagcccccggcctccccaggaacatgcacgttcaccccgcttcctcgtgggtggctttttttttttttttaaaaccagtccacgttttcattttttacaactggacctccacccacaacttccccagcccagctgggctccctttgtcagagtcaatggatgatgcttccaggacaaatcggcttcctctccccaccctcctgccactctaagtattgaatgtactttgtataattttagtggaattattgttattaaagagaataaaatttttacaatcataactggctttttctaagtaactagctgcaagaaggaatgtatatcccttactgcatactttgtatggtggtctgctgtttttatacttgtgactgtgttctatttgtaaaactcagggtaataaaggagtttcagatgttggc

SEQ ID NO: 1586 - DNA, 2929 bp, Mus musculus
  misc_feature 624: n = A,T,C or G
ggcagctcccggcgtgccctgccatctctgctgcccgccgccgacccctccttcttctcgtcccagtgccaccgagccggagtccgagccaccgccgccgcagccacttcagccgcgggcactatggcatctggagttacagtgaatgatgaagtcatcaaagtttttaatgatatgaaagtaagaaaatcttctacacaggaggagatcaaaaaaagaaagaaagcagttctcttctgttttgagcgatgacgaaagacaaataatagtagaggaagccaagcagatcttggtgggtgacattggtgacactgtagaggacccctacacatcttttgtgaagttgttgcctctgaatgattgccgatatgctttgtacgatgccacgtacgaaacaaaagagtctaagaaagaagacctagtatttatattctgggctcctgaaagtgcaccgttaaaaagcaggatgatttatgctagctctaaagatgccattaaaaagaaatttacaggtattaaacatgagtggcaagtaaatggcttggacgatattaaggaccgctcgacgctgggatagaaactggggggcagtgttgtagtttcccttgaaggaaagccactatnaaataatagccaagtgccatttgatcttaaggggcttacacgtatctctccagctcagtccactggaattgtattaggttttgtttttttttgttaattcccttttcactggtcccgttcgtgaatgagtgaatataagaagcctgtcagtattgccatgagactgtttcatatggttacttttctgtattcccaaggaatgccttcctgtcttattttagccaaaacaaactggttccatgccttccttgcagtgaacgttacaatggatgtggttgtcaatgtgaatagcttagagtactacaaagggtaagctaactgaatgccttgaaaatattatccactggtcggtcatatgggagacttgtttcagtattatttatagttgcacttgattaccgtcctctgaggcactggagccttcatacacctcacctgccttggcaagcctatttttgtgacctggcagcacagatttaacactattcgttaaaagcactttttttttaatgcgtttaatcccttataaagaatgccaattaagttttattacctgtcatcaatttatcctagtatctcagtgttcattcttcttgccttcatatttttttcaaagaaacagctgtgctaatgtctttggtttcccgatgagtgtacactactgtataatttatgtttaccatatgagtcttgaaacactacagatattttgaatatcagtcatggtggcaatttctgtataaaagagccttaaatggaacattgttttgagatcaaactccctaccctcacaaaagtggccacgttgcaataaaaattgtggcagattacagaatgttgccttgttttccttggaaattttgcaaattgttatgtgaaattttagggtaacggtgattaagctctgcactggtatttggaattttttttcctttaatctttggtttaaaaacatcttaaaatcacttatatacaatcattaaaagagtggtaattttataaatgcttatttatgttataaaatggagatcagaaaaaaattctttttgcactttggcctatccagtatcttatctatcctctagataagctaggatattaatccagagttacattactgagaattgagtagtataagtaggatgtttttattacttggtcataatgaaaataatttgtaaaatgtcattcgaaggttaatgatgattgtgatgtttaggaatgtttgtctcagccacagttccttcatagcttttccaaaatgaattgggaaaaaaaaatcgtatagcagtcttaaagcttagtaatggaacttggctgtggcccagagctttctccttatagagaatttgatctgctccgtgtgcgctctctgctattagccggagctatttatggcaaacacatgcttttgtatcttgtcatagtcatccacagatggcaaaactggacttgattctactggcatgtaagacaggcgtgctagtgagcagtcgtgtgtggctctggactctgaccccagagctctgaagaatgctcttatcagaagataggaaatgaaaatatccttttttaaaatatgtggaagtaatttgggtataattagtttttttctaccttttggaaagttgtttttttgttgtttttttttttttcccagatgagaacattaacatagtggttaaatgtctaggcttccatttaaaactacacaaatgacttgggatctttttagcactaaggaatttgatttcagccttccagctgttgctgtgagttgttccagacctttctgtggctttttggtaaggctgcttagaagcatgagaagcatgagaatggtaatgtgtgctaaacctatgtttaaccaatctttgcaccaaaggactttttcaccaatttattttgttattcttccaaatattaagtgatttctaaaaggtaaagggtgaccttttgtttttatatctaatttctcaatttctttatatgcatttttagaataatttgagagattaaatgctgcttgaaactattatactttgagttttagattggccaaatacattaatgtagttaaattcatctttaaagtacacatatgtgcctagagccaaaaaataataatgatttaatttatgaccttatgttgagactaatttcacatcttattttgcagtcatttacagtgaaacaatgttccagctagctttaaaagctatacggtgctaattagtaaaatattgagggcaatattttactgctagcttgcaaaattataagtgttttaaaaataaaatacatg

SEQ ID NO: 1587 - DNA, 3397 bp, Mus musculus
gactctcctcaggctcatcaaaactccacccgagcctcacgaacgtccttacttcctctcttcctggtagcagccttgcagtcccgagctcgggggacctcacgtctagcctggaaccgagggtaccgcgccgcggcggacctgcccgcctaacgtcgctcgcttcccattcgctctcccgcgcggctgactttaaatctgaccccaggacctcgtcgtcgaggtcgggcctcgcgacaccaccgccggagttggaaagcgaaaccgctctgctctgcgagcggcaccgcccgcgtccgcccctgggaccgcgcgtaagtttcgattctccgtgaagccgagtcccgcgcagcggccggagcagcggcagccatagcgcgccatgacggatcccgaggtattctgtttcatcaccaagatcctgtgcgctcacgggggccgcatgaccctggaggaactgctgggtgagatcagcctccccgaagcgcaactctacgagctgctgaaggcagcagggcccgatcgctttgtgctattggagactggagaccaggccgggatcactcggtcggtggtggctactactcgagcccgcgtctgccgtcgcaagtactgccagagaccctgcgacagcctgcacctttgcaagcttaatctgctcggccggtgccactatgcacagtcccagcggaacctctgcaaatattctcacgatgttctctcggaacagaacttccaggtcctgaagaatcatgagctctccgggcttaaccaagaggagctggcggtcctcctggtccaaagcgaccctttcttcatgcctgagatatgcaagagttacaaaggagagggccgcaaacagatctgcgggcagccgcagccctgcgagagactccacatctgtgagcacttcacccggggcaactgcagttacctcaactgtctcaggtctcataacctgatggacaggaaggtgttggccatcatgagggagcatgggctgagttctgatgtggtccagaacatccaggatatctgcaacaacaaacacactcggaggaacccccctagcatgagagctccccacccacatcgcagaggcggggcacacagggacagaagcaaaagcagagaccgcttccatcacaacagtctagaggttctctcaacggtctcacctctgggatctggtccccctagcccagatgtcaccggctgtaaggatcccctggaggatgtgtctgcagatgtcacccagaagttcaagtacctggggactcaggaccgtgcacagctttcctccgtctcatctaaggccgctggtgtccgaggacccagtcaaatgagagcaagccaggagtttttggaggatggggatccagatggcttgttttctaggaatcgttctgattcgtccacaagtcgaacctctgctgctggctttcctctcgttgcggcacaaagaaatgaagctggggccatgaaaatgggcatgccttcaggacaccacgtcgaggtcaagggcaagaacgaggacattgatcgcgtcccgtttttaaatagttatattgatggggtaacaatggaagaagcaacagtctcaggaattctaggtaaaagggccacagacaacggtctggaagaaatgatactatctagcaaccatcagaagagtgtggctaagacccaggatccccagaccgctggcagaatcactgacagtggccaagacacggcattcctgcatagtaaatatgaagaaaacccagcgtggccaggtacatctacccataacggcccaaatggctttagtcaaattatggatgaaacgcctaatgtctctaaaagtagtcccactggttttggcataaaatcagcagtcactggaggaaaagaagcagtctattctggagttcagagtctgagaagccatgtcctggctatgcctggggagaccactactcctgtacagggcagcaataggctgcctccgtcacctctgtcttcttccacaagccacagagttgcagcctctgggagccctggcaagagctccacccatgcctctgtgagcccagccagtgagccctcgaggatgatgatgatgatgtcagaccctgctgagtattccctatgctacatcgtaaatcctgtatctcctaggatggatgatcatggcctgaaggaaatctgtctggatcatctgtacaggggctgtcagcaggtcaactgcaacaagaaccacttccatctgccctaccggtggcagctgttcatattgcccacttggatggactttcaggacatggagtatatcgagcgggcctattgtgatccccaaattgaaatcattgtgatagaaaaacatcggatcaatttcaagaaaatgacttgtgattcctaccccatccgtcgcctctccactccttcatttgtcgaaaaaacacttaattctgtcttcaccaccaagtggctttggtattggaggaatgaattgaatgaatatactcagtatgggcatgagagcccaagccataccagctccgaaattaattctgcatacctggagtctttcttccactcctgtcccaggggagttttgcagttccacgctggttcacagaattacgagttaagctttcaagggatgattcagacgaatatagcttccaagactcaaaggcatgttgtgagaaggccagtttttgtttcttcgaaggatgtggagcagaagagaagaggtccagagtaagtgttcagcagctgttagctcaggccatgatcttgctgcgtcatgctgcgtcatgctgtgtcatgcatctggaggtctgtgttcttgggaagttcctgcctctgtcttactgtagtttctgtttgatttatctatgagtaaggaaattgttaagcagtgtgacataactgaaagtttcctggccaggggactagggagtgcaagcacttggttaagctttgtgtaacagatacaaggccttgggtttagagtgtaggaggaagggatgctataccatgaaaccagcatccgcctttagcttacaggctatttagctgctcgctctcatctgcactctgggccttacttgctccagctgcgactggctggatcaaggagtgtacaagtgtatacactggatttttgttttgttgggggtcctctctgtgtctttggttgtgctgagaggacaggaggctgagaaagaggcttaagttagtagcctggggaaagagctggagagatgaagttcactaaaggcattggtgttagatttaatcgacttgtaatcattgtacccatggggcatttcaaggtgggttttgctgtggggaattcattgtaacttgcctgtctctatgaaactcagtaaaatctcattgttcg

SEQ ID NO: 1588 - DNA, 2217 bp, Mus musculus
aattcggatccttgtgacgtcagcacgggcggaaactttaaaattcaaaccgccttgggttgacggaagcggacctctggattgggcggctgttttcgtgtgcagtcgtgcggtttacggaaagctgggcgccgggtctcgttgagaagctgagcgaaaggttgcgagaatgaagcgcagttcagtttccacctgtggtgctggccgcctctctatgcaggagttaaggaccctggacctcaataagccaggcctttatacccctcaaaccaaagaaagatcaacctttggaaagctgagtacacacaaaccgacatcggaaagaaaagtctcaatatttgggaaaaggactagcggacatggatccaggaatagtcaacttggtatattttccagttctgaaaaaatcaaggacccaagaccacttaatgacaaagcattcattcagcagtgtattcgacaactctatgagtttcttacagaaaacggttatgtgtatagtgtatccatgaagtctctgcaagctccatccactaaagagttcctaaagatcttcgcctttctttatggctttctgtgcccgtcgtatgaacttcctggtacaaaatgtgaagaagaggtcccaagaatttttaaagcacttgggtatcccttcacactgtccaagagctccatgtatacagtgggagcccctcacacgtggcctcacatcgtggctgccttggtgtggctcatagactgcatcaagattgatactgccatgaaagaaagctcacctttatttgatgatgggcagctctggggagaagagactgaagatggaattaaacacaataagttgtttttggagtacaccaaaaagtgctatgagaagttcatgaccggggccgacagctttgaagaagaggatgctgagctgcaggcgaagctgaaggacttgtacaaggtagatgcatctaagctggagtcactcgaagcagaaaacaaagaactaaatgaacagattgcaagactggaggaggaaagagaaagagaaccgaaccgtctgatgtcattgaagaaactgaaagcgtccttacaagcagatgttcaaaactataaagcatacatgagcaacttggagtctcatttagccgttctgaaacagaaatcgaatagtcttgatgaagaaattggtagagtagaacaagaatgtgaaactgttaaacaggaaaacactcgactacagagtatcgttgataaccagaagtattcagtcgctgacattgagagaataaatcatgagaaaaatgaattgcagcagactattaataaattaaccaaagacctggaagccgaacagcaacagatgtggaatgaagaattaaaatacgcaagaggcaaagaggcgattgaagcgcagctagcggagtaccacaagttggctagaaaattaaagcttatccccaaaggtgctgagaattccaaaggttacgactttgaaattaagtttaatcctgaggcgggtgccaactgccttgtcaaatacaggactcaagtgtatgcaccgctcaaagagctcttgaatgaaagcgaagaagaaattaacaaagctctgaataaaaagaggcatctggaggatactttagaacaactgaacaccatgaaaacggaaagcaagaacactgtgaggatgctgaaggaggagattcagaaactggatgaccttcaccagcaggcagtgaaggaagctgaggaaaaagacaagaagagtgccagtgagcttgagtccctggagaaacacaagcacctgctggagagcggggtgaacgatggcctcagcgaggccatggatgagttggacgctgtccagcgggaataccagctaactgtgaagaccacaactgaagaaagaagaaaggtggaaaacaacttacaacgtcttttggagatggtcgccacacacgtagggtctttggagaaacatcttgaagaggagaatgctaaagccgacagagagtacgaagaattcatgtctgaagatctcctggaaaacatcagggagatggcagagaagtataagagaaatgctgcccaacttaaggctcccgacaaatgaagataaactaatctttcatagatataacatagtattttatccccaaattatgataacatggtaaattgaccttttagacatatcagaagttaataaagtatacttgtaaaaaaaaaaaa

SEQ ID NO: 1589 - DNA, 3206 bp, Mus musculus
tcgagaagccatcctggcttcaagatcttcaggggatccagacatgtccgaagtgagtggagccgaaagaaggccggggcccaaagtggctgctcatgagcccgagaagcggagtgatggcaggaaaaaccccgaggcgcggggggacgcgggctgggcggacccccgcactgggctcagcctgctgtctctggcgatgaccctgggcctggcctggcttgtatttcaacaatcagaaaagtttgcgaaggtagaaaaacaataccggttactgcaaacagagagcagcgagtttcagggcctccagagtaaaatcagtttaatttccagcaagcttgagtctactgaaaataccctgcaggaagctacatcatccatatctttgatgacccaatttgaacaggaagtatctggcctccaaagatccatacgtgatattgagactagcgaagagatgctcacacaaaagatgcaaaaccttaatgagaaattccagaacattacagacttctggaagagaacactggcagaaatgatcgatgacacagccgtcttcaaatcagaagtgaaggatacacattctgaagttaccctgaagattaactccgcggatcaagaaataaaatcgctcactgaacgtctaaaagatttagaagacagcacactgcgaaacatcagaacagtgagcaggcaagaagaggaagatcttctacgagtcgaggcccagcttagctctgataccaaagcagttaagaagctagaagaagaacagcacacgctcctagccagagacgaagatctgaccaacaaactctccagctacgaacccaaagtagaagagtgcaaggcacacttcccgaccatagaaaatgctgtccactcggttctcagagtctctcaggatctgatagggacagaaaggaagatggaggagctgacgatgcagatgttcaacatggaggacgacatgctgagggctgtgtctgagatcatggagatgcagaaaaccctggaggggatccagtatgacaacagcttactaaagatgcagaacgagctggtcgttctaaaaggaaaagttcatgacttcatagcatattcaagtgcacgggaaaaggggactttgggagagtatagcctaggaaataagggaactgatgagtattaaatatactgcacaccttctgatgggctgcactaccaagtgggaatcattcactcctacattttttaggtttttttttttgatctgcctcatgttactcgagaataagtggagtgtgcgccatatggagtatgcatctaatcaaactttttcgtctttttaatcttaaaacttactttaactatgttcatagcaattcttctaaaatatatattgctccacttttttaggcagtatatttaatatttacatgtctttccaatgattaatagacattatgagttgcattattctatctatctatctatctatctatctatctatctatctattctggagatagacagacagataatctgtagcaaatattaaaacctcttaccatttcactgtgaccctcattatctgttttctaagctatgtctgtttctcacaacttttctgtctcctgctcttgcagccagttggtaacataccttcctctcccaggtttttggggctctttttttttttttttaaattcagacaaccaagttcattggaagtgtatgtaaaatagaaggtaaccttcctgcaggagaaccaaggggctctcctgtgaggtagtgccacgttatgaaaactatgaaaactgaaaagtatcctcccttttgcaaaggttctaagctgtgttacagatacttacaagaggtttaagatgtgagtgaacgtgtccctattgtgttctcatttatagccttttctatgaactggtgatgttttgaagtatgagtttatgaagtctctttgtgaacctggacttttatttctaaagtttgaactgtgtgacactagagtttactgaatacaattaatagatgcttaaaataagaacatgttgggcctgtgcctattttaaagataaaataacatagcaataaattgtgataatgacatatttacatcattattttaaagattctccaatgtatgaaactaaatttgtttcacatattaattttttaaaaagtagggctggagctaagtacggtggcgcacagctttgataccagcactccagaggtaaaggcagtcggctctctaagttcaagatcaccctggtctacatagtaagactgtgtctcaaaacaaaacaaaagaaaaacaaaaattaggacaaggagatagttcaataaatgagaggcttgctgtgtaagcacaaggaccaggatcagggtttaatacccgacactgacataaaaagctgtgtcttgccgggcgtggtggtgcacgcctttaatcccagcacttgggaggcagaggcaggcgtatttctgagttcggggccagcctggtctacaaagtgagttccaggacagccagggctacacagagaaaccctgtctcaaaaaataaaaaataaaaaataataaaaaaaaaaagctgggtctagcatcccctgcctataataccagccctggaaaacagagacatgagaaaactattgaacatgtgtgtctgtgtattcctttgctaagaaatttgatgtctcaggggttaagagcactggttgttcttgcagaggacttgggtttgattcccagtgcccacgtgatggctcacaaccatctgtaactcagctcccaggagacccagcacagccttatgactcctgcaagtaccatgcatggcgtgcacgcggtgcacagacacatacaggcaggccactcatatgcataaaataaatgtattttaacttcctgtttaacaaaatcgtcattgtagattaacgtttaacgaattttcctttgtttctttctttctttgtttcgaagggtttttttgttttgttttgttttgattttgagacagaatctcaagatgtagcccaggttagtcttaagtcaccatcttcctgctcctgcgtttcaagtaacagggaccataggtctaaatcatggcacaggacttcatattgttgtgctttatggcaaattcccagtattataatccacactttcgtatctctgtaattgataataaattttatatagcagttagc

SEQ ID NO: 1590 - DNA, 1939 bp, Mus musculus
ttggcgcgagctggctccgcgcgcgttcacgggcggttccccttcttggagggtgcttcgtcccggtgtccagaggccccgctgcccgaccccggcctgcctggcctctgtgaggtccccagcggcccccgccgacccggaacctgggacctcgctgctgcgccacgctgcgccacgcccagcctccccaggtacttgtggcccacacgaccttcatgtggacaatacaacgtgtgtgtggcaaagaagtggctctcttgtgggccacaggaccaagtgctgtttgagtggacacattgctttgtgctcggatcctttagcgttgccatgaccatgcccaccgagggcaccccaccacccctaagtggtacccccatcccagttccagcttacttccgacacgcagagcctggtttctccctcaaaaggcctgggggcctcagtcggagcctcccacctcggccccctgccaagggctgcatccctgtcagccgtctattcccccctcgcaccccaggctggcaccagccccagccccggagggtgtctttcctgtgtgagacctcagagcccctgcagagtcctgggtatgacccgagtcggcccgagtccttctttcagcagaacttccagaggctcagccgcctgggtcatggctcatatggagaagtcttcaaggtgcgctctaaggaagatgggcgactctatgctgttaagcgctacatgtcgccattccgcggccccaaagaccgaactcgtaaactggctgaggtaggtggccatgagaaagtggggcagcatccacactgcgtgagactggagcgggcctgggaggagggtggcatcctatacctgcagacagaactctgcgggcccagcctgcagcaacactgtgaagcctggggggccagcctgccagaggcccaggtctggggctacttgcgggacattcttctggctctggaccatctacatagtcaaggcctagttcaccttgatgtcaagcctgccaacatcttcttgggtccccggggccgctgcaagctgggcgactttggactactggtggagctgggttcaaccggtgctggcgaggcccaggagggagatcctcgctacatggccccagaactgctgcagggctcttatgggacagcagcagatgtgttcagtctgggtctcaccatcttggaagtggcctgtaacatggaactgccccatggtggggagggctggcagcagctgcgccagggatacttgccccctgagttcactgctggtctgtcttctgagctgcgttctgtcctcgccatgatgctggagcctgacccccagcttcgagccacagctgaggccctgttggccttacccatgctgaggcagccacgtccctggaatgttctgtggtatatggctgcagaagccctaagtcgaggctgggccctgtggcaggccctggtcactctgctctgctggctctggcacgggctggtgcatcctgccagttggctgcagcctccaggcccgccggccacaccacttggctctccaccttgcagccccctcatgaacagcaccctctccagcagctgggataatgacagcataggtccctcactctccccagagaccgtcctgtcccggatcactagaagaacctctacccctcggggcaggtacatacctagggatgccctggacctaactgatgtggactcagagcctccaagaggtccctgccccacctttgagccaaggaacctcctcagcctgtttgaggactccctagacccagcctgagcacaggcccagccagccttgatgcttttaaacctctgaccgtcttgcccacctctcccctgaaacttccgtgtctaataaaaagtaatgcgtcttgggaacacccaaggttcttgctcatgtggcagcatagcccctc

SEQ ID NO: 1591 - DNA, 1439 bp, Mus musculus
gggactcgtcatggcgacggagcagaggcctttccacctggtggtgttcggcgcctctggcttcaccggccagttcgtgacggaggaggtggcccgggagcagatagcctcggagcagagctcccgcctgccctgggccgtggcgggtcgctccaaggagaagctgcagcaagtgctggagaaggctgcccagaaactgggaagaccatcactatcatctgaagttggagtcataatctgtgatatcagtaatccagcctcacttgatgaaatggctaaacaggcaaagcttgtcctcaactgcgtaggaccgtatcgattttatggagaacctgtagtaaaagcatgtattgaaaatggaacaagttgtattgacatctgtggggaacctcagtttctggaactaatgcatgcgaagtatcatgagaaagctgcagagaagggggtttatatcattggaagcagtggctttgactccatcccagcagatctaggagtgctatacaccaggaaccagatgaacggtactttgactgctgtagaaagcttcctgacaataaatacaggacctgaggggttgtgtattcatgatggaacctggaagtcggcaatttatggttttggcgataagggtagtttaagaaaactacggagtgtatcatgtctgaaacctgtcccaattgttggtacaaagttgaaaagaaggtggccagtcagctattgtagagagctgaactcgtattccattccttttttgggatctgatatatctgttgtgaaaaggactcagcgttacttacatgaaaatttagaggactcaccagttcagtatgctgcttatgtgacggtgggaggcatcacctctgtgattaagctgatgtttgcaggactgttctttttattctttgtgaagtttagcattggaagacaacttctcataaaattcccatggctcttttcctttggctatttttcaaaacaaggtccaacacaaaaacagatggatgagacatcatttacaatgacattctttggtcaaggatacagccatggcacttgtgttgaaaagaacaaaccaaatatccgaatctgcactcaagtgaagggaccagaggctggctacgtggctactcccatagccatggttcaggctgccatgacttttctgagtgacgcctctgaccttccaaaagggggcggtgtctttacacctggagcagctttctccagaacaaagttgattgacagactcaacaaacatggcattgaatttagtgtcattagcagctccgaagtctaaacgtttgaagactaaccgaatcataaaatgcacaaaccgcgtctgtatttgatatgtgaaattcttctataagcctatctgactgtatgtggactgtcaagtataaaatatctgtacattaaaagcaggaaattatacc

SEQ ID NO: 1592 - DNA, 859 bp, Mus musculus
ggtcgccccctgagcctttgcgggactcggcctctaggtgcttcacctctggctgccagagccggggaagggcgccctagggcagaggcggacgccccagcgctgcagagagaaagtgacgagccgcccctcgttgtcagccaggaacgcggacacagcggcgctcccaccctgctgctgtcgatccctaggccgccgcgatggcagctgccggcgcccgaggcctgcgggccacctaccaccgactcatggataaagtggagttgttgctgccaaagaaattgaggccgctttacaaccacccggcaggccccagaacagtttttttctgggctccaataatgaaatggggattggtgtgtgctggactagcggacatggccagacctgcagagaaactcagcacagctcagtccactgtgttgatggctacagggtttatttggtcaagatattcacttgtaattataccaaaaaattggagtttgttcgctgttaatttctttgtggggtcagcaggagcctctcagctgtttcggatttggagatataaccaagaactcaaatctaaagggatccagtaagagagttcctgatcacctgaacattctagatgtggacagaaacattggaacctagtgtatttgcttaccgataaggtgatgctaaattctgataacattcgaaaagaaggaaagcaaaatctaactgtacttaaaagctagcacttgacttcacaaaaaataaagcaaacttttagtaccagtctgtctttacatttgcctcaaggggacttgcttgtggatggcaccaaccttggtttctaccatttgtccataataaaccgtacttggtcatg

SEQ ID NO: 1593 - DNA, 2478 bp, Mus musculus
tgaggagtctagccagttggtgagcgctgtaatctgaaccagctgtgtccagaccgaggccccatttgcattgtttaacatacttagaaaatgaagtgttcatttttaacattcctcctccaattggcttaatgctgaattactgaagggggttaagcgaaaccaggtgccggcggcgagggctctgcagtggctcccagcacccggcactgtcccggccctccgcgctgcccgctcggcccctccggaaccaagccgccccagtcccaccgcagagcctgccttcctcgcgtcgcttctcctcccgcgcatcttggatatgccaggattaaaaaggatactcactgttaccatcttggcactctggcttccacatcctgggaatgcacagcagcagtgcacaaacggctttgacctggaccgccagtcaggacagtgtctagatattgatgaatgccggaccatccctgaggcttgtcgtggggacatgatgtgtgtcaaccagaatggcgggtatttgtgcatccctcgaaccaacccagtgtatcgagggccttactcaaatccctactctacatcctactcaggcccatacccagcagcggccccaccagtaccagcttccaactaccccacgatttcaaggcctcttgtctgccgctttgggtatcagatggatgaaggcaaccagtgtgtggatgtggacgagtgtgcaacagactcacaccagtgcaaccctacccagatctgtatcaacactgaaggaggttacacctgctcctgcaccgatgggtactggcttctggaagggcagtgcctagatattgatgaatgtcgctatggttactgccagcagctctgtgcaaatgttccaggatcctattcctgtacatgcaaccctggtttcaccctcaacgacgatggaaggtcttgccaagatgtgaacgagtgcgaaactgagaatccctgtgttcagacctgtgtcaacacctatggctctttcatctgccgctgtgacccaggatatgaacttgaggaagatggcattcactgcagtgatatggacgagtgcagcttctccgagttcctctgtcaacacgagtgtgtgaaccagccgggctcatacttctgctcgtgccctccaggctacgtcctgttggatgataaccgaagctgccaggatatcaatgaatgtgagcaccgaaaccacacgtgtacctcactgcagacttgctacaatctacaagggggcttcaaatgtattgatcccatcagctgtgaggagccttatctgctgattggtgaaaaccgctgtatgtgtcctgctgagcacaccagctgcagagaccagccattcaccatcctgtatcgggacatggatgtggtgtcaggacgctccgttcctgctgacatcttccagatgcaagcaacaacccgataccctggtgcctattacattttccagatcaaatctggcaacgagggtcgagagttctatatgcggcaaacagggcctatcagtgccaccctggtgatgacacgccccatcaaagggcctcgggacatccagctggacttggagatgatcactgtcaacactgtcatcaacttcagaggcagctccgtgatccgactgcggatatatgtgtcgcagtatccgttctgagcctctggctaaggcctctgacactgcctttcaccagcaccgagggacgggaggagaaaggaaaccagcaagaatgagagcgagacagacattgcacctttcctgctgaatatctcctgggggcatcagcctagcatcttgacccatatctgtactattgcagatggtcactctgaaggacaccctgccctcagttcctatgatgcagttatccaaaagtgttcatcttagcccctgatatgaggttgccagtgactcttcaaagccttccatttatttccatcgttttataaaaaagaaaatagattagatttgctggggtatgagtcctcgaaggttcaaaagactgagtggcttgctctcacctcttcctctccttcctccatctcttgctgcattgctgctttgcaaaagtcctcatgggctcgtgggaaatgctgggaatagctagtttgcttcttgcatgttctgagaaggctatgggaacacaccacagcaggatcgaaggtttttatagagtctattttaaaatcacatctggtattttcagcataaaagaaattttagttgtctttaaaatttgtatgagtgtttaaccttttcttattcattttgaggcttcttaaagtggtagaattccttccaaaggcctcagatacatgttatgttcagtctttccaacctcatcctttcctgcatcttagcccagtttttacgaagaccccttaatcatgctttcttaagagtttttacccaactgcgttggaagacagaggtatccagactgattaaataattgaagaaaaaaaaaa

SEQ ID NO: 1594 - DNA, 4194 bp, Mus musculus
acatgtaagaagaaggagaagtcaaggcgtctggaaagaattacccagtcctggcttcgagcagcccattgaacgggggacttgaaccagccaaagacttcttcattctgctcttgctagactctgctgagtcttgacccggcttgtaggttgatgtgaaaagagattttgtgtcgtcggagggaaggggattggagcaaatagcaaaacagggggaaaagttaatttatctttaaagcagatataacaaagaattagaagacttaagtgcagcggaaatataaagagaatattagtgaaatttcttctcaaagaggggagaaccaagcatttaaggctcccccatctttttttttaaatgttgtttttaaatttcttattttttttggccggtcgtctcaaattcatctgatttcttattacctcaattttggaaacttccttccacgaccctccgggaccacacagacaggcggaggacgagtctatgagcaggagctgaacaagatgcattgtgagaggtttctatgtgtcctgagaataattggaactacactttttggagtgtctctcctcctcggaatcacagctgcttatattgttggctaccagtttatccaaacagataattactacttctcatttggactgtacggtgcctttttagcctcgcatctcatcatccaaagcctctttgcctttttggaacaccggaaaatgaagaagtcccttgaaaccccgattaaattgaacaaaacggtagcactctgcatcgctgcgtaccaagaggaccctgactacttacggaaatgtttgcaatctgtgaaaaggctgacctaccctgggattaaagtcgtgatggtcatcgatgggaactcagacgacgacctttacatgatggacatattcagcgaagttattggcagggacaaatcggccacgtacatctggaagaacaactttcatgaaaagggacctggtgagacagaagagtcccataaagaaagttcacaacatgtcacccaattggtcttgtctaacaaaagtatttgcatcatgcaaaaatggggtggaaagagagaagtcatgtacacagccttcagagcactggggcgaagcgtggattatgtacaggtgtgtgactcagatactatgcttgaccctgcctcatctgtggagatggtgaaggtcttagaggaagaccctatggttggaggtgttggaggagatgtccagattttaaacaagtatgattcctggatctccttcctcagcagcgtgagatactggatggcttttaatatagaaagggcctgccagtcttattttggctgtgtccagtgcataagcggtcctctgggaatgtacagaaactccttgctgcatgaatttgtggaagactggtacaatcaggaattcatgggtaaccaatgcagttttggtgacgacaggcaccttaccaacagggtgttgagtctgggctatgcaactaaatacacggctcggtccaagtgccttactgaaactcccatagaatatctgagatggctgaaccagcagacccgatggagcaagtcctacttccgagagtggctgtacaatgccatgtggtttcacaagcatcacctgtggatgacctatgaagctgttatcactggattctttcctttctttctcattgccacagtcatccagctcttctacaggggtaaaatctggaacatcctcctcttcctgttaactgtccagctagtgggtctcatcaagtcatcttttgccagctgccttagaggaaatatcgtcatggtattcatgtctctgtattcagtgttatacatgtcaagtctacttcctgccaagatgtttgcaattgcaaccataaacaaagctgggtggggcacatctggaaggaagaccattgttgttaatttcataggacttattccagtgtccgtgtggtttacaatccttctaggtggtgtaattttcaccatttataaggaatctaaaaagccattttccgaatccaaacagactgttctcatcgtgggaactttgatctatgcatgctactgggtcatgcttttgactctctatgtggttctcatcaataagtgtggcaggcggaagaagggacaacagtatgacatggtgcttgatgtatgatgatgtttgtagtcacacctggagacacacacacacacacatcacacacacacacaccttagctcctcaaggggctatacagtattgtggcaccgcaccctgccaccacaggagacatatcactgctgctgggacttgaacaaagacattcaatgggggttggtttcttttttattctgccaaagcaaattgatacatcagtgagaagaaagtccgattaaatctgacagttttaggacggtgggatgatgtcttggcttatgcacttttcccttactgtgcatctgcctgacagtgtttgttctaaatacctcacttgccatgctttgtgtgggtgatcatggaagaaaaggattctgaaaactcaagggaacgttctttcaacctacacatcctaacttatggactcttttgatagctgatgattttctttctattttttgtttttaaggaaaattgttcatctttaccaaatgaaatgccaaaggaaagttggaaagccactggctatgctgtattttgatataataattgtactgtgttttaaattttgtatccggatttttaaaaacaaaatttcacaccatagtctatattttacttctctggcaaaatacacttttgttcttttatatatatatatatatatatataataaaataggttctaaaaaaatccatactataaaaaaaaattaacctgcccaaaatgtgaaacgtggttgactgatgttcatgaaagaataaaatgtttctctctttctctacattttataattgaatagttatttctgtgaaaagaaatgtaaagtttgaatactctaacattttatttcttttagaaagggtcgagatacctgtcaacttttaggtaaaaatacatactcacatgtgtacaagagccaatcattaaagttgaggccgaaagggtagaaaagtgcaatttttgaaaatatatatttttttcaaaagggaatccatgtctttggaaaaagcaaaacaaaatgccgggctccttgtactggataaatgtgaacatccaagccagatcatctggagagatggtggcagtctttgcctaggcctagacaaaatggaaagctggtgagactttatctgtgtgattgggacaaatagaatgcaattcattaaaagttttactctgtggcctaaatgtggcagaccttctcacatgcacaatgagtgtgtttcctccagttagtgtctgggttcgccaagtcaccctgcctgttagtgatgtttacatgggcgaactgtaactgatacacaacacaattcagacctggcacatttatgttcctagtggcttctttacttctcaggaagggtatttttttttctcaattatacaggtaatctctccacttcttccatacttggccttcctaaaaatctccacaagtagaaatgatgtcaacctgtaattactattactaagaactggtaaattaaaaaaagtgacgcaccagttcctccaaacgtgtctaattcagttgtaacagggcctcagttgttaatttgacttttcacatgatttatcttggctggtgctgtgtagggctgtgagacagacactcagaacacaggaatagctgcacagaagccttgtggcgaagcaaaaagagcaccaaggttctgcttcctcactgcgcagactaccacaccacacacaactgtagcgagatactgtctaagggaaagctgcacactctaccttgtgagtacaaagaggttcgttcaagttctgaaaaactccgactctcgccgtatggagagctagtgggaaacaaacacaccctgacaataaatgaaactaaaacttgagtttgcctttttaactatttatgttctaagttaagctttgataacgttcaaatgtcaaattttttctcattcttataaaaagttgaattaattgccttgtatttattttagcaattattcaatgtatttccattataggatgtatagtataattgattgtttttgtaaataaaatatttttgat

SEQ ID NO: 1595 - DNA, 1256 bp, Mus musculus
actcgcgccttaggaagcttgggtgtgtgtggcgcgctgtcttcccgctcgcgtcagggacctgcccgactcagcggctgccatggcatcagatgaaggcaagcttttcgtgggaggactcagcttcgacaccaacgagcaggcgctggagcaggtcttctccaagtatgggcagatctccgaagtggtggtggtaaaggacagggagacccagcgatcccgaggctttgggtttgtcacctttgaaaatatcgatgacgctaaggacgccatgatggctatgaatgggaagtctgtggacgggcggcagatcagagttgaccaggctggcaagtcttctgacaaccggtcccgaggataccggggtggctctgctggaggccggggctttttccgtgggggacgaagccggggccgagggttctccagaggaggaggagaccggggctatggaggtggccgctttgagtcccggagtgggggttatggaggctccagagactactatgccagccggagtcagggtggcagctatggttatcggagctcgggagggtcctacagagacagctatgacagttatgctacacacaacgagtaaaagccctccgcgtccagatcgtccttccatggctgtaattaagatgggggacgttcgctgatcgttgtgtagtgagcaccttgttcccacttttgtagtcctttccgttctgacccgtcagcagcctgcttctgacccaagatggcctcgtgactagacctgtttttaaggaagcgctgtctgtttttaagtattcttaaaaacgttttggaaagcacttcagattttactgtttaccatgagccatgggtttttgttttttctaaattgtcgggttgtgtgggttttggttactcgtttttgttttttcaggttttttggttgtggcttttctttttttttctttttttgtgtggtcgcccctgaagtctggcgccccacccctcctgagatggaatggactcgatttgagcaagccatggccctccagctccccagcccggctgcggagttgcagcaggtcctgcccatcgggcacatgtctcaagcccatggggagcatagcagtccgggaggctgtggaaatgtttatttatattgtccttttttaccgaagacatgcatactccatcgatgttgtattcacagtggctgaggaattcttgtacgcagtttctttggcttcacgttgccgattaaaagaccgtgtgaaatg

SEQ ID NO: 1596 - DNA, 1702 bp, Mus musculus
gagccttctgttgccttgggaacgatcctcggggcgcctaggtgggcccttggaccgggcgagctgccttaggaccgcactccccgcgctcagccccgcttcctgcccacaaccggatgcgtgcgggctgagccccctgcctctgagttcaccccatggttattcctgtaggctatggctatcgccgtttcctgcagcgtcaggctccacctcgcctcaaagtcgacctaagctcctctgtgcagtgcagtaggatggaaaccaccccctcactgctgttcagatgtgcacttcctgtacttcttcaaggacttgtactgagagcttaatgaaaatggacacaattcctgccttcctagagcaaacagactaacagggaagatacctggtttcttccagtttaccctgagttacacgagaagatgaaatacattgccaagaaatgtggagttaggttccagcctccagctgtgatcttgatttatgagaatgaaaccgaaggaaagagccgccagcgtatcatgcctgtccgaaacttttcaaagttctcagattgcaccagagctgcggaacagttaaagaataacccacggcacaagagttacctggaacaggtgcccctgaagcagctggagaagctgtttgtttttttgcgaggttccttgcaggggcagagcttggcagaaacaatggaacagattcggcgggaaacgaccatcgatcccgaggaagacctgaacaaactggacgacaaggagctcgccaaaaggaagagcatcatggatgagcttttcgagaaaaatcagaagagaaaggacgaccccacttttgtgtacgacgtcgaggtggagttccctcaggatgaacagctgctgtcctgcagctgggacacagcgtcagtggatgacttctgaggaagcgctccacgtttcctcagagaacaaagatcagttctagaaaacgctgaaacactagcgatctataaaaccaggacacttccatgtgctacgtaggcctatgagaaacacagaaatacaaggtgggaatctgccttcaaggcgttgacaggcgacagcaaagggaactcaaggacttgtaaaaagatattttaataatattactcaggaaaaagataagagccagattttgacaaaggggaggctttccctcagcggaaaggggcccatgcttggccctgaaatgctacagatgtttttgtagaaatcaagatgaagcaaagagggaagggtgtggtaaagagacaagaaatgggagaatctgagaaatggtgagtaattatagtttgacaagattggaattaacctgtgttcttcaggactctatgtgcattaactctggggtagacaggagcacctgtaaatgcagaacgtctcacagctacgagtacatgtggcggatggcaggcagttctactccgcaatcaggaaatatggtctaacgttactctgaaacccagagccacttcctgcgaaaggctggtttgtacagtggcaagtcctcccacaatgagtgataggtactactgttcagacctgtttgtgagtttagatgtacaaagatctcggcctcacaaatcctctgtgtgcagatgtgtttgttcttactagaatattatctgattgatagaaatcgtatgttttctacaaggaaactattattcattgaataaagctgtgaccgc

SEQ ID NO: 1597 - DNA, 1107 bp, Mus musculus
gtcttttgtgttcgtatccagccaccctatgatggagcggccgccgcgcgccttgctgctgggtgcagcctgactgtttctcttttttctgttcctctcctcttcctcctcttcggatgcctgtgacccgtgcgtgccggcctcctgccccgcgctgtcccggctcggctgcccgctgggtgatactcgcgacgcgtgcgggtgctgcccggtgtgtgctcgcggcgagggtgatccgtgcgggggcgccgcgccggcggggggcactgcgcgccgggtatggagtgcgtgaagagccgcaagaggcggaagggtaaagccggggcagcagccggcggtcccgcgaccctcgccgtgtgcgtgtgcaagagccgctacccggtgtgcggcagcaacggcatcacctaccccagcggctgccagctgcgcgctgccagcctgcgcgccgagagccgcggggagaaggccatcacccaggtcagcaagggcacctgcgagcaaggtccttccatagtgacgccccccaaggacatctggaacgtcactggtgccaaggtgttcttgagctgtgaggtcatcgggatcccaacccctgtcctcatctggaacaaggtaaaaagggatcactctggagttcagcggacagaactcttgcctggtgaccgggaaaatctggccattcagacccggggtggtccagaaaagcatgaagtaacgggctgggtgctggtatctcctctaagtaaggaggacgctggagagtatgagtgccacgcatccaactcccaagggcaggcttccgcggcagccaaaattacagtggttgatgccctccatgaaataccactgaaaaaaggtgaaggtgctcagttataacctgcgaatccatgagcctctgtagctaaaggtgctctcagacagccgacagctataaccctgctattgcctgacacacttctcttaacctaacccactaacactttattacagccagctggttttacacagagaaatcaaagataacacatcaagactatctacaaaaatttattatttacagaaaaaagcacatgtagctttaaacaaaacaaataaaattcttatcac

SEQ ID NO: 1598 - DNA, 3290 bp, Mus musculus
gtgttcgcgcgaaaaccggtggcagctggtgcggtggagctagcgcagacatggcggagtcttctgagtctctctcagcatctagccctgcccgtcagcggcgccggatcagtgatcccctcacctccagcccaggccgcagctccagacgtgctgacgccctgacctccagccctggcagagacctccccccatttgaagatgagtctgaggggcttctgggcacagaggggcccatggaggaagaagaggatggagaggaactcattggtgatggcatggagagagactaccgtcccattccggagctcgatgtctacgaggccgagggattggccctggatgatgaagatgtggaggagctgacagccagtcagagagaggcagctgagcggaccatgaggcagcgggaccgtgaggctggcagaggcctgggacgcatgcgccgggggctgctctatgacagcagcgaggaagatgaggagcggcctgcccgtaagcgccgccacgtagaacgcgccacagaggatggcgaggaggatgaagagatgatcgagagtattgagaatctggaggacctcaagggccactcggtgcgcgagcgggtgagcatggcagggcccaggctggagatccaccaccgcttcaagaacttcctgcgcacccacgtggacagccatggccacaacgtcttcaaggagcgcatcagtgatatgtgcaaagagaaccgtgagagtttggtggtaaattatgaagacctggcagcccgggagcacgtgttggcatacttcctgccggaagcaccggctgagttgctgcagatctttgacgaggctgccctggaggtcgtgttggccatgtaccctaaatatgaccgtatcaccaaccacatccatgtgcgcatctcccacctgcctctggtggaggagctgcgttcactgaggcagttgcacctgaaccagctgatccgtaccagtggcgtggtgaccagctgcaccggagtcctgccccagctcagcatggtcaagtacaactgtagcaagtgcaactttgtactggggcctttctgccagtctcagaatcaggaggtgaagcctggctcctgccctgagtgccagtctgctgggccctttgagatcaacatggaggagaccatctatcagaactaccaacgtatccgcatccaggagagtcccggcaaggtggcggctggccgactgccccgttccaaggatgccattctcctcgctgatctggtggacagctgcaagccaggggacgagattgagctgaccggcatttaccataataactatgacggctcgcttaacaccgccaacggctttccagtctttgccactattatcttggccaaccatgttgccaagaaggacaacaaagtagctgtgggggagctcaccgatgaggacgtgaagatgatcaccggtctctccaaggatcagcaaattggagagaagatctttgccagcattgcaccctccatctatgggcatgaagacatcaagagaggcctggctctggccctgtttggaggggagcccaagaacccaggtggaaagcacaaggttcgaggtgacattaatgtgctcttgtgtggggaccctggcacagcaaagtcccaattcctcaaatacatcgagaaagtgtctagccgtgccatcttcaccactggccagggtgcgtcagcagtgggtctcaccgcgtacgttcagcggcatcccgtcagcagagagtggaccttagaggcgggagccctggttctggctgaccggggggtgtgtctcattgacgagtttgacaagatgaatgaccaggacaggaccagcatccacgaggccatggaacagcaaagcatctccatctccaaggctggcatcgttacctcgctgcaagcccgctgcactgtcatagctgctgccaaccccataggaggccgctacgacccttcactgaccttctcagagaatgtagacctcacagagcccatcatttcccgctttgatgtcctgtgtgtggtgagggacactgttgatccagttcaggatgagatgctggcccgctttgtggttggcagccacgtcagacaccaccccagtaacaagaaggatgaagggttgactaatggtggcaccttggagccagccatgcccaacacatatggcgtggagcccctgcctcaggaggtgctgaagaagtatatcatctatgccaaggagagggtccgcccgaagctcaaccagatggaccaggataaagtggccaggatgtacagtgacctgaggaaggagtccatggcaacgggcagcattcccatcacggtgcgccacatcgagtccatgatccgcatggccgaggcccatgcccgcatgcacctgcgggactacgtgatggaagacgatgtcaacatggccatccgagtgatgatggagagcttcattgacacccagaagttcagcgtcatgcggagtatgcgcaagacttttgcccggtatctctccttccggcgagataacaatgatctgctgctcttcatactgaagcagttggtggctgagcaggtgacatatcaacgcaaccgctttggggcccagcaggacaccattgaaatacctgagaaggatctgatggacaaggccaggcagatcaatattcacaacctctctgccttctacgacagcgacctcttcaaattcaacaagttcagccgtgacctgaaacgcaaactgatcctacagcagttctgagaccagcacaggggcctctatgtctgaatgaggctcggtcaccacgctgagcctacgtcacttcccacttccactggggcttggtgccctgtaggggtgggaggatggcttaatgcagacctttacctgtgagcccctaggccaaggctgtagcattaaatgactatttattcttctgcccccctctagagcactcttcttggccagaccctctgtccaaggctcattagaaggctggggttgtgttcaggtgacagactttatcaaaactattgctgttttggcatgagttgtgtttctggactgttttgttttcccctttagacaaagagcaacttagaagtatttgcaaacttttccaaaacattctcaaagcctgtgatggaggagcacaagaccctgtctgctgagggcccatgctcctctcatgggtttcttcccacctagccagtgccttcatttgcttgttgtacagtttcttgtagtttattttttaatagatttgaataaaacctaaatagcgct

SEQ ID NO: 1599 - DNA, 311 bp, Mus musculus
ttcttttctgtttaggctgactccacgcccctgacgtgtttgccaaatcccatgcccacggcaggtgaccccctaatcgagctgcggaagatggaggccgccgaggacattgcataccagttctcccgttttcggaacatcacctacctgccagcggtccattccgtgcttctccagcttcccctgtgagcccacccggtcctcgccctccatcttgttgaatgactccttccttttcccccaccccagaaattcactgtgaaatttcttgtttggcttaaagtgtaggaaataaaggttaaatcacttct

SEQ ID NO: 1600 - DNA, 3367 bp, Mus musculus
tgagctattccgagctccctgtccaccggcatcatggccaaggggttctacatttccaagaccctgggcatcttgggcatcctgttgggtgtggcagctgtgtgtaccatcatagctctgtcggtggtctacgctcaggagaagaataggaatgcagagaactctgccacagcccccacgctcccgggcagcacctcagccaccaccgcaaccaccacccctgctgtagatgaaagcaagccttggaaccagtatcgcttgcctaagactcttatacctgacgcctaccgggtgatcctgagaccctacctcacccccaacaatcagggcctgtacatcttccaaggcaacagtactgttcgctttacctgcaaccagaccacggatgtcattatcatccacagcaaaaagctcaactacaccctcaaaggaaaccacagggtggtgttgcgaaccctggacggcactccggcacctaacattgacaaaacggaactggtagagcgtactgagtacctggtggtgcacctgcaggggtccctggtagagggccgtcagtacgagatggacagccagttccagggggaactggctgatgacctggctggcttctaccgcagcgagtacatggaaggagacgtcaagaaagtggtggctacaacgcagatgcaggctgctgatgctcggaaatcctttccatgttttgatgagccagccatgaaggccatgttcaacatcacactcatctaccccaacaacctcatagctctgtctaatatgcttcccaaagagtccaagccctatccggaagacccttcctgcaccatgactgagttccactccacccctaagatgtccacatacctgctggcctacatcgtgagcgagttcaaaaatataagctccgtctcagccaatggtgtccagattggaatctgggctcggcccagtgccattgatgagggccagggtgattacgcactgaacgttacaggccccatcctaaatttctttgcccaacattataatacatcctaccctctaccaaagtctgaccagattgccctgcctgacttcaacgctggagccatggagaactggggtctggtgacctaccgtgagagctccctggtctttgactctcagtcctcctccattagcaacaaggagcgggtggtcactgtgattgctcacgagctggcccatcagtggtttggcaacctggtgactgtggcttggtggaatgatctgtggctgaacgagggctttgcctcctacgtggaatatctgggtgctgactatgcagagcctacctggaatctgaaagacctcatggtactgaatgatgtgtaccgtgtgatggccgtggatgcccttgcctcctcccacccactgtccagtcctgctgacgagatcaaaacaccagaccagatcatggagctgtttgacagcatcacctacagcaagggagcctcagtcatcaggatgctgtccagtttcctgacagaggacctgtttaagaagggcctttcatcttatctccacacctaccagtactcgaacaccgtttatctggacctgtgggaacacctgcaaaaggccgtgaaccaacagacagctgtccaacccccggccacggtgcgcactatcatggaccgctggattctacagatgggctttcccgttatcactgtgaacaccaatacaggagaaatctcccagaaacacttcctcctggattccaagtccaacgttacccgcccctccgagtttaattacatctggatcgcgcccattccatttctcaaaagtggacaggaggatcactactggctggatgtcgagaaaaaccagagtgcaaagttccagacatcctccaatgaatggatcttactgaacattaacgtaaccggctactacctggttaactatgatgagaacaactggaagaagcttcagaatcagctgcaaacagacctttctgttatccctgtcatcaaccgagcacagattatccacgactccttcaacctggccagtgctaaaatgatacccatcaccctggcgctggacaacaccctcttcctggtcaaagaggcggagtacatgccctggcaggctgccctgagcagcctcaactacttcacactcatgttcgaccgctcggaggtctacggccccatgaagaggtatctgaagaagcaagttacgcccctcttcttctacttccaaaatagaaccaacaactgggtcaaccgtcctccaacgctgatggagcagtacaatgaaattaacgccatcagcaccgcctgttccagtggtctcaaagagtgtagggacctggtcgttgagctctatagtcagtggatgaaaaaccctaataataacacgatccaccccaaccttcggtctactgtctactgcaatgccattgctttcggtggcgaagaagagtggaactttgcttgggaacagttccggaatgcaactctggtgaacgaagcggacaaactccggtcagccttggcctgtagcaaagatgtgtggattttgaacaggtacctgagttacactctgaacccggactacatccggaagcaggacaccacctccaccatcatcagcattgccagcaacgtggctgggcaccctctggtttgggactttgtccgaagcaactggaagaaactgtttgagaattacggtggaggatctttctcctttgccaatctcatccagggagtgacccggcgcttctcctctgagttcgagctgcagcagctggagcagtttaaagcggataactcagccacaggctttggcaccggcactcgggctctggagcaagccctggagaagacgagagccaacatcgactgggtgaaggagaacaaagatgcggtattcaagtggttcacagagaacagcagttagttcctggttctgagaaccacttgtcccagtatgacacctcttactatctcagcagcctgtgcagggtctctgtcctcagagctccagacaccagcatcctactctcaaggatgaagtctccagcctgtggagccagcctagctcctaactgtcaggctgacggacacctcccaggtcttgcaccctcatgccaactctgccccaggtccaggcctctggggctgatctcagggaagcccagctctgaagctagatttactggacaaagggcagcctggaaagagactccctgaatgctttactatccctgccccctacccccacccctaccccccacgagatccagaaccaaagaatcaacagggcacaagatctatatatatttttaagagaaaatgtaaataaagaatttctaaaatgaaaaaaaaaaaaa

SEQ ID NO: 1601 - DNA, 1326 bp, Mus musculus
cccacgcgtccgctcgaagtgcgtttgggctcgccgttcagtaccgcgcgagtctgtcaggagcaggatggcggcttcaggcgaggcgcgccgggtgctggtgtacggcggcaggggcgctctgggctcgcgctgcgtacaggccttccgggcccgcaactggtgggttgccagcatcgatgtggtggagaacgaagaggccagtgccagcgtggttgttaagatgacagattcattcacagagcaggctgaccaggtcactgctgatgttggaaagctcctaggtgaccagaaggtggatgcaattctctgtgtggctggaggatgggccgggggcaatgccaaatccaagtcgctttttaaaaactgtgacatgatgtggaagcagagtatgtggacatccactatctccagccacttggccacaaagcacctgaaggaaggaggcctcttgaccctggctggggccaaagctgccttggatgggactcctgggatgatcggctatggcatggccaagggagccgtccatcagctctgccagagcctggcagggaagaacagtggcatgccccctggggctgctgccattgctgtgctccccgttaccctggataccccgatgaacaggaaatcaatgcctgaggcagacttcagctcctggacacccttagagttcctggtggaaaccttccatgactggatcactgggaacaaacggccaaactcaggaagcctaatccaggtggtaaccacagatgggaagacagagcttactccagcatatttctaagctgcatctcagtgcctgggagagccctctcgaaacatcactaacctgtctgtattgccgaatctggccccatgttttctgtattcctgtttgtggtaggagataaccagtcttgtttgtttcttacatggcattcctttgttgtcctgggatggtgaggtatgtttatgggaaatgagcagaggcctgtaggtagcacctgagggtccagggaggtatatggacaggcctgcatcacagcatcctagacttctttggagacccgtttgatagtactttcagtttttggcatttggggtactttgaaatccaacttgtttttaaattccatgttggtgccatagatgtagtttttacagcctgaaaattaactgccatgaacattctttggtgatgtaagcaagtaaaacccaatggactctgttgtgatatccttttgtgttccagcctaggctaagtgtttgtgaaagccatttgtgagtgcttggagtgttcttcctaataaacacacttcatgtaaaaaaaaaaaaaaa

SEQ ID NO: 1602 - DNA, 4185 bp, Mus musculus
ggagagagagagagagagagagagagagagatgcgtctcaggatggaggatcttgccattcgtctgcagaacagaggtacattataaagtcaacacttcccgctgcattccatgaggaaaatggatatagcaagtcccccaacttccaaatgcatcacatactggaaaagaaaagtgaaatctgagtatatgcggcttcgacagctcaaacggctccaggcaaatatgggagcaaaggctctgtatgtggcaaattttgcaaaggttcaagaaaaaacccaaatcctcaatgaagagtggaagaaacttcgtgtccagcctgttcagccaatgaagcccgtgagtgggcacccttttctgaaaaagtgtaccatagagagcattttcccagggttcgacagccaggatatgttgatgcggtctctgaacactgttgcactggttcccatcatgtattcctggtcccctctccagcagaatttcatggtggaagatgagacggttttgtgcaatattccatacatgggtgacgaggtgaaggaagaagatgagactttcatcgaagagctgatcaataactatgatggcaaagtccacggtgaagaagagatgatccctggatctgtgctgatcagcgatgctgtgtttctggagctggtggatgccctcaaccagtactctgatgaggaggaggacgggcacaacgacccctccgatggaaagcaagacgacagcaaagaggacctgccggtaacaagaaaacggaagcgccatgctatcgaaggcaacaaaaagagttccaagaaacagtttccaaatgacatgatcttcagcgccattgcgtccatgtttcctgagaatggtgtccctgacgacatgaaggagaggtatcgagagctgacagagatgtcagaccccaatgcacttccccctcagtgcacacccaacatcgatggccccaacgccaagtcagtgcagcgggagcagtctctgcactctttccacacccttttctgccggcgctgttttaaatatgactgcttccttcaccctttccacgccaccccaaatgtatataagcgcaagaacaaggaaatcaagattgagccagaaccgtgtggcacagactgcttccttttgctggaaggagcaaaggagtacgccatgctgcacaaccctcggtccaagtgctctgggcgccgccgccgaaggcacccagtggtcagtgcttcctgctccaatgcatcagcttctgctatggctgaaactaaagaaggagacagtgatagagacactggcaatgactgggcctccagttcttcagaggctaactctcgctgtcagacccccacgaaacagaaagccagtccagccccagctcagctctgtgttgtggaagccccctcagagccggtggaatggaccggagccgaagaatctcttttccgagtcttccacggcacctatttcaacaacttctgctcaatagccaggcttctggggacaaagacatgcaagcaggtctttcagtttgcagtcaaagaatcacttatcctaaagctgccaacagatgagctcatgaaccctgcacagaagaagaaaagaaaacacaggttgtgggccgcacactgcaggaaaattcagctgaagaaagataacaattctacacaagtgtataactaccaaccctgtgaccacccagaccgtccgtgtgacagcacatgcccctgcatcatgacccagaacttttgtgaaaagttctgccagtgcagcccagactgccagaatcgctttcctggttgtcgctgtaagactcagtgcaataccaagcaatgtccatgctacttggcagttcgtgagtgtgaccctgacttgtgcctcacctgtggggcctcagagcactgggactgtaaggtggtgtcttgcaaaaactgcagcatccagcgtggcctcaaaaagcacctgctgctggccccttccgatgtggccggatggggcaccttcatcaaggagtctgtgcagaagaatgaattcatttctgaatattgtggtgagctcatctctcaggatgaggctgatcgtcgagggaaggtctatgataaatacatgtccagcttcctcttcaacctcaacaatgattttgtagtggatgctacccggaaaggaaacaaaattcgctttgcaaaccattcagtgaaccccaactgttatgccaaagtggttatggtgaatggagatcaccgcattgggatctttgccaagagagcaattcaggctggcgaagagctcttctttgattataggtacagccaagctgatgccctcaagtatgtgggcatcgagagggaaacggacgtcttctagccctctgggccccgtgccagtgctgtggtggcagcactgtcatggcttcaggcacacaccactgctgctccagctcctgcaatgtcttccatgctgagaaacccacccaccctgcataactaggcctccactttattccaaggggacacactgcctcaggagaggggaaacagaggcggtgaagacctggtctcccaggagagttcagatgtaagaagctgcgctcccatgccaggaggaggagatggtgggtgtgggataatgccagggcttgagttttcctcagctgccaagccggggaccctcaggaaccaaccagtgctaccattttagctttctcgatcaagagttccatgtcactgactgtgctcagggttaaaggtgagcctggcaagcattgcagacagaactcaaagggagacatgtctccatgccatcaaagcaggaatttaaggatacaggaaggaaaacttaagttctttcatcctgtgaacatagagccagctagacccttgggaaaagcctaccctataggttacaggggtggcagggtggttttcaggctcccaggacatgtgccagtgacccactccttccaaagttctggctcagtggcaacatgcctaagctgcggctatgcctggttgggagtgagtactcggggtcagtgaagctgcagctgtccctaccctccattcctcagcggcttgtccatggagcagcttgctgctttcttcagggtagctgggcctaatctaggctagaggaagatgttgctggtctggtttactccctgtctgtagtacctgctgttggttgtgtttgtgggtgtgtgggtgccattgcacatttaggagtgtgtcacagtgcagggtagactgccaggcagaccaccattctctgggattcatagagaacaaagcactttaactctcttttagaaggtttatagattggagtggagtttgagccaagtctctgcccgaatcccacttctgaaggaggaagaggagagtggaagatcctgcagtttaatatcattttctgagaggcaggaggagctgacttgacacaaaaacaaaaactagtcagcatagctaccttgtgtctggtgtgctgagaataggggcttgtgctggaaggggcgtgggtggatacagactgccctagagtgttagaatggggcacaagctccttgcttcctgaagaaccagagctcctgtggcccttgctaaccattcccttctcccacactgcctcttagagatttgcatgggacgtgcatgcttgtgcacatactccttcactacactggcaggtccgtgtgtgcctcacactcagcacactctacagctcctctccccacacccagttctgaaactgacatctgctggggggttatgtctattgtgtgtatcagggataccctccagcctaacgataggctctgaattactcagtctctgggaaaccagagactggtggaggaggggctggtcatgaggatgctttaaaacatgtcggttctagactgagctcagccttccctcagcaggcatcactggcagcccctccctccgcagttcaggccaataatactcatgcgctccagccgcccactcttggttcctgctgtcctctatttttaatgacgggtttcacccctcctctccacttctgccccacgtcacgtggtagataaagtgaggtgctgtggactggtggggaactggcgtacctgcggcttaattgccagtaaatttcttgcactttaaagtcctgtggcttgtgacctcttatctaataaagtgttaagactcc

SEQ ID NO: 1603 - DNA, 739 bp, Mus musculus
acgggcgacacggccgagggcacctggtcagggtcgcggctaccgccgtcatgccggggatagtggagctgccaactctggaagagctgaaagtggaggaggtgaaagtcagctcagctgtgcttaaagctgccgcccatcactatggggctcagtgcgataaaaccaataaggagtttatgctgtgccgctgggaagagaaggacccaaggcgctgcctgaaggagggcaagctggtcaacggctgtgcgctgaacttcttcaggcagataaagagtcactgtgcggagcctttcacagagtactggacttgccttgattactccaacatgcagctgtttcgtcactgccgccagcagcaggcaaagtttgaccagtgtgtgctggacaaactgggctgggtgaggccggacctggggcagttgtctaaggtcaccaaagtgaaaacagatcgtcctttgccagagaatccttatcactcaagagcaaggccagagcccaaccctgtgattgaaggggatctgaaacccgccaagcacggcacccgcttttttttctggaccgtgtagagatgggttgacggtccacacttggtcacctcggtcatgcgcccagacaacagacgacgaaaacacccgtgccgatctcgtgttctttcctggatcacagacattaacaaaaaagttaatttatgtgacttggcagttattctatacatttcctgtccattataaatttt

SEQ ID NO: 1604 - DNA, 2037 bp, Mus musculus
gagaaaccaggcggcgtgttcccggtatcggtgctttggattccggcgcgcgcgcatccgcactagcctccctcagggcaggcggacggcctcggaaacccctccggatccatggtctctcgtgcagctctgggcgggcaatgccagcatgccaggagccatgtttgatcaggatgacgggacggtcagctgcatcccggggacccttgtaaggacatgagtgcttgagcagaggccaggatgaagctgctcccaggagtcggtgtgttcgggactggcagctcagcccgggtcctggtcccgctgctgagggcagagggcttcaccgtggaggccctgtgggggaagactgaggaagaggcaaagcagctggccgaggagatgaacatcaccttctacaccagccgcacagacgacgtcttgctgcatcaagacgtagacctggtctgcatcaacatcccacctccgctcacccggcagatatccgtgaaggctctaggaattgggaagaacgtggtgtgtgagaaggcagcgacatccatggacgccttccggatggtgaccgcatctcgctactacccacagctgatgagcttggtggggaacgttctgcgcttcctgcctgccttcgtgcgcatgaaacagctcattgcagagcactacgtgggtgccgtgatgatctgcgacgctcgcatctactccgggagcctgctcagccccagctacggctggatctgtgacgagcttatggggggcgggggcctgcacaccatgggtacctatatcgtggacctgttgacccacttgactggccagaaagccgagaaggtgcacgggctcctcaagacctttgtgaggcagaatgccaccatccgtggcatccgccatgtcaccagtgatgacttctgttttttccagatgctcatgggtgggggggtatgcagcacagtgaccctcaacttcaacatgccaggtgcctttgtgcatgaggtcatggtagtgggctccgcagggcgccttgttgcccggggagctgacctctatgggcagaagaactctgctgcacaggaggagctgctggtgagagactctctggctgtgggcgcagggctccctgagcaaggtccacaggatgtcccactgctttacttgaaaggtatggtctatatggttcaggccttgcgtcagtccttccaggggcagggggatcgccgtacctgggaccgcacccctgtctctatggctgcctcattcgaggacggactgtatatgcagagcgtggtagatgctattaaaaggtccagccggtctggggagtgggagactgtggagatgctggcagaggagccagatgccaaccagaatctaagtgaaacacttcagcggaacaacctgtgaacctgcgcatgcgcgcttcctcccaagggccagaggctccagggagggcactgggacctgggattggctgtagcagagacacggtgtcgttttttaaataaatcagcttgggccagggttaggagccaactgaaggtggccaaggaaaacacccatccatccatcattgattcctcagacttgcctggggacccctagctatgacgcacctgctgtcatagcttaggctagcagtgtgtgcaggatagagctgtagcctgaccccttgtggttctgccagtgagcagggccaatgaagatcaatatgggctcttcaggctgagttgtggtctcacaggatgagaaaacccaacaggaactagcttggttgagtccttagggtagatggcaagaaaccttgcctgttgtggaccagggcatctcaggactggagaaggcggtgacaggtcatcccttagggatcttcccccaccctcccattcgatctgatcttttcagcccccttgcaagcccttccaagagaaaaggaggtttctgtgttatacataactctgggggggggggcaacttggcagagagaagacaaaggggaactgtagaacatctgagaaatgtcagtaaataagtcagaaaagaacc

SEQ ID NO: 1605 - DNA, 824 bp, Mus musculus
accgacaggcgggactgtcagagctttagtgtgggtctcctgggggccctgcatacacactgcaccagggttagctcttggattagattgttgttcgctgtcagggttggagggaatctgccactgggtgctcagcagaggagctccttctgaactggatgggctggggagctgctatggtgcaggccagggtggagggggtctgacagcaggacctgctgagccacagggcccgagccgaccccacaagcaataacagatgtggagtgcggtggatgcttggccttttctaaacaggttacatttaaacacgagtttctatttttaagatacagcttatcagggggtgtgtggccgatctcactgcgcattgtctgcttctgtcccatgcccacatgtcagtggccagcactgtgcatgtttcatggtgttcatagttcccagccctggggctccagggggcacctgtgggcaccttgtgctttccttctcgggggagcccagtctgtttgaaacgcaacagagtctggtgttgggaggtgcaggaagggggttgtaccgaaatagtattgcaggccactgagatgaaggcctctctgtaaggaagtggtctgtgtggggtgatgtccacacacagagtggtcacagggcatgtcgctgtcctcaggcctccctggcaagtgcgggaggaagagaggcagtctctttgcaaaacaaagtatttttattcatttgtatttattaaatgaaaaaaaattctctgttgtccctcttctgagatggactttaattgctgttaaataaaattgtgtacctgtcctcgc

SEQ ID NO: 1606 - DNA, 1055 bp, Mus musculus
ccctcaggcctttgagcagggcaacaccagctccagtaggcctcagacaccagtggccacagcaacaagaaggccagagggcacctatgcagggaccttgtaagtggccggcaaggccagctcacaggaacccagtactaaagctgcttgcatgcgttactaatacaaacaaatgtgatcaagccacttacctactgaactgctactgctgcctgacaaaaatgtgatttttattctgcctgtatttaaaatggatgaaggaaacaaatgcattcattatactgtaaacatttaggccgctggccactctctgggacaaaggtcccagggcaactttttgatattccccagctcagtctcccgtggtagtgttctctctcccttcttggggagacagaagagggcaccgggtccctgatgtcctgccctgaccctgcctcatccacccttcttattcccctgctctgaaagcagaagctggggcagcagtggcctggggctggaggggcagacacgacactccattcttaaccataaggaccccactgggacagtggggggaatgctgggcccccagaggccagacttctcttgttttcattcctccgaagaagctgcctgcgtgcatgtatgtatgcgtgtgtgtgtgtgtgtgtgtgcgtgtgtgtgtgtgtgtgtgtgtgtgtgtgtgtgtgtgtgtgtgcatgtgtgtgtatgagtatgtacgcacacacacatgagtgagagagacagagagagagaaagagaaagagggggggcaggaagaccagtgatggccctgcagtagctgtggctggtcatctgggggtgggggaaagatgaggtgttcccccctccatacctgtgtcctcactctgctccacccagacccccagcggctggcctgctgatccccccagggtctctctgcccctggccatggctgtcctcaccaccctctgcctctccagccactctgggattttgcttgtttgctgtttttgtttagttcagatctattttgtttgtggtttggaaactttcagaccgaacag

SEQ ID NO: 1607 - DNA, 2399 bp, Mus musculus
agctgtccagctctgggcagcgtcgcctcagtggcttaggagacggttgcgcaaggagccggccggaggctcggaagagggatgcgcggggcgttgcctccgacccgccgccgccgccgccgcccgaagccccagaggagctgagggaggcgacgccgaagcgctggcccgcagtggcccgggctgcagcgcggccggcgcagtagggcactcgcccgatttgtggaccgacccggctccggcgccgccgatcccggtccggggtccgccccccaggcccggcctcgttcccgattcccagatgagcaccgagggcgggcctccgccacccccgccgcgcccgccgcctgccccactccgccgcgcgtgcagcccggcgcccggcgcgctccaggccgccttgatgagcccgccacccgccgccaccctggagtccacttcgtcgtcgtcatcatcatcctctgcctcctgtgcctcgtcctcttctaactccgtcagcgcctcggccggtgcttgcaagagtgcggctagcagcggcggcgcgggcgccgggagtggaggcaccaagaaggcaacctcggggctgcggcggccggagaagcctccttactcgtacatcgcgctcatcgtcatggccatccagagctcgcccagcaagcgcctgacgctcagtgagatctaccagttcctacaggcgcgcttcccctttttccgtggcgcctaccagggctggaagaactccgtgcgccacaacctctcgctcaacgagtgcttcatcaagctgcccaagggcctcgggagacctggtaagggccactactggaccatcgacccggccagcgaattcatgtttgaggagggttcgttccgccgccggccgcgcggcttcaggcggaagtgccaggctctcaaacccatgtaccatcgcgtggtgagcggcttgggcttcggggcctcgctgctgccccagggcttcgacttccaagcgcccccgtcggcgcctctgggttgccacggtcaaggcggttatggtggcctcgacatgatgcccgcgggctatgatacaggggcgggtgctccgggccacgcgcatccacagcacctccaccaccaccacgtcccccacatgtcgcccaacccgggctccacctatatggccagctgcccggtgcccgcaggtcctgcgggcgtcggtgcggcagcgggtggcggcggtggcggcggggactatgggccggacagcagcagcagccctgtgccctcatccccggctatggcaagcgccattgagtgtcactcgccctacactagccctgcggcacattggagctcgcctggcgcttcaccttacctcaagcagccgcctgccctgacgccaagcagtaatcccgcggcctctgctggtctgcaccccagcatgtcttcctactcgttggagcagagctacttgcaccagaacgcccgcgaggatctctcagtcggactgccccgttaccagcaccactccactccagtgtgcgacaggaaagatttcgtcctcaatttcaatggcatttcttctttccacccttccgctagtggctcttattatcaccatcatcaccagagcgtgtgccaagatattaagccctgtgttatgtgaatggacagaggccttgaaggccactctgctctccctcttctgccttcttctcctctcccctccgagaggggcagccaggaactgcaacggactcacactgtgcacgctggatagcgaatagcagtaagtagcacacccatcacttagacaaatacccaagggagttctgctcaccgatatttgcccggcccctggaagaggaaacctttcgaaagctaatatcccagaagagcgacagacagaggaggtgactacatgtaagacatatgttactgtgtggaggacataaaacttttcagttctggggtggccattgcattcactaatcagggtctgaaaagggaggtgtgtgtgtgtgtgtgtgtgtgtgtgtgtgtgtgtgcttttcaaaattgcagtgctaaaagcacacaatttcaagaaagccttctctagttccctggctcagtaggacatttcttccacccactcccagtcccccaacactcccttcttcggatacaggtgccaaagaacattgtgaagaaatgaagaaccgatagtctagtttaagaaagtggctctcagtattgtgacagtacatttttacaaggttgtttttctaccaccgtatttttaaagtatttttatgatcttcgtatactcacacttcgcttgtattgtaaaaggagggtatatttgcacttatgtatactttgacagtttgccaagatattttgatgtaaggttttttttttttcaataaaatgtgtataac

SEQ ID NO: 1608 - DNA, 1921 bp, Mus musculus
ggataaacctggagaagtgtcagaccagcatggatgagctcctgaaagaaatccaggccatgagccaatgccatcatcctaacattgtgtcttactacacatcttttgtggtaaaggatgagctgtggctcgtcatgaagctgctaagtggaggttctgttctggatattattaaacacattgtggcaaagggggaacataagagtggagttctggacgagccaaccattgctacaatcctccgagaagtcttagaaggactggagtacctgcataagaatgggcagattcacagagatgtgaaagctggaaacattcttctaggagaagacggctctgtgcagattgcagatttcggcgtcagtgcttttttagccactggtggtgacattaccagaaataaagtgagaaaaacgtttgttggcaccccgtgctggatggcacccgaagttatggagcaggttcgaggttatgattttaaagctgatatttggagttttggaatcactgcgattgaactggccacaggggcagctccttatcataaatatccaccaatgaaggttttaatgctgacgctccagaatgatcctccttctttggaaactggtgttcaagataaagaaatgctgaagaaatatggaaaatcatttagaaaaatgatttcattgtgccttcaaaaggatccagaaaaaaggccaacagcagcagaactgttgaggcacaaatttttccagaaagcaaagaataaagaatttcttcaagaaaaaatactccagagagcacctaccatttctgaaagatctaaaaaggtccgcagagtccccggctccagtggccgtctccataagacagaggacggaggctgggagtggagtgacgatgagtttgatgaggagagcgaggaagggagagctgccatttctcagctgaggtctccccgagtaaaagactcattatccagttctgagctcttcgcggcagctgagcccatggggactttgcttcaagttccagaacagatttctgctcatctacctcagccagctggccagatgcccacacagccagctcaagtctctctcctgccccctgcagagccagcaaaaccagcacaggctcagtcttcaggagaacggtcccaggagaccaagatccctatcagtctagtgctaagattaaggaattccaaaaaagaactaaatgatattcgatttgaatttactcctgggagagatacagcagagggtgtttctcaggagctcatttctgctggcctggttgatggaagggatttagtaatagtggcagccaatctgcagaagattgtggaagaacctcagtcaaaccgatctgtcactttcaaactggcatctggtgttgaaggctcggatattcctgatgatggcaaactgataggatttgcccagctcagcatcagctaaaccacagacctggaagagtcagcctaggagatgccacacatgcacatgtctgttgcttctgttggcctgaacctacaactgccaaagaacccagcaacaaacctcccagcttggagctttagtttttttctttgtttttcttgctgccctcctccctgccccccttttcttacaaggaaagaaaagttggatcgtcagtggccagcctcccctcagagagttccgttggtagatacgctgctcatgtcccctctccctccatctgagaagcagaagcggccagtgtgcctcaaggcccaggatggaagactctcaactcattcttgccttactacagtgatggtcccagtggatagagcagctgcactgggcaacctcatcttgcctgctctcccgcacctgctgggacatgagcatcttgggatatctctttaacactcaagtagcaattaaagttgattgttcagctggagccc

SEQ ID NO: 1609 - DNA, 2311 bp, Mus musculus
gagagcgagcggcgcggcgtcatgtgactgcccagagttggtgccaaggagccagaggggagcggggagccgagccgcgcggagccgggccggagcgcagtgcgagcgccacccgagccaaccccacccgcgcgtccgtgcggtcgcggtccctatcccggacgccgtccggcccgaagcgcttgacctgccggcccgcggggttccgggcgccggggagccgggcctgggtttcttggccgctgcgctcggcaccgcgcttggcagagccagacatcagaacaccctagaaggcgtggctgaaaggatgctcatgtttgatccagtccctgtcaagcaggaggccatggaccctgtctcggtgtccttcccgtcgaattacatagaatcgatgaagcccaacaaatatggggtcatttactccacaccgttgcctgataagttcttccagaccccagaaggcctcactcacgggatacaggtggagccggtggacctcacggtgaacaagcggggctccccgcctgctgcgggcggttctccttcctctctgaagttcccgtcccaccggagagcgtcacctggcctcagcatgccctcctccagtccgcccattaagaagtactcgcccccttctcctggcgtgcagccctttggagtacccctgtctatgccgcctgtgatggcagccgcgctgtccagacacggaatccggagcccaggcatcctccccgtcattcagcccgtcgtggtccagcccgttccttttatgtataccagccacctgcagcagcctctcatggtttccttgtcggaagagatggacaattcaaacagcggcatgccagtacctgtaattgaatcatatgagaagcccttattacagaaaaaaattaaaatagagcctggaattgaaccacagaggactgactattaccctgaagaaatgtcaccccctttaatgaacccagtgtcccccccgcaagccttgttgcaagagaaccatccttccgtcatcgtgcagcctgggaagagacctctacctgtggaatccccggatacccaaaggaagcgcaggatacacagatgcgactatgatgggtgcaataaggtctacactaagagctcgcacttgaaagcacacagaagaactcatacaggagaaaagccgtacaaatgcacctgggaaggctgcacgtggaagttcgctcggtctgatgaactgacgagacatttccgaaaacacactgggatcaaacctttccagtgtccagactgtgaccgaagcttctctcgctctgaccaccttgccctacacaggaaacgccacatgctagtctgaaaacctgtctccagctcagtgtgattccccgctcttcctggcctctctctctttctctctctctctcctatctctttctcttctccttctgcccgttatctaactcatttttatatgtacattttaatttcgattcagctggtctggatctctgaatttatatcattcaagacttccatatggtcagtagttgatactctaaccctcccctccttaccacgggtcagacctaaagaatgtgaacattattttttccggggatgctaagcaaaccctccttacagatacatttaatgtaatgagaacaagggaacatgtaaactaacgaccaatttgtcggtttctccatgtattcctcaaaagaatgtcaaagtaaatgtattagaaatgcagtatccagcctattagtccttgccagagaccttcgactttctgccacattttgtgtttgacgacagaaagaattctgtccctgttaccagctagcgagacctacaagatgtcaagctggacccaccgtctcgccttcgccctccccacgattcgcctgttgacctggctcacctgctcagctaaatcagctcctttgtcctctgtggcacctgaagctcatgtggagggctttgacatccctgggagctgagcaggagctgttgccttaggtgggccatgtgctcccatagtgtgaggaagaaggagaagatattggaaatggaggagggagtcagcgattcctggctaggaccggctggaccatcaacatctgggaaattcacattagctgtgcagtgcatttgttaaatgtccatccccaggcacaacttggccgagcacacctttgctgcaaagctggataccgagagggttatccatctgtgccaccaccacctccgttcctgcaggatccttcattgtcgatcatgaagccttgagagtaaggaatccacagaaatatttgttcagtcatgt

SEQ ID NO: 1610 - DNA, 1115 bp, Mus musculus
aattgctctgtgtggctttggctcagctccgcttcctcccacgaaatcgagaaggaagatcaataagaggacttcttcttccgtgtgaatgtaaatggtgtgaaataaagcgttttgtatgtgtgcagaatcagtttagttcctgccttcagcttactaataggaaatgattgtaccattttataattaggaagaaatttagaggtggaagagggtggggagggagtgttatttttatagtgggatgtccgttatgtttagaaaacttgagataaattttgtatttgtgaagttacattccatccattccagggtgggggttctttaaaactctccttaggtggaaggaagaattttctcatttgcagaatatccggaatgcatgtgtcgccttccgtggcatgcacttctgtaacctgcagaccataaccagcaagtgtctgtttaaaagcaggaagtagagcagcatttttttaaaactctctttgtgtgacacattatctgtgattaaaaaaaaaaactacaaagataatggatctgtaagtctggaataatcagacatgatgttataagtcggcctccagcatcaccaaccccatgagcaaagagaaaacccaggcctttctttctccaccctagtgggaattattagcttctgttgtcaaagggtgatgccacagtcagtattcccttgagcttgcctatgatgtcattttggctggtctgagggtggagtgaaagataggcccatctcacctgtaatctgagataggacagtgaaggcaaccctgacctcactgcctgctgacccaccaatcacaagaactggctctggctggtttttgtctgagggaattttggacttgaagtttggttcacttttcttgtgctgaaatatggtggtagtgcgttctacagccacgctgtgaagacatcacttcccctcggagtcccctgagtatttacaagcctcagcagggcagcatagctatgttctgtttgccgtttgttggtttgcttctgtataggtctctttccttcctcccagccccagatgcctacccgactcttttaaagcactttatatctctttaaatacaaaggaaattggaagg

SEQ ID NO: 1611 - DNA, 1623 bp, Mus musculus
gactcccggggggccgttccgtggcgcggccgccgcggccaccgcttctttcacactttagttgccgcgagccgcgcgccgcgctcagtgactggagagagctggccgcgcgccgccttcccgcacgcacgcacgcgggcccggctccggggttttcggcttttactccaggcggcggggaggagggggagccccggccacactgtagggaggaggaagaggaggacgtggaggagggaggaagagaagaggcgaggaggccaggggcggggggcggggggcttgccaccttcagcccccccccgcgagcgcccaaggtgtacacactgttaccagcacagccacaaggcggatttcctgtgtgcttgaagagagagaaagcaatgtccccgtgtctgtagagatgatttgcagtccagccctgctgaagctgaccgaatgagactatgggctgtgcctctgccaagccatgtcgctactgttcaaaatgaagaggaagcacagagagggaaaagctaccagaatggagatgtgtttggcgatgagtataggatcaagacccgtggaagaggtcaaatacatgaaaaatggggcagaagaggagcagaaaatagcagccagaaaccaagaaaacctggaaaaaagtgccagctcgaacacaaggcttaaaactaataaagaaatccctggattagttcatcaacccagagcaaacatgcacatctctgaaagccaacaagaattcttcagaatgctggatgaaaaaatcgaaaagggtcgggattactgttctgaagaagaggatatcacatagcatcggttctcagtcggaccaggagctactactgtgtaaataggttgcaccccagttgaaacctttgcaaaggtcggttctcttcactgaacagcactatagcgaacgaagactgttccatgtcctatgccccattaaattacagtgtttcttaatgaacctgcagaggaatattgctaaacacaaacacacacacacaagaacaaaaacaacaacaacaaaaaaaaaaactgttctggaactttctttgttgctgctagttaaaacttgttgcaacttttcacttctctcgtgtccaagtatgcagcaaaattctgcagttcactttaaagatgttattggtttcaggatgctctctagcctgtatcctcggcgattgggtagaggtgaactctgatacagatgtcagttctagcctggttctgctttgatgtcaagcatcccctcccttctattctccttatccatctctttcgagtggtccagagatggcctgagccttgcttctcactggtaacgtggggctttggacatgggatggtggccacggtgagcctagtttctctgcttgaaagagccacaattgattgaaagcctgttgtaacctaacctgactcccggaagtgacaaaggaacaagtgagcagtaggttgttccgcttactaggactcttagtgcaggattaagcttgtagcattggcttttgctcagatgcaaatggaagtgtgaccacgtgaccacaatcattttcaacccctccctcctcacttttttttctaagaaaataaacattttgctgtttttctgtg

SEQ ID NO: 1612 - DNA, 1955 bp, Mus musculus
cgggacgtgaccacgccgtcgcgcccttccatgccttagctgggtcaacttgcggaagacacgcaacaggccgtgccggtgcagcgcgtgggacgcgggtcaggctgagaagtgcagctctggagggctggggcctaactggtttgcatttcctccctactcgtgaacaatgccaaagaaagtgcagcccacaggggatgagaacgaagaagcgtctgttccttgcaagcgggtgaaggaggagctgcctgaaacgctttctgtattaaactttgacagccccagtagtttcttcgaaagtttaatctcacccatcaaagtagagacttttttcaaggaattctgggaacaaaagccccttctcatccagagggatgaccctgtactggccaaatattaccagtctctgttcagcctctcagatctgaagagactctgcaagaaaggagtgtactatggaagagacgtgaatgtctgccggagcatcagtgggaagaagaaggttttaaataaggacggcagagcacattttcttcagctgagaaaagattttgatcagaagagggcaacaattcagtttcaccaacctcagagatataaggatgagctgtggcggatccaggaaaagctggaatgttactttgggtccttagtaggctcgaatgtgtacatgactcctgcaggatctcagggcctccctccacattatgatgatgttgaggtttttatcctgcagctggagggaacgaaacactggcgcctgtactccccaactgtgcccctggcacacgagtacagtgtggaatctgaggaccggatcggcacaccgacacacgacttcctgctgaagcctggagatttgttgtactttcccagagggaccattcatcaggcagaaactccttcaggcctggcctactctattcacctgactattagcacctaccagaacaattcatggggagactgccttttggattccatttcggggttcgtatttgacattgcaaaggaagatgtggcattaaggagtggaatgccccggcggatgctcctgaatgtggaaaccccagctgatgtaacaaggaagttgagtggctttctgaggactcttgcagaccagctcgagggcagagaagagctgctgtcatcagatatgaagaaggacttcgtcaagcacagactccctcctttcttcgagggaaatggaacggagacgatggacccaggtaaacagttgccaaggttggacaacataataagactgcagttcaaagatcacattgtcctcacagtagggccagataagaatccatttgatgaagctcaacaaaaggtggtttacatctatcattctctgaagaatgtgaggcagatgcacatgataggagaagaggaggaatccgagattttcggtcttcgctttcctttatcacatgtggatgctctgaagcaaatctggtgcgggtcaccaattcgtgttaaggacctgaaacttgacacagatgaagaaaaggagaacctggcactgtctctctggtcggagtctttaatccaagtactctagtgcctttatgcagagaattgttgattttctctatacatacattcagtgagcggggagggggcttggcgctctggttagtactgtgggtggaggtgtagtgacctagaggagcaaggagaagaagctggttcatgtccttgtggacacgagaggaaaaccaggaaattattaggcatcccagactctgataaaacgatacttcggacaagtttattcaatgcagtgttgtagaaaaggcacaactgcagtacacatgtcataaagattatgtcagtaacctggctcgtcttgcttctttggaagaaataactcctttaaagagcatcactggctccgaaaatactttctaacaattaaaacttaggaataaagttggatttttttcttt

SEQ ID NO: 1613 - DNA, 307 bp, Mus musculus
tattttctaaacttccccctcttttccgtgtaattttgaggtggctggttccatttctaattcatcttttgaatgtgctctgcattctatgattcgtttggccagttagtgaaatgaatttgaaattttttgtttctccacttcatatttcctatttgtattcaagaggaaagactacattaagaagatagggtgcatagttagagcagtttttattggtgcccacaaccattgttgtggtattttgtatggacaaatgtcatgagactctttgcaacttgagtgtaaataaaattttctcacttgc

SEQ ID NO: 1614 - DNA, 1219 bp, Mus musculus
agcccattccttgtctgtacccaaagtcagaggccagttatcgaaaacctgaatgtgagcacttgctgggaagcatgtgatctagcccgagcaacccaccgtgcccttagctgtggcatcacttgtgctgctgtctgggtcgggagaggtagaggttagcttaggcccacctgtctcacctcactagccacaactatgggcaggtgctcctgtctgctctcttcccctggaagtcttgtgctaagtgtgatcagtggtctgaagctagatcccagagcctgtccttaggctgtctcatcctcagatttctccctcccgtcagtgtctgctctttggattccattgtttcacttgatccttccaggaagtgcagagctcagatcatgtttacagcactcactacccccttctaatgcccgcccgcccacctgcctgcccgacaagggctctggacaagggtttgctttccctgctagccagccccagccaccattcccactggcacactgaggctttctggggcctgatatgggaaccagacagagtggtcggacgtggcaatcaggagggtggcgccaagctggcttgagaatttaattttccaaagtacattacaaatcataccattaggggaaagcgggccatgtggctcatctttgaaactgtggtcaatacttgaaggcactttagtcctgctggccgcgccagcttccgtctggccggtgtcttctttttctgtgtgtcccgagccattcaatggtcagagacattaaaccgtgctcataagcagttatcaaaaaaaagcagcagaaaatgaggctggaaggagcctggtgtttaccctgttctttggtttaaatcaagccgatgttgaagaagctggaattttttttttatgaataataaaatcccacgtctatatcgtaaagctgtcagtatatgttgaaatcaaggaacgagagaactgccctacagagagtcttaacagccagacagtaccgtgtgctggcgcctacctggatgtgcattgcgtacacgcgtggggcatgtcagagcttcagatgtgcattgcgaacatgcatgggtcatgtcatagcttcagatgtgcattgtgtacatgtgtgggtcatgtcagagcttctacgtctcatttgggttgcacatatggatcttgtgttaaatttccacttcaataaatgaatttttttttttatttttg

SEQ ID NO: 1615 - DNA, 583 bp, Mus musculus
tttttttttttttttttcatgttttcatacaaaaaatttaataaatattacttttcaaaatttattgccaggaacaacacatcaaagatgtattttctgttcatataacactaatagaacaaacaccaagtatctccccagtcccggtggtgaacctggatcactctgttttataagccttttttttgatcttgagcttggtaatagcactttgatttcctcacttaaggcaggcagtgtactctacggcaaatctaaacagtgatctaactggacattttacggttcaagtattcaactagcttatgagaatactccctaaatgcagtagacaacaacaacgaaatcaagtctacaagtggttcagcattacataacgaatggtgaaaataaatcagaatttacaaagtaagattgggatgcttccaacttcacacaattaatttgatatttgtaatgagattcaaccagtcactttctggctacataagtcatatagctcagtctgttcccttaaaactgactgctctgtagcagatcgcctgcctgtctcttttcaagtctaaagcaggaaagaaagagg

SEQ ID NO: 1616 - DNA, 270 bp, Mus musculus
tttcttaatcacagcacaaaatcagcatgggagacattgcccataaatttccaagtatcaggctttctttttatgagccccatttatatgcagtgttagtaattactcacttttactttgtggctgttttcacctggtgatgagtttttgacagtgtgtgcattctttttacagttctgttaaaatatgcctctggttaaaactatctggatcaattaggaaaagtgcagatttacataaaaactatgaacgaaatgccactgctttgtg

SEQ ID NO: 1617 - DNA, 983 bp, Mus musculus
ccactggggctggcaaatcttccatgactctttgcctgttccgaatcctggaggccgcagagggtgagatcgtcattgatgggctcaacgtggcacacattggcctccacgacctgcgctctcagctcaccatcatccctcaggaccccatcctgttctcgggcaccctgcgtatgaacttagatccctttggccgatactcggaggaggacatctggagggccctggagctatcccacctgaacacgttcgtgagcagccagccagcaggcctggatttccagtgcgctgagggtggggataatctcagtgttggccagaggcagcttgtatgcctagcccgagccctgctccggaagagccgagtcctggttttagacgaggccactgctgccattgacttggagacggatgacctcatccagggcaccatccgtacccagtttgaagactgcaccgtactgaccatcgcccaccggctcaacacaatcatggactacaacagggtcctggtcttggacaaaggagtagtagctgaatttgattctccagtcaacctcattgcggccggaggcatcttctatgggatggccaaggatgcgggacttgcctagatgatgcattccaagggtttcttccttgtcagatggactcgatggccatgagtggggacatttagagttttttttaattctgcaaattgtctcacagtggaatgaggaaatgagttagagatcacagccagttcaaagccacgctctgaccagtgcctgggtctcctggtctagtccaccatgattcctgtactgcagtttttaagagaccttgctcctgcctctacatatgcatattttacaattttttttttttaaatgagcctttctcctcatggaccagggactgctaggtcagtctgtcccgggaaaagagaccctgtaatggtgctgtgtgagtccactgatgaaataaagctgtagtcaacg

SEQ ID NO: 1618 - DNA, 1174 bp, Mus musculus
gctgcgtgcgcgctcgggcctgtgacccgctcggggatggacagcggctccgtggcggccgagcggccgaggcgcacaccgagtcgccagcggctcccgtcctccggctgcggagttccggcgcgcccgggcgtctccacgctgcccggtggacgaagctggctgaggcctcgcggacgggcggcccgcgcgtctccgctgttgttcctcctgctcgtgccctccccgcgcctggccgccaccgccactgccaccgccccgcgtaggacgctggctgagcgctcgcgcccggggctcgttctccccgcggccgcgctcggcgccggcaggaacgcgctgggccgtctgcggctgggcgcccggcgtgtggccgcgcttgcgagcagccggagagagctcagcctgtctgctaagtgccatcagctggagcacagaaaagagaacttgcccctctctgtgagccggcagctctactttgacacccacgctctggtgtgcttacttgaagcaaatgggtttaccattcaacaagcagaaatcattgtgtctgcactggtcaagatcacagagaccaacatgaacatcatctacaaagacatggtcagcaagatgcagcaggaaatcgctctccagcaggtattatctaagattgctaacgtgaaaaaagatatggtcatcttggagaagagtgagttttcagccctcagagcagaaaatgagaaaataaaacttgaactgcaccagttaaagcaacaagtgatggatgaagtgaccaaagtccggacagataccaaattaaacttcaatctagaaaaaagcagagtaaaagaactgtactcgctgaacgagaagaagatgctggaactgaggactgaaatagtgtcgctgcatgcccagcaagacagagccctgactcagacagaccggaagatagagacggaggtggctggcctcaagacgatgctggaggcgcacaagcttgatacaatcaaatacttagcggggtctgtgtttacgtgcctaacagtggctctgggattttatcgcctgtggatataataaagtgtctatttaaagacattttcattgttttgccataagagtaccagattgttataccacccacccaactccccccttttttattcttgtttcaagttttaatcctaattcg

SEQ ID NO: 1619 - DNA, 1446 bp, Mus musculus
gtgggaatttcaggccaaaaggggcagagatgtaactatgtgtagaattgggatcaactgtcaggaggagtgcctgggtgccgcggccgccgcgtgagtctgctgcgctccatgaggaagatgcttgccgctgtatcccgcgtgttggcaggctctgcgcagaagccggcaagccgagtgctggttgcttcccgtaattttgcaaatgatgctacatttgagattaagaaatgtgaccttcatcggctagaagagggccccccagtcaccacagtgctcaccagagaggatgggctcaagtactacaggatgatgcagactgtgcgccggatggagctaaaggcggatcagctgtataagcagaaaatcattcgtggtttctgtcacttgtgtgatggtcaggaagcctgctgcgtgggcctggaggctggcataaaccctacggaccacctcatcactgcctatcgagcacatggcttcaccttcactcggggcctgcctgtgcgagcaattcttgcagagctaacaggacgaagaggaggttgtgctaaagggaaaggcgggtcaatgcacatgtacgccaagaacttctatggaggcaacggcatcgttggagctcaggtgcccctgggagcaggaattgccctggcctgcaagtacaatggaaaagatgaggtctgtttgacattatacggcgatggtgctgctaatcagggtcagatctttgaagcttacaatatggcagcactgtggaaattaccttgcatttttatctgtgagaacaaccgctatggcatggggacgtctgttgagagagcagcagccagcacggactactacaaaagaggagattttattcctggactcagggtagatggaatggatatcttgtgcgtccgagaggcaacaaagtttgcggctgcctattgcaggtctggtaaggggcccatcctgatggagctccagacttaccgctaccatggacacagcatgagtgaccctggagtaagctaccgcactcgagaagaaatccaggaagtaagaagtaagagtgaccctattatgcttctcaaggatagaatggtgaacagcaatcttgcaagtgttgaagaattaaaggagattgatgtggaagtgaggaaagaaatcgaggatgctgcccagtttgccacggctgatcctgagcccccgttggaggaactaggctatcacatctacagcagtgatcctccctttgaagtgcgtggtgccaaccagtggatcaagtttaagtcagtcagttaatgggtgactgttaggtgggtggatgggtgttcctcatccagcgtaaggaactctgtgctctcaacttggacaggaaatacccagacaacaaaaggcttgaaaacatgtaaattaagggagagtaaaattgcatgcagtttgtaaaaaaaaaaaaaaaaaaaa

SEQ ID NO: 1620 - DNA, 1121 bp, Mus musculus
gagagccgccccgagccggacgggcttcttactccggcgttgcaaccgccgtcggaaccgccctctcgccacctcggtggctaaggtgccgggtaccaacgccagcagcggaggcgccagggagcagcgcgcctttgtgcgagacggcccccttgagaatattgaccccaaagactcctgtctcattccaagaaacatcatggctgagccagactacatagaagatgacaatcctgagctaattaggccccagaagcttatcaaccctgtcaaaagctcccgaaatcaccaagacctccacagagagcttcttatgaatcagaaaagaggtcttgcccctcagaataaaccagaactgcagaaggtgatggagaagagaagacgagaccaagtgataaagcagaaggaggaagaagctcagaagaagaaatccgacctggaaatagaactattaaagcgacagcagaagctggagcagcttgaacttgagaagcagaaattgcaagaagagcaagaaaatgccccagagtttgtgaaggtgaaaggcaatctcaggagaacaggccaagaggtggctcaggcccaggagtcctaggcccaggctgtgtgtgacctgatgtgtccccaccatctctgtaggagccccgtctagacacctctacagtactgttcttgggccaaagtcctgaggaagagaatccagacagctgagaattttgactatcaaaaaaggattgcgtttgatttaccattgtggtagatgagttgtctctgatggttgcaattcccattcgccaaatgaaagacatcgaccagcacacaagataccatggacctgtgtttagaccaagaaagccacaaaaggagtgaaaagaggcaggaagcgggcactggaacacgcaagagggttgtactactcggcctttcttccattccaagtttagtgggacacagagccttccttgttaagagaattgtttggaatccctccttgggttatctgttagattgttttgattgcatcaaaatgtatttcatctgttacatccagtatttgtatttcattctgagaacccagatttccccccaccaccaccacattataaattaagaacggaggc

SEQ ID NO: 1621 - DNA, 3095 bp, Mus musculus
gtgttctctcagtcaggctttctgtcttccccacgtccggggatgatgggcccattcctttttgtggtctgggcagtctgtcactggggactgtgccaggcagcttatggtctaagcactgttcttacactcggggacttcagagtccctccctttgtgcatcctgggaaggaactcactgtatctcagtgccagtgccccttggtagtctctccagattcacttgctgtcctggaaccagggccaccacctcagaggtctttcagaggagccctatgacccagttgctgtaacccaggagagggctctaccaggctgtctctgtgtcaaggaaagtttgtatctcagtgaacaggacaacctttctcatagtcacctgtgtcctgtcaacatgggcccatcagaagacatccagaatccagttctcctacaggcacaagttgtaaatgctgacatcaaagttgagtttgtcacagtgggctacacttgtcctgggttttccattgtgctaggcctgcacattagagggcttgccccgactgattgaacccttatctgctggctgctgcagagtagtcatgtttattctattaggacaagaacacaggtcatatgttctaatagagttatgggaaacttccagcaggtgccaggaaatatttatggggacagggaaatgaaaatattggtgaaggtcaggctgcttagtgtcaacagcccaaagaaaggacactgatgtgcagtgtaccaggtggggtaccaggtggggtccaagttagattctcatctgtgctggacaagttctgattccgaacacataagtgttatccctggggaaacaaggtggcacatgtcaggggcaagtgaaatgtgttttattggccagttaattgttgtggttaaacatttgcccaaggctacaagaaggcaaagacttagatcctaagggaaagatctaagggaggaaagagtcatgtttaatttttggttcagaaaggcaaaacagagcacctgaggccagctgtgacatcaggagagccacagagagggtgcccttaggcacatgtccaaggtgggtgagcctgggcatcgccatggtgtgcctggggcttttccctagagaaagaaacacagtagctatgacactactctgcggcttctgcatccccaggcagtgactaggacactgtttcatgccacaggacaaagccatgtcatgatctggcgtggcccagcccccatgggtgggcaggcctgggatgggtgctgtgtggcagagtgaagggcactggttctggctgttgtgccgggttggcagtctcactgggtgagcccgcccttgtcttgggttaagtggtggcgagggctttcctcagctccttgctcctcctgcgatcaatgtcctccatttcccgtagtttctgcagagagccaccagaaagagctgctgtcatggcaggcaggacaccctagacatctagctaactgtcctggtgctggctggggctcctcccctttgcttccaccctccccttgggtgggctctcctacctgggagatctcagccaggatgatgctgcggtactgcctgccctgccccagagcctccatggcagccaagaattctttcctgtcttggatttctttcaccactgcacagaggagaggggctgtcaatgcacagggtaggcgtgcatagagccccagccatgcatggtctctgagggacaccggtgggacatgtctatcaagccatgtcactcttgttagccccatcagttctacacacacacacacacacacacacacacacacacacacacacggtggctcacgttcatcaaaccggtccagctctggagctgggtcttcttgccgcacgtggggaacctttttccgttcctccttgtccttcccagtggcaaagatattttggagtcttcgtttctctttctccagatctcctgtggggcccagaaatgattttgctaatgtgtagagcaaggcctgttcccgtgttcccatcggctgtgtgcactgcgggtgtctcgtttatgaggagtgggcctctgcagatcccacacttctttggctgtttctgagcagagcgtgttaggctagcagtggaaacaaccgagaacaagcaccagtgcagaactaatgagtaacccagaaccgcaggccacccaagtggcctgtgtgtaaggaactggggggagaggagggtgttagtgggtctgggccaaaggcagtgttagaagaggaggggctcccagatgtggactcagatgcataggagatggacttgagggaacaggaggataagcagctgacagccacatgtccctctgagattgggaaaactggattaatttgaaaaaagttataggaagataaagagggccacctgactggtttcctgcccgggtttgttaccagcttgcttgaatgatgctgtcccaggctgatgtgacccccgaaaagagccctaagcccagcacttactggtggcctgaggcttgaattgttcacgactgtacgccccattggcttggcacaagctgcgcaggcctgaggtgagagtgggtggccagaatgggaggcaggtagatggctgaggctgccttcttggagggagagcccctcaggctggatgtagggttgcactgcaggggcagaggggctcctcctgggaacacaaggagcaagtggggccacctgttgggcttgcttctcagaggaaataaggtagctgcttattaggtggttgctccttgttcttgatgcttctagaacatatccaagggtgttttcctttggtctgcgcacactcggttcttacactggatcataccatgtggtcaataacagatccttttctcacccgtttatcaaggccaacttcctataagcacattcatacgtaacttattttttgatagctatgtactagtggttagaatggttacattatttattcagctagtgtacttctggacagtctgatcgtctctgggtattttgtttcttttttttgttgttggatttttactacttccgacaatgctgcaataaacaaacattcttatacactg

SEQ ID NO: 1622 - DNA, 510 bp, Mus musculus
gctcattagcacagggattcctatagtcccaggcaggtgggagtctgtcagaggccaaacttccaagctatcttggcaaagtgtcaaactagaactctgtgatggttatggcaacaaatgggatgattaggggaaaaacaaaaaacaaacaaacaagcaacctgctttaacaccgagtcctgtcagcacaaagagaagcctcactggctttttagggtcccctgaaggggtccctggacctgacagcaaacaggaatcagctgttaagccatcctcgtgacccagggatgcagacgcaaaatgtgtcaactcctggaaggtgaacaggattgaatagtcgtcacaaacacacaccgtgtcccctcaccttacccagaactggaaaggcagaaggcatggtctttattatgcatcgcggcatcagtatatattttgttcagtgcctgtatatcagaaaacctacgtggcaatgagttcttcattctgtgctcatcaaaagccaaagtgaat

SEQ ID NO: 1623 - DNA, 2371 bp, Mus musculus
ataagccaagcagcttttggaatccagcagaacagcgcggagatggcggcggcggcgttgttggctgcggtggacaggaaccagttgcgacgggtcccgatcctgctgctgcagccgagggaatgggcttggaagttgagaaccatgaagtatggaacaaccccaggaggaagtattaccaaggtcctcattgcaaacagaggagaaattgcctgcagggtgatacgaacagccaaaaagatgggtgtgcagtcggtggctgtgtacagtgaggccgaccggaattccatgcatgtagatatggcagacgaggcatattccattggccctgctccatctcagcagagctacctcgcaatggagaaaatcattcaagtggccaagagctctgcagcacaggccatccatccaggctacggttttctttcggaaaacatggagtttgctgaactttgtaagcaagagggaatcatttttataggtcctccttcgtctgcaattagagacatgggtataaagagcacgtccaagtccatcatggctgctgctggagttcctgttgtggaaggttaccatggcaaggaccagtctgatcagtgcctgagagagcatgctgggaaaatcgggtatcctgttatgatcaaagcagtccgtggtggaggaggaaaaggcatgaggatcgttagatcagagagagaattccaagagcagttagagtcagcccggagggaggcgaagaagtctttcaatgatgatgcaatgttgatcgagaagttcgtggacactccaaggcatgtagaagtccaggtgtttggtgatcaccatggcaacgcagtgtacttgtttgaaagagactgtagtgtgcagaggcgacatcagaagatcattgaggaggccccagcgcctggtattaatcctgaagtaagaagaaagctgggagaggctgcagtcagagctgcgaaggctgtcaagtacgtgggagcaggaactgtggaattcattatggactcaaggcacaatttttatttcatggagatgaacaccaggctacaagtggaacatcctgtcactgaaatgatcacagggactgacttggtggagtggcaactcaggattgcagcaggagagaagattcctttgagccaggaagaaatccctctgcagggccatgcctttgaggctagaatctatgcagaagaccctgacaataacttcatgccaggggctggaccgttggttcatctctctaccccttcggcagacatgtctacgaggattgaaactggagtccggcaaggagatgaagtctcggtgcattacgatcccatgatcgcaaagctcgttgtgtgggcctcagaccgccagtcagccctgtcgaagctgaggtactgccttcatcagtacaacattgtcggcttgcgcagcaacgtggacttcctgctccggctctccggccacccagagtttgaggctgggaacgtgcacacggacttcatccctcagcaccacaaggacctgctgccgagtcacagcactatagccaaagagtctgtgtgccagccagctctggggctcatcctcaaagagaaagaaatgaccagcgcttttaaactccacactcaagatcaattctctccgttttcattcagcagtgggagaagactgaatatctcttacaccaggaacatgactctgagaagtggtaaaagtgatatagtcatagctgtgacgtataaccgcgatgggtcatatgatatgcagattgacaacaagtccttccgagtcctgggcgatctttccagtgaagatggctgtacctacctgaagtcttctattaatggggtagcccgtaaatccaagttcatcctcctggacaacactgtccacctgttttctatggaaggcagtattgaagttggcattccagtgcccaagtacttgtctccagtgagtgcagaaggagctcaggggggcaccatcgcgcccatgactggaaccattgaaaaggtgtttgtgaaagctggagacagagtaaaagctggagactctctgatggttatgattgccatgaagatggagcataccataaaggctccaaaggatggcaggataaagaaggtattcttcagtgaaggagcccaagccaacagacatgcacctttagtggaatttgaggaggaggagtctgacaaatgagaatcgcagtgaactgtgtccagaaagaaatagacgaccgcatagcgccttatctgtctgcgaacagcaagtgcctcttcagtctctagatctcggagagaggagctttattaaatcaatgatggtgtgattatatttaaacccttttataaattatcttaaaagatttcataga

SEQ ID NO: 1624 - DNA, 1207 bp, Mus musculus
gtcactgacctagcgtacctttccttttcatatctacactgaccttaacttaaaaaaaaaacagaaaagaaaagcaagttttatatatatacatatatatataaagaactacaattaaaagaatgttttgataatccaggggctggttagtgagcccgctggcctcactggggtgtcagggctgggcccagggattgctattttcacgtaggcccttgtccttggatacccaggggagggagccactgtcgccgcagcacaccaggattggggctctcaggctgtgctgccctagacccgccacacaaagccatccgcccctcacagaccctacaagacgatgttaggaaacacatgcttgctggccttgaaggacacagagagaagtatgtgtgtgtggtgtgtttccagctctggctcccgaaggggcaaagcagcctcctgtttacagaaggtccacgcgagctatccccgtggcgttacgaatgcagccagcgcccggcgtttgtgcaggggtgtcgggaacgaacgcagccagcgggcatctgtgcgtgcgaggagaccccttctctcggccaagtttttacccataacacccacatggatttgtgaagacgtgcttctcagaagcaaggactcaaaaagcaaaggtgcacggcgaggccacgaagcccacgccagcccggggatggagcatgtatgtattatttatctgctggagttctacgtttttatgtaagcatgaaacacaggcagtgtgagagaaagccaggacccgacatgctgtccgttaacgctacgtctgctgtagttccattttgtatgttgtgtaaagcgagcatcgatcgaagcaaaaggtgatgtgtgtatatcagaaaaaagaaattaactgtatatcattccagtacattccgttgtacattttagtctccgtttactttctcttcattgttgataagagaatgccaacgtgcgcgttgttcaggcagtttacccctactagagaagaaaggaagaaacgctagaagaaaacaggagagagagaaaatttgtgaattgcggtcgtcaaaacaaaacaaaacaaacaaaaaaaaacaatctagcctagctggccttatttgggaagcgtaactgcttttagcatatgggagtattttttcacattttctttgtataaaatttgtattaaacttaaatatcttttttg

SEQ ID NO: 1625 - DNA, 3352 bp, Mus musculus
gtcgtcttggcggaggttgtggtgacgccatcatgggagctccggcgctgccccagatctggcagctgtacctcaagaactaccgcatcgccaccttcaagaactggcccttcctggaggactgcgcctgcaccccagagcgaatggcggaggctggcttcatccactgccctaccgagaacgagcctgatttggcccagtgttttttctgctttaaggaattggaaggctgggaacccgatgacaacccgatagaggagcatagaaagcactcccctggctgcgccttcctcactgtcaagaagcagatggaagaactaaccgtcagtgaattcttgaaactggacagacagagagccaagaacaaaattgtatgtatgattgagaataaggactgagcaaattctgcccccagaagccctagggatctgctcaggaagggtgcttcaaaggtggttcctgagcaggtcaccttcccacctgagtggcaagcattgtcagaagcccttgtcacaggctgagcccccagtggtagcactggtataggtagaggcttggggacatggcagagagtattggctgaaggggacactgagcagacaggtcagctgagctttgcctcctgtcacgtgaagttgattgggaagcaggaggcacaggtgagtccacagggaggtggctcccatgcagccaggcatgaagagtcagggtggccagagtccagagctcagagtaaacctgggtccattttgactgagaacaccccacattttgcattggttattcactgcaattgttcgtttatctgaagttcaactctaagcaggcagcctgggtgctcatctgttaccctcgaactgttttagtgggaggagtcggggaggggttcactggcaaacactatacctcatcctcgaaggatgacccacagctgaccctggctcaggtagaggctccgacctgctgtcttggttgccacggtttctcttcagctgtaagttacgttccttggtggagggctttgtgaaataactgactgatgctcaacatagaggatgatggtttgctgtcaggaggagagggagctgaagatggtgtttggtcagcgtgctcagacactctggggatggtcaggtgaggtgggtcctgctgctcaagtccctcttatatagcattcttttttatttatttatttatttttttgaagcagagttgaggttcaataaacatatttaatacaagcttaggcacagagtcaaaagaaccatctatccagactcagacccctctcccaaggtttttttttaaggcatgattctctgtgcagctctttctgccctggaattcactctgtagcccagcctggcctcaaacctctgcctcctgggtgctgggattaaaggcatgctctcccaccaccaggcatcccttcctgtgtttaaggttgtagctctgggtctgtggagatcctaccataaggagcacagccatatttcagtctttttttttttttcttgtcaatttattaattttaaattaagttctctaatctgtgaaagtaacttttattcttctgtaataattgtctcacaggcttactgcccctgtctgctaacctaggcctagtcctggaagcttctaacctctatacaatctaatctaggtctagaatgttttcagcctctgagactcactgctgagtaaactcacactttctagttctttctgggctctaactgactggttcaactcagctgttctgacccaaactcttctccaagctgactgattcaatctggcttttctcttcagccttttctgaattgctctgtttggcttcatactgccgttggcaatctgttctaatccggctgcttctcattctctggcttgttctgtcctcacctgtctctcatttgtgctcttcagtctgtctgcgcacagctgtgctagtaagacggcctcctctcttttctgcgccctgctccttacttcgcctcccctccgctcccttctcaggagagctgggcgtgacctagtctctcaatcttcctctgattcgtcactttgtctgccactcaattagacatcacttgcaagcatgggtgcttccttctacaaactaccttcattgtttgggattaaaggtgagtgctaagggctgagccacaccacaactagaaacagtttttttccaataaacaacacaatcttgggggtcacaatgtgatcaaatatcctacaagactaacccgggcttggtgccacagggtacagtcctaggatactagggtacaatcccaaataatttggctatttggctggctgaaggaggactgaaagttaaaagctatcctgggctacatgaaaaaacatgtttttttttgttttgtttttttttttttgtttttttgtttttggttttttgagatagggtttctctgtatagccctggctgtcctggaactcactttgtagaccaggctggcctggaactcagagatccacctgcctctgcctcccgagtgctgggattaaaggcgtgagccaccacgcccggcttgaaaaaacatgtttatatatatatatgtatatatataaaaaatcaaggaaggaaaattccagtttgtagctcagtaagtatttgcttattactattgaggccctaggttcaattcccagcaatacaaaaataataactttccttttaatgatttatcttgccacgatggtgatgaaactagcatctcaccctggacaggcaagcctggccctctgggccacaccccagccccttcgtgtctgttcatcattccaggcaaaggagaccaacaacaagcaaaaagagtttgaagagactgcaaagactacccgtcagtcaattgagcagctggctgcctaatgctgagcctttgctgagataacttggacctgagtgacatgccacatctaagccacgcatcccagcttttccagccagggcctcctagcaggatcttagagaaggagacagtggtattttgaaactggatatcaaatatttttggttttgctttaaagtggctacctctctttggttttgtggctttgctctattgtgacgtggacttaagcaataaggaagtgatgaagggacagtgttctctgacaggacctgtgggggtcggggtgcctgtgcaaggtcttggttctgattgtgatatttccatacagggctgctaatgcagcccatgggtaagtgtggttatatgtgtttgtgctgataattttgtcctgatgagttttcctaccacggggtaacggaataaaatcacttgaaaaagtggactgtaagctcaaaaaaaaaaaaaaa

SEQ ID NO: 1626 - DNA, 590 bp, Mus musculus
  misc_feature 495: n = A,T,C or G
ttttttttttttttttttggaatccacactatttcagtgatttattggaggtcgccccatgacttggggtgcttcggggacatgaaggcaaggatctttgactgtcttgtttactgttgtgtggccagctttgaggacatgccaactggggaatgcgctcccacgcggggtttgatctcgatctgctcctccatctctttactcttcatagctgcgtactccttctccagcctcttcatctttttagggttgtacttgacctgataagccttgaggaccagcttgtctgggcagctgtcaaactggtgggggatgactctctggaagtactgggacatgccctccatgtccagttgcatcaactctgtctggttcacttgcagcagggcaaggcctactcggaacacaatctccagtccctcatacataaagatatcaaagacccgggtggcaacaggcagggggaaggtggtaaggaaaagcgttaggaaccangacgattcatacatggacgtgtggaagctctgtgaacggaagtgggtattcaggtcccgaagctgctcctgtagcatgtattcaaaactgtagat

SEQ ID NO: 1627 - DNA, 2719 bp, Mus musculus
agattctggaaggcgtctgtggcggcggcccgcgggtcttgattcccagtgatggcaggttcctccgcggagcaggctgccgactacaggtccattctgagcattagtgacgaggcagccagggtgcaggccctggaccaacacctcagcacgcgtagctatatccaggggtactccctatcccaggcagatgtggacgtgttcaggcagctctcggcccctcccgctgactcaaggctcttccacgtggctcggtggttcaggcacatagaagcgctcctgggtggcccccaaggcagagacgagccctgcaggcttcaagcaagtaaaggccggcgagtgcagcctcagtggtcccccccagcagggactgagccctgcaggctccgcctctataatagcctcacccggaacaaggatgtatttatacctcaagatgggaagaaggtgacgtggtactgttgcgggccgactgtctatgatgcgtctcacatgggacatgccaggtcctacatctccttcgatatcctgaggagggtgctgagggattacttccagtatgatgtcttttactgcatgaacatcacagacattgatgataagatcatcaggcgggcacggcagaactacctgtttgagcagtatcgggagcagaaacccccagccacccagctcctgaaggatgtccgtgatgccatgaagccattttcagtcaagttaagtgagacaacagatcccgacaagaggcagatgctggagcggatccagaactctgtgaaacttgccacagaaccactggaacaggctgtgcgatccagcctctctggagaggaagtagacagcaaagtacaggtgttgctggaggaagcaaaggacttgctctctgactggctggattccacaggtggcagtgaggtgactgacaactcgattttctccaaactgcccaagttctgggaagaagagttccacaaagacatggaagccctgaatgttctccctcctgatgtcctaacccgtgtcagtgaatatgtgccagaaattgtgaacttcgtccagaagattgtggacaatggttatggttatgcttcaaatggatctgtttacttcgacacagccaagtttgctgctagtgaaaagcactcctatgggaagctggtgcctgaggccgttggggatcagaaggcacttcaggaaggggaaggtgatctgagcatctctgctgaccgccttagtgagaaacgctctcccaatgactttgccttgtggaaggcctccaagccaggcgagccatcctggccttgcccctggggaaagggtcgtcccggatggcacatagagtgttctgctatggcaggcacgctcctgggagcctcaatggacattcatggtggagggtttgacctccgcttcccccaccatgacaatgagctggcacagtcggaggcctactttgaaaatgactgctgggtcaggtacttcttgcacacgggccacttgacgatagcaggctgcaagatgtccaagtcactgaaaaactttatcaccattaaagatgccttgaagaagcactcagcacggcagctgcgactggcattcctcatgcactcatggaaagacacactggactattccagcaacactatggagtctgctcttcagtatgaaaaattcatgaacgagtttttcttaaatgtgaaagacatcctccgagcccctgtagacatcactggccagtttgaaaagtgggaagctgaagaagtggagctaaataagaacttctatggcaagaagaccgcagttcacgaagccttgtgtgataacattgacacccggactgtcatggaagagatgcgggctttggtcagtcagtgcaacctctacatggcagccaggaaggctgaacggaggaggcccaaccgggctctgctggagaacattgccatgtacctcacccacatgctgaagatctttggggccatagaggaggagagccccctggggttcccagttggtgggcctggaaccaacctgaacctcgagtcaacagtcatgccctaccttcaggtgttatcagaattcagagagggagtacgaaagattgcccgagagaaaaaagttcttgaggttctacagctcagtgatgccctccgggatgacatcctgcctgagcttggggtccggtttgaagaccatgaagggctgccaacagtggtgaagttggtggacagagacaccttactgaaagagaaggaaggaaagaaaagggctgaagaagagaagaggaggaagaaagaggaggcggccagaaagaaacaggagcaagaagcagcaaagctggccaagatgaagataccacccagtgagatgttcctgtcagaagtcaacaagtattctaaatttgatgaaaatggtctgcctacccacgacaccgaaggcaaagagctgagcaagggccaggccaagaagctgaagaagctctttgaagcccaggagaaactgtacaaggagtatctgcaaatgttacagaatggcagcctccagtgatgccacggcagcccaggaggggcgcacctgccagcctggctgctatggactaggccacagctactgaggctccgtgccctgatcatgtttacagctgttctcacacctgaatcaggcagagtggtagcagctctgggacactgataataaattcttctgaacggtgaaaaaa

SEQ ID NO: 1628 - DNA, 2140 bp, Mus musculus
ggcgcaggcggtccacgagcgcgatccccggggctgctcctcaccacctccccttccccgggcggcctcccggtggccgcgtccgggtgatctctgggctagaactgctgagcagtggcaaacattacctcatgagttgccatcagatccccggtcatactggaaaagtacaatttggaacctcctcactccagctgaaacagagatacagattactcacaaactaagagacatgggctgcaacccaccttatcacctctcctacagattacgattgttgctgctctttaccctgtgcctgacggtggttgggtgggccaccagcaactactttgtgggtgctattcaagtgatccccaaggcaaaggacttcatggctagtttccacaaggtcatacatttggggaatgaagaaactctgggccatgatggggccacgaaaaaaccagagcttgctaactgcccttcggtgtctccaaacctcagaggccagagcaagctcgtttttaagccggacctcacgttggaggaaatagaggctgaaaaccccaaagtgtccagaggccggtatcaccctgaggaatgtaaggctctgcagcgggtggccatcctcattccacacaggaacagagagaagcacttgatctacctgctggaacacctgcatcccttcctgcagaggcaacagctggactacggcatctatatcatccaccagacgggaagtaaaaagtttaaccgagccaagctcctgaacgtgggctatctggaagctctcaaggaggagaactgggactgcttcgtattccacgacgtggacctggtgcctgagaatgacttcaacctctacacctgcggtgatcagcccaagcacttggtggtgggccggaacagcacgggctacaggttgcgttacagtaaatattttgggggtgtcactgccttcagcagggaacagtttctcaaggtgaatggattctctaacaactactggggatggggaggagaagacgatgacctcagactcagggttgagctccataaaatgaaaatatcccggcccaagcccgacgtgggcaaatacaccatgatcttccacaccagagacaaaggcaacgaggtgaacatgggccgaatgaagctgttgcaacagatgtcccgggtctggaaaacagatggcttatcgagttgttcttacagattactctctgtggagcacaaccctttatatgccaacatcacagtggatttctggactgctgcgtgacccggagcttttgatgacactcaggactgatgatttgactgtaataattttggcctagagacttccatagtagcacaacgttaagaacttgttccaactaattattaggctgaaatttttccattttctcagcagagctcttggttatgtagaatgtagaaccatagtaacaagacagcttttcttggttgttttgaatcatggctgtgaagtgttgtaacacacgtacttgaaggactaaagatgagaggatgtgatgaagtcaccttgcggtctgtatccttacaggattcacttcagcaatgtaccatgtgatcaaaaagcggagaacaaaatccccaagcatcttagagaaccatctaagacagaaaggtactaagatatgtttctgtaactcagtgtatcctatatggccatctgcgaagtggtggattccagattcgaagaaagccatagaagaggggagcaaagtcaagaatcagatgccacaaacacgaccgtaaagagctggctaaggacagagtgtggagtgaactggcagcggtcccccgtgctggctgctgccaccaatcttctgtggtggatgccgcctcatcagaaataccttccagcctgtggccacccgaccctgaatgtacccagcctcttgagaggtttttgccagtaataacccaccagagaacacactgtctattagtttttaaagcatttttataaaatgattttgtacatgtagggtatgaatgagcagtttataagccacgtgatgactgataatgtctatagagtatctctgtagtaaaatatgaaaaaacacaaaaaaaaaaaaaaaaaaaaaaaaaaaaaaaaaaaaaaaaaaaaaaaaaaaaaaaa

SEQ ID NO: 1629 - DNA, 1271 bp, Mus musculus
gaggggagccgggaaagagcgaagcctaggcggctgagtggccgccgcgctcccgccatggcccggaacacactgtcctcacgcttccgccgcgtggatatcgacgaatttgacgagaacaaattcgtagacgagcacgaagaggcagcggcggcggcgggcgagccaggccccgacccctgcgaggtagacgggctcctgcggcaaggggacatgcttcgggcgttccatgcagctttgcggaactcaccaatcaacaccaagaatcaagctgtgaaggaacgagcccagggtgtagtcctgaaagtactcacaaactttaagagcagcgaaattgagcaggctgtgcagtcactggacagaaatggcattgatttgctaatgaagtacatttataaagggtttgagaagcctacagaaaatagcagtgcagtgctactccagtggcatgaaaaggccttagctgtaggaggactaggctccattataagagttcttacagcaagaaagactgtttaaaaaaaaatcctgttaccttgagaagaattttggatgcccaggctggtgaagaagggactgacaatggaccatcttcctagaactcccaactaaatacttcaggacacatcttctggaatgtattttacttttgaggtggagggagaaattgtcttattgattcctaaattctttgcaggatcagaatgtctgcctttgtctacagagttaacacagaaccaacacttgactatcaggctgactggccagattatgtcaggtgtacctgtgagcactgtctgtttgaaatggggagggactgtttgggcaggtgcagatccacaggctgtggtgaaaaggagagcttgggttctgaagcggaaaaacctgagagtttgtacagacatcctgtcttctcagagaagacaggctctcttgggttcattgtaaagtgcctgctgcatcaataaagctcttggcttattagtctattcatcgcggtgtgttctctgtatgttaagtgggaaaagaaagggttagtaatgaatgatgatagttgggtttggaaagctgatgtagaaggagtacaggtgtccctgtcctgccatccctgggggagggggaaagcaagcagggcgacgacacagctgtgccatatttcaactacagaggtgctggatgctaccgagagaccttttgctgagtgtttatttttcttactcttttgatttgtatgtaattttggagcttatttaataaagtgccaaaccttt

SEQ ID NO: 1630 - DNA, 293 bp, Mus musculus
ttccctacttactatcaaccttgcgctaaaataatttttttttcgtaacagaagacatcttggctccgaattccagtaggttgatctataactcccaagttcatcttttttctttaaccaaggtcaggagattcctggggcccaggtttgttgtgacaatctttacatattccacataacattcttgacttcggaagcgttacattatgcaacctgactgtgactaatgctataacttatttattacttgatatatttacgtatgtgactttataaataaacatgaataattt

SEQ ID NO: 1631 - DNA, 3044 bp, Mus musculus
gggcggccgagtgcgaggcgcggagcgtgagctgtgcgagcgagcgagcgcgagcatagcctgcgagcgagcagagagaaagagcgagggcaagagagcggcgaggcgcctgcgcgatgctcgggcccctaagcccgcggcgctgagccagccgggacggacatgcgcgggagggcgccgcggggtcccgctcccttgggggaatgaaagctactggttgacttaaaaacacctgggctttacaaatttgaaggcatcccagagtggggcacaatgtcaacagcaggagttgctgctcaggatattcgagtcccattaaaaactggatttctccataatggtcaggccttggggaatatgaagtcctgctggggcagtcacagtgagtttgaaaataactttttaaatattgatccaataaccatggcctacaatctgaactcccctgctcaggagcacctaacaactgttggatgtgctgctcggtctgctccagggagcggccacttctttgcagagtgtggtccatctccaaggtcaagcttgccccctcttgttatctcaccaagtgaaagctcgggacagcgtgaagaggatcaagttatgtgtggttttaagaaactctcagtgaatggggtctgcacttccacacctccacttacacccattaaaagctgcccttcccctttcccctgtgcggctctgtgtgatcggggttctcggccgctcccgccactgcccatctctgaagacctatgtgtggatgaggccgacagtgaggtagagcttctaaccaccagctcagacacagacttgcttttagaagactctgcgccttcagatttcaaatacgatgctcctggcaggcgcagcttccgtgggtgcggccagatcaactatgcatattttgacagcccaactgtttctgtggcagatcttagctgtgcatctgaccagaacagagttgttccagacccaaaccctcccccacctcaaagccatcgcagatgaaggaggtctcactcaggaccagctgggtcatttaacaagccagccattcggatatctagctgcacacacagagcttctcctagctctgatgaagacaagcctgaggtccctcccagggttcctatacctcctaggccagcaaagccagactatagacggtggtcagcagaagtgacctccaacacctacagtgatgaagataggcctcccaaagtccccccgagagaacctttgtctcggagtaactcccgtaccccaagtcctaaaagccttccgtcttacctcaatggggtcatgcccccaacacagagcttcgctcctgaccccaagtatgtcagcagcaaagccctgcagagacagagcagcgaaggatctgccaacaaggttccttgcatcctgcccattattgaaaatgggaagaaggttagctcaacgcattattacttactacctgagaggccaccgtacctggacaaatatgaaaagtattttaaggaagcagaagaaacaaacccaagcacccaaattcagccattacctgctgcctgtggtatggcctctgccacagaaaagctggcctccagaatgaaaatagatatgggtagccacgggaagcgcaaacacttatcctacgtggtttctccataaatatgggggtcatgattcaacagaagttacatgggatgaatggctcccagttttccagtttgaggttcgtagaacaatgtcaagtggcaaaatgaagttggtggactccgccttaatgagaaaggcttagagcagttatgaggtgctgttatgctgggagtccctgatctatcagcataggagaaaaaagtatgatttaaagatgtgctagggggagggaaaaatgggcaacttttacatttgactacattatatacctatgtataaaagtgcggtgtaaccatagaccatagctgcaggataaccaattagtcactcttagagtaatctgtattcagaacaattcaaacaagctggaggaacagctcctgatagtgtgagaattgagcaaatgggagaaagcaatattgttagatcagattataaatttgttaagtttaaagattcctggcatacaggcctgctctataaatttgttttccccttccctgccagcagtcttctccatacacgacagggcgtgttctccaccaggcctgtaacatcttgttgagatcatttctatggcccaatacttgtcgctctggggttttgtcttgttgaggagaggacagcagtttctggaccatgttatcacctgtgtgtgtctcatatcttggaaattgacagatttggtgaataacttttccatactattcctgcttttcccatccactgaaacagcctgttgtagcaagaggctttcaagagtgcagtggagttgcgctggccatcagtgtttggggtctgagtttgatagactagtgcagcgatcagccatatgattgagagctactttggggatatatggtacgttgtttttgttttttagacttaataaaggacaacacgagctggtcttgtgttgctggttcctattcagtatttcctggggattgtttgctttttaagtgaaacacttttgaccaatagcacagaacgttttaatgccagaggtcacttcagcattttcctgctttgaaaactcacgctggctgcttcactgccctgagattcagtgagacacgcagtttgtgttcagtttttacatcctctgattgtttatcttgtgcagataaacacaaagagaaggtgcttgctagcagggacactgctgccatgtcccaacaagctgttcagtttaaactgctgaatgacattatttgagctatttaaagcttactttagtatgaactaaatgaaggttaaaacatgctttagaaaaatgcactgatctccgcactgtgtgtacagtattggacaaaggatttattcattttgttgcattattttgaatattgtcttttcattttaataaagttatattacttatttatgaccccgtt

SEQ ID NO: 1632 - DNA, 1053 bp, Mus musculus
cgtgcgacattgccgacgccaatttcagtccgccagtgaaccggtcttgaaccactctccagcagcctccgagaggcagagttgcgccaagttccttggtctccgacggcctcccttctcacgcagccatgtcttccagcagacccgtggcgctggtgaccggtgctaacaaaggaatcggattcgcgatcactcgtgacctgtgtcggaaattctccggggacgtggtgctcgcggcgcgggacgaggagcggggccaaacggcagtgcaaaagctgcaggccgagggcctgagcccacgcttccaccagctggacatcgacaacccgcagagcattcgcgcgctgcgcgactttctgctcaaggaatacggaggcctggacgtgctggtcaacaaggcaggcatcgccttcaaggtcaatgacgacacccccttccacattcaagcagaggtgacaatggaaacgaacttttttggtacccgagatgtctgcaaggagctgctccctctaataaaaccccaaggcagagtggtgaatgtgtccagcatggtgagtctcagggccctgaaaaactgcaggctggagctgcagcagaagtttcgaagcgagaccatcacagaggaggagctggtggggctcatgaacaagtttgtggaagatacaaagaaaggagtccatgcggaagaaggttggcctaatagtgcatatggggtcaccaagattggggtgacagtcctgtccagaatccttgccaggaaactcaatgagcagaggagagaggacaagatccttctgaatgcctgctgccctgggtgggtcagaaccgacatggcaggaccaaaagccaccaaaagcccagaagaaggagcagagacccctgtgtacttggcccttttgcctccagatgcagaggggcctcatgggcagtttgttcaagataaaaaagttgaaccatggtgaacccaactctcacctcccacccccttgtatccagacttgctgaaggccaaggaaagccataatgtagtaacacttctgaaaaataaacata

SEQ ID NO: 1633 - DNA, 1215 bp, Mus musculus
gccagcttttctatatatgggtgagagaatatgagtatgctgaaaggtcttctgcctcctctatccccaacaccttaccccttcccatcttttcaggaatgcctcacctactgggacccgaggtaactcctggggagggatccctggggttcatcatactcaaggggtcaggaatcgtgtttccaaaccttcctagagtaccccaatcatcatgaatgcttactgttgagtggcattgatgatttgacacattcttaggggagcaacagaacatgcatttccatcctaaataaggaccctcccacttccacctttgacctttaataatgattgtattacatttccccataaccttttgctgatgtggttcaatttatttctctcagtcatgaaaattatttatttatttatttatttttatttatttgtttgtttatttatttatttattacttgtgagtcaccagctgccaagtatttgcattagtctggtggagactttgagaggactgtgcttttctgttcccctcccccagaaaagaaggctggttggttggttggtttgaaccacctctcttcccacatgctgtttccctcaccatggcttactttgggggaggggagggcttctaccagctgattcccttgttgtatactagatggctagacatttttgtatattagtgtgttttaagttattgatttgttttatatgaaataatttatttttcaggtaccattttttttttcattttaactttgtttttacatgggtttgttttcaataaagtctgacatgctgtccaaagtcaacaataaagtgaatcccattgtgttcttttgaggatgtttatgtaactagcctttaaaagtaattctcagaaaaagaaaggtggggaacaaaaacctttaacctattttccttttcccattgcctttttccccactactttaaatccttgtgaataaatgttcttcagtgttttaggaagaaaaaagcaaacctagattttgataatccagaagatttcagattaacgaagctttgaaagaaccatttttcgaaatttcagtgacgtgtgaatattttttgtcaatggctttctcaaagagaatgaaacttttgcaccattttcagagtttttatagagatgccaaattgatatatttacatgtaatggaaacataaaaaaagttttattaaacaattgttcat

SEQ ID NO: 1634 - DNA, 1367 bp, Mus musculus
gatgctatgctctggccgactaggtgtttgcagcctgcctgggtcagggttgttcctcacgcggacccaggaactctggggcggcgacgaccatgcccagtgaaactctctgggaaatcgcaaaagctgaggtagagaaacggagaagtcatgggagcgaaggggacggagctgaaatcggagaaaaacctgttttcttcattggcagtaaaaacgggggaaagacaaccattatcctaaggtgtcttgacagggatgagtcagcaaagccgaccttagcgttggagtacacgtacggaaggaagaccaaggggcacaacacgccaaaagacattgctcacttttgggaactgggtggaggaacctccttgctggacttaatcagcataccaatcacagtcgacaccttaaggacattttctattgttcttgttttggatctttccaaacctaatgatctttggtcaaccatggaaaatctgttgcaagccataagtatccatataggcaaggtgataatgaagctgggcaagacaagctccaaggactcggtcgagatgcggcaacgaatgtggagcgtggtgcagaaggaccatccggaccgggaattaattgacccatttccaatacctctggtcattattggaagtaaatatgatattttccaggattttgatcctgagaagagaaaggtgatatgtaagaccctgcgctttgtggcacattactacggagcctcgctgatgtttaccagcaagtcagaagctctgttactgaagatacgcggtgttatcaaccagttggcattcggtattgataaaagcaaatcaatatgtgtggatcaaaataagccactgtttatcacagcaggactggattctttatgtcagatagggtctcctcctgttcctgacagtgacattggaaaacttcaggcccactcacctatggagctgtggaaaaaggtgtatgacaagctcttcccaccaaagagtaccggcaccctgaaggcggtccaggacccagcccgagacccgcagtatgcagaaagcgaagtcgatgagatgagggttcagagggaccaggaactagaacactacaagagaagctcctctaagacctggaagcaaatcgagctggactcctgacccgcttccctgctgtgggcatggcttccttcccaatcgaggaagattattttcttaccttctgtggcaacatgtgaagaaagttgagcatataacctgttagggaaaatctgtttcttgttctgttacaactttctgaatgttctgaagtcttttagaaggaaaatattcactatatgtctgtcattctttttcaaataaaaaatttttctatcaccc

SEQ ID NO: 1635 - DNA, 7036 bp, Mus musculus
gcctcgcgagctctggcgtggcgctcgccggctggccctcacggggaagaggtggcgttccgttggtgacgttaggctccggcggcgccggcagggcgttctccggagctgtgcggccagctcgccgccgtcccgctgctgcgctcgcgatgggcgcccaggaccggccgcagtgtcacttcgacatcgagatcaaccgggaaccggttggtcgaattatgtttcagctcttctcagacatatgtccaaaaacatgcaaaaacttcctatgcctgtgctcaggggagaaaggccttgggaaaacaactgggaagaagttatgttataaaggttctacattccaccgtgtggttaaaaactttatgattcagggtggggacttcagtgaaggtaatggaaaaggtggagaatcaatttatggtggatactttaaagatgaaaactttattctcaaacatgacagagcgttccttttgtcaatggcaaatcgagggaaacataccaatggttcccagtttttcataactacaaagcctgctccacacctggatggggttcatgttgtttttggactggtaatatctggttttgaagtaattgaacagattgaaaatctgaaaacagatgctgcaagcagaccttatgcagatgtccgagttattgactgtggggtgctggccacaaagttgacaaaagatgtttttgagaaaaaaaggaagaaaccaacctgttcagaaggctcggactcttcttcccgttcctcttcctcttcagagtcctcctcagagagtgaagttgagcgagagacaatcagaaggagaagacataagaggaggccaaaagtcagacatgctaaaaagagacggaaagaaatgagcagttcagaagaaccgaggaggaagcgcacagtaagccctgaaggttattctgagaggagtgatgtgaatgaaaaaagatcagttgactcaaacactaaaagagaaaagcctgttgtccgcccagaagagattcctccagttcccgagaaccgatttttacttagaagagatatgcctgctatcactgtggagcctgaacagaacattccagatgttgcacctgttgtaagtgatcagaaaccctctgtatcaaagtctggacggaaaatcaaaggaagaggcacgattcgctatcacacacctccaaggtcaagatcccactctgagtccaaagatgatgacagcagtgaaacccctcctcactggaaggaggagatgcagagactgagagcctacaggcccccgagcggagagaagtggagcaaaggagacaagctgagtgacccctgttcaagccgatgggatgaaagaagcctgtcccagagatccagatcatggtcctataatggatactattcagatcttagtacagcgagacactctgatggtcaccataagaaacacagaaaggaaaagaagtttaagcataaaaaaaaagctaaaaagcagaaacattgcagaagacacagacagacaaaaaagaggagaatagttatgcctgatttggaaccctcaagatctcccacccaccgaatgaagtcctcttgtgttagagaaaggagatctcgtgcctcctcctcctcctctcatcactcatccaagcgcgactggtctaaatcagaccaggatgacgggagtgcttcaacccattccagcagagactcctacagatccaagtctcattcacgatcagattctagagggagctctagatcaagggctgtgtcaaagtcctcatctcgttctctcaacagatcaaaatctagatctagttccaggtcaggaccccgaagaacatcaatatcccccaaaaaacctgctcagctgagtgaaaataagccagttaagacagaacctttaaggccgtcagtgccacagaatggaaatgtgctagtgcaaccagtggcagcagaaaacattcctgtaataccattgagtgacagccctcccccttctaggtggaagcctgggcagaagccctggaagccctcttacgagcgaattcaggagatgaaagctaaaacaacccacttgctgcctgtccaaagcacatacagcttaacaaatattaaagcaaccgtgagttcatcatcttatcacaaaagagaaaaaccttcagaaagtgatgggagtgcttattcaaagtacagtgatagaagttctggaagctcaggaaggtcggggagcaagtcttctaggagcaggtcatcctccaggtcctacacaaggtcaaggtcaagaagtctccctacttcacgctcactctctaggtctccatcatctaggtctcactcaccaaataagtacagtgatggttcccagcacagtaggtcatcttcatatacttctgttagcagtgatgatggaagacgagccatgtttagatccaacaggaaaaaaagtgtcacttcacataaaagacatcgcagcaactctgaaaagacacttcacagtaaatatgtcagaggcagagagaaatcctcacgtcacagaaagtatagtgaaagtagatcatctttagattacacttcagacagtgaccagtcacatgttcaagtatactcagccccagagaaggagaagcagggaaaagtggaagcattgaatgataagcaggggaaaggcagagaagaaggaaaacccaagcctgaatgggaatgtcctcgttctaaaaaagagaactccgaagatcactctagagatgacagtgtgtccaaagggaagaattgtgcggggagtaaatgggattcggaatcaaactcagaacaagatgtgactaagagcaggaaaagtgatccccggagaggttcagaaaaggaggagggtgaagcctcttcagactccgagtcagaagttggtcagagtcacatcaaagccaaacccccagcaaagcctccaacaagcacttttctgcccggcagcgacggtgcctggaagtctaggagaccacagtcttcagcctctgagtcagagagctcctgctccaacttggggaacattagaggagagccccagaagcaaaaacactcaaaggatgatcttaagggggatcacacaaaaagggcaagagagaagtcaaaagctaaaaaagacaaaaaacacaaggctccaaaacggaagcaagctttccactggcaacctccactcgagtttggtgacgatgaggaggaggagatgaatgggaagcaagttacacaggacccaaaagagaaaaggcatgtctctgagaagtgtgaagctgtgaaagacggcattccaaacgtcgagaaaacctgtgatgaaggcagttctccaagtaaacccaagaagggtactttagagcaggacccacttgcagagggtggacatgatcccagctcttgtcctgcacctctgaaagtggaggacaacacggccagctctccacctagcgcccagcaccttgaagagcatggcccaggtggaggggaggacgtgcttcagacagatgacaacatggagatttgcacgcctgataggacttcccctgcaaagggagaggtggtgtcccctttagcaaaccacaggctagacagcccagaggtgaacattattccagagcaggatgagtgtatggcacatcctagagcaggaggagaacaagagagtagcatgtctgaaagcaagaccttgggtgaaagtggggttaaacaggacagctctaccagtgtgaccagtcctgtagaaacttctggaaagaaggagggggctgagaagagccaaatgaacctcacagataagtggaagccattgcaaggtgtagggaatctgtcagtgtctactgcaaccacatccagtgctctggatgtgaaggcattatctactgtgcctgaagtgaaaccacaaggcttgaggatagaaatcaaaagcaaaaataaggttcggcctgggtctctctttgatgaagtaagaaagacggcacgcctaaatcgaaggccacggaatcaagagagttccagtgatgatcagacacctagtcgggatggtgatagccagtccaggagtccacacagatctcgaagcaaatccgaaaccaaatctcgacacagaacaaggtctgtctcatacagtcactcacgaagtcgatctagaagctctacgtcatcttaccgatcaagaagctactctagaagccggagcagggactggtatagcagaggccgaacccgcagccggagcagttcctatggaagtttccatagtcacaggacgtccagcaggagccggtccaggagcagctcttatgacctccatagccgctccagatcctacacctacgatagctactacagccggagtcgtagccgcagccgcagccagaggagtgacagttaccatcggggtagaagttacaacaggcggtccaggagtggtagatcctatggctcagacagtgaaagtgacagaagttactctcatcaccggagtcccagcgagagcagcagatacagctgagatgtctctgtacagattgtgtcttaagtgtaaatacctggtaacttaaagcttaagaaactggatggcagtctgttgtgttttagtattagacctcaatcctatagtggatatttcttgtcacttatttacatgtgcgcaaaagaatttaaagtgcagatgtccctagaaatatttctatgacccattttacagtaggcaactatggaattttcattttcttgaatcaagaaatggtaaatttgatgtaagtataatttgcagtgtcactgtagatagggttttctgtagatcacattgtctgtagaattcaggtttctttttgtttcaggttttagcatccatgctgccaaacacaattatggagagctgtcacaagacacgtgttctccatgtccccatgtccccatgctggttgtcgtcttggtgtgtgctgtcagatgaggctgtccacatccatattgaccatggccaggtgtgcagggtggtagctcattcctctgtgtcccagctgtgagcacccacacttcacagggaatgccagcccagccaccccagctcctgctttggtgcttggtgcctttggttcctcgtataccctatgtcatattgtcacatactgcatttcctgatgccagaaaatgaattgtgattttttttttttaaattcactggcaccaaaaataatttcttctgagctgggttcactgtgagtgtaggggcttcttccaaacacagatatgtggtggaggtcccttggaacagaacctgtatggctggtcatcttgttctgcacatgtgtgctaaagtgccgagctgaagaatgtccttcagaagcagctccacagacactccagccaagcttcactctcactgtggcaatagtagcagccctgccccaaccatcctattccctgtttgtgtcgagacaccccccacccccacccccacgctgccccctgactccatgaagccctgcctgatggaggaaacccaggacaaaagttgggggcagcagggtcacaggctctgctgcacagaaaggggttcttacggctttgtgtggctcctccaggaagaatctaacctgtaaaaactagtgtgggtttgtttctttgttttgttttactctttagtttgcattctttccccaagtgtacttaatcaccttagtgccggttaaatccagttcacagacttcctgtcaggtatatggtgtagaagtctgtactctcctatcccacccaggccttgctagtgcatttgggaagagtaaaggccttgggctggaggaaattactaaagccctggccagatggaggggaagtactggatatatgaaagtagtcttccagggccatgtggctcagtgatatatagcatgtgcttagcatgtaagtagctctgggatcagaggtcagcaccccacaaataaataatggtgttactctgtgatgtatgtaagcagcattttggtggccagccagcttattgttccaccatgtctgtaaattagttaattagaaggataacatcggaactcagtgcttggcgggttagacatgtggtttatagtgagtgggtccttctaccccccccccccctttaaagttgcctacaaagaagggtgtttgaatctagtattcagtaggaagaatgcattcagagcccaaataaactggcaaatgtaattagtaagaaaaggtcactattgggccatatattcttatttggttgctgtgtaacaagttatcccaaatttctcagcctaagagtgcctatgtgtcattgacaaacaggcaatggtagggttgactcatctgctcagggtctcaaggtaaggtctggaagagctcatttctcagaagactctgggaagacgtgacttgtagctgggcccctctagagccctcggtggatgcccacatcgcctgctgtaggccttgccagcttcaaccagcagggaccctttgagtcttgtctttttttcaaaacctctgccctcctcctgctttaagggtccatgtaagtagatcagactccagagataaatctctactcgaagtcccgtggccagaggaattacagacattgtcgggttctggggattagcatagcaagaggaagggcatccacctaccacctactgctgcatggacagggcttaacctgtaccagcaggcactcatgttacgtaatgtcaaccttgctgtttatactcgactgaatacagaaatggcttttcttcttatccacgatcattctgtattttgaagttatttttttaataaaattgaattatgttgtgtaatgtgcttaatagaaaatgctttctttattggatgattttgtaacatcctgtttactgcaagtggcatagttgatattgttcaaaaatgtagaaaatacttttgtacatactagcaatgtctaatttgtatatacttctatgaaatttctctacaacttgaaaaggatcttgtagaaatgaaaatacatgctgagtttgagcctaaaaaaaaaaa

SEQ ID NO: 1636 - DNA, 2113 bp, Mus musculus
ggtgcaccggattccagctgttttcgcctgctcctcgccgtctccgccgctgccctcgttcgccatgctctccgtccgcaccccgctcgccaccatcgctgaccagcagcagctgcagttgtcgccgctgaagcgactcaccctggctgacaaggagaacacgcccccgactctcagcagcacccgcgtcctggccagcaaagctgcgaggagaatcttccaggactccgccgagctggaaagtaaagcgcctactaaccccagcgttgaggatgagccgttactgagagaaaacccccgccgcttcgttgtctttcccatcgagtaccatgatatctggcagatgtacaagaaagccgaggcctccttttggactgccgaggaggtggacctttccaaggatattcagcactgggaagctctgaaacccgatgagagacattttatatctcacgttctggctttctttgcagcgagtgatggcatagtcaatgagaacttggtggagcgatttagccaagaagttcaagttacagaggcccgctgtttctatggcttccaaattgccatggaaaacatacactctgaaatgtacagtctccttattgacacttacattaaagatcccaaggaaagagaatatctcttcaatgctattgaaactatgccttgtgtgaagaagaaggctgactgggccttgcgctggattggggacaaagaggctacgtatggagaacgcgttgtggcctttgccgccgtagaaggaatcttcttttccggttcttttgcatcgatattctggctcaagaaacgggggctgatgccgggccttacattttccaatgagcttattagcagagacgagggtttacactgtgactttgcctgcctgatgttcaagcacctggtacacaagccagcggagcagagggtccgagagataatcaccaacgccgttaggatagagcaggagttcctcacggaggccttgcccgtgaagctcatcgggatgaactgcactttgatgaagcagtacattgagtttgtggccgacaggcttatgctggagctgggttttaacaagattttcagagtagaaaatccgtttgacttcatggaaaatatctcactagaaggaaagacaaacttctttgagaagcgagtaggcgagtatcagaggatgggagtcatgtcgaattcgacagagaactcttttaccttggatgctgacttctaagtaactgatcgtgtgctcttcgctgatttttgtccccttgccattaaaagaaaccagcaaaaacaaccaactggctacaccatgaattgtcattaaatttgctaaacaggtgtctaaaaagctgtgtagctacctcagtcctgtttgccaggctggtcactagaagaaagtatacttcaaacaatgggtacttggatccttagggagatcctgtccttggcttttacaagtagtgtggtcacctttgacctcatcaaagtactaacagcactgggccaggttttaggagcagtgaccatcaagcaagcaggtttaaacatttagatgctgtttagggctgtttaaagatgtcggactgcttcctgcaggcatgcagagtctacttaacaagtttgtaaataaaattggcactttgcacacacacacatagtactgtcaggcgattaaactatacattttatgaggtagtacctctatgcttttttttattttaatgctcagtattatcttgaagtttgcaaatgctatgatggtacagtaaattctgacatttgccctaataagagtgtcactttttttttttttcttcgagacagagtttctctgtatagccctggctgtacggaattcacaagtgagtttgagcccagtggtgggtacacccgtgggactctcttacaaaccaaaacaggaaaagcaagtgttccctgaggtagtttactgtgatctagcttcctcatgaactgacataaccctgatcagtttccttgattattgtataaatgtttttgtaatatgaaaagcctttgtaccttttaaattattgttacttaaaattaataaactcttgaattaacagtcttgaactttcatggc

SEQ ID NO: 1637 - DNA, 2494 bp, Mus musculus
ccggaatctctgtgttctaggtcagatcagacattctgtcacaatgcctgaaataaataccagccatcttgatgaaaaacaggttcagcttctagcggagatgtgtattcttattgatgaaaatgacaataaaattggggctgacaccaagaaaaactgtcaccttaatgaaaacatcgacaaaggattattacatcgagcttttagtgtcttcttgtttaatactgaaaataagctcctgttacagcagagatcagatgctaaaattacctttccaggttgtttcaccaatagttgctgtagtcatccattaagtaacccaggcgagctggaagagaacaacgccattggtgtgaagcgagcagcaaagcggcgcttgaaagccgagttgggaatacccttggaagaggttgatctaaatgaaatggattatctaacaagaatttactacaaggcccaatctgatggtatctggggtgaacatgaagttgattacattctgtttctgaggaagaatgtaaccttgaatccagatcccaacgagattaaaagctattgctatgtatcaaaggaagaagtcagagaaattttgaagaaggcagccagtggtgaaattaagttaactccgtggtttaagataattgcagatactttcctcttcaaatggtgggataacttaaaccatttgagtccatttgttgaccatgagaaaatacatagattgtgaatgtgtaaatgatttgaaaaattttctacctggtaagaatggtttggtttggttttaaattgggccctcttatatgatacataggtattttacaaccagaatttgttttgagaaaagaaaaactcaactagcttacagttttatatcatatatcccatatatatgcactgatgtctgtaaaagatatttaggtgaggttattgcaaaattatgccataagtaaaacttaatttagcctgtccaaatacctggctatgacaagattgaggaagtaactagaactcatattttacatttgatagacactttcagaactctttgctaattgtcaagtgttgtttatatctttagatttttatcatacatcagaaaattgagcagctgctttgaaacagcactaagaggttaaatgggcagggctcaggagacagctcagtgtaccatgattgccttgcaggcatgatgtcatgggttgttgagtccctaaccctaaagataattgtaacaacagcagcaacaggcagagcaggttcagagggaagtatatggcgctctctctctctctctctctctctctctctctctctctctctctctctctctctgtctcggtcttcagacaggatgattaatctcaggaaccctgtataaccaatactggatgctcaagtcgatagaacgtatcgtatttgcatattactgactacacttcacctcgtctctggcgtggccatgacactcaacccagcgtaaatgctcctgtaaatgatagttgtactatgctttatgataaggagacgtctgcatgtgcggcacagatcaaatattaatagacagttgcttgagcccttggatgtttggcccacagatttaaaaggccagttctgtatactaatttttgtcattctcacttgattttgtgctttaaccatcctgaaattattattttactacttaaaggtaactgttacttttggtagtaatggtaactgattagctattcagcaaaatctgtttatagtcctagtgaaaaagatggttagtcataatgtgtgagtgagttctactttaaaaagttgagaaaacctttgactctaccatggctggccctggatcctcttgttgtagggggtctggcttgagttagataatttagtagcattagcacccctttttaagacaacaacaacaaaagaaaatctagggaagagtgggggcgtgtttctttctctgtgtagctctggctattctagaactcaatttgtagactaggctagcctcaaaacccagagatccaccttcctctgactcccaggtactgggattaaaggagtgtaccacatggccagcaacaaccagaatttgaatgggtgataatcaagagtcccgtaacgggctcgctgttctatgatcagggcttattttagaggtggaagtgggaaggagtagggctgaggaaacatacagtgactagactgatgtcccagaataggcatatattaagattttgaggttatagaataggcatatattgatactgtgttttgattgatgttcttttaaaacttgccacaggtgtgtcacatttgagctctttagacagctttattcttaagtgctgcataatggatacattttttcttataaaaattttataaacctaatttcttgctaactctgaacagttgatttatcattggggatatgactatgttgcaagaatttattgaaaattaaaaataaattattttaaaaaaaaaaaaaaaa

SEQ ID NO: 1638 - DNA, 777 bp, Mus musculus
ccaggctgccaggacactgctctcacggttgatattagagcctggagaacggtgctgggcaggacaaagagctttgcagtctaggtgtctgtctgtctgtttcctgcccggggcattgattcgttggctttcaagcatgctgtttgggtggaaggttgatgggggcaaatgccccagtggggccagtaaagcatcctcctgcccacagcaacggcttggggcgtctgagctctgcttacagcaagggctggagttgccagaggccctgctctgggaagaccctggccactgacacccaagatctgatggagagagcggccccacccttgccaacacagacacctgacctttttgttcaacttgtgtgttagggtgaaggaaactgccaaacttcctctgagtgaagacctctgactgcccaggagtaggggtggggaccagggccagagctcaacgtgtaccccagcacctgcccgagggacactcctccctcatactcataggtctgggagccagactgtccagggaaccagcccctcttttctatatactcggccacaaggctacccgatcccccactgtgcccagctcccccttttgtaagtatgtgaaaaggaaaaatgcaaaggttggatcggccggagcccttccctccagtcgagacttttaaccctgtaataatgtacagagaagttgttggtgttcgaagactccgtgtggctgtgcaatttctgtacatttgcaattagaaatattaaagatttatttagctatttt

SEQ ID NO: 1639 - DNA, 1750 bp, Mus musculus
ggagcagtcatgccgcagtccccgcgtagcgcccccgggctgctgctgctgcaggcgctggtgtcgctagtgtcgctggccctagtggccccggcccgactgcaacctgcgctatggcccttcccgcgctcggtgcagatgttcccgcggctgttgtacatctccgcggaggacttcagcatcgaccacagtcccaattccacagcgggcccttcctgctcgctgctacaggaggcgtttcggcgatattacaactatgtttttggtttctacaagagacatcatggccctgctagatttcgagctgagccacagttgcagaagctcctggtctccattaccctcgagtcagagtgcgagtccttccctagtctgtcttcagatgaaacctattctctgcttgtacaagaaccagtagccgtcctcaaggccaacagcgtttggggagcgttacgaggtttagagacgtttagccagttagtttaccaagactctttcgggactttcaccatcaatgaatccagtatagctgattctccaagattccctcatagaggaattttaattgatacatctagacacttcctgcctgtgaagacaattttaaaaactctggatgccatggcttttaataagtttaatgttcttcactggcacatagtggacgaccagtctttcccttatcagagtaccacttttcctgagctaagcaataagggaagctactctttgtctcatgtctatacaccaaacgatgtccggatggtgctggagtacgcccggctccgagggattcgagtcataccagaatttgatacccctggccatacacagtcttggggcaaaggacagaaaaaccttctaactccatgttacaatcaaaaaactaaaactcaagtgtttgggcctgtagacccaactgtaaacacaacgtatgcattctttaacacatttttcaaagaaatcagcagtgtgtttccagatcagttcatccacttgggaggagatgaagtagaatttcaatgttgggcatcaaatccaaacatccaaggtttcatgaagagaaagggctttggcagcgattttagaagactagaatccttttatattaaaaagattttggaaattatttcatccttaaagaagaactccattgtttggcaagaagtttttgatgataaggtggagcttcagccgggcacagtagtcgaagtgtggaagagtgagcattattcatatgagctaaagcaagtcacaggctctggcttccctgccatcctttctgctccttggtacttagacctgatcagctatgggcaagactggaaaaactactacaaagttgagccccttaattttgaaggctctgagaagcagaaacaacttgttattggtggagaagcttgcctgtggggagaatttgtggatgcaactaaccttactccaagattatggcctcgagcaagcgctgttggtgagagactctggagccctaaaactgtcactgacctagaaaatgcctacaaacgactggccgtgcaccgctgcagaatggtcagccgtggaatagctgcacaacctctctatactggatactgtaactatgagaataaaatatagaagtgacagacgtctacagcattccagctatgatcatgttgattctgaaatcatgtaaattaagatttgttaggctgttttttttttaaataaaccatctttttattgattgaatctttctaaaaaaaaa

SEQ ID NO: 1640 - DNA, 805 bp, Mus musculus
ctggcctcctcagtcacccaggggtgctagccagctgccccttccgctagcaggcctgtgaggggtgatctataggcatgggggctggtgctaagagttacatatctattactccttctcctgctctctaccatttgcacagtatggccattactggtagccacagattcagccaaggctattgtgtgtctgtggaaagaaagctggaccaaaatagctgctgctatgtcctccacctgcacctgtccatgtgagccatgcggtgtgccataacagagtctggaactccaggctcaggcttgggcctctctactaggaggtggtccagatgtaccagacccaccatcctgctgcaggcccagctggtctagcaggagaggacacagaggttttgtctctagacggcccctaggcctgcctctgtatttctcacctgcaggtgcttgagcttgcctttctaggcagatggagttgtgcaccaaactgtggctggacagttcctacctttctgtgtgccccaagccttccctgcctctggtgggtcagttagcctctcaccccttgtgcctgcacagagggtcttgatcccaggctagcaagcaagttctcaggcctctaaactagggcactagggcaggttccgtgccagagtcaggggctacacaaggggcctggtgccagtgcggtgggcgagttatgagacctgagctgcagactggaatgggaccccatcccacctgtcaaacagatggggctgtgctgtgtcattctgtcattgtaatataaatacagatttttatacccc

SEQ ID NO: 1641 - DNA, 2061 bp, Mus musculus
gagatgccttcaagatggcggctgcggctgctgcacgagcagttcctgtgagctctggattccgaggcctgcggcgaacactgccacttgtagtgattctcggggctactgggactggcaagtccaccctggctctgcagttaggccagcggctcggcggcgagatcgtcagcgccgactccatgcaggtctatgaagggctagacatcatcaccaataaggtctctgcccaagagcagaagatgtgccagcaccacatgatcagctttgtggatccacttgtgaccagctacaccgtggtggactttaggaacaaagcaacggccctgattgaagatatttttgctcgagacaaaattcccattgtggtgggaggaaccaattattacattgaatctctgctctggaaagttcttattactaccaagccccaggagatgggcactgggaaagtggttgatcggaaagtagagcttgaaaaggaagatggtcatgaactccataaacggctaagccaggtggacccagaaatggccgccaagctacacccgcatgacaaacgcaaagtggccaggagcttgcaagtgtttgaagaaacaggaatctctcacagtgaattccttcatcgtcagcacgcagaggaaggcggtggtcctcttggaggccctctcaggttccctaacccatgcatcctctggctccatgctgaccaggcagttctagatgagcgcttggataaaagagtggatgacatgcttgctgccggactcttggaagagctgagaggttttcacagacgttataatcttaagaacatttcagaaaatagccaggactatcaacacggtatcttccagtcaattggcttcaaggaatttcacgagtacctgaccactgaggggaaatgcacaccagagactagtaaccagcttctaaagaaaggtattgaggctctgaaacaagtaactaagagatatgcccggaaacagaaccgatgggttaaaaaccgctttttgagcagacctgggcccagtgtccccccggtatatggcttagaagtatctgatgtttccaagtgggaggagtctgttctggaacctgctctcaatatagtacaaagtttcatccagggtcacaaacctacagccatgccagtgaagatggcatacaatgaaagtgagaacaagagaagttaccacatgtgtgacctctgtgaccggatcatcattggggaccgggaatgggcagcacatttaaaatccaaatctcacttgcaccaattgaagaaaagaagaaggttggacttagacgctgtcagtgccacaggaagtcaaagtaattccccagactgtgacccggaacgcatcgagggggaatcctcggggcagcacaatcaagagctgaaggccagtgtttgagagacatgcctagtggcctttgcagagacgtggggatcaagcccaggagggaggggagtgtcgctctcccacgcctggactgaggaatgctgggcagaaggccccaccatcttctttcattctgtgctgtggtctgcagtggaaacagcaggcctttcagctccttgtgtgcctgttgtgtctggtaatgatgtagttcagagtgggatttttttctttgaaccttaaaggttttattttagaacgaggcacagatcgcacattttctacttgaggatcttttttagtggtgaataccaagattcagtgcatcctttaaaagagcgttcttgtccctggcgctggctaaaaatagctcgtttccagatgcttttgtagatgactgaagtattgtaaggcgcagtcaggagctctggactcgagaacggcagaaaggagtagtgcagagagatgattaagcaaactctcccagctctgtgaatctacagaagagggggtcaggctgaggtggttgtgacctggatcttgaagactaaaagacacagagtctgctgagctgctcctgtgcatggtggctgtctcttcatctagggcagaaatctatagattcttttgaaatgtaaataaaaagattgtaaacgcg

SEQ ID NO: 1642 - DNA, 4214 bp, Mus musculus
  misc_feature 3914, 4029: n = A,T,C or G
gcggacccgcaggcgcagacgcgaaggaggtggtaatcggcaagctgccttccttgctggcatcagggttgctctagtgccaagagtaatgcaggaagatgtaggggattggggagcagaagagcgctgtgaacctgacctttggaagatattgctggagggtaggcactggcctgcaagatcctttctgctacctcaagtctgagcatcctcgaagcagtgtctgcctggggacagctggaaactcagaggctggggagcagcagcatgcagccggaggagggaacgggctggctgttggagctgctgtccgaggtgcagctacaacagtatttcctgaggcttcgagatgacctcaacattacccgcctatctcattttgaatatgtcaaaaatgaagacctggaaaagattggcatgggccggcctggccagagcgggctgtgggaggccgtgaagaggaggaaggccatgtgcaaacgcaagtcatggatgagcaaggtgttcagtggaaagcggttggaggccgagttcccttcccagcactctcagagcaccttccggaagccctcccccaccccagggagcctgccaggggaggggaccctgcagagcctcacctgcctcattggggagaaagacctacgcctgctggagaagctgggggatggctcctttggcgtggtgcgcaggggtgaatgggacgcccccgcagggaagacggtgagtgtggccgtcaagtgcctgaagcctgacgtgctgagccagccagaggccatggacgacttcatccgggaggtcaatgccatgcattcactagaccaccgaaacctcattcgcttgtatggtgtggtgctcacactacccatgaagatggtgacagagctggcacctctgggatctttgttggaccgcctacgtaaacaccaaggtcatttcctcttggggacgctgagtcgttacgctgtgcaggtggctgagggtatggcctacctggagtccaagcgcttcattcaccgggatctggctgctcgaaacctgcttttggctacccgggacctggtcaagattggggacttcggactgatgcgagctctgccccagaatgatgaccactatgtcatgcaagaacaccgcaaggtgccctttgcctggtgtgcccctgagagcctgaagacacggactttctcccatgccagtgacacctggatgtttggggtcacactgtgggagatgttcacctatggccaggagccctggattggcctcaatggcagccagatcctgcataagatcgacaaggaaggggagcgcctgccccggccggaggactgccctcaagacatctacaatgtcatggtccagtgctgggcccacaagccagaggacagacccacatttgtggctcttcgggacttcctgctggaggctcagcccactgacatgcgggcccttcaggactttgaggagccagataaactgcacatccagatgaatgacgtcatcactgtcatcgagggaagggctgagaactactggtggcgtgggcagaatacgcggaccctgtgtgtaggacccttccctcgaaacgtcgtgacctccgtggctggcctgtcagcccaggacatcagccagcctctacagaatagcttcattcacacaggacatggtgacagtgacccccgccactgctgggggttccctgacaggatcgatgaactgtacctgggaaaccccatggaccctcctgacctgctgagtgtggaactgagcacctcccgacccacccagcacctaggacgggtgaaaagggagcctccacctcgcccacctcagcctgccatcttcactcagaagacaacatacgaccctgtgagtgaggacccagaccccctgtccagcgacttcaagaggcttggcctgaggaagccagccctgcctcgagggctgtggctggcaaagccctcagcccgagtgccaggcaccaaggcagaccgcagcagtgggggtgaggtcacactcatcgacttcggtgaggagcctgtggtcccaacccctcggccctgtgcaccctccttggcacagttggccatggatgcctgctccttgctggacaagacaccaccacagagccccacacgggcactgccacgacctttacaccccacccctgtggtagactgggacgcgcgtccgctgcccccgccccctgtctatgacgacgtggcccaggatgaggatgactttgaggtctgctccatcaacagcacgctagtaggtgcaggcctccctgctgggcctagccaaggcgagaccaattacgcctttgtacctgagcaggcgcagatgccccctgccctggaggataacctgttccttccaccccagggcggaggcaagccgcccagctcagtgcagactgcagagattttccaggcactgcagcaggagtgtatgcggcagctacaggtccccactggccagctgaccccctccccgaccccaggaggtgatgacaagccccaggtgccaccccgggtacctattccccctcggcccacgcgtccacgtgtggagctatctccagctccctcgggtgaggaagagacaagccggtggcctggacctgcctcgcccccccgagtgcctccccgggaacctctgtctcctcaaggttcaaggaccccaagccccctagtgccacctggcagctctccactaccgcatcggctctctagctcacctggaaagaccatgcccaccactcaaagctttgcctcagaccctaagtatgccactccacaagtgatccaggctcctggcccacgggcaggcccctgcatcctgcccattgtccgcgatggcaggaaggtcagcagcactcattactacctgctgcctgagcgccctccttacctggaacgctatcagcgcttcctgcgggaggcccagagcccggaagagccggccgccctgcccgtgcccccgctgttgcccccgcccagtactccagcccctgctgcccccactgccaccgtcagacctatgcctcaggccgccccagacccaaaggccaacttctccaccaataacagcaacccaggggcacggccaccatccctgagggccgcggctcggctgccacagaggggctgcccaggggacgggcaagaggctgctcggccagcagacaaggtccagatgctgcaggccatggtgcatggggtgaccacagaggagtgccaggcggccctgcagagccacagctggagtgttcagagggctgcccagtatctgaaggtggagcagctctttgggctgggtcttcggccacgggtggagtgccacaaggtcctagagatgttcgactggaacctagagcaagccggctgtcaccttctgggctcctgtggccctgctcatcacaagcgctgatggttgactggagagcagtggtctgccctaaaagaacctcttgaacctgtctgtgggacaagggtgggggacctcccctccctcaggcccgaaggacccacaactgcctgcggctcccaggggacagtgagacccaggcagcaggaggctgggagcctcaccttgcccacctcgctcacccacccagcgctgttctgcacaccttggttcagccctcagtgccccaagaggtgggacgttcccagcgtggcctgcctctggctccagatcaaggctgggctggtggctagagtgtgccccaggctttcctctgggggattagactgacaggaagccaggcttgacatggacaagaaggatgtgttggccacacagcagggcgagccagcaaccaacaggccctcctcagggctaggccccttcccagggaacccctgtaggagtgtggagtgttggacagaatgtgacctgtagcttcnactgtgaacttgtgggcttggctggtcttaggaacttgtacctataaacagcctgaagtggctcagaaacagaaaaggtgccaggatcttctctggcagggaccagggcccaagnccccggatgtggaaggagaccccagtggcaccagtactttcctgtttgacctgttcctcccctgttgctatctgatgtgttcccatcagcctctgttgccaaagtcgtggccccagctatggatatctgcttcttccagagaaataaagcttgtttctattttatgttaaaaaaaaaaaaaaaaa

SEQ ID NO: 1643 - DNA, 2187 bp, Mus musculus
cgctggctccgtgcgccatggtcacccacagcaagtttcccgccgccgggatgagccgccccctggacaccagcctgcgcctcaagaccttcagctccaaaagcgagtaccagctggtggtgaacgccgtgcgcaagctgcaggagagcggattctactggagcgccgtgaccggcggcgaggcgaacctgctgctcagcgccgagcccgcgggcacctttcttatccgcgacagctcggaccagcgccacttcttcacgttgagcgtcaagacccagtcggggaccaagaacctacgcatccagtgtgaggggggcagcttttcgctgcagagtgacccccgaagcacgcagccagttccccgcttcgactgtgtactcaagctggtgcaccactacatgccgcctccagggaccccctccttttctttgccacccacggaaccctcgtccgaagttccggagcagccacctgcccaggcactccccgggagtacccccaagagagcttactacatctattctgggggcgagaagattccgctggtactgagccgacctctctcctccaacgtggccaccctccagcatctttgtcggaagactgtcaacggccacctggactcctatgagaaagtgacccagctgcctggacccattcgggagttcctggatcagtatgatgctccactttaaggagcaaaagggtcagaggggggcctgggtcggtcggtcgcctctcctccgaggcacatggcacaagcacaaaaatccagccccaacggtcggtagctcccagtgagccaggggcagattggcttcttcctcaggccctccactcccgcagagtagagctggcaggacctggaattcgtctgaggggagggggagctgccacctgctttcccccctcccccagctccagcttctttcaagtggagccagccggcctggcctggtgggacaatacctttgacaagcggactctcccctccccttcctccacaccccctctgcttcccaagggaggtggggacacctccaagtgttgaacttagaactgcaaggggaatcttcaaactttcccgctggaacttgtttgcgctttgatttggtttgatcaagagcaggcacctgggggaaggatggaagagaaaagggtgtgtgaagggtttttatgctggccaaagaaataaccactcccactgcccaacctaggtgaggagtggtggctcctggctctggggagagtggcaaggggtgacctgaagagagctatactggtgccaggctcctctccatggggcagctaatgaaacctcgcagatcccttgcaccccagaaccctccccgttgtgaagaggcagtagcatttagaagggagacagatgaggctggtgagctggccgccttttccaacaccgaagggaggcagatcaacagatgagccatcttggagcccaggtttcccctggagcagatggagggttctgctttgtctctcctatgtggggctaggagactcgccttaaatgccctctgtcccagggatggggattggcacacaaggagccaaacacagccaataggcagagagttgagggattcacccaggtggctacaggccaggggaagtggctgcaggggagagacccagtcactccaggagactcctgagttaacactgggaagacattggccagtcctagtcatctctcggtcagtaggtccgagagcttccaggccctgcacagccctcctttctcacctggggggaggcaggaggtgatggagaagccttcccatgccgctcacaggggcctcacgggaatgcagcagccatgcaattacctggaactggtcctgtgttggggagaaacaagttttctgaagtcaggtatggggctgggtggggcagctgtgtgttggggtggcttttttctctctgttttgaataatgtttacaatttgcctcaatcacttttataaaaatccacctccagcccgcccctctccccactcaggccttcgaggctgtctgaagatgcttgaaaaactcaaccaaatcccagttcaactcagactttgcacatatatttatatttatactcagaaaagaaacatttcagtaatttataataaaagagcactattttttaatgaaaaaaaaaaaaaaaaaaaaaaaaaa

SEQ ID NO: 1644 - DNA, 1220 bp, Mus musculus
tatccccgactgacgttgggcagcaaagatggcggcaggaaccagcaattactgggaagatctcaggaaacaagctcggcagctggaaaacgaacttgacctgaaactcgtttcctccagtaaactctgtacgagctacagccacagcggctcacgggatggaggacgcgataggtacagttctgacacaacaccgctattaaatggatcaagccaagacagaatgtttgagacaatggcaattgaaattgaacagcttttggcaaggcttacaggagtaaacgacaaaatggcagagtacacccacagtgcaggggtgccctccctgaatgcagccctgatgcacacgctgcagcgacacagagacattctgcaggattatacacacgaatttcataaaaccaaagcaaactttacggcaatacgggaaagggagaatctcatgggatcagtacggaaagatattgagtcatataaaagcgggtctggagtaaacaacaggagaacggaactgtttctgaaagagcatgaccaccttcgaaactctgatcgtctgatagaagaaacaataagcattgctatggcaacaaaagagaatatgacttcccagagaggaatgctcaagtcaattcacagcaagatgaacactctggccaaccgctttcctgccgtgaacagcctgatacaaaggatcaaccttaggaaacggcgtgactcgctcatccttggaggggtcattggcatctgcacaattctgttgctgctgtatgccttccactgaaagcatagccccaggactctctgcccaccaccttcatggcctgatctgggactggggagcctaccaaggagaaagacccatcccggccacgggcgccagcagatggattccaaactgcaccctgtggctctgacctggtcgggctgagctgaagccgaagtttttctgtgctatcttttctaatacacattactctgtttttaattttaaaaacaacaaaaggtttccgttgctgtgtctccctaggaggtaagcaggcagaagctgagaagctgggcttcagtgactggcgaggccagatgatcagcgggcctcggagctggactcctcgtagcaccagactctctacatccaaagatggcttcactttcagcacacgagattggaatgtgaataaaagtaatttttgtccttttaaaaaaaaaaaaaaaaaaaaaaa

SEQ ID NO: 1645 - DNA, 2053 bp, Mus musculus
gaaaaaaaggccactgtctgtcctcggttgaagcttcttggatgcatgaccaccaggctaggagcacatgccggaatgttagatatgttcagtcaactaggttggagtgggtagacgccagccatcgctgcgtgagggcctgggtatcttcctcaggagggatccatggtagagagagttgctcttggattcatcttgctgagggtcctcctcaggagttcattcttcccacggccttttctaaaggcaccgaagagagcattggtcaggccagaggaacgctggcttcctcactccctctactagggtcttggtacttggagagactttcacagggacaagaggaagaaggaacaataacatcatctgtgggaaagagaaccagcttccttgtggtgactacacagcaggttgttgtatggaaggactaggaaccagcaggccaccgactacatttcgtatcagcacacatcatcagttctaagagtccatgttgatctcgcaagtagaaggatttaaaagagaaaggttcccacagaaaccaagaaccttaccatctcctttagccctggagggtggcggacaatggatatcatagagacagcaaaacttgaaggtcacttggaaagtcaaaccaacgactccaccaacacttacacaagccccaccgaagctgtagaggaagagggcaaaaatggcaagggcaaacccaagaccttatccaacgggttacgaaagggtgccaaaaaatacccggactacatccagatttccatgcccaacgactccaagaacaagtttcccctggagtggtggaaaacaggcatcgcctttgtgtatgcgctcttcaacctcatcctgacaaccgtcatgatcaccgtcgtgcacgagagggtccctcccaaggagctcagccctccgctcccagacaagttttttgattacttcgaccgggtcaaatgggcattttctgtatcagaaataaacgggatggtattggttgggttatggatcacccagtggctctttctgcgttacaagtcaatagtggggcgcagattcttcttcatcatgggaactttatacctgtatcgctgtataactatgtatgtcactacgttacctgtgcccggaatgcacttccagtgtgctcccaagctcaatggagactctcaggcaaaaatacagcggattctccggctgatttctggcgggggactgtctatcacgggatctcacatcctgtgcggagacttcctcttcagcggccacactgtcgtgctcacacttacttacttgttcatcaaagaatattcacctcgtcacttctggtggtatcacttggtctgctggctgctgagtgcggctgggatcatctgcattctcgtagcgcatgaacactataccgtggacgtcatcattgcttactatatcacaacacggctgttttggtggtaccattccatggccaacgaaaagaacttgaaggtctcttcccagacgaacttcttgtctcgggcttggtggttccccatcttctacttttttgagaagaatgtgcaaggctcaattccttgctgcttttcctggccgctgtcctggccccctggctgcttcaagtcatcgtgcagaaagtattcccgggtccagaagatcggggaggataatgagaagtctacctgagctgccaacccggcagccgctctcacaccaaaagagtccgtgctgcaaccgaaggcacgtgcggctttatatttattttcagagaactgactggtaaaatgaagtggaccaaattttatgcaaaagattggagcgatgaagtattacctttggctttttttttattcatcccaagaaacatatattttcctgcagctcttcgttcattgatgacaaagcccccacactggagttctgaagaggtggcaaagaacacgccgagcctctcctcgccttccttcacttccacgttctttccagattgctttttttctcccttcaaggtcagaagagtttgctaacgttttgaataaaatgtctggatatatac

SEQ ID NO: 1646 - DNA, 1002 bp, Mus musculus
ttgaaggccaagttggcactttgattacagccatccccgactatagcactagaattctgacttccttactgggatttacccaaggaggaaggtgacgtgactcatctgcttcaaacataaaggagagaaactactttatctacaccgagaaactctatccactgaggcacaacagtagtttcaaatggagcattctttaaatcaaacacattgaagatattattggatgtaaaaccatgaaacttaatttacattccctgctatagacattagccttctttaattcttcttgccattatatacatattttggctccagactaagcaccaacttaagtcttcaaggaggaataaaacttagcaagattctggcttgcaaatcttttctcacctctctgcaaggctgagtaccaggtgttttgactttcggtttcaaatgttggcaaatgcagcttttgacttctccaaaagctttcagatactcaacctcattttctttgacttatagtcactagcagatatttaaattaaaagaatatgtagccttgctgccagaagagcaaaggagtccataacttataaatctgcagtgtgttcctccttggtagtgatattggccagtgcttagttttaggccaacatatacaaatagagtattgatttgtacgcattctggagacttgctatgtcatagtttgctatagcccagactcagcttagcatgggaatgcttgggacttcactgagagtggagtggctgctgcaatctttggcattgccttgtaattagggacttcatgagcaacaccttaacgagggtaccacagtgcggtctctgtgtgcatatacagaactcatgtgcaggataaatgtgtgcaccaagcaaacctgaaactttatgtgactgtcaaatgactattatttgggttaagatttttttttcatttctgatttggatagaaaattgctattaatcttgtattaaaatagtttttaaaaatct

SEQ ID NO: 1647 - DNA, 785 bp, Mus musculus
aactacgaatcctttctgaggcgagatctttccattgttccaataaaaacctaagcaagttgaatgtggaagtcggtaagtagggagcaccccgccttctttacaccagcggacctctgggttactttctaccatgggtctcagccacatacacatacacacgcacgcactcatgtgcacacactcaatacttgagaaggatttgtgaaaatgtacatacccagtacacagatgtacacagtgctctgacagccctcaagctcttctgaggcttagcagtgatgggtccacaacatggaatactgaaagggattcactgagatctacgtgtgctaataaagtgcttgaagccagcctggtctcttccccagcatcccctagtccaaggccagctgccacacacacatggacagagaaaggcgagacaccggttacttctcctagccaactggctcattattatttgctgaatatttgctggatttttctggttttgttctgttttagaatggggtgggagtggatgttatgtcacaatcctaatacagtaaagttttgcatcttccatatcttatgcaaaaacagacatttaaatcaataaatagttgtgccctagactgaaagttaatgtttaggagagggaaaaattgttggaattttttctacatttttttgtgaagaatcttttttggaaaggaaggatacatatttttgttgtgtaatattttctatttttgaatgcattttattggtacaagactgtttttttggtgaagacattatct

SEQ ID NO: 1648 - DNA, 698 bp, Mus musculus
aagtcagcccaggagactgggccagcttcagggaggctgcctgtctgtgagagggccagcgccttcctcacttgggcaagtcccctgcacatgacctcattttaggaccaagagctatgttggtttcttagattgttagctttttctctagaggaccacagtgggtatggcttggagtccagggcccttggctatacaaacaatatttaggtccttgtccaggggagaacttcgtgtatgccatgtcagccccactttttgtcgttgttttccatgaggcttttttggaccatggtcggagcttaggcactttctgtaagaatgtttctgtaaagatggttatttaacgcttcctagtccccatcatgttagtcctccagagcgctaacccagaggccagtggaactgcccaggtgtccacagaggggctgcagcctgcagagaactgctccagcccccctccaccttagtagcatgtgtggaccaccaggcatctgactgcccttgaccagcctcgggtaggagggctgcctctgtccccatgactgctttcctttgccacccatacttgtttgaagttgtgctgacagcttttttttttgtaccctttcccgttcccagtttgcgttggaattggcagcagccagggacttgctattgatgaattttacattaaatagtcctgttgccttacctgt

SEQ ID NO: 1649 - DNA, 3636 bp, Mus musculus
ccgcagggactaggagcctgggctagaaacgtctaggttgtgatagaggctagctgctgtcgccgcaggcatacggaaacccctctgcctggactgggtgtctgcaccagcgcagggctagcttttctcggaacttgcacggtgcacccctggacagcatgcttgggattttctttctgggtgtgctggctccagctagcctggggctctccgcactagccaagctgcagcccacaggcagtcaatgcgtggagcatgagtgcttcgcgcttttccagggccccgcgaccttcctcgatgccagccaggcctgccagcgcctgcaaggacatttgatgacagtgcgctcctcagtggctgccgatgtcatctcccttctgctgagccagagcagtatggatttagggccctggatcggtttacagctcccgcagggctgtgacgacccggtgcatctcgggcccctgcgcggcttccagtgggttactggcgataaccacaccagttacagcaggtgggcgcggcccaacgaccagacggctccactctgcggccctctgtgcgtcacggtctcgacagcaactgaagctgcacccggcgagccggcctgggaagagaagccatgcgagactgagacccagggtttcctctgtgagttttacttcacagcttcctgcaggcctctgacggtgaatactcgcgatcctgaggctgcccacatctctagtacctacaacaccccgttcggggtcagtggtgcggactttcaaacgctgccggtaggcagttccgccgcggtggagccccttggcttggagctggtgtgcagggccccgcccggaacttcagagggacactgggcttgggaagcgacaggagcctggaattgcagcgtggagaatggtggctgtgagtacttgtgcaataggagcacgaatgaacccagatgcctctgccccagagacatggacctgcaggccgatggacgttcgtgtgcaagacctgtggttcaatcgtgcaacgaactctgcgagcatttttgtgtcagcaacgctgaagtgccaggctcttactcctgtatgtgtgagacaggctaccagttggctgcagacggacaccggtgtgaggacgtggatgactgtaagcaggggcccaatccatgtccccagctctgtgttaacaccaagggcggcttcgaatgcttctgctatgatggctatgagttggtggatggagagtgcgtggagcttctggatccgtgtttcggatctaactgcgagtttcagtgccagccagtgagccccaccgactaccgatgcatctgcgctccaggcttcgcacccaagccggatgaaccgcacaagtgcgaaatgttctgcaatgaaacttcgtgcccagcagactgtgaccctaactctcctactgtttgtgaatgccctgaaggcttcatcctggacgagggttccgtatgcacggacattgatgagtgcagtcaaggcgaatgcttcaccagtgaatgtcgaaacttccctggctcctatgagtgtatctgcgggcctgacacagcccttgctggtcagattagcaaagactgtgaccccatccctgttagggaagacaccaaggaagaggagggctctggggagcctccagtcagccctacgccaggctctccgacaggtcccccttctgcaaggccagtgcactctggcgtgctcattggcatttccattgccagcctgtccctggtggtggcgcttttggcgcttctctgtcacctgcgcaagaagcagggcgctgctcgtgcagagctggagtacaagtgcgcatcttccgccaaggaggtagtgctgcagcacgtcaggactgatcggacgctgcagaagttctgagggbatttgctccagagacccaggtggcctttgtctttccgggctctgtacctctcctctcctctctctctctccagcctcccagctgtgttctctggcaacttaaaagcaccctggctggtataataaccagagaagagcccatcctctcaggabcaagcgagggtagggaggacttgaagcaggacagcccagtttcttccaagtagatactggacaactgggcggaggtggcaaatacagcggagatcccagagtaccccagtccctcacctcacctcctagtgctgctgatctgtaggcttgaaggcaaaccttgaccccatgggctggagatgacccagatatttattttttttaaagtatttagtattttcttccctccagttttcttctgcttgtaagtctccagccccccacagctttctcagtccctccattccccccctcctgtcattctcctccccaaacctgatcataactttgcccttaccgttgtttccaaactcttatgtgaaacagaaaagaaacactaaaagcagaaaacgttctttttcactggctttgggtatttagtcagaaatttcaggtaaccaaagcaaaagaattttaacaaaagctaaaatatttcagctgaacactaactagtcaatagtgctggaatgtcacagaaaataaacttaaggaagtagggttttttttttttttgaaatctttgtttttgaaagggtgagcctgggttttatgattgttgctgttgttttgaatgggaatgacaaaagaggtcattattgttaagatttttatgcaggctctacagtgttattaatttttgacagtgttcaaaatgtgcagaggatcctttgtccaaccctttgacatgacaataggacattgctatcttgagacatactgggccacattcatagctttccaaggatgtatgtggtcctgcctcaacatatcagagcctgacagatggaagcaccttccagtaaagcatgagttgtgtgcttcgtgccgagctgactctcaactgtgcctgccccttgtagtcccgaaatacaagcaatgtgctgctgagggaaacatggaaacttgggaatggagtctgggggtgcctagatggggctttcttttaatgagactcttgaacaatatctcgtaattcagagggatcttctagccctggccactggcctgtacacaagaattgggacctcgcttgggatctggctagaattgcaaaatcctagcccccacccctgccccaccccagtgtgccagttcataagaatctgcattttgacaacatccacagggacattgtccagtcatttcaggacaactggtcttaagagtttccaacctttgtagaacatttaaatgtcggttaataataagtagcaggccatgttaaggccatttattatcaagaaactgaggaattttctctgcatagctttgctttctggatacaataaaatgagaaggtacacacctctagatagtgccacacagagtccagaagggttttgttttaagtaagctaggaatgagttcatatgttagtgtaaggaacaaatgtattatatgtgtatcttttgtaaagaaaggtttttctttacggttttgtaagctcagcatatttgtacatatttatttattggagtttcgctagaacacaagcaaagcctttgcttatgacgtcacatgtacaaaataaatagatgacagtgtactg

SEQ ID NO: 1650 - DNA, 843 bp, Mus musculus
ggtgctgggctgaacccagagccagaaaagagtcggttctgagttccctgtgggtgtgcggccgccgcggaggggaacatggcgctcgtgggcagccgagtggaattggacgcggacgaggatatctttgaagatgccttggagaccatctctagatctccatcggacatggccaccagcggctttcactttgtaccatgcgagaccaaacggacctccagacagcttggagcatctgctatgggaagacctgaaggttcatcagccaaggtggatctcaagagcggcctggaggagtgtgcagaggcactgaacttatttctaagtaacaaatttaaagatgccctagagttgctacgtccatgggccaaggagagcatgtaccacgccttgggctacagcaccattgtggtgttgcaggctgtcatgaccttcgagcagcaggacatccagaatggcatctctgccatgaaggacgctttacaaacctgccaaaaatacaggaagaaatgcacagttgtcgagtctttctcaagtctcctttctcgagggtccctggaacaactgagtgaagaaactgatctccgagcatccctaagaacaagagctggtactgggaggcctaaagtgtttccgagacaatccatgagactgaactggccccagtatgacttgcattgccttttccttcctgggaaccccatgtgactccttccctggtccattggtgactgcttccctttttctttgtggtgtgaaggtgacactggagagttttaaaccttagttttaagaggaatgacatggtatttttggtgtgagaataaataattctaaaacatg

SEQ ID NO: 1651 - DNA, 1174 bp, Mus musculus
cggacgcgtgggtccgcggaccgaccgagcgcaccgaccatggcctccaagtgtcccaagtgtgacaagaccgtatacttcgctgagaaggtgagctccctgggcaaggactggcacaagttctgtctcaagtgtgagcgctgcaacaagacactgacccccggcggccatgctgagcatgatgggaagcccttctgccacaagccctgctatgccacactgtttggacccaaaggcgtgaacatcgggggcgctggctcctacatctacgagaagcctcagaccgaggcccctcaggtcactggccccatcgaggtccctgtggtgagaactgaggagcgaaagaccagcggcccccccaagggtcccagcaaagcctctagtgtcaccacattcactggggagcccaacatgtgtcctcgatgcaacaagagagtgtacttcgctgagaaggtgacctctctgggcaaggactggcaccggccctgcctgcgctgtgagcgctgctccaagaccctgaccccaggcgggcatgctgagcacgatggccagccctactgccacaagccttgctatggaatactctttggacccaaaggagtgaatactggtgctgtgggcagctatatctacgacaaggacccggaaggcacagttcagccctagatctgcagatgctgtcctcggggtccccctgtttgacccggaggcaaagtggcctgttgcctagtcctgcctcagcgtgtctcgcctgcaaatccgggacctaagtggtggaggagaaagcctggatagtcccagagcttcagccccctttgtcaccttggcgtgtcccgtgctgcccaccgtttacttcctgtctgtgtgcctccgtagccccatgggtcctgtgttcctgtgtccctgatagctctccaaggtgactgtcctatgatatatccctttgcccacacctgcccaccagtattatttatgctctgcttgccggtgatggccgtgagctcacagcattcccagggtgatggctggtgcccttgcgaggagccctctgctggttccacactactccctacctaccctcacatggttcatggctatggagacttttgctgtcaataaatagtttggtttgaggattgcaaaaaaaaaaaaaaaaaaaaaaaaaaaaaaaaaa

SEQ ID NO: 1652 - DNA, 845 bp, Mus musculus
tggcacatctgggcagctggtgggagcatgaacggctcacaggtgggagctgcagccaaggctgcctggctgagctgctgcaaccagtccgggctgccactcggacccccagaggggccacgcatggtgcaggcagtcgtgctgggagtcctgtcacttttggtgctctgtgggatcctgttcctgggtggtggactcctcctccgcgctcagggcctgatagccctgctggcccgagaaaggcattcaacccccgaggctgagcctggtgcctgtggaggggatgacgactcctaggtgtcagctgctcttgagattcagcctgttctgtggccacgccatccagagttcatttttgtgaggcacagcggaaggtccaacccacaagctcttatttcccgcacaggtgctggacatctcccctcgcctgccgcccacccgcaccctatttgggcttgtggtgatggactgaagacaccggaccggtgactcctcatcctgggactctgttattcggctgtctccgagctgctcccgacactcctggggtgggcgcaggagactcccgctcagaacaagaacaagtgagtttgcttggtgactgccctgtgccatgggcactggctttacaccccaacggcgtgcacacgagtgtgccctctgcacaccaagctctgtggacacgagtgcagctcctgtcttgcctgatgcggtatctgacaacccagtgccctatcgctgtcgagaacctggaactgtttcccatctggagagtgtgtcagccatccagcaacagttccagcatcgcttcccacggctttgccattaaataggccaggaacgcg

SEQ ID NO: 1653 - DNA, 607 bp, Mus musculus
cgcccttcagcctagagcgcggaggaggacggtagctcggtcacggggtttggagtcgttgtttttcctatagttggagtcgaggtcaaacctctcgtggaacctgcctcaagatgatgaacggccggccgggccatgagcccttaaaattcttgccggacgaggcccggagcctgcccccgcccaagctgaacgacccgcggcttgtctacatgggcttgttgggctactgcacgggcctgatggacaacatgctgcggatgcgaccggtgatgagagcaggtttgcaccgccagcttctgttcgttacgtcctttgtctttgctggatacttttatttaaaacgtcaaaactatttgtatgctgtgaaggaccatgacatgtttggttatataaaattacacccagaagattttcctgaaaaagagaagaaaacctatgctgaaattcttgagccattccatccagtgcgttgaagttttcaaaaggcttgttcctgttcctcttcaccacaacctgaatattttctgagttttatgggattttctgtgacagtgaagtttaggttaagatgttaacactgttattaaaatagttattacaaatc

SEQ ID NO: 1654 - DNA, 703 bp, Mus musculus
gtcccgggcagtgcctgaggtccggatgggcagtgtatcgctgatccctctacgaggcagtgaaaatgaaatgcgccggagtgtggcagccttcactgctgaccccctttcccttctccgccatgtctgagcacaggagtcgttctgactctgggacaccatcactgccaccaggaagctttcctgttcagacgccctcgtgctctgcgtgtttggtgtgagccaacagaacacacggggaagccatacccacatcccatatcctgactgcagcacaggcttcttggctgggcaggaatgggctggcaatggggatttcccaggagggacccttccttttcctgcaggcaagcaatgctcttgacctggcttgcttacctagggtcatgctctttgaatccgtggaattggaaagatggacagaaatcaggagctgtgcaggagaagggtttggggccccgctgggagggagcccacccccttcccacaggctcccaaatggaaagggtgacactctgaacgtactcccgggggtctacaagggagctcgtgggaagcttctgcagggtgatttctggacttggggacatcagccctcttctggtgtgtgctggcagggaggcccaggctgtggctgtctgctatcccttccccactttggatactttttgataatataaatatatctgtatattttaccctg

SEQ ID NO: 1655 - DNA, 1986 bp, Mus musculus
cctgtcctgctgccgggtgctgccgggaggatgcggccggagcccggaggctgctgctgccgccgcccgatgcgggcgaacggctgcgtcaagaacggggaagtgaggaacgggtacttgaggagcagcaccgccaccgtcgcggctgccggccagatccatcatgtaacagaaaatggaggactgtacaaaagaccgtttaatgaagcttttgaagaaacacccatgctggttgctgtgctcacatatgtgggctatggcgtactcaccctctttggatatcttcgagatttcttgaggcattggagaattgaaaagtgccaccatgcaacagaaagagaagaacaaaaggactttgtgtccttgtatcaggattttgaaaacttctatacaaggaacctctacatgagaatcagagacaactggaatcgacctatctgtagtgtgcctggagccaaggtggatatcatggagagaaaatctcatgactataactggtcattcaagtacacagggaatataattaaaggtgtaataaacatgggttcctacaactatcttggatttgcgaggaacactggatcatgtcaggaagcagctgctgaagtcctcaaggagtatggagcaggggtgtgcagcactcgtcaggaaattggaaacctggacaagcatgaagaactagagaaattggtagcaaggttcttaggtgtggaagctgctatgacctatggcatgggatttgcaacaaattcaatgaacattcctgctcttgttggcaaaggttgcctgattctgagtgatgagctgaaccatgcgtcactggttctaggagccagactgtcaggagcaaccattcgaatcttcaaacacaacaatatgcaaagcttagagaagcttttaaaagatgccattgtttatggtcagcctcggacaagaagaccctggaagaaaatcttaatccttgtggaaggcatatatagtatggaggggtctattgttcgccttcctgaagtgattgctctcaagaagaaatacaaggcatacttgtatctggatgaggctcacagcattggggctcttggcccttcagggcgaggcgtggtagattactttggcctggatcctgaggatgtagatgttatgatgggaacattcacaaagagcttcggtgcttcaggaggatacatcggaggcaagaaggagctgatagactacctgcgcacacattctcacagtgctgtgtatgccacgtcgatgtcaccgcctgtgatggaacagattatcacctccatgaagtgcatcatggggcaggatggcaccagtcttggcaaagaatgtatacagcagttggctgagaacaccaggtatttcaggagacgcctgaaggaaatggggttcatcatctatggcaatgaagactccccggtggtgcctttgatgctctacatgccggccaaaattggcgcctttggaagagagatgctgaagcggaacattggtgtagttgtggtgggatttcctgctaccccgatcattgagtccagagccagattttgcctgtcagcagctcataccaaagaaatacttgacactgctttgaaggagatagatgaagttggggatctgctgcagctaaagtactctcgccaccggctggtgcctctactggacaggccctttgatgagactacctatgaagagacagaagactgagcctttctggtgctccctagagggggataattcctcccaggacagtgtgtgccctttctgagccaattccaggaaccacacttcagtgaccacttcatgtgaaagacatttctgaagctactgaaggtggccaccttcactccaaatggcattttgtaaatagtaaaaaaaccaaactgcttcacattcttcctctgtttgctaagtctcacacacacacacacacatatgattactttgtccattaaaaatgttttattttaaaaaaaaaaa

SEQ ID NO: 1656 - DNA, 703 bp, Mus musculus
gttgttattccaagactggagataggcagggttaaaaatattataacttttcttttaatgatggtgctaaaattatttctataaaattctttaaagataaagattgtttcatcaatgctatttgtgaacacagaactgttaaacatcccatttgagagatagatcattattcctgggtcttttaactgttccttttatgatgtatttagaacattgtgtaatgcttgcaagtgtcttaacctaggacacataggtccccttgtgtctcaagattttttccttaattgcagttgtttgctccattgttgtttcttacttaaataatctgggccatcccaaaggacaaggcccacatagaactttgatcatgtatctctgcaaagcatcgaattaaatgcatgcttctgtcatgtcagtcatcttcagtttgttgaatcctttgaacatattaggtccttttagtttccaggagtgaaaactaagatctcctggtagtttttgttcacaatttagtagacgatgcaacaagtacctaccattttgtctgcactggcttaaaaataaacctatctgtaacattgcctgcaaaggcatgttgacatcaatgaagacagtctatgcgttagaaaactcaggctagtgattggtaaagagtaaaggaaatgaaaaatccattattgaataaactaataataaaacatgc

SEQ ID NO: 1657 - DNA, 2962 bp, Mus musculus
aaaagctccgtgccctccagcaaaccagaggacttgggagcagctgcatgttgagtctccaggatgaggccagcgcttgccctgtgcctcctctgtcctgcgttctggcctcggccagggaatggggagcatcccacggccgatcgcgcagcttgttcggcctcgggggcttgctacagccttcaccacgcttccttcaagagaagggcggcggaggaggcctgcagcctaaggggcgggactctcagcaccgtgcactcaggctcggattttcaagctgtgctcctgctcttgcgtgcaggtcccgggcctggcggaggctccaaagatcttctgttctgggtggctctggaacgcagcatctcacagtgcactcaggagaaagagcctttaaggggtttctcctggttgcacccggactcagaagactcagaggacagcccactaccgtgggtggaagagccacaacgttcctgtacagtgagaaagtgcgctgcgctccaggccaccaggggagtggagcctgctggttggaaggagatgcgctgtcatctgcgcaccgatggctacctatgcaagtaccagtttgaggttctgtgccctgcacctcgcccaggagccgcctctaatttgagtttccaagctcccttccggctgagcagctccgcgctggacttcagccctcctgggacagaggtgagtgcgatgtgtcctggggacctttctgtttcgtccacctgcatccaggaagagacaagcgcacactgggacgggcttttccctgggacagtgctctgcccctgttccgggaggtacctccttgctggcaagtgtgtggagctccctgactgtctagatcacttgggagacttcacctgcgaatgtgcagtgggctttgagctggggaaggacggacgttcttgtgagaccaaagttgaagaacagctaaccctcgaggggaccaagttgcccaccaggaatgtaacagccactccagcaggtgctgtgacaaacagaacatggccaggtcaggtctatgacaagccaggagagatgccacaggtcactgagattcttcagtggggaacacagagtactttacctactattcaaaagaccccacaaaccaagccaaaagtcactggcacaccatcaggaagcgtggtcctgaactacacatcttcgccccctgtttctctgactttcgacacctgttccacggtggtcttcatacttgtgagcatagcagttatcgttttggtcgtcttgaccattacagtgctggggcttttcaaactctgcttccacaaaagccgttcctccaggacagggaagggagctttggactcaccaggtgtggaatgtgatgccgaggctacctctttgcaccacagttctacacaatgcactgacattggagtgaagagtgggactgtggcctgaaggactgagcttaggttcttcactggctgggtgcgctcttggatcgggacacttagggaaacacctcaatgctcacatcttgcctagactttttcagtcccaacaattggggaaagaagaaaattttcagtgattactgtggaagtcctccttcccatacattttattttgtgctaaatctgaaagagacacttgttccctgaaaggggaagaggtggaagctgtgggctggtattggaagacagggtaaaaaatggcaagagacattttcctattctctgggggaatttgaagaaatgcttgaatatttccagtactgggaacaaataaataacactataattttttgaacatttcttttcatccaaaatgggaagggaatatctatattattcaggctaggaatatattagcttgaaattttgaggcaaataataaaacattgttgaaaacctaggctaacatatgtttgacttatacaaagggtgttatttaggaatacaccattctgaggatagcaactggctatgagtttactggtaagacacacaagggtacactctgagctttgggggaaaagtctttatacaccagctccttcagaactagtgaagtttccctttattcttttatcctttgctttcaaagtcactgtgactgtgctctgccataaatcggaagtgcaatgttgccagtttctgactccagaagcaaattacagttgaccaccaatccaagtgtttactgtgtgtccttgcccaaggaaacaaatgatttgtgtcttccttttccagggtttgtgttctccagtgtaatgaccttcctattcaagccaccttgtaggcatcaagatgctgatcctcacttccaattacaatgatgttaattctcaattaaaacgttaatgctacgtattgatttgaaatcttctgggtgcactaaagccaaaggaagctttgcttcttccaaggttgctagattcttgtgtcctatttaatccatgtgggtgggggctggggacacttgaatgtcaagccatttctgtttcttctcaatagattgtgaatacaatgacaatgtgtgtgcatcagggggttgttacaactgagcaagagtctttgcaggcaaaactaggggaaattgctttccacagaattaatagtgtaaaaaggaaataacaaataaaaatataacaccttgctatgacttgagatgttagcatataataagaaatatcacacattcaggtggtaaataattaaggaataataataaaaaacaatctggttgaagccaaagaccttggagaatatttcaggtagattagagtgctgcgatttttgtaagtgttgtaaagttgtgtgaagagaaacagagaaataaactcactcttgggagaaaatgaaactagaaaataaacttgagttatatttttctagaatcatttttatactcttgattgtactaagagttgatttaaagttagcaaatatcctataataaaataacctagaaaatt

SEQ ID NO: 1658 - DNA, 586 bp, Mus musculus
ggcgcgcccggactgcaggacgagctggagctgggctgctcgaccactccgcgcccggggactcggcgacctggggccgggagcgctgggcaggtaacgtgtattggaccgggctgggggctccgggaggcccgggggcggcccttccccgacttctgtccccgcggtggcccgcgccggggcaggaagccgaagtgggtgtggagcgccagagcgggagagaaacttcaatgagaccagtccagagaggccggcgcgacacgggcaccctgtcgccctcctccctaaaccctcccgggccactccttccccgtgtttccccgatccggaggccctccgactcccaccctggctctcccgagccccactgtcgccctggcaggtacttttagggacttgttggccccggaggccagccttgagcccggtccttccggctgctccgcacgccctcgcacgtggcaggcaagcaggctgcggagaactttgctgcgtcttctaggaaattgcaatcgatttgtaacgcactttcgctaattgggagttcagaattaaactttaataaagcatttgtgttgtctcctct

SEQ ID NO: 1659 - DNA, 1623 bp, Mus musculus
agaaaatatagagcaagacttccctgcatctcaagtgctgaatctacactgggaaaaggctggactggggaatcatgttggattgtcttccggccctgacattgaaaagctactagcttcaaaggccatcagcatttctgaagaagtgtctttgcagactcaagaggacgtggaagagcaaaaggatgcagaggaaacttcagagactgaattttcagaagcagaaaatcattctagccagaaaacctatgcatgcccttctgtggggtctgctgcttgctcttctgtgggctggaacatcccttctcctggtttgaatgacagcaatgaattacttgaaagtggttcagaagatcagctccaggtgactggcttgacggatattgctgacatcattggtgaccttataactaagagtggagtgtccagccacgagcttggcttaacagaatgtcaagctagaagtatatccaggattcagcgtcctcctgaccgaggcccccgtagaactgccgaggagaggagagagattaaagcctggatgcgaaggaagcagaaggagcgaatgtcagagtacctaggtcagctggcagaaaggcgggggcgggagcgcaaccccttctgccccacaagcagcccgttttatatgacttcaaggcagatcaggcaaaggcaaaagatgaagcgtgagaaagataggttgcagctgtctaagcactatagtcagcgactctctcaggcatacagcctgatgaatgaactgctgtcggactcggcacacataactgcacctgcagagaatcccttacctcccggaccttacagacggcagcggggctcctctccaaagagagagaatgcacatggacagagtttacctgtaaatagacctggaggagacagacatatctccagatcaagccatctctgtaaggggcagccccgaggatcgtctcagttacgaggctcccagcctccctgtcagagccagaagcctctgagaagccgtggggctgctggcgtgggtcctccagtgcagcaggcgtgcagagaggatgagagggaagagatggtggtgagtccctggacgctgccctcggaaatccacaggattcttcacggcaggcccgagtccctcctacaggacatgtcgccagctgacgaggaagagcccgagccccctcttttggcgggtggcatggacagcgtgtctgagagcacaggcagcatcctgagcaaacttgattggaaagctgttgaagacatggtggccagcgtggaggataagaacctgtctgtgcactgggccttggaccagtaggacctgcatgacattctctttcccagcactggccagagtctcactgttgtggccctcagagttctgtgggtctaagactgcgaaataatgaaagaatttatatcctgcagccataggcttctctgggttaaccattcattccaagatggaaagtaaacatgaatcagtaatgttgcctttatgagaaaggttgtttaactagagaaaaagtattacgttttgcatatctgattcattttaaatacttgtcaagccaggttttcacaacatttaaattacttcaaataaaaattgtatctgct

SEQ ID NO: 1660 - DNA, 1750 bp, Mus musculus
agtcgggagagccagcgcccgagccagacgcggccgccatgagggagattgtgcacatccaggcgggccagtgcgggaaccagatcggtaccaagttttgggaagtgatcagtgatgagcacggcatcgaccaggccggagcgtacgtgggcgactcagcgctgcagctggagaggatcagcgtctactacaatgagtcatcctctaagaagtacgtacccagggctgccctggtggacttggagcccggcaccatggacagtgtgaggtctgggccttttgggcaactcttccggcctgacaacttcatcttcggacagacgggtgccggaaacaactgggccaagggtcactacacggagggcgcggagctggtggattcggtgctggatgtggtgcgcaaggagtgtgagcattgcgactgtcttcagggcttccagctcacccactcgctgggcggtggcacgggctcaggcatgggcacactgctcatcagcaagatccgagaggagtacccggaccgcatcatgaacaccttcagcgtcatgccgtcacccaaggtctcagacaccgtggtggagccctacaacgccacattgtcagtgcaccagctggtagagaacaccgacgagacctactgcatcgacaacgaggccctctatgacatctgcttccgcacgctcaagctgaccacacccacttacggggacctcaaccacttggtatccgccaccatgagcggtgtcaccacatcactgcgtttccctggccaactcaacgccgacctgcgcaagctggctgtgaacatggtgccattcccacgtctccacttcttcatgcccggcttgccccctacacagcccggggcagtcagcagtaccgtgccctgacagtgcctgagctcacacagcagatgttcgatgccaagaacatgatggctgcctgtgacccacgccatggccgctacctgaccgtcgccactgtcttccgggccccatgtccatgaaggaggtggacgagcagatgctggccatccagaacaagaacagcagctactttgtggagtgatccccaacaatgtcaaggtagctgtgtgcgacatcccaccacggggcctgaagatggcctccaccttcattggcaatagcactgccatccaggagctattcaagcgcatctccgagcagttctcggccatgttccgccgcaaggccttcctgcactggttcaccggtgagggcatggacgagatggagttcaccgaggccgagagtaacatgaatgacctggtgtccgagtaccagcagtaccaggacgccacggtcaatgatggggaagaggcatttgaagacgaggatgaagaagagatcaacgaatagggagccataagatgctacagtgaacgtctgctcttttcttagccttgatggtgtgggaatggtgccctggtctaagcatgtcactggcccctctcaaaccaaatgcaccacactgttctccaggttacctggaacagtcccagcagaccagggagatctcatataggaaccctgaaagcaacgtagggggctcacacagggctaaagaaagtgaccaccttttgttaagcccccttcccaccccatcagagttagaatagggatttgtttttcatcctcggtgataaaaactaaagccacacagtgctgccttaagtgaatgcacactatggaactttatgacaatccattcataataaaatctaaacctg

SEQ ID NO: 1661 - DNA, 2354 bp, Mus musculus
agcaggcggtggcggcgctaggggcgggacgcgcgcacgggctagaacgccgtggtctccgcgccggccgggtccgcagctcgggatcgggtggctggggcggggggaggggggcccaggcaggtggggcggaaagcgatgagtcctcggcgcctcctccgcctcccgcgggccccgctctctggctcccgctccgacgcccggatgatctgagccgcgagggctccgagagccgggggcccggacccagcccggctcctcccctcctccgcccgggcccggccgccgtcgcgggaccccgtgcccggccgccgtcgccaccgccgccccggccgaccgagggacccgcccgcccgcggctgctccggacctagaggatcaagtcataatgggagcatttttagacaagccaaagatggagaagcataatgcccaggggcaggggaatgggttacgatacggcctaagcagcatgcaaggttggcgagttgaaatggaggacgcacacacggctgtgatcggtttgccaagtggacttgagacatggtcattctttgctgtatatgatgggcatgctggttctcaggttgccaaatactgctgtgagcacttgttagatcacatcaccaataaccaggatttcagaggatctgcaggagcacctgtctgtggagaacgtaaagaatggaatcagaacagggtttctggagattgatgaacacatgagagttatgtcagagaagaaacatggtgcagatagaagcgggtcaacagctgtgggcgtcttaatctctccccaacatacttatttcattaactgtggagactcgagaggtttactttgtaggaatagaaaagttcacttcttcacacaagaccataaaccaagtaacccgctggaaaaagaacgaattcagaatgcagggggctcggtgatgattcagcgtgtcaatggctctctggctgtatcgagggcccttggggatttcgattacaaatgtgtccatggaaaaggtcccacagagcagcttgtctccccagagcccgaagtccatgatattgaaaggtctgaagaagatgaccagttcatcatccttgcatgcgatggcatctgggacgtcatggggaacgaagagctctgtgactttgtgagatccagacttgaagtcactgatgaccttgagaaagtttgcaatgaagtagtcgacaccctgcttgtactaagggaagtcgagacaacatgagtgtgattttgatctgtttctccaagtgcacccaaagtctcggcagggcggcgaagaaggaggcggagctggaccaagtacctggagagcagagtagaagaaatcataaagaagcaggtggaaggcgtccctgacttagtccacgtgatgcgcacgttagccagtgagaacatccccagcctcccaccagggggtgaattggcaagcaagcggaatgtaattgaagccgtttacaatagactgaacccttacaaaaatgacgacactgattctgcgtcaaccgatgatatgtggtaaagccgctcacccagccgtggactcaccttcgcctgcaaaggggaagccagctcatccttgccgagcctttaccatccatcaccgacttcacaggagggtctgacacgggtgaggactgcagcttcagcgatggaacagctagcccagaatggattttctttttttattgtaaatttgagacttatgtaagcgtgatttcaaaccgtaattcatgttgtaaatcagactccagcaatttttgttgtatgattttggtttttgtaaagtgtaattgtccttgtacaaagtgctcatatttaattatgaactgctttaaaatcactatcagtgaatgataaaggaaatttggcttgttgtgtgacacaacagacatagtcatgctgtgtctggactcggttgggatagggaaagcggcagccacatagctgcatgctacgtgcacacgattaggaagaattccaaaagcttacacagctgtcacccaggctcatggaaactgtctctgttccggcgaggactggctcactgatacagccatcgctctcacctgtctctaggatgtcctctcctcgtagccaagatattgcagctgatcctgtatattcatgagagtatctatcaattttgggctaacatgccttgattctcttgcacctctttatgagttcttacatttaattactaattggtaagcagcagcttcctacacagtaggagactgccacatttttttcctatcatgactggctgggcctgctgctgttcctagtaagatattccgaattccattttatcaataaagcttggtttaac

SEQ ID NO: 1662 - DNA, 594 bp, Mus musculus
tactttaaaagacagaaggcacttggctacagtgcagccccaaagaccaggctcctctgagaaaaaggtcaaggagccagcttttggagagaggggagctgaggcagatgctgtggtcctcctccactgaggagagggggaaagcagcatggaagatggagccccccgcagaggtagcaggattcacgagtgtagggtccaggaagaaaggccaaccagaagcccaatcacccccgagtaaggagccggggaacttctgtgccattcctcctgccaaaaaactatcactgggtatggtggtgcatgcctttagtcccggtactggggaggcacaggcaagcagatccctgtgagttcaaggccagcctgggctacaaagtgagttgcaggacagccagggctacacaaagaagccctgtcttgatagaccaaaaccccaatctaaccaaacaaaaccaaaaacaaaccaaaaaacaaaacccaaacaaaacaggtttttgggaatgggttgtagttcagaacacttgtctaatatgggcaatgctctgggttccacctcagcattacagaaattaataaaaaactattttgggc

SEQ ID NO: 1663 - DNA, 516 bp, Mus musculus
ggttgtttgtgtatcacttttcccaccagttgtctccttttgaggactgcttgagcctgcaggcactgcaactgtacaccccgctgtgactgaagcacaggggctgggctgcctgacagtgaaggagcagtcagggcatggggtgtgagtttagagagaactattttgggttcaacctcacagaggacttggagggaatcctttactctcccggaacttcaatttctcattaaaatgagagctggtgttgatgaaagctgagagtactttctatcctattgttagattactaacaacaaaaatacccaaggcaatggtctcctgggtgctaagcactgggaaggatcaggagccatcacagcttaagtaggtttcctggtttgtgttactgttgctgggataaaatactgaccttggctttccaagggtggctttcacgtctacattgatgcccctggagtgatagtcaacgttttctttgctgttcattgttgaaccaataaagtctgtgaaccc

SEQ ID NO: 1664 - DNA, 1155 bp, Mus musculus
ttttttgagccttctggcagtcgagagagtggccccggacaggctggtgcagctgagcgaggagcgcctccgtgacgggacagtctccaggcccgcctctccacctggtgatggtcattgtcccctgaacagggatggaggaggtaacatcccaagaagccgcagagtcacccaggggccacttccagcctttggagaaccagtctgaatgtctttccccagagcttcggtttctgcaggacacggacatggagcagggattcagtggggctcaacctgttccccaggtgcctgctcttccccatgagggaagcccaggagaccaggcagctgcgctcctgacagccaggtaccaggcatacttctccgccttcccaccacccggattcattgtgtgaattcctgcccagccctgagtcatacccaggcaagtgctttctctggagaaacacttgcagtccttacggcaggaatcaccaagagatggcccagggatcggctttccatcgggagtgctcatcccagcacggaaactccttttccaagattgtaagatatcatacttggttgatggaacatatgttccttgggatgccaccattatgtaaagttgctgctccctccctaagtgacatttggtgaatctctaacatggaagccttccttatgatcacgtgcatttggaactccgttcattcataaaccacacttggtggtcagctacttgtgtgaaatgccacaaagctcactcttttcagttgccatcttttcctgttattttagagtagggatcagatgctgtgtgctctttctagcagtaagtatagcctgcccactgtgatgcctcactgtgtgacctctcacttgtgtgacccccagacttctctcatgtttggtatcatttttttcttcctttaaagtcctgtcttcttgtacctgatttgttgtggtaccaaaccaattgctgtatttatattacctttcctattaagtgttcttaatgctgtctttgatagaggggaagtaggggggacagaaactaaatagttcagggcatcaaaatggatgtatttttaaaagctttgtaaattgtaaaatgatctatataattgtaaactactgttaattttacctaatacagaatttccaacagtt

SEQ ID NO: 1665 - DNA, 2181 bp, Mus musculus
ggaggcggcgactatccctgtcaaccggggcctgagagatcatggcaacgggctcgggcggggagcgcgtggcggcggcggcgaccgagtcgctaccggcggagactgagaagcagcagggcgtggacgctggcgcggccggggatccagagcgcctggagctggaggagcagcccaaggacgtgggccggatcccgaccccgacgcgacgccacgcgcccgaggaaggagaggcccgcgtcgtccggcggctgccaccagcgctgcccctggcccagccgaggccggcggcgcgggccctgagccagctcgtgaaggcacggggccggagccggagccgggtctaccggcggagcgcaggctcgatgcggccggtcaccgtggacagctccaaggcccgcacctccctggacgcgctcaagatcagtcttcgccagctcaggtggaaggaggtgaggcccgccggcccggcgcgtgggcacaggggggtcgtcccgaggcctggcccccggagccacttcccaggtcaggtcagcccgtctctgctctgctcccctacagcttttcttatgtctgcagccctggcctcgtcaagctgtagatcctggtttatccgtcctgtcttctcctctgttggccccggggccaggggccacctttcactttctgcatttcagtgatatttaaagtttagtaaactttcatgcttagagtgccactcttgggccaggtttgtgctcgccagcgcctcactacactcttcaacttagctgtgcgaccttgagcaagctacttttcttcttttggtcccgtttacctcggtaaagggaagccggttcgttccggtttggagcatagtgcctagtgcttgcacaaggtttcagcaaatgacaacctactttcatcacgatcttttaccaccaccaccatcaccaccaccgcagacactgattgggggatgtagcaggtgacagtaagtgggggtgaaagcatgtgtgagcagatgaatcacccttgaattcatttcagaccttttaagggacggggtgggacaaaagcaccaacgaatccgagaggtttctattttcattggctgagtaaataaagccagctgactttatttacagcatagaaaccattggtccactaaagattccgtgcgcagagagcatgagggctcaggctctgaactttgtgctaagtgtggtacaagtggtttaatgaagttggagactggggagagatggccacaggtccactatggtcagaatgttgatgtcccagtggaagagtttggtttggagagaaaccaagaatcaggtggggtggtggaggtggggtctggcaatcccaggtgtcagagccctctcagtcttgattttcacaccttggaaactggatgaagattggtgagactcggttctacagtgtctaaactgtagataaagtcccatgtccagcccaaagataggcaggccaggaaggtaaacttggacttgtcagagccacccaaagataggcgggccaggaaggtacacgtagacttgtcaatgctgctgacctactgaagagagtccagggatagaaagtagctaagaactcaagctggctagcaagtgcctgtgttctcagctcagccctgagaagagacaggaagcagcctttatcttgctcacccaatccagcacaggttcattctcttaatttgtagatatcctctatggtgataccaagttctatgctgggcctagagaatcacactttaaatgtactcttgtcttcaagcgttcctagttcagtagggaatgaaatccagtaagtagtcctggtatctgcaggcccattgctgctgctgctgctgctgttgctgctgctgctgctgctgctgctgctttaaatgctcctttcccagctagctatgtgcatggctttctctgtcacctcttgggactgctgatcaaggtcctgagagaggtttcccaggcaatgttcgcagccatctctagccctggctgtttgcttcatagcatgaacctctacctgacatcgtgttgtatttgtttattgactgtttttctcaccagaatgtaagctcttcgagggcaggcattttgttttgttactgctgtactcaaagttgtctggcatctggaagttgctcaatgaatatttgttgaatgc

SEQ ID NO: 1666 - DNA, 1607 bp, Mus musculus
taggtgaaaaagaagtggaagccagacgttagttaatctcggtgttctttctcatttacctctctgcggcttaggtatctaagcacttccctgaggatggctggtgctagtttggactggttttcacctagcagctccatttctctgacaagttgattgctgctttgtggttattctggacctaacagcaactgttagtggtgggcaggcagatccaatggtcttagacctgggtgttctctctgcttgctgtttgtgtgttgaagtttctaagcaagccatgtttaagctgttacatattgatgtttcttttactctgtagtgtagcagaaagcatatcttcctgagagcctggcactcccaggttttttcttttcaaaggcagaaattcacacctttgttcaaggaaaaggagacaaaacaattgcttttatttttttagggcactgcatgtcatccatcacccaccattctcgttgaaagagaagatgcctgcctgcctgccttctttccttccttccttcctctctacctccttccttccttccttccttcccttcatttcttcccctgagctccttgtggatagaacttccatgccttttttttatttctgttctccctccctttaagtgccaatttaggcacttggaggaaggtagaaattaaaccaggtaccttacttgtttcagatatttccagttaaaattgtttgaatacttgccccatagatgatgctgaataatcccctatttgctggaaatcctcagcttcaagaacaaatgagacaacagctcccaactttcctccaacaaatgcagaaccccgacacgctctcagcgatgtcgaatcctagagccatgcaggcgctgctgcagatccagcagggcttgcagacgctggccacagaagctcctggcctcatcccagggtttactcctggcttggcagcaggcaattctggaggctcttccggaaccaatgcacctagcactgcacctagtgaagatacgaacccccaagggggcactgctgagccaggccaccagcagtttatccagcagatgctgcaggcccttgcgggggtgaatcctcagctgcagagtccagaagtcagatttcagcaacaactggaacaactcagtgccatgggattcttgaaccgtgaagcaaacctgcaagctctgatagccacagggggcgacatcaatgcagcaatcgaaaggttgctgggctcccagccgtcatagcagcatctctctatcctgagaaaatgtaatttatttttgataacggctcttaaatctttaaaataacatgctttatttcattgggattctgtgctgttataaaggaaaccaataggaagtatctggaggcagagtgcagtacgacgggcgggtttctgtgtctttttggaacagtgggaatcaatgtttcttctggttaaggctgctgcatgcatcaaacacttggcatttattgtaatttttaaaaaaatatcaccttttctaattgggtgaacaaatttttgtcctgcatctgtccaactaacttgctttttaaacataaccctatggtagtaatttatgtagaataaaggcatt

SEQ ID NO: 1667 - DNA, 1509 bp, Mus musculus
gagaccccacaggacaccagcagacccaaactcttccctgcccactctgcctgcttgctcaccaacaacaactatgtttcttgtgcttatagccactgaagagctaaaggaattctttgccaaggcccgggctggctccatccgacttatcaaagtcatcattgaggacgaacagctcgtgctgggtgcctcacaggagccagtgggacgctgggaccaggactacgaccgggctgtgctgccactgctagacgcccaagagccctgctacctcctcttccgacttgattcgcagaatgctcagggtttcgagtggcttttcctggcctggtcacctgacaattcgccggtgcggctgaagatgctatatgcagccacacgcgccaccgtgaagaaggagtttggaggcggccacatcaaggatgagctcttcgggacagtaaaggatgacctctccttggctgggtaccagaagcacctgtcatcgtgtgccgcacctgccccactgacttctgccgagagagaactccagcagatccgaatcaatgaggtgaagactgagatcagcgtggaaagtaaacaccagacgctgcagggcctggccttccctctgcagcctgaggcccagagggcacttcagcaactcaaacagaagacggtcaactatatccagctgaagctggacctggaacgggagaccatcgagctggtacacacagaacccacaaatgtggcccagctgctctcacggattcctcgagatgctgcccgctaccacttcttcctatacaagcatactcatgagggtgatgcccttgaatctgtggtgttcatctactccatgcccgggtacaagtgcagcatcaaggagcggatgctctactccagctgcaagagccgcctccttgactccgtagagcaagacttccagctggagatagctaagaagattgagatcggcgatggagcagagctgacagctgagttcctctatgacgaggtacatcccaagcaacacgcgttcaagcaggcgttcgccaagcccaaaggccccgggggcaagcggggccacaagcgcctcatccggggccccggggagaacggggaagacagctaggtgtctggactgggaacagggccgggcacgtggactacagggttgccactctgccacccctggacttccttcctccccagcctgggctctaaggaattgctttcctgtgggacaaggagggcaggtggctgaccatatctgagggcctgcctctggaccagcactgtgtgaccttgccctgtcactgtccctgcctctcatctgtgtgtacagggtggctggcgaaaccccaccttggcacaaacctagcctccagaaaatttcgtgctgtggttgcagcccagcccaaaagcctttggctacagtgggtggggacggttggcaggggccagatgtcacaggaagggatggttgaatgctgtattttgtaaagaataaaatatttttaaatc

SEQ ID NO: 1668 - DNA, 3157 bp, Mus musculus
gtggctgacgcagggatcccgcggctgcggcgacggcggcggcggtcgtggtggtggcgacggcggccggagtgggctggtgtccccggctgagcatggtagcagcctgtggtctgggtcccttcgtctggtgtcaggcacatcttgaagagccagtaagcctgggcacccacagcccagctaatgaaggagtgatccacctatcccagcttgaccatctgatgggtgacacaagccaaataatttgagaaaacaccaggaacatcattgcacaggtgactaaatggtggcctctgtgacagatggccatctaggcatgtgcggcccccgaggtcgcctgtgacttctggaagtagaggtctacaagcccaccacacaggccgcaccagcccatggggtccctagagccccggggagccagctgacggtccagaaccccccaggccagccatggcaggagccgagggcttccagtacagggctgtgtacccattccgccgggagcggcctgaagacctggagctgctccctggggacctcctggtggtgagccgggtggccctacaggcacttggtgtggctgatggaggagagcgctgcccacacaatgtgggctggatgcctggcttcaacgagcgcacccgacagcgaggggacttccccgggacatacgtggagttcctaggacccgtggctctggctcgaccaggccctcgcccacgggggccccgtccgttgcccgccaggcccttggatggatcttctgagtcaggccacatactcccagacctggcagagcagttctccccacctgaccctgctcccccgattctggtgaagctggtggaagccattgagcaagcagagctggacagtgaatgctacagtaagccggagctgcccgcaacacggacagactggtccctgagtgacttggagcagtgggaccgcaccgccttgtatgatgctgttaagggcttcctgctggcgttgcctgcagctgtggtgacccctgaagctgcagcagaggcgtaccgggcacttcgagaggttgcaggccccgtggggctggtgctggaacccccaacactgccgctgcaccaggctctcacactgcgtttcctgctgcaacacctgggtcgcgtggcccgcagagcaccctcgccagatacagctgtccatgcactggccagtgccttcgggccgctactgctgcgcatacctccgtcagggggcgagggtgatgggagtgagcctgtacccgacttccctgtgctgctgctagagaggctggtgcaggagcatgtggaggagcaagacgctgcccccccagcgctaccacctaagccctctaaggcaaagccggcacccacagctctggccaatggagggagcccgccctcgcttcaggatgcagagtggtactggggggacatctccagggaagaggtgaatgagagactccgggacacacctgatggtaccttcttagtcagagatgcatccagcaagatccaaggagagtacacgctcaccctcaggaaaggcgggaacaacaagttgatcaaagtcttccaccgggatggtcactatggcttctcagagccccttaccttctgctccgtggtggaactcatctcccactaccgccacgaatcactggcccagtacaacgccaagctggacacacgccttctctaccctgtgtccaagtaccaacaagaccaggtggtgaaggaggacagcgtagaggctgtgggcgcccagctcaaggtctaccaccagcagtaccaggacaagagccgcgaatatgaccagctgtatgaagaatacacacggacctcccaggagctgcagatgaagcgcacagccatagaggccttcaacgagaccatcaagatcttcgaagagcagggccagacacaggagaagtgcagcaaggagtatttggagcgcttccggcgagagggaaatgagaaggagatgcagaggatcctgctgaactccgagcgactcaagtctcgcatcgcggagatacacgaaagccgcacgaagttggagcaggatctgcgggcgcaggcctccgacaaccgtgagatcgacaagcgcatgaacagcctcaaacctgacctcatgcagctgcgcaagatcagggaccagtacctcgtgtggctcacccagaaaggtgcccgacagaggaagatcaacgaatggctgggaatcaagaacgagactgaggaccagtattcactgatggaggatgaggacgccctcccccaccacgaggagcgcacgtggtacgtgggcaagatcaaccgcacacaggcggaggagatgctgagtggcaaacgagacgggaccttcctcatccgggagagcagccagcggggctgttacgcatgctccgtggtggtggacggcgacacgaagcactgtgtcatctaccgcacagccaccggcttcggcttcgcagagccctataacctgtacgggtccctgaaggagctggtgctgcactaccagcacgcatcactcgtgcagcacaatgacgcacttaccgtcaccctcgcacaccctgtgcgtgcccccgggcctggcccaccgtctgcagcacgctgagcgcccacctcgcctgcctccctgtccatgtctgtctccagatcccctcccctggtgaacacgcgcaggaggccatccctcccgctgcgcctgccatgtttacagaggctgtggggccactggcctgggcgccctgagttcttcaagccatatacccggggttagaaaggaaccgcgctaggtggtttccaggaactcaggcctggacactcggggccgggcgggacccgccccgcggaccccaacttcccctcttaaggtcgaagtgaaaccagtcacagggggttaccccgcagctgcagagaatcttccccactctggcgggcaaaatacaaactctggccctcgcccaggccctgcgctgttctccagactgtgcaatctcctcccctttgggacaagggccctgggtgtgtccctgctccctggaccccatacctgcccagggtggatgggcagcaggttttgtacggtacatttattgatacgaatatgaaacattgtacctgttaaaaaaaaaaaaaagtcgagcggccgc

SEQ ID NO: 1669 - DNA, 1969 bp, Mus musculus
ctctgcgaggacggacgccattatcgcagctccccgacaaacaccacgagaattccgcagcccacacggtgacagaaaccccataccctgtgacttctggactcttgctgtcagtgtgccccttcctcgtgctctggatgatgtcagagcaggacctggcggatgtggttcagattgcagtggaagacctgagccctgatcacccagttgttttggagaatcatgtcgtgacagatgatgatgaacctgccttgaagcgccagcgactagagatcaattgccaggacccctctataaagtctttcctgtactctattaaccagacgatatgtttgcggttggatagcattgaggccaagctgcaagctctcgaggccacttgcaaatctctggaagagaagctagacctggtcaccaataaacagcacagtcccatccaggtccccatggtggcaggttccccacttggcgccacccagacctgcaacaaagtgcgatgcgctgttcctgggcgtcggcagaacaccatcgtggtgaaagtgcctggtcaggacgacagccacaacgaagatggggagagcgggtcagaggccagtgactccgtgtctaactgtggccagccaggaagccagaacattggaagcaacgtcacactcatcaccctgaactccgaagaggactatcccaatggcacctggctgggcgatgagaataaccctgagatgcgggtacgctgtgccatcatcccttccgacatgttgcacatcagcaccaactgtcgcacggccgagaagatggcgctgacactgctggactacctgttccaccgtgaggtgcaggctgtgtccaacttgtccggccagggcaagcacgggaagaagcagctggaccccctcaccatctacggcatccggtgtcacctcttctataaatttggaatcacggaatctgactggtatcggatcaagcagagcattgactccaagtgccggacagcctggcggcggaagcagcgaggccagagcctggcggtcaagagcttctctcggaggacgccatcctcatcctcttacagtgcctcagagaccatgatgggaacccctcctcccaccagtgagctacagcagtcacagccacaggccctacactacgccctggccaacgcccagcaggtccagatccaccagattggggaggatggacaggtgcaagtaatcccacagggccacctccacattgcccaggtgcctcaaggggagcaggtgcagatcacacaggacagcgagggcaatctgcagatccatcatgtgggtcaggatggccagtcgtggggcctgtgccagaatcccattcctgtcagcggtgactcagtggcccaggctaatccctcccagctttggcctctgggaggagacacacttgatctgcctgctggaaatgaaatgatccaggtactgcagggtgctcagctcatagccgtggcctcttcagaccctgctgctacaggagtagatgggtcgcctctccagggcagtgacattcaggttcagtatgtccagctggcgcctgtgagtgaccacacagccgcagcgcagaccgcagaggccctgcagcccactctgcagcccgacatgcagcttgaacatggggccatccagatccagtgaggccaggcactgcaggagcaccgagtcacagctgctcgctgaccctgccccactcgtgccctgctctcttgcttcagcaagcaactgcaggttctgctgggcatctgagagctgctcctcccaggggaaggtcctggccacccctgctggaaggcgcctcagggttggagtctcactactggtcgtctccaaaggagaagcatagtgcagagtgttgagtgcattcagacagacaagaactacgatattttgtttaaacagcttttttaatttgctatggtgtttataacaaaaaagaaaat

SEQ ID NO: 1670 - DNA, 1923 bp, Mus musculus
gggttctccgtgtgcgagcgcctagtggcgtaggctgcggctttgcggggaactgcgggggctgcagtggtccacggggctgatcgggttccgttgggcggatccacgtgcccgctatccgcctggaaggagaggtgcaggagtacccccgaccttggctgcgtgctgactcgcttccttctgcccgcccaggcttgcactccccggggatctgcctctgcatctcttgccttcgctgttgtttccctctctgtccagctcccctcccgctctcgccctggagaatggctcagaaggagaacgcctacccgtggccctacggctcaaagacgtctcagtctggcctgaacacgttgtcccagagagtcctacggaaggagcccgccacgacatctgcgcttgctctcgtgaaccggttcaacagccagtccacagctgcccctggccagaagttggctgagaacaagagtcagggctccactgcctcgcaaggatcccagaacaagcagcctttcactattgacaactttgagattgggcgtcctttgggcaaaggcaaatttggaaacgtgtacttggctcgggagaagaagagccgtttcatcgtggcactcaagatcctcttcaagtctcagattgagaaggagggggtagagcaccagcttcgccgagagatcgaaatccaggcgcacctgaaacatcccaacatccttcaactctacaactacttctacgaccagcagaggatctacttaatcctggaatacgcccctcgcggggaactctacaaggaactgcagaagagtcggaccttcgatgagcagcggactgccacgatcatggaggaactgtcagatgccctgacctactgccacaagaagaaggtaattcacagagacataaagccggagaacctgctgttaggtctgcagggagaactgaagattgcagactttggctggtcggtgcatgccccatccctgaggaggaagaccatgtgcggcacgctggactatctgcccccagagatgattgaggggcgcatgcataatgaaatggtagatctatggtgcatcggggtgctctgctatgaactgatggtggggaacccacccttcgagagccctagccacagtgagacgtatcgtcggattgtcaaggtggacctgaagttcccctcttctgtgccttcgggcgcccaggacctcatctccaagctgctcaaacataacccctggcaacggctgcccctggcggaggttgcagctcacccttgggtccgggccaactcaaggagggttctgcctccctctgccctttagcctgctccttggttttttgtccctgtcatttttcagtgttctttgtatgtctgtgtatgtgttctgagaaggggtgggaactggaaactattcctagctccagttctaggggatctgatctctcttctgacctctacaggcaaaattaggcacccctgtggtgcacatatatgcacaccaaacacatgaagttacaaacaaacaacaaacacacagatagtgctggagagatggctcggtagttaaaagcactggctgctcttcccaggaacctagaactcaattctagcactacatggtgctcacgaccactgtctgtaacacccagtcctggggaatctggggccttcgagcctctgcagacactaggcatggatgtggtatacatgtatgcaggcaaaacacccatgcactgacttttaagaaaccctctagtctgattcctttcaatttgtcaaatgttgaatgttatttttaaaatattataagccatttaatacaatttttctttgaaacatggtatagcctagtctgtcttaaattcagaaaaattatgaagaacaacattttataataaagtcttaaatgtttcatgtttttg

SEQ ID NO: 1671 - DNA, 620 bp, Mus musculus
tgaacagagttatgtcctaactatttttatagatttgtttaattaatagcctgtcattttcaagttcatttttttattcatatttatgttcatggttgattgtaccttcctgtcatcacctggtggggcatgggaagacaagatgggaaagtggctacagagtgaccctgcctgctgcccacactgacagtgtgtccgccccaccagaaacagagggaacggcacagggaagaccacccaggccgggtagggtagtggggaaggtggcagcttgacattctttcctggaccgggaggatttctttattttgccctttggaacgacaaggcagtgaggtgcttcaccaggaatttggtttgagggtgaggactgaaggacagggtggcctgccttccccaacccgtgacctggtctccctcctggcccacagctgcccatgctcaatgagtggcctgctggccacttggcaattgtgcctccattgccccagaatggcctgatgaggaaaatccaaacaggatgcaaagatcaatgcaaaaatcaccggtctgcatagtctatgctgtaactggagtttgtcaaaggcaagcagccttctaataaagtcgcttcaaatgtg

SEQ ID NO: 1672 - DNA, 861 bp, Mus musculus
gcgggacctacccgaccctcagcactgcgcaggactccgcgggacccggaaccttccgacagggttatggcggccgctccgggcgcccgactcctgcgcgcggcctgcgcctccgtccctttccgcggccttgaccgctgtcggctgctggtctgcgggaccggagcgggaactgccatctctccgtggaccccgagtccccgcctgcatgcagaggccgggcccggccggccgctgagcgtgtctgcgcgcgcgcggagcagctcagaagataagataacagtccacttcaagaaccgagatggcgagacgctaacgaccaaggggaaaattggcgactctctgctagatgttgtgattgagaacaacttagatatcgatgggtttggtgcgtgtgagggaacgttggcttgctctacttgtcatcttatctttgaggatcacatctatgagaagttagatgccattactgatgaagagaatgacatgcttgacctggcttttggactaacagacaggtcaaggttgggctgccaagtttgtctgaccaaggctatggacaatatgactgtgcgtgtgcctgaagcagtggcggatgtccgacagtctgttgacatgagcaagaattcctaagctacaataaaaagaaatattttcattaaatttttacctatttttataattatttcttagtataattaagtgattatatgacagaatatatatcttagtgtgagtagctgtgctgtcttagttcagttctgtagaactgaaactttgcagtttttattttgattaaattattaaaacatcagtcaactattagaaggcagctgatataataaattccttatgtatttt

SEQ ID NO: 1673 - DNA, 2452 bp, Mus musculus
atggaagccgcggggctggccgtgattctggggttcctactcctggctgggggctctgtgggtgatgaggctcgggaggcaaaggccgtgcgggaactggtggtccggctactgggacccgggccggcggccaatttcttggtgtccgtggagcgcgcgctggcggacgagtcgggcctggacacctacagcctgagcggcggcggcggggtgccagtgcttgtgcgcggctccacgggcgtggcggcagccgcggggctgcaccgctacctgcgtgacttctgtggctgtcaggtggcctggtccagcgctcagctgcacctgccgtggccgctgcccgctgtgcccgacgggctgaccgaaaccacgcccaacaggtaccgctattaccagaatgtgtgcacgcacagctactccttcgtgtggtgggactgggcccgttgggagcaagagattgactggatggcactgaatggcatcaacctggctctggcttggaatggccaggaggccatctggcaaagggtatacctggccttgggcctgacccagtcagagatcgatacgtacttcaccggtcctgccttcctggcctggggacgcatgggtaacttgcacacctgggatggccccctgccccgttcctggcacctcagtcaagtctacctgcagcatcgaatcctggaccggatgcgctcctttggcatgatcccagtgctgcctgccttcgcagggcatgtccccaaggccatcaccagggtgtttccacaggtcaatgtcatcaagttggggagctggggacatttcaactgctcctacagctgctccttccttctggctccaggagaccccatgtttcccctcatcgggaacctcttcctacgggagctgaccaaggagtttggcacagatcatatctatggggctgacaccttcaatgagatgcagcctcccttctctgagccctcctacctcgccgctaccactgcagccgtctatgaagccatggtcactgtggaccctgatgctgtttggctgctccaaggctggctcttccagcaccagccccagttctggggcccctctcaaatcagggctgtgctggaggccgtgccccgtggtcgtctcctggttctggacctgtttgctgaaagccatcctgtttacatgcacacagcctccttccatggccagcccttcatctggtgtatgctccacaactttgggggcaaccatggcctgtttggagccctcgaggatgtgaaccgaggcccccaggcagctcgcctcttccctaactccaccatggtcggcactggcatagcccccgagggcattggccagaatgaagtggtctatgctctcatggctgagctgggctggcgcaaggaccctgtaccagatttgatggcctgggtgagcagctttgccatccgccgatacggggtctcccagcctgatgccgtggcagcttggaagctcctactcagaagtgtctacaactgctctggggaggcgtgcagtgggcacaatcgaagcccgttggtcaagcggccgtccctacagatgagtaccgctgtctggtacaacagatcagatgtgtttgaggcttggcgactgctgttgacagctgccccaaacctgaccaccagcccagccttccgctatgacctgctggatgtcacccgccaagccgtgcaggagttggtcagcctgtgctatgaggaggcaaggaccgcctacctgaagcaagagcttgatctcctgctcagggctggaggcctcctggtctataaactcctgcctacactagatgagctgctggctagcagcagccacttcttgctgggtacctggttggatcaggcccggaaagcggccgtaagtgaggccgaggcccagttctatgaacaaaacagccgctaccagattaccctgtgggggcccgagggcaacattttggattatgccaataagcaactggcaggactggtggctgattactaccagcctcgctggtgcctcttcttggggactctggctcacagcctagccagaggtgtccccttccaacagcacgagtttgagaagaacgttttcccactcgagcaggctttcgtttacaacaagaagaggtaccccagtcagccccgaggggacaccgtggacctctccaagaagatcttcctcaaatatcacccccagcctgactctttgtgacagattagccatcgcagggacctgctggaataggtcctcaaatccaaacaagcccagaatgcgccccaccccacccccgggcctgggaggagacagggtatgacagtgagtgacaatgatggcttggagggaaacaaggtgctttcttccactccagacttggggcttaaagtaccattttctgttatcaataaagtgctgaatccaaaaaaaaaaaaaaaaaaaaaaaaaa

SEQ ID NO: 1674 - DNA, 1467 bp, Mus musculus
ccttacccttccctgtcattcccccctccctctcagtcagggccaggccaggccagctcctctggcagcagaggggggcaggtgacaggcaggcatcgcagctgagacagtgaggaggcgcccgggaagcggaaacctgggagaagtccagccagagcccaagagccggaactacccctcgacctgtgcaccatgggggagatggagcagctgaggcaggaggcggagcaactcaagaagcagattgctgatgccaggaaagcctgtgcggacatcactctggctgagcttgtgtctggcctggaggtggtgggccgagtccagatgcggacacggaggacattaaggggacatctggccaagatctatgccatgcactgggccactgactctaagctgctcgtaagtgcctcgcaggatgggaagctgatcgtgtgggacacttataccaccaataaggtgcatgcaatcccgctgcgttcctcctgggtcatgacctgtgcctatgcaccatcagggaactttgtggcatgtggggggctggacaacatgtgttcaatctacaacctcaaatcccgcgagggcaatgtcaaggtcagccgggagctctctgctcacacaggttatctctcctgttgccgcttcctggatgacaacaacatcgtgactagctctggggacaccacatgtgccttgtgggacattgagacaggacagcagaagacagtgtttgtgggacacactggtgactgcatgagcctggctgtgtccccagactacaaactcttcatttcgggagcttgcgatgctagcgcgaagctctgggatgtgagggaagggacctgtcgtcagactttcactggccatgagtcagacatcaatgccatctgtttctttcccaacggggaggccatctgcactggctcagatgacgcctcctgccgcctctttgacctgagggcagaccaggaactgactgcctattcccaggagagcatcatctgcggcatcacttcagtagccttctcgctcagtgggcgcctgctctttgcaggctatgatgacttcaactgcaatgtctgggactctctgaagtgcgagcgtgtaggcatactctctggccatgacaacagagtcagctgcctgggggtcactgctgacggcatggctgtggccactggttcctgggacagcttcctcaaaatctggaactgaggaggctagaggaagaggtgggaagccacgaaggttctcagcaggctcctcctatgccccgtctccttagggtcagtctcctatactccaggggccattcctagtaaacttccttttaagagcaggtgggattatgggagtgtgcctttggaagcatcagggacttaagggcaagaactgccccatttcctgccatggcctctcctctccacagccctcacagcctctcccttaataaacaagaatggaccc

SEQ ID NO: 1675 - DNA, 1267 bp, Mus musculus
gaattcggcacgagcagcccttccagagagaggcaagagaggtccacgatgagagccctgggagctgttgtcactctcctgctctggggtcagctttttgctgtggagttgggcaatgatgccatggactttgaagatgacagctgcccaaagcccccagagattgcaaacggctatgtggagcacttggttcgctatcgctgccgacagttctacagactacgggccgaaggagatggggtgtacaccttaaacgacgagaagcaatgggtgaacacagtcgctggagagaaactccccgaatgtgaggcagtgtgtgggaagcccaagcaccctgtggaccaggtgcagcgcatcatcggtggctctatggatgccaaaggcagctttccttggcaggccaagatgatctcccgccacggactcaccaccggggccacgttgatcagtgaccagtggctgctgaccacggccaaaaacctcttcctgaaccacagcgagacggcgtcagccaaggacatcacccccaccctaacgctctacgtggggaaaaaccagctggtggagattgagaaggtcgttctccaccccaaccactccgtggtggatatcgggctaatcaaactcaagcagagggtgcttgtaaccgagagagtcatgcctatctgcctgccttccaaagactacatagcaccaggccgtgtgggctacgtgtctggctgggggcggaacgccaactttagatttaccgatcgtctcaagtatgtcatgctgcctgtggccgaccaggacaagtgtgtggtgcactatgagaatagtacagtgcccgagaagaaaaacttgacgagtcccgttggggtccagcctatcttgaacgagcacaccttctgtgctggcctcaccaagtaccaggaagacacctgctacggtgacgccggcagtgcctttgccattcatgacatggaggaggacacctggtacgcagctgggatcctgagctttgacaagagctgcgctgtcgctgagtatggtgtgtacgtgagggcgaccgacctgaaggactgggttcaggaaaccatggccaagaactagttcagggctcactagaaggctgcacatggcagggcaggctgggagccatggaagagggggaagtggaagggttgggctatactctgatgggttctagccctgcactgctcagtcaacaataaaaaaatgtgctttggacccataaaaaaaaaaaaaaaaaaaaaaaagggaattc

SEQ ID NO: 1676 - DNA, 1057 bp, Mus musculus
cgttgcctcttcccggagacatcctttttaactgagacagagcagagcctttaatcccaagggaaaatggtagaagcttcctgggcagaaagacccggcgagtctatgacctgttgctttgcaagctcagcttccccagccagctgcactgcttgcttttttgactttgtccctctcgaagggaacataggacaaataaataaaagtgcatatgtgcgtttttttacttttctggaatgcagcctttgctctctccgagatgccagccacggctagtgcgattgtatctaaatttcctgaggggtgttttttgattaagtaggtaatgtcaaacacccctttaactacagctagaaaataaaaccattttataaagccacccttgcatcccctgcgagcctcacacagagcatctctccaaatccaggtatgccagccaccttgaataaaatctcttccgcttccgacgtatgaaaagcaaaaatgaaaagagggaaggttcccagttactcttttgtcttcagacatttagtaatataaagtacctatttttatgctgaaatgtttatacaggtttattaacagcaagcgcaactaactggcggcatgccgtgcagctcgttttgatatattagccatgcttgcagataaaggcaagccccaaactactcaccttttgcagtctctctgggatcaggaaaagaaaaagcaatcacatgtttgagaagtgggactgtaaatatgtaatgtatatttaactttgtgtagcccatgtacctaccttgtatagaaaaataatttttaaaacctgagcagaaaaggagtaaaatgagggagtcatgaagggtccccccccacacttttatttaaatgaaggaatttcaaataattcacctgcagacttttagcacaaaaatagtccttggaaattgttaacatattcggttgttctttggggaagagaagaccactataataccatttacttttcttttcgaggttctatttatctgcagtagtattaagtcatattgctggaataggttactaccccccc

SEQ ID NO: 1677 - DNA, 2557 bp, Mus musculus
tgagaagccagtgagcattcagccaagttccatcctttgtcctgcacctgtcctgaacaaagatggagaaactcttgaagtttcaatcagctataatgatgggaagtctgctgtctcaagatccttaacaatcacagccacagaatgtaccaatgggattgcagccatcgtagctattttggtgttgttgctgctcttgggtgctgccttgatgtggtggttttggcccctttgctgcaaagtggttatcaaggaccctcccccaccaccttctgcaccaatggaggaggaggaggaggatcctttgcccaacaagaagtggccgactgtggacgcttcctactacggaggtcgaggtgttggaggaattaaaaggatggaggtccgctggggagataaaggatctacagaggaaggtgcaaggctagagaaagcaaaaaatgctgtggtgatggtccctgaagaagagatccccatcccatccagaccacctcgacccagacccacacaccaggcacctcagacaaagtggtacacgccaatcaagggtcgtttggatgcactctgggctttgatcatgaagcagtatgaccgggtgtccttgatgagaccccaggaaggtgatgagggccgatgcataaacttctcccgggttccacatcaataagacgggagaacaaagaatgagaagataagaagacagtgtgacagtgtatcttcatgatgctgatttccaacagaaccgacagtccggtgcatctcagaagttcttgggacaacagcccattttctctctgtcaggaaatgtttcctctgccttctgctttctgtgcactaaacattttccaacacttgttctgccatcgacatgagaggtgatgaaagtcatcggcgatagcccatgattcacgacactgaaaatcccgaggaatgttagtttgcatgctagggtttatgcaaagctcgttttgactatgtaagaggacaaagcagacacatcgatgatgtaatgataccaaagctaggactgcaaatccatcagccacagaggtttgcaatggagactggtgattctgccatgaatgtgtggcccctgtgcttttgtttggcaagatctttagctacaagcaaaacatgaagtttcctcccaggctaaacagataatggagtccactgccttgtagctatgtcagatagcaaagcctttccaagtcctccattactttgtgccttacaggaaatttctgactagaaaatcttgtcattgttacactgaaagtgcacacgcatgacaaaatgtagacgagacgcctcaaggtactggatgcaagcaggatttttgccctttagttttccaagacacctttctttcattatgcacttgagacaagagaattaatagagcgttaattcaacaggaagaccgcctccaaccaaagacctggagcgcagcataaggacttgtgatttgagacgttgtccccagcctggtagatccccctttctcagcatttgggatttagcagtgcataaagcattaatatctgtaaaaacacctagatgtttgtttggcttttaatttaaggaagctgcaaccacaaagcttccgctcagggttttttcttccttcaagtctccaagggctcttcagcgtcacaagccagcaactctctttgcatgaaaatttcaaagtttaattaatataattaaaggcaacagcaagcagcagcctgtgaagattttgctcatcttttttatgccttttgacattgagtgacctatcactgtatgcatgttacttagaaattgaggagcaccacaccttggttgtggttcagcctgggaaagagacctccttccttctgtttataaattaaaatcaggaggggcgccatcagaaagcatggacaatatacatactataaatttttagaaatatcaccatcgtgtcacgtcaacgatgccaaattatgttagtgtgagcagaaacccggtgggggaggaaggcggcagcagccgaaggaaatagctcagataatctagtcactttcgatactgtacttcagatgcgaaatggatattcgactggaaacctgacaaagcgcgcctgctttgatgtgaactgttatagacaatgaccagtggccgggtcagtgggatgtctctctgcgagcacaaaggcttatcaaatgacactaaaaataagttcaacaaccatcactttggaagggagaaggcgaacatttcatgtttggcgggcatgtgagtgcaggagatggaaagagccatttagagcatcctcatataattgcccgcattgtactcttcatggaaatttcaaaggacggcagtgatatttttcattggtgtccacgtttgtggcactgctccaagaagccttatgcacacatacaaatatacaaatgcacacacctacactctctagctttaatctttttgctcaaccttatttatatcactgactggctggatccaaagtcacacctccacatattagtgaataaaaaatttttacctgtgaaaaaaaaaaaaaaaa

SEQ ID NO: 1678 - DNA, 1350 bp, Mus musculus
tcttcacagtgcgaaagaactgaggctttttctcatggctgaaaacaaacaccctgacaaaccacttaaggtgttggaacagctgggcaaagaagtccttacggagtacctagaaaaattagtacaaagcaatgtactgaaattaaaggaggaagataaacaaaaatttaacaatgctgaacgcagtgacaagcgttgggtttttgtagatgccatgaaaaagaaacacagcaaagtaggtgaaatgcttctccagacattcttcagtgtggacccaggcagccaccatggtgaagctaatctggaaatggaggaaccagaagaatcattgaacactctcaagctttgttcccctgaagagttcacaaggctttgcagagaaaagacacaagaaatttacccaataaaggaggccaatggccgtacacgaaaggctcttatcatatgcaatacagagttcaaacatctctcactgaggtatggggctaaatttgacatcattggtatgaaaggccttcttgaagacttaggctacgatgtggtggtgaaagaggagcttacagcagagggcatggagtcagagatgaaagactttgctgcactctcagaacaccagacatcagacagcacattcctggtgctaatgtctcatggcacactgcatggcatttgtggaacaatgcacagtgaaaaaactccagatgtgctacagtatgataccatctatcagatattcaacaattgccactgtccaggtctacgagacaaacccaaagtcatcattgtgcaggcctgcagaggtgggaactctggagaaatgtggatcagagagtcttcaaaaccccagttgtgcagaggtgtagatctacctaggaatatggaagctgatgctgtcaagctgagccacgtggagaaggacttcattgccttctactctacaaccccacatcacttgtcctaccgagacaaaacaggaggctcttacttcatcactagactcatttcctgcttccggaaacatgcttgctcttgtcatctctttgatatattcctgaaggtgcaacaatcatttgaaaaggcaagtattcattcccagatgcccaccattgatcgggcaaccttgacaagatatttctacctctttcctggcaactgagaacaaagcaacaagcaactgaatctcatttcttcagcttgaagaagtgatcttggccaaggatcacattctattcctgaaattccagaactagtgaaattaaggaaagaatacttatgaattcaagaccagcctaagcaacacagtgggattctgttccatagacaagcaaacaagcaaaaataaaaaaaaaa

SEQ ID NO: 1679 - DNA, 659 bp, Mus musculus
ttttttttttttttttttaattttagataagaacacttactccccttcgattttaaggaataattattaagagataatggacttctactgtctttgtttctttttcttaacaacctatgacagctctttgcatgaaaataatcagataccaaggcattgctagacagttttctttctggtgggtgtgggattttgatttttggtggcttatccagttattccacttgctggggggggggggggtattaaaccatttttttcctgcctattcgccactgatatgttttaagtataaaaataacctggctgacacttgggtcgacatatccatcggctgctctgagtcacttattaaaaagcttctaaactgtactgagttatgtttcacaatgattgggattcaaagccggttccttgaggcaggattcgaagagtggactttacaaacgtgagtcaagttcaccttgtttagatgtgtatcacaaagttgaaggcagcaagttaacgggagtacatgaaaacacaacacaaaggaaaaaaagcaggaaaaagacaatgcaaaaatcagtgtaggagacaggaacacgagcagatctaaggtcgcctatcagtccaattccacgttctgatcacaagtttccatctgagcaactgtgctg

SEQ ID NO: 1680 - DNA, 2831 bp, Mus musculus
  misc_feature 2407, 2412, 2413: n = A,T,C or G
tcgacctcaacacaaagacctgggtcgtgagacacacgcgtagagtcaggcggcttccccgaaaaccggactcggccggcgccgagtctgggtccccgccttcaaccatgaccctagcaatccatccctcggcccgggctccggacgtctgatattccgcacattctcgtacaactgctggagaggcgactgctgcccccttgtcgcccttggcgccttaccgcattccctatccggagttgggagcagcgcggccaccggcgcccctgtgcaaactgggggtgtctgctagatcagcctctgccgctgctgcccgcagctctggccatggcctggccgggcacagggccgagcagccggggggcgcctggaggcgtcgggctcaggctggggctgctgctgcagttcctcctgctcctgcggccgacactggggttcggggacgaggaggagcggcgctgcgaccccatccgcatcgccatgtgccagaacctcggctacaacgtgaccaagatgcccaacttagtgggacacgagctgcagacagacgccgagctgcagctgacaactttcacgccgctcatccagtacggctgctccagccagctgcagttcttcctttgttcggtttatgtgccaatgtgcacagagaagatcaacatccccatcggcccgtgcggtggcatgtgcctttcagtcaagagacgctgtgaaccagtcctgagagaatttgggtttgcctggcccgacaccctgaactgcagcaagttcccgccccagaacgaccacaaccacatgtgcatggaaggaccaggtgatgaagaggttcccttgccccacaagactcccatccagcccggggaagagtgccactccgtgggaagcaattctgatcagtacatctgggtgaagaggagcctgaactgtgttctcaagtgtggctacgatgctggcttgtacagccgctcagctaaggagttcacggatatttggatggctgtgtgggccagcctctgcttcatctccaccaccttcaccgtgctgaccttcctgattgattcatccaggttttcttaccctgagcgccccatcatatttctcagtatgtgctataatatttatagcattgcttatattgttcggctgactgtaggccgggaaaggatatcctgtgattttgaagaggcggcagagcccgttctcatccaagaaggacttaagaacacaggatgtgcaataattttcttgctgatgtacttttttggaatggccagctccatttggtgggttattctgacactcacttggtttttggcagccggactcaagtggggtcatgaagccattgaaatgcacagttcttatttccacatcgcagcctgggctattcccgcagtgaaaaccattgtcatcttgattatgagactagtggatgccgatgaactgactggcttgtgctatgttgggaaccaaaacctagatgccctcactggctttgtggtggctcctctctttacgtatttggtgattggaacgctgttcattgcggcgggtttggtggccttattcaaaattcggtccaatcttcaaaaagacgggacaaagacagacaagttggaaaggctaatggtcaagatcggggtcttctcagtactgtacacggttcctgcaacctgtgtgattgcctgttatttctatgaaatctcaaactgggcactctttcgatattctgcagatgactcaaacatggcagttgaaatgttgaaaatttttatgtctttgctcgtgggcatcacttcaggcatgtggatttggtctgccaaaactcttcacacgtggcaaaagtgttctaaccgattggtgaattctgggaaggtaaagagagagaagagggggaatggttgggtgaagccaggaaaaggcaacgagactgtggtataagactagccggcttcctcgttcctcattgtgaaggaagtgatgcagggaatctcagtttgaacaaacttagaaacacttcagcccacacacacccacgtcagcccaccaccactcacccaactcagcatcagaagaccaatggcttcactgcagactttggaatggtccaaaatggaaaagccagttaagaggttttcaaagctgtgaaaaatcaaaatgttgatcactttagcaggtcacagcttggagtccgtggaggtcccgcctagattcctgaagcccagggtgatagtgtttgctcctactgggtgggatttcaactgtgagttgataacatgcaaggagaaagattaatttttaaaacccttttaaattttaaatagtaactaaggtcttgcagatagcaaagtgatctataaacactggaaatgctgggttgggagacgtgttgcagagtttttatatngtttnnctggtctaacataaacatcttctggcctacactgtctgctgtttagaactctgtagcgcactcccagaggtggtgtcaaaatccttcagtgccttgtcgtaaaacagaattgtttgagcaaacaaaagtactgtactaacacacgtaaggtatccagtggatttctctctcctgaaatttcaacatccctaattctaggcagcccctgttttcttcactttaaactaatgactcaaaaaaaaaaaggttatttttataggatttttttttgcactgcagcatgcctaatgagaggaaaaggaggtgatcacttctgacaatcacttaattcagagaaaaatgagatttgctaattgacttaccttccgacccctagagaccctattgcattaagcaatgtttaagcaattggggactt

SEQ ID NO: 1681 - DNA, 933 bp, Mus musculus
gtgtagccctccctggtgtgctgaaactcaacaactctgatagccaggacatccgtgggcagatgcggggcagccagaatgggcccatagcatccgggcacgctccagtgatccactctattcaaaatctctatccagaaaactttgcgccctcttttcctcatggatcccctgggagtgggaggagtgaaggtggtcggagctctcgggtcagccctgcagctgctggctaccacagcagagcagcaaaggccaagcctccaaagcagcagggagcaggcgatgcggaggaggaagaggagtgatggtgactctgggggctcttgcagcccccaccccaccccaccccatgcataacagaacatgctggtgcaatgtccagctgcctctcgggcttactgggcaggagagacaccagattgtaatttttcctaggttatggccattttgtgtctttgcgattgtgctgtgtgtgtttgggtttgagggagggctagctgggaggcccgagctgccattgttgagcagccttgaaatcagcgctgagtgtctgtggccctcctggcccataagggctccatccttagtgatgtcatcaccactgcttcttggtgctttgtggtcctgatggacagagacaagggttctgggatctcagagtgagaagcatcctcctggtggggacctaagcttgagtgtgcagcgtgttacacaggcacatgtctggcagggacacggactggaggccaccttcgtccttgcgggtcactcacccacctctctctgttcttgatgaggaatgtactgctttgttcatgctgcccctaccagggccactcctactcatgaggacggaggcgccagcccctcccctttttattttactgttctaattgtctatttccttgtaatagaaataaagtttgtatttag

SEQ ID NO: 1682 - DNA, 1529 bp, Mus musculus
gggcctccgactgcggcgcggcggggcgatgtgagtgccatggcgaggagtctctgcgcgggggcctggctgaggaaaccccattacctccaggctcggttgtcctacatgcgggtgaagtatcttttcttttcctggctggtggtttttgtcggaagctggatcatatatgtgcagtattcaacctatacagagctatgcagagggaaggactgtaagaaaatcatatgtgacaaatacaagaccggagttattgacggacctgcatgcaacagcctctgtgtcacagaaacactgtactttggaaaatgtctgtccaacaagcccagcaaccagatgtatttaggagtttgggataatctaccaggtgttgtgaagtgtcaaatggaacaagctcttcatcttgattttggaactgaattggagccaagaaaagaaatagtgctatttgataaaccaaccaggggaactactgtacagaaattcaaagaaatggtgtacagtctctttaaggcaaaattaggtgaccaagggaacctctctgaattggttaatctcatcttgacagtggctgacggagacagagatggccaggtctccctaggagaagccaagtcagcatgggcacttcttcagttgaatgagtttctcctgatggtgatacttcaagataaagaacacacccccaaactaatgggattctgtggtgatctctacgtgatggaaagtgttgaatatacctctctgtatggaataagtctaccatgggttatggaactttttattccatctgggttcagaaggagcatggatcaattgttcacaccatcatggcccagaaaggcaaagatagccataggacttctagaatttgtagaggatgttttccatggcccctatggaaactttctcatgtgtgacaccagtgccaaaaacctaggatataatgagaagtatgacttgaaaatggtggatatgagaaaaattgtgccagagacaaacctaaaggaacttattaaggaccgccactgtgagtctgacctggactgtgtctacggtacagactgtagaactagctgtgacctgagtacaatgaagtgcacttctgaagtaatacaaccaaacttggcaaaagcctgtcagttactcaaagactacctactgcacggtgctcccagtgaaattcgggaagaattagaaaaacagctttattcttgtattgctctcaaagtcacagcaaatcaaatggaaatggaacattctttgatattaaataacctaaaaacgttattgtggaagaaaatttcctacacaaatgactcttagttcatttggactactgccatcattgagaatctacttatgattttgagcatttaaagagtggcttctgccccccaggcctgtggagtcatcatcttaaatgcatgttgtaacaataatggcaggtgtagggccaagatgtccaaaactcatccctgcccttttacaagtccacaagtatattcactgttaactatcttgactct

SEQ ID NO: 1683 - DNA, 2012 bp, Mus musculus
cattgtggagaaccaagagggcctctaattgtaacaatgttcatggttgtgatttttttttttaaataaaattccaaatgtttataaactgtcatcctcctcctctgttctcgtgtatgtccagttctttccagccctcgctagatgggagcagaagcttgtgatgccctcgaagatgcccactggaaacctgtgctcgcatctccagctcttggctttactgggtcatttgttcccttccagaaggctctgagatgacttatcatcattccaactcccactatctgaattcacaggatcgccctgtgcctttgctgggatagcagacctgatcgtgtcctctgcagtgccaagtggtcactctagtcctttgctgccttcttccggacttcaaaatggggctttcccacccagctcatttatttatttggtcttttcgagacagagaaattctgtcttgagggaaaccaaagataaaataagtaaatatatatgtatgaatgttttgcctgcatctgtgtctgtggaacatgcacatgactggtgcccatggaatccagaaaagaacattggatcctttggaactggagttgtagatggttgtgatctactatgtgggttctgggacttgaacttgggtcctctggaagaataaccagttttcctaactgctgagccatctctctagtcccttgttctatttttgagacagggtcttctgttactcaggctggcattgaaattgctatgtagctgaagttgcttggcactcctgtggtttacctccctagtgctgggattacagcacacatgcttttaaagatagaacagtgatgcttttataactagttttgaaccattttgtagagatagaccctaactttatcactgagataggtcctcagcctttttgtatgttaattttaactttattttcttgtaatgttagcttgaaatttttccaagtgtatttaatactaaattcaatttcaacatattgtatatacatatatgataatttcttaaaaatattacacttttacacacacactggttcttggcatcccaaggccagaaggtggtattagttctcctagaattggagttatagaatgttgtgagtcaccatgtagttgctgagactcaaactctgtcctctgaagagcagcaagtactcttaacagctgagccatctgtctagctcctcagattctttcattttcagattggtatgtatgatatccccctttcttagatttctaggcccccccccccttttaaagcaagacgaattttcatttaccggtgtgtctactggtttgtagctaattttctttttgtttatttatttattaattaattatacataagtactctgaagaaaataataaataaatctttttttaaaaaagtactgtttctagttaaggtgtgcgttcagcctttagcaaacacctttaatccctctataatacagacacacccttagtatacacctttagcaggtcaccggccacggcggcctgcggggcctcctacgggttttcttcagggcaaatgatataaggattggtacactggtgggagaagacaaatatgggaataaatactacgaagacaacaagcaattttttggccgccaccgatgggtcatctacaccaccgagatgaacggcaaaaacacattctgggatgtggatggaagcatggtgcctcctgagtggcaccgctggcttcactgcatgactgacgaccctccgacgactaatccaccgactgctcgtaaattcatctggacaaaccataaattcaatgtgtctgccactccagagcaatacgttccttattccaccactagaaagaagattcatgaatgggtcccaccttcgacaccttacaagtgaccgcagtgaagactgttcctgcactttcaggctagttagtgcaggaccatcctagcagctggccatgaacttgattaaaattgtttgacctaaaaaaaaaaaaaaaaa

SEQ ID NO: 1684 - DNA, 607 bp, Mus musculus
ccccccccccgagtcaccttgagcagggagtgtgctgtgggccgagcaggggctgcaggggagtgggagtgcagattgaaaaatgcagaccaccaaggcactgctcatttctccagctctgattcgctcctgtaccaggggtctaatcaggcctgtgtctgcctccctcctgagcagaccagaggccccatctaagcagccttcctgcagcagctcccctctccaggtggcccgacgggaattccagaccagtgtcatttcccgggacatcgacacagcagccaagttcattggtgctggggccgccacagttggtgtggctggatcaggagctggcattggcacagtgtttggtagcttgattattggctatgccaggaacccatctctcaagcagcagctcttctcctatgccattctggggtttgccctgtctgaggccatgggactcttctgtttgatggtcgccttcctcatcctcttcgccatgtgaggctccctggggtcacccagccgtccctgctgctttgactccatgccagtcctggtgctggagtctactgagctttaccattaaacaacaacaacaacaacaacaacgtttctc

SEQ ID NO: 1685 - DNA, 2126 bp, Mus musculus
ggggaagcgcttcgcgcgcacgggacgccatgtcggccctgaggcgctcgggctacggccccagtgacggcccttcttacggccgctactacgggcccgggggaggcgatgtcccggtgcacgtacctccgcccttatacccccctcttcgtccggagcctccccagcctccggtttcctggcgagggcgcgggggcgccccggccgagaccacctggccgggcgaaggcgcaggtggcgatggctactacccctcgggaggcgcctgggcagaagcgagcagagccgggggaggccaccaggaacagccaccatatcctggctataactccaactactggaattctgtgcgacccagggctccatacccaggctcctactctgtgaggccagagttacaaggccagagcctgaattcttatgcaaatggagcatatggaccgccttaccctcctggccctggagcaagtactgcctcctactctggggcttactatgtacctggctatacacagagcaattactccacggaagttccaaacacctaccgttcacctggtaacagcccaactccaatgtctcgttggatgtattcccagcaggactgtccaacagaagcacctcctctgaggggacaggtgccaggatatcctgcttcacagaaccctggaatgaccttgccccattatccttatggagatggcaaccgcgctgtgccgcagtcaggagggactggacgaccacaagacgatgcctgggcttccagcgcttatgggatgggagcccgttacccctggccttcagctgcaccctcagccccctcggctgggagcctgtacatgacggaaagtgcttcaccgtggccaggcaacagttctcctcagccgcctccttcacccccacctcagcagcctaaggacccctcgtactcctacaacccatcgggtcaaggcctgagccggcacagctttccctgcagcgtccatcagtatgaatctccgggagcagtgaacaatgacaactcagaccttttggattctcaagtccagtatagtgctgagcctcagttatatggtaatgccagcagcgagcatcccagcaaccaagttccgagtaataatctcccagaagagtgtttctcttcagatgagggcactcctccaagtattaaaaagatcatacatgtgctggagaaggtgcagtttcttgagcaagaagtagaagagtttgtaggaaaaaagacagacaaagcgtattggcttctggaagaaatgctgacaaaggaacttttagaactggattctgttgaaactgggggccaggactctgtccgtcaggccaggaaagaagctgtttgtaagatccaggccatactggaaaaattagaaaaaaagggactatgaaataacttggaatgcaggggagcctgtgactgatttggccaaagaactctttaatttggttagttcccatcttttgaaacgcctgttgtgacaagaagcaacacattccaactttctcctgacctaaaacttgaaagggggaaaaaactggaaaagccggcagaggaatgaaagcagcagtgacaagattctttccggttctcagatgactgaacagaataggaaactggagttgtcagtattgccaagtagacctctccttacgcaagccaaggtgtctgtaggctgctgcttgtcagatctaaggagggagagagactttatgtaaaggttgtcaaacgcctaatctgagacaaacaggctgttttgtaagcatctggactgtcacatttttgtgcattgtgactgcagatacttcatgtgtatattatagcttagactcttggacctctgttctgttttcttacctgcaggtcacaagtgtaatactattctacttcttcgtacattttgtagtaatatgtttaatataatcaaatattggcagccagatatgtgagcagttctgaacgaattcatatccttttaccacttgaatatattgcagtgtgtggtgggctcctaaagtcattcgtgtcctttctgtacagcatgttccattccatccttcccacttctgcttttcatgatggggaaggtgactgaaaattacattgaaatagg

SEQ ID NO: 1686 - DNA, 1054 bp, Mus musculus
gtgctgcgcagtttccccgaagtaagtttgccagttttctgtcttatactgaggttcgccgggtcatggtgccagcctgactgagaagaggacgctcccgggaaacgaatgaggaaccacctcctcctgctgttcaagtacaggggcctggtgcgcaaagggaagaaaagcaaaagacgaaaatggctaaatttaagatccgtccagccactgcctctgactgcagtgacatcctgcgactgatcaaggaactggctaaatatgaatacatggaagatcaagtcattttaactgagaaagatctccaagaggatggctttggagaacaccccttctaccactgcctggttgcagaagtgcctaaagagcactggacccctgaaggacatagcattgttgggttcgccatgtactattttacctatgacccatggattggcaagttgctgtatcttgaagacttcttcgtgatgagtgattacagaggctttggtataggatcagaaattttgaagaatctaagccaggttgccatgaagtgtcgctgcagcagtatgcacttcttggtagcagaatggaatgaaccatctatcaacttctacaaaagaagaggtgcttcggatctgtccagtgaagagggatggaggctcttcaagattgacaaagagtacttgctaaaaatggcagcagaggagtgaggcgtgccggtgtagacaatgacaacctccattgtgctttagaataattctcagcttcccttgctttctatcttgtgtgtagtgaaataatagagcgagcacccattccaaagctttattaccagtgacgttgttgcatgtttgaaattcggtctgtttaaagtggcagtcatgtatgtggtttggaggcagaattcttgaacatcttttgatgaagaacaaggtggtatgatcttactatataagaaaaacaaaacttcattcttgtgagtcatttaaatgtgtacaatgtacacactggtacttagagtttctgttttgattcttttttttttaaataaactactctttgattt

SEQ ID NO: 1687 - DNA, 1444 bp, Mus musculus
cggccggcctccgcgctcgcgcccgggcgcccagcgatgtactccccgtactgcctcacccaggatgagttccacccgtttatcgaggcgctgctgcctcacgtccgagccttctcctacacctggttcaacctgcaggcgcggaagcgcaagtacttcaagaagcacgagaagcggatgtcaaaggacgaggagcgcgcagtgaaggacgagctgctgggcgagaagcctgagatcaagcagaagtgggcatcccggctgttggccaagctgcgcaaagacatccggcccgagttccgcgaggactttgtgctaaccatcacgggcaagaagcccccctgctgcgtgctttccaaccccgaccagaagggcaagatccggcggattgactgcctgcgccaggctgacaaggtgtggcggctggacctggtcatggtgattttgtttaaagggatccctttggaaagtactgatggggagcggctctacaagtcgccccagtgctcgaaccccggcctgtgtgtccagccacatcacattggagtcacaatcaaagaactggacctttatctggcttactttgtccacactccggaatccggacaatcagatagttcaaaccagcaaggagatgcggacatcaaaccactgcccaacgggcacttaagtttccaggactgctttgtgacgtctggggtctggaatgtgacagagctggtgagagtatcacagactccagttgcgactgcatcagggcccaacttctcactggcggacctggagagccccagctactacaacataaatcaagtgaccctgggaaggcggtccatcacctcccctccttccaccagcagcaccaagcgccccaagtccatcgacgacagtgagatggagagtccagtagatgatgtgttctatcctgggacaggccgctctccggccgctggcagcagccagtctagcggatggcccaatgacgtggatgcaggccctgcttctctaaagaagtcaggaaagctggacttctgcagcgccctctcctctcagggcagttccccacgcatggctttcacccaccacccgctgcctgtgcttgctggagtcagaccagggagcccccgggccacggcatcagcgctgcacttcccttccacgtccatcatccagcagtcgagcccgtatttcacacacccaaccatccgctaccaccaccaccatgggcaggactcgctgaaggagtttgtgcagtttgtgtgctctgacggctcgggtcaggccaccggacagcattcacaacgacaggcgcctcctctgccaaccggtttgtcagcatcggatcccgggacggcaactttctgaacatcccacagcagtctcagtcctggttcctctgattaagatcaacaaaaaaaaaaaaaaaaaaaaaaaaaaaaaaaaaaaa

SEQ ID NO: 1688 - DNA, 2055 bp, Mus musculus
ggttgctagcgactgactgcaggctgtatgtaggcatctctcattcagaatggacattgacgtgttgagcagagaagaaagctttcagcaatgtgtcatttgtcacaattgtcaggctttttaaaaaaggactcccaaggagagatgctgcatgctttgtatggtagcacagactgatttcctctgcagactcttaagttttcagaagcttaaatatagagccctgttataaaaggaagagagaatttgtgtgttaaatcggccttgtgaagaagtgcttcatcactctcctgcacctccctgtgctctggtgcgtggcgtggccacggctctctaggttagggctcggagctggctgcagcatgctcatgtgctagctgagtagagttcaccggcagtcgcaggctgacacagggttttttggtttttgtctttctattccgttgaatatcagaatgccatccaaagagtcttggtcggggaggaaagctaacagagccacagtccacaaagcaaaacccgagggcccggcagcaaggcttactgatagcagccttgggaatgaaactgggctctcaaaagtcatctgtgacaatctggcaacctctgaaactctttgcttattcgcagttgacatcacttgttagaagagcaactcttgaaagaaaaatgaaccaaattccaaaatatgaaaaggttcacaatttcaaggtgcatacgttccgaaggccacactggtggtgaatactgtgccaacttcatgtggggcctcattgctcaaggagtgaaatgtgcagattgtgggttgaatgttcacaagcagtgttccaagatggtccccaatgactgtaagccagatctgaagcacgtgaagaaggtgtacagctgtgacctgacaacgctcgtgaaagctcacatcaccaagcggccaatggtggtagacatgtgcatcagggagatcgagtccagaggtcttaattctgaaggactctaccgagtgtcaggatttagtgacctgattgaagatgtcaagatggcttttgatagagatggtgagaaggcggatatttctgtgaacatgtatgaggacatcaacattatcactggtgcacttaaactgtacttcagggatctgccaattcctctcatcacatacgatgcctaccccaagttcattgagtctgccaaaattatggaccctgacgagcaattggagacccttcacgaagcactgagatcgctgccgcctgcccactgcgagacgctccggtacctcatggcgcatctcaagagagtgacccttcatgagaaggagaatctgatgagtgcagagaaccttgggatcgtgtttggaccaaccctcatgagatccccagagctcgaccccatggccgccctgaacgacatacgctatcagagactggtggtggagctgcttatcaaaaacgaagacattttattttagagttttgatttgaggagaagaaaaatggtttacagatgaaggaatgttttctagtaatttaattagcttcattagctgaattgtttcttcgttagaggtttggccaaatacccagattaaaatgaaggaacttcctgtcatttctatagcaccgctcagctgtccttgtaaaacagtgcacacacgctttctggtcccggtaaccctgggtgtctatcatgttaagagaaactcaagctactgcatgattacccctttttggtgaggaaaccccacattgaggaatcacagacttgtgcctgcaccacctctgtcctgggttgtctgtggttgtcacccagcatgcttcccagagtaaactgtcatgactttgcttttggggtccatgccattggtttctgatgcttgcacacacacacacataagcagtgccctggctgttacatcaccatccccataccatatgccaactccacaacggttcctttccagcttcttcctcctcctctgacatagcgctttgtcctcagcagaagccagatgtgttttagatcttacttcagtacgctaccaataaaaatgcaccacac

SEQ ID NO: 1689 - DNA, 1205 bp, Mus musculus
  misc_feature 330, 965: n = A,T,C or G
ccccggggtccccctggctctgctggttctcctggcaaagacggactcaacggtctccctggccccattggtccccctggtcctcgaggtcgcactggtgacagcggccctgctggtacccccggccctcctggaccccctggccctcctggacctcccagtggcggttatgacttcagcttcctgcctcagccacctcaagagaagtctcaagatggtgaccgctactaccgggccgatgatgctaacgtggttcgtgaccgtgaccttgcggtggacgccaccctcaagagcctgagtcagcagattgagaacatccgcagccccganagcagccgcaagaaccctgcccgcacatgccgcgacctcaagatgtgccactctgactggaagagcggagagtactggatcgaccctaaccaaggctgcaacctggacgccatcaaggtctactgcaacatggagacaggacagacctgtgtgttccctactcagccgtctgtgcctcagaagaactggtacatcagcccgaaccccaaggaaaagaagcacgtctggtttggagagagcatgaccgatggattcccgttcgagtacggaagcgagggctccgacccgaccgatgtcgctatccagctgaccttcctgcgcctaatgtccaccgaggcctcccagaacatcacctatcactgcaagaacagcgtagcctacatggaccagcagactggcaacctcaagaaggccctgctcctccagggatccaacgagatcgagctcagaggcgaaggcaacagtcgcttcacctacagcagggttgtggacggctgcacgagtcacaccggaacttggggcaagacagtcatcgaatacaaaaccaccaagacctcccgcctgcccatcatcgatgtggctcccttggacattggtgccccagaccaggaattcggactagacattggccctgnctgcttcgtgtaaactccctccaccccaatctggttccctcccacccagcccacttttccccaaccctggaaacagacgaacaacccaaactcaatttcccccaaaaagccaaaatatgggagataatttcacatggactttggaaaacattttttttcctttgcattcacctttcaaacttagtttttaccaaagaccaactgaacgtgaccaaaaaccaaaagtgcattcaaccttac

SEQ ID NO: 1690 - DNA, 4193 bp, Mus musculus
cccgcagcagcggtcgggagcactgtgggctagcggctcaccgaggagctgggtgcagcatccgggcgcagacggcctggcctggggagatggcgcccaggtggcacctcctggatgtgctcaccagtttggtcttgctgctggtggcacgcgtctcctgggcagagccagagaatgttgctgaggaggtggggctgctgcagctccttggagaccccctacctgagaagatctcacaaatcgatgaccctcacgtcgggccggcctacatctttggaccagactccaacagtggccaggtggcccagtatcatttcccaaaactcttcttccgggacttttcgctgctgtttcatgtccggccagccacagaggcagcaggggtgctatttgccatcacagatgctgcccaggtggtagtctcactgggcgtgaagctctcagaggtccgagatggacagcaaaacatctcattgctctacacggagcctggggccagccagacccagacgggagccagcttccgcctacctgcatttgttgggcagtggacacacttcgcgctcagcgtcgacggaggctctgtggctctctacgtagactgtgaagaattccagagggtgccatttgctcgggcctcgcagggactggagctagagcgtggcgctggcctctttgtgggtcaggctggaacagcagaccctgacaagttccaggggatgatctcagagctgaaggtacgcaaaaccccccgggtgagccctgtgcactgtctggatgaagaagatgatgatgaagaccgggcatctggagattttggaagtggctttgaagaaagcagcaagtcacacaaggaggatacatctctactacctgggctccctcagccacctcctgtcacttccccacccctggctggaggcagcaccacagaagatcctagaacagaagaaacggaggaagacgccgcggtagattctataggagctgagacccttcctggcacaggttcaagcggtgcatgggatgaggctatccagaaccccggaaggggcttgataaagggaggtatgaaaggacaaaagggagaaccaggtgcccagggcccacctggcccagctgggccccagggtcctgccggtccagtggtccagagccccaactcacaacctgtccctggagcacaaggacccccgggacctcaggggccaccagggaaggatggcactccaggaagggatggtgaaccgggtgaccctggtgaagatgggagaccgggtgacactggacctcaaggctttccagggaccccaggagatgtgggccctaagggcgagaagggagatcctggtattgggccccgaggacctccagggcctccagggccaccaggaccctccttcagacaagacaagctgaccttcattgacatggagggatccggtttcagcggagacatagagagccttagaggcccacgaggcttccctggccccccggggccccctggtgtcccaggacttcctggtgagccaggacgctttgggatcaatggttcctatgcaccaggacctgcaggccttcctggtgtacctgggaaggaaggaccccccggttttccaggtcccccgggacctccaggtcctccaggcaaagagggcccaccaggagtggccggccagaaaggcagtgttggtgatgtgggcatcccaggacccaaggggagcaaaggagaccttgggcccatcggtatgcctggcaagtctggcttggctggatcccctgggccagttggacccccaggacctccagggcctccagggccaccaggaccaggatttgctgctggattcgatgatatggaaggctctggaatacccctctggacaacagcccgaagctctgatgggctgcagggacctcccgggtcgccgggactcaagggggatcctggagtggcaggcctacctggagccaagggagaagttggagcagatggagcccagggcatccctggtcccccaggaagagaaggtgcagctggatctccggggccaaaaggagagaaagggatgccgggagaaaagggaaacccaggaaaagatggagtgggccggccgggcctccctgggcctccaggacctccagggcctgtgatctatgtgtcaagtgaggataaagcaatagtgagcacgccaggacctgagggcaagccagggtacgcaggctttcctggacctgctggaccgaagggtgacctgggttccaaaggcgagcagggtcttccggggcccaagggtgagaagggagagccaggcactatctttagtcctgatggcagagctctgggccatccccagaagggagccaagggagagccaggctttcgaggacccccgggtccttatggacgacctgggcacaagggtgaaattggcttccctggacggccgggtcgacctggaacgaatggcttaaagggagagaaaggagagcctggagatgccagccttgggttcagcatgaggggattgcctggcccccctgggcctccaggacccccaggtcctcctgggatgcccatctatgacagcaatgcatttgtggagtctggccgacctggactaccaggacagcagggtgtgcaggggccttcaggaccaaagggtgacaaaggagaggtgggcccacctgggccaccagggcaattccccattgacctcttccacctggaagcggaaatgaagggggacaagggagaccgaggggatgctggacagaaaggagagaggggagaacctggggctcctggtggtggattcttcagctcaagtgtacctggcccacccggcccacctggataccctggaattccgggtccaaagggagagagcatccgggggccacctggccctcctggccgccagggacctcctggcattggctatgagggtcgccagggtcccccaggacctccgggacctccaggacctccctccttccctggccctcacagacagactgtcagtgttcctggtcctccgggcccacctggtcctccaggtcccccaggagccatgggtgcctctgctgggcaggtgaggatctgggccacataccagaccatgctggacaagatccgggaggtgccggagggctggctcatctttgtggccgagagggaagagctctatgtacgcgttagaaatggcttccggaaggtgctgctggaggcccggacagccctcccgagaggcacgggcaatgaggtggctgctttgcagcccccattggtccagcttcatgagggcagtccatacacccggagggagtactcctattccacggcacgaccctggcgagcagatgacatcctggccaacccaccgcgcctgccagaccgccagccttaccccggagttccacatcaccacagttcctatgtgcacctgccgccagcccgccccaccctctcacttgctcatactcatcaggactttcagccagtgctccacctggtggcactgaacacccccctgtctggaggcatgcgtggtatccgtggagcagatttccagtgcttccagcaagcccgagccgtggggctgtcgggcaccttccgggctttcctgtcctctaggctgcaggatctctatagcatcgtgcgccgtgctgaccgggggtctgtgcccatcgtcaacctgaaggacgaggtgctatctcccagctgggactccctgttttctggctcccagggtcaactgcaacccggggcccgcatcttttcttttgacggcagagatgtcctgagacacccagcctggccgcagaagagcgtatggcacggctcggaccccagtgggcggaggctgatggagagttactgtgagacatggcgaactgaaactactggggctacaggtcaggcctcctccctgctgtcaggcaggctcctggaacagaaagctgcgagctgccacaacagctacatcgtcctgtgcattgagaatagcttcatgacctctttctccaaatagggcctctgccagctagggtggcagacagaggccatgcagaactttgacacagcgcagggagcattcagtcagcacccagggctctggctgggatacaatcctgtatagttcccatttttatgtaatcctcaagaaataaaaggaagccaaagagta

SEQ ID NO: 1691 - DNA, 98 bp, Mus musculus
atagcaccctcctgtgctgcagcctttctcacctggaagacagctcctcctcgaaggtttacaaaatgtgtgatgcctttgtgggaacctggaagctt

SEQ ID NO: 1692 - DNA, 613 bp, Mus musculus
cccagaagtgcacaggctcggcaggacaacttgcagcccttctccctggattcagtcatttgaagactgagaccaagattggaagcatggccgacctcaggcagctcatggacaatgaggtgttgatggcctttacctcctatgcaacgatcattcttaccaagatgatgttcatgagctctgcgaccgcattccagaggataaccaacaaggtttttgccaacccagaagactgcgctggctttggcaagggagagaatgccaagaagtttgttcgcactgacgagaaggtggaacgcgtgcgcagagcccacctgaatgatcttgaaaacatcgttccctttctcggcatcggctcctgtactccctgagtggaccagatctctctacagccctcatgcacttcagaatccttgtaggtgctcggatctaccacaccattggttacttgactccccttcctcagccaaacagggggctggaattttttgttggctaaggagttaccttgtcaaatgcttacaggctgcttaggagcagactgtacttgtaaagaggattgtgatcttaccttccaattggatcttttaaaaaagaatcctatattttagtt

SEQ ID NO: 1693 - DNA, 2755 bp, Mus musculus
ctggccagagagacccaagggatagtcagggacgggcagacatgcagctagggttctggggcctggacaggggcagccaggccctgtgacgggaagaccccgagctccggcccggggaggggccatggtgttgcctgcccaacatgtcagccgaagtgcggctgaggcagctccagcagctggtgctggacccaggcttcctgggactggagcccctgctcgaccttctcctgggcgtccaccaggagctgggtgcctctcacctagcccaggacaagtatgtggccgacttcttgcagtgggtggagcccattgcagcaaggcttaaggaggtccgactgcagagggatgattttgagattttgaaggtgatcgggcgtggggcgttcagcgaggtagcggtggtgaagatgaaacagacgggccaagtgtatgccatgaagattatgaataagtgggacatgctgaagagaggcgaggtgtcgtgcttccgggaagaaagggatgtattagtgaaaggggaccggcgctggatcacacagctgcactttgccttccaggatgagaactacctgtacctggtcatggaatactacgtgggcggggacctgctaacgctgctgagcaagtttggggagcggatccccgccgagatggctcgcttctacctggccgagattgtcatggccatagactccgtgcaccggctgggctacgtgcacagggacatcaaaccagataacattctgctggaccgatgtgggcacattcgcctggcagacttcggctcctgcctcaaactgcagcctgatggaatggtgaggtcgctggtggctgtgggcaccccggactacctgtctcctgagattctgcaggccgttggtggagggcctggggcaggcagctacgggccagagtgtgactggtgggcactgggcgtgttcgcctatgagatgttctatgggcagacccccttctacgcggactccacagccgagacatatgccaagattgtgcactacagggaacacttgtcgctgccgctggcagacacagttgtccccgaggaagctcaggacctcattcgtgggctgctgtgtcctgctgagataaggctaggtcgaggtggggcaggtgatttccagaaacatcctttcttctttggccttgattgggagggtctccgagacagtgtacccccctttacaccagacttcgagggtgccacggacacatgcaatttcgatgtggtggaggaccggctcactgccatggtgagcgggggcggggagacgctgtcagacatgcaggaagacatgccccttggggtgcgcctgcccttcgtgggctactcctactgctgcatggccttcagagacaatcaggtcccggaccccacccctatggaactagaggccctgcagttgcctgtgtcagacttgcaagggcttgacttgcagcccccagtgtccccaccggatcaagtggctgaagaggccgacctagtggctgtccctgcccctgtggctgaggcagagaccacggtaacgctgcagcagctccaggaagccctggaagaagaggttctcacccggcagagcctgagccgcgagctggaggccatccggaccgccaaccagaacttctccagccaactacaggaggccgaggtccgaaaccgagacctggaggcgcatgttcggcagctacaggaacggatggagatgctgcaggccccaggagccgcagccatcacgggggtccccagtccccgggccacggatccaccttcccatctagatggccccccggccgtggctgtgggccagtgcccgctggtggggccaggccccatgcaccgccgtcacctgctgctccctgccaggatccctaggcctggcctatccgaggcgcgttgcctgctcctgttcgccgctgctctggctgctgccgccacactgggctgcactgggttggtggcctataccggcggtctcaccccagtctggtgtttcccgggagccaccttcgccccctgaaccctaagactccaagccatctttcatttaggcctcctaggaagatcgagcgaccagggagcgacccaaagcgtctctgtgcccatcgcccccccccccccccccaccgctccgctccacacttctgtgagcctgggtccccacccagctccgctcctgtgatccaggcctgccacctggcggccggggagggaggaacagggctcgtgcccagcacccctggttcctgcagagctggtagccaccgctgctgcagcagctgggcattcgccgaccttgctttactcagccctgacgtggatgggctaactgctcagctcatccgatttcactttttcactctcccagccatcagttacaagccataagcatgagccccctatttccagggacatcccattcccatagtgatggatcagcaagacctctgccagcacacacggagtctttggcttcggacagcctcactcctgggggttgctgcaactccttccccgtgtacacgtctgcactctaacaacggagccacagctgcactcccccctcccccaaagcagtgtgggtatttattgatcttgttatctgactcactgacagactccgggacccacgttttagatgcattgagactcgacattcctcggtatttattgtctgtccccacctacgacctccactcccgacccttgcgaataaaatacttctggtctgcccta

SEQ ID NO: 1694 - DNA, 1229 bp, Mus musculus
tccccacattgcaaagcctacacaaagatccctaccactgagcaccgagggaggcatggctcagaaccccagcaacatggagcccttgcgtaaaccactggtgcctgtgaagggaatcccactcatcaaatactttgcggagacaatggagcaactgcagaacttcacagcctggcctgatgatgtgctcatcagcacgtacccaaagtctggtactaactggatgagtgagatcatggatatgatctatcagggtggcaagctagataagtgtggccgggcccccgtctatgcccggatacccttccttgagttcagctgcccaggggtccccccaggtcttgaaactctgaaagagacaccagccccacggatcattaagacacatctgcccttgtccttactccctcagagtctgctggatcaaaagatcaaggtgatctacgttgcccgaaatgcaaaggatgtggttgtctcctattataacttctacaaaatggccaagctgcaccctgacccaggcacctgggaaagcttcttggagaacttcatggatgggaaagtgtcctatgggtcgtggtaccagcacgtgaaggagtggtgggagctgagacgcactcaccctgttctctatctcttctatgaagacatgaaggagaatcccaaaagggagatcaagaagattctagagtttctggggcgctctctacctgaggagactgtggatttaattgttcaccacacatccttcaagaaaatgaaggagaaccccatggctaactacacaaccatcccaactgaagttatggaccacactatttatcccttcatgaggaaaggtaccattggggactggaaaaataccttcactgtagcccagagtgagcactttgatgcccactatgccaagctaatgacaggttgtgacttcacgttccgctgtcaaatatgaattgtggatatggctatactgggaaccaaggcaagctgacacatccccatcatgatctcaagagaaaaatgtgatgtgttcatatttgttgtatgcctaaaggaaatctgagctaagagaataggactgggatgtagctgaggcagagggtcttatgaacatgtcaggaaagccatcagtcctaacactgaaaaagaacctaaagtacaaacatgcaaaaatagtaagataaactgtattttacctgaacaaataaatgccactgggagctgactgg

SEQ ID NO: 1695 - DNA, 2535 bp, Mus musculus
ggcacccaggctgggagttcttctgagggaaagccgagtggagtgggcgacccggcggcggtgacaatgagttttcttggaggcttttttggtcccatttgtgagattgatgttgcccttaatgatggggaaaccaggaaaatggcagaaatgaaaactgaggatggcaaagtagaaaaacactatctcttctatgatggcgagtctgtctcaggaaaggtaaacctagcctttaagcagcctggaaagaggctagagcatcaaggaattagaattgaatttgtaggtcaaattgagcttttcaatgacaagagtaatactcatgaatttgtaaacctagtgaaggaactagccttgcctggagaactgactcagagcagaagctatgactttgaatttatgcaagttgaaaagccatatgagtcatacatcggtgccaatgtccgcctgaggtattttcttaaggtgacaattgtgagaagattgacagacttagtgaaagagtacgatcttattgttcatcagctagccacctatcctgatgtcaacaactctattaaaatggaagtgggcattgaagactgtctgcacatagagtttgaatataataagtccaagtatcatttaaaggatgtaattgttggaaaaatttacttcttattagtaagaataaaaatacaacacatggaattacagctgatcaagaaagagatcacaggaattggacccagcaccacaacagagacagaaacaatcgctaagtatgaaataatggatggggcgccagtaaaaggagaatctattccgataagattgttcttagcagggtatgacccaacccccacgatgagagatgtgaacaagaagttttcagtaaggtactttctaaacctcgtgcttgttgatgaggaggaccgaaggtacttcaagcagcaggagatcatcctgtggagaaaagcacccgagaaactgagaaaacagaggacgaactttcaccagcggtttgaatctccagactcgcaggcctctgcggagcagcctgagatgtaagcaggtgggcagagcagcaagtgcaagaaccgggccaagagagcagctcagctggctgacgacagtcgcagcgtgcggacatcccaactccacgtctgctagtcttccttatcctagagtgctgcgtttattttacagtatgattaaaggttttgtgtatatacattttaaaaagtgcttcttggaaacactggagaattcctaagctgccttttttgttttcttttttactgcacactgataagcactcagaagcataaacattaaggattttcatgtgagtagactggtatttgtaattttgctttctttatgcataatgttgaaaatccttttctctgttttcatgctaatgattacctcttattctctatgtgcaaaaaattaaatatttttgttcaagtaaaatgagaaaaacctgagcagcccttatgtcctacaaagttttaaggcatggctcctcagtatttttgagaattgtgtttatttttacatgtggatcagaaaccaacctggtgttacatggtaggcacttctgggtctaccattcacagcctcctgaattttaatctttgggatctctgaggtatatgaaagattgtcaccccagggatgacatggtttgtcatcgtggccctcttgccccttattgaccacgtttgctatgactttctgtatcatcatgtaggttctgcagtgtggagttgacacattggcattttagaacttgttaaacctgtatcattttttttccataaagactttgaaacatgtatatattttttaatttaaggactactttccatgtgtatgcaaatcgtcacctaggaatgagagagcttgggagaaccagccgaagtgtccatagccggacaatttcttgttaactggaatattggctagttcaaacttgacttcacgtagtctatttaaaaaaacccgaaccaaacagaacaaaaaacactaaattcataccattctctgaaaagaaggctgcagtcagctgagcacagacacacaactgaggcgtatggggcaggaggaagcctgtgtgggggccactctcactcagggcttgttggtttctgtaccagtgttccttgatacacctcagtacaggtttgtcagttaactttactttctaggaagctcaacagcccaacttatgtttccttaaacctattttttactatgatggcactttgataaaatggccagcaaccagccctggccaaaggttcacataccacgtcctggagcagctattgtcaatgtgggtttctaaggacggccatgttctccttcatgtaagtgcctgttcagagtctcaaagtttcaaaatgccaaatattttcatggtcacttgcatgtataatctaggaaatattcaaggagattttgaaaaacaattgtatttaaccagcctcaagttgtgcaaccatgatatataaaataaataatttgaaacagaaaaaaaaaaaaaaa

SEQ ID NO: 1696 - DNA, 1782 bp, Mus musculus
tgacagagttgcacagcatatgttagtggattcttgttcacagtgtgcctgtttaagaaattaacggaaacagtgtcaagagagtaaggtcacagaggacttgctgaaaatgaatgtatgtgcgttctctcttgccttggcattagtcggtagtgtcagtggccaatactacgattatgacatccctctcttcatgtatgggcaaatatcacccaactgtgcaccagaatgtaactgcccccacagctacccaactgccatgtactgtgatgacctcaagttgaagagtgtgccaatggttcctcctggcatcaagtacctttacctgaggaataaccaaatcgaccatattgatgagaaggcctttgagaacgtcacagacctgcagtggctcattcttgaccacaaccttctagaaaactccaagatcaaagaaaaggttttctctaagctgaaacaactgaagaaactgcatataaactacaacaacctgaccgagtccgtcggtccacttccaaagtccctgcaagacctacagctgaccaataataaaatcagcaagctcggctccttcgacgggctggtcaacttgaccttcatttatcttcaacacaaccagctcaaagaggatgctgtctcggcttctctgaaaggtctcaaatcactagagtacctggatttgagcttcaatcagatgagcaagctgcctgctggtctacctacatctcttctaactctctacctagacaataataagatcagcaacattccggatgagtacttcaagcgcttcactgggctgcaatacctgcgtttatctcacaatgaactggctgatagtggggtacctggaaactcgtttaatatatcatccttgctcgagcttgatctctcctataataagcttaagagtataccaacagttaatgaaaatcttgaaaattattacctggaggtcaatgaacttgaaaagtttgatgtgaagaccttctgtaagatcctgggacctctgtcttactccaagatcaagcatctgcgcttggatggcaatcctctcactcagagcagtctgcctcctgacatgtatgagtgtctacgtgtagcaaatgaaatcaccgttaactaacatcctctcattccaatacattgaagtatgttctggagcagaacttcatggttgggaatgtgggggatgttttaaagttttcactaatatccttctcgttgctggtggtattacttcatggattttaattaatgaaggaaatgttttatgaacatttaccacatttaaataaaagatgaaaagcaggcctttttcatcctgagaacagaaatacaaaacccgttaaacttaagtctttatttgtaaatttaatgttttctacagctctatgttcagatggtatgaaagcctttttactgattgcatggaaatcagccaagttttttatggttcccagattttacattaatgatttcaaaaacatgaaacaaatatacatggatgtttgttatcctaatccaaattatcttgacatgtcaagtctgttttgcagacatttatactctgcatttggaagccagtaatttgcaagataccaaagaaaattaatgaagttgcatccacttacagaaatgtagttcgcagtaagcatttgcacggttacttaggtggaaacttttcttgagtcattttcctctgtcatgtgtatgttcctttttgattgtttgcatgttatgattaatagttgatagcaaaataaaacaataaagctggca

SEQ ID NO: 1697 - DNA, 2246 bp, Mus musculus
ggcgagagaggccatcacaacctccagtttgtgtcaaggtccagtttgaatgaccgctttcagctggtgaagacatgacgaccctggactccaataacaacacaggtggtgttatcacctacattggctctagtggctcctccccgagccggaccagcccggagtccctctacagtgacagctccaatggcagcttccagtccctgactcaaggttgtcccacatacttcccaccatcacctactggctccctcacccaggaccctgcccgctcttttggcagtgcgccacccagtctcagtgatgatagctccccttcttctacatcatcgtcatcctcttcatcctcctcctccttctataacgggagccccccaggaagtctacaagtggccatggaagacagcagccgagtgtcccccagcaagggcacaagcaacattaccaagctgaatggcatggtgctactgtgtaaggtgtgtggggacgtggcctcaggcttccactatggagtgcacgcctgtgagggctgcaagggcttttttcgccggagcatccaacagaatatccagtacaaacggtgtctgaaaaacgaaaactgctccatcgttcgcatcaatcgcaaccgctgccagcagtgtcgcttcaagaagtgtctctccgttggcatgtctagagatgctgtgcgttttgggcgcatccccaagagagagaagcaacggatgcttgccgagatgcagagcgccatgaacttggccaacaaccaactgagcagcctgtgccctctagagacctcacctactccacatcccacctctggctccatgggcccctcacctcctcctgcaccagcccccacacctttggtgggcttctctcagttcccacaacagctgacaccacccaggtctcccagccctgagcccaccatggaggatgtgatatcccaggtcgcccgggcccatcgagaaatcttcacctatgcccatgacaagttaggcacctcacctggtaacttcaatgccaatcatgcatcaggtagcccttcagctacaactccacaccgctgggagagtcagggatgcccgtctgcccccaacgacaacaaccttttggcggctcagcgtcataatgaagcgctgaatggtctacgccagggcccttcctcctacccgcctacctggccttctggccccacccaccacagctgccaccaacctaacagcaatgggcaccgtctgtgccccacccacgtatattcggccccagaaggggaggcacctgccaacagtctacggcaaggcaacaccaagaatgttctgctggcatgtcccatgaacatgtatccccatggacgcagcggccggactgtgcaggagatctgggaagacttctctatgagcttcacgcctgccgttcgggaggtggtagagtttgccaaacacatcccaggcttccgtgacctttctcagcacgaccaggtgaccctgcttaaggctggcacctttgaggtgctgatggtgcgctttgcatcgttgttcaacgtgaaggaccagacagtgatgttcctgagccgcacaacctacagtctgcaggagctcggtgccatgggcatgggcgacctgctcaatgccatgtttgacttcagcgagaagctcaactccctggcacttaccgaggaggagctgggcctattcaccgcggtggtgcttgtctctgcagaccgctcgggaatggagaattccgcttcggtggagcagctccaggagacgctgctgcgggctcttcgggctctggtgctgaagaaccggccctcggagacttcccgcttcaccaagctgctgctcaagctgccggacctgcggaccctgaacaacatgcattccgagaagctgctgtccttccgggtggacgcccagtgacccgcccggccggccttctgccgctgcccccttgtacagaatcgaactctgcacttctctctcctttacgagacgaaaaggaaaagcaaaccagaatcttatttatattgttataaaatattccaagatgagcctctggccccctgagccttcttgtaaataactcttcccccacccccaccgccatgctcccatcctcccctatttaaaccactcttgctctctccaccctcctctggcccctcgatttgttctgttcctgtctcaaatccaatagttcacagctgaaaaaaaaaaaaaaaaaaaaaaaaaaaaaaaaaaaaa

SEQ ID NO: 1698 - DNA, 1221 bp, Mus musculus
atggcagtcgccgtcgagggcgcccgcaggaaagagcgcatcctctgcctgtttgacgtggacgggaccctcacgccagctcgccagaaaattgaccctgaggtatcggccttcctgcagaagctacgaagcagggtacagatcggcgtggtgggtggctctgactactctaagatcgccgagcagctgggagagggggacgaagtcattgagaagtttgactacgtgtttgctgagaatgggacagtgcagtataaacacggacggctactctccaaacagacgatccagaaccacctgggggaggagctcctgcaggacttgatcaacttctgccttagctacatggccctgctcagactgcccaagaagcgtgggaccttcattgagttccggaatggcatgctgaacgtctcgcccattggccgcagctgcaccctggaggagaggatcgagttctcggaactggacaagaaggagaagatccgggagaagtttgtggaagccttgaagacagagtttgctggcaaggggctgcggttctcccgaggaggcatgataagcttcgatgtcttccccgagggctgggataagcgctactgcctggacagcctggatgaagacagctttgacatcatccacttctttggaaatgagaccagtcctggcgggaatgactttgagatctatgcggacccccggactgtcggccatagcgtggtctcccctcaggacactgtacagcgatgccgcgagctcttcttcccagagacagcccacgaggcgtgactgggcccacagctgagcactgggaccttcaaagagctctgaccaggcctgaagatagaaccattgggtgccacggttcccatcccactggcccaacacgtagcatcctgtgtgggcactgcagggtcacctacacaggaccaacgtctgtgtgggaactgtccccagccaggtggctcctgacgagacgcatacctgctctctaccctgatggtcctggcctctgatgctgctggttttggggacagaacaggtctcaccacagggtggcatgggagttgtgctatggagcctgctggccacagactgacaagggacagaatggcagagaaggggcattacttaaaggactctgtcacagatattaaagttcccaagacaaaaaaaaaaaaaaagctcgacctcgaggggggtgccggtacccggggatcc

SEQ ID NO: 1699 - DNA, 5176 bp, Mus musculus
gaggtggggcaccgcgcgtgggggagccgaggggccggagtcgggtttcagagcgcgggtgactcaggcgcgggcagcagcggggatcccgccgtcgccaccgagcgcagcctttgttccgcgggcgaagtacagctggggtccggcggctgcaccatgacacacaggaggaccgcgcagggccggcgcccgaggtggctgctctccatcatctccgcgctgctctccgctgtcctgcagacccgcgctgcgacagggtcagcctctcaggttcacctggacctcacagtgctcattggtgtcccattaccctcgtctgtgtcctttaccaccggctatggcggtttcccggcttacagctttgggcctggtgccaacgttggccgcccagccaggaccctcatcccaccgaccttcttcagggatttcgccattggtgtggcggtgaagcccaatagcgcccaagggggcgtgctcttcgctattaccgatgctttccagaaagtcatctacctgggcctgcggctttcaagtgtggaggatgggcgccagcgggttatcctctactacacggaaccaggctcccacgtgtcccgtgaagctgcggttttctccgtgcccgtgatgaccaacaggtggaatcgttttgctgtgaccgtccagggcgaagaagttgctcttttcatggactgtgaggaacagagccaagtccgtttccagcgatcgtcctggcctttgacctttgagcccagtgccgggatctttgtgggcaatgctggagctatggggctggagagatttacgggttccatacaacagcttaccatctattcagaccccaggacccctgaggagctgtgtgaagcacaagagtcctcggcgtctggagaagccagtgggtttcaggagatggatgaagtcgctgaaatcatggaagctgtcacctacacacaagccccgcctaaagaatcacacgttgatcccataagcgtgccccctacttcatcctctcctgccgaggactcggagctttctggtgagccggtaccagaaggaaccccagaaacgaacttgagcatcattggacacagcagccctgagcaagggtctggtgagatcctgaatgatacgctggaggtccatgcgatggatggggaccctggtactgatgatggttcaggggatggagccttgttgaacgtcactgatggtcaggggttatcagcaacagcaactggggaggccagtgtgcctgtcaccactgtcctggaagcagagaatggcagtatgccactggggagccccaccctggccatgtttacccagagcatcagggaagtggacactccggatccagaaaatctaacaacaacagcatcaggggatggtgaggtgcccaccagcactgatggggacacagaggctgacagctcgcccactggagggccaaccctgaagccaagagaagaggccactctgggttcacacggtgaggaatggttaaccccagctgtgtccaaaatgcccctcaaggcttttgaggaggaggaagccagtgggactgccatcgacagcctggatgtcatcttcacacccacggtggtccttgagcaagtcagcaggagacctacagacatccaagccactttcacgcccacagtggtccttgaagaaaccagcggggcccctacagacacccaggacgctctcacacccacagtggcccctgagcaaatgttcactgctgaacccacagatggaggagacttggtggcgtctacagaggaagctgaagaggagggatctggtagcatgccccccagtgggcccccactccccacacccacagtgactcccaagaggcaggtcaccctggtaggagtggaagccgaggggtcaggccctgttgggggcttggatgagggctcaggctctggagacatcgtgggcaatgaggatctgctgagaggtccgccgggtcctccaggcccaccgggatcacctgggatcccagggaaaccaggaactgatgttttcatgggacccccggggtctcctggggaggatggagctcctggtgagccaggaccccagggccccgagggacagcctggacttgatggagcctctggccagcaaggaatgaaaggagagaagggagcaagagggcctaatggttcggctggcgagaagggtgaccctggaaaccgaggcttaccaggtcccccagggaagaatggagaagttggcccacctggggtcatgggaccaccagggcctcctggaccccctgggcctccaggcccgggatgtaccacagaacttggatttgagattgaaggctctggggacgtccggctgctgagtaaacccacaatctcaggacccacctctccaagtggtcccaaaggagaaaaaggagagcaaggagccaagggtgaacgaggagcggacggaaccagcactatggggccgcctgggcccaggggccggcctgggcatgtcgaggtcctgtccagttctttgatcaacatcaccaatggatccatgaatttctcagacattcctgagctcatgggacctccggggccagatggtgtacccgggctgccaggatttccaggccccagaggaccaaaaggtgacaccggtgtgcctggattcccagggctaaaaggagaacagggtgagaagggagagcctggagccatcttgactggggacgtccctctggaaatgatgaaggggagaaagggtgaacctggaatccatggtgcaccgggacccatgggacccaaaggaccaccaggacacaaaggagagtttggcctcccaggacgacctggtcgcccaggactgaatggcctcaagggtgccaaaggagatcgaggggtcacgctgcctggtccacctggcctacctggacccccagggcccccagggccccctggagctgtggttaacatcaaaggcgctgtttttccaatacctgcccggccacactgcaaaacaccagttggtaccgctcaccctggcgacccagagcttgtcactttccacggtgttaaaggagaaaaggggtcctggggtcttcctggctcaaaaggagaaaagggggaccaaggagctcaaggaccaccaggccctccagtcgatccagcttacctgagacattttctcaacagcttgaagggggagaatgaagatgcttcattcagaggagagtccagcaacaacctctttgtatcagggcctccaggcctaccaggatacccaggcctggttggacagaaaggagaggctgttgtggggcctcagggacccccaggaattccaggcctgcctgggccacctggctttgggagacctggtgttcctggaccaccaggaccccctgggccaccaggacctcctgccattctgggtgcagctgtggctcttcctggcccacctgggcctccaggacagccaggactccccggatccagaaacttggtcacaggcctcagcgacatgggtgacatgctacagaaagctcacttggtcatagaagggacattcatctacttgagagacagtggggagtttttcattcgtgtccgagatggttggaaaaagttacagttgggagaactgatccccattcctgctgatagccccccaccaccagcactttccagcaatccgtatcagccacaacctccactgaaccccattttaagtgccaactatgagaggcctgttctgcacctggttgctctgaacacaccggtggctggggacatccgagctgatttccagtgcttccagcaggccagggctgcaggcctcctgtccactttccgagcctttctgtcttcacacctgcaggatctctccacagtcgtgcggaaggcagagaggttcggccttccaattgtgaatctcaagggccaagtgctttttaacaattgggactcgatattttctggtgatggaggtcaattcaatacacacattccaatctactcctttgacggtcgggatgtgatgactgatccttcctggccccagaaggtggtctggcacggctccaacccccatggtgtccgtcttgtggacaagtactgtgaagcctggcgaaccacggacatggcagtaaccggatttgcctccccactgagcacagggaagattctggaccagaaagcttacagctgtgctaacaggctaatcgtgctgtgcatcgaaaacagtttcatgacagacactaggaagtgataaccttcccatgattcttaagagagtgttctaagatatttcttatgtgaagagttgacactgaagtctaaaatgttgtaaatattacaagtttggtttttatatatattacacatctgtcaaaagagaaaccaaagaaaacatacctcagtatactcaaaaggaaagacagaaaggactcagatccaagtcaaatccaatccacatattggtgctagattctgcaggaagacccccccgcgccccccacccccaccccccgcagtgtgaacacattccctgacacagagtaggacagtctgaaaacaggccagcatgattccccagtgcattcttcagaaagcgatttcttccttgcaaccatggctgttgagtgtaaaatgtgctttgtgtttgcttacaacatcagcttttagacacacaggcccttcctaagtcacgagtgatccaggcgcttggtgactccacgcacgcgcacacagccagggaaagggatccgctcagacgatcccgctcatgtttcctccggctttggtgtggtccccactaaaatagtattgccatcatgctgtagagttctgcgtgtttacccagtcatagctgagcgtggcatctgttgatgtaattctgacttgctgggaagttaaaactctaggagagaaacagcacagaatccttccctccccctctctactgtcccttcccattcccccgccccggtcttatgatttccatttggcaagccttgaattacgactgcagctgaaacagattggctgagaggaattttctgaaaagaaaaaaatctctgtatcattgtgctatagactttgatatctttttccatgtaagaacataaagacatcttttccaggaaaaaaaaaaaaaaaaaaaaaaaaaaaaaaaaaaaaaaaaa

SEQ ID NO: 1700 - DNA, 2322 bp, Mus musculus
aagcaaggcactgacactgctggactaccttatcaagacaggttctgagcgggtggcccagcagtgccgtgagaacatctttgccatacagactctgaaggactttcagtacattgaccgtgatggcaaagaccagggtattaacgttcgagagaaatcaaagcaactggttgcgctcctcaaggatgaggagcggctgaaggttgagagagttcaggctctcaaaaccaaagagcgcatggctcaggtggccactggcgtgggcagcaaccaaatcacctttggccgtggctccagccagcccaacctttctaccagctactcagagcaggagtatggcaaggctgggggctcgccggcatcctaccacggctctacttccccacgagtatcctctgagttagagcaggcccggccacagacaagcggagaagaggagctgcagctacaactggcacttgccatgagcagagaggttgctgagcaggaagaacgcctcaggcggggtgatgacctcagattgcagatggctctggaagaaagccggagagacacagtaaaagttccaaaaaagaaagaggcgaaagcttgttgcaagccaggctcccactcccagcagactaccttgttggatttaatggatgccctccccagctcaggccctgttacacagaaaactgagccctggagtgcaggagcctctgctaaccagaccaacccctggggtggaacagtggctccttcgaacattactgacccgtggccatcgtttggtaccaagccagctgcctctgtggacccctggggagtacctaccacagccagcacacagtctgtccctaagaactcagacccttgggcagcctcacagcagcctgcctccaatgctggaaagacaacagatgcctggggagctgctaagcccagttctgcctcagggtcctttgagctcttcagtaatttcaacggtacagttaaagatgatttttctgaatttgacaaccttcgaacttcaaaaaaaccagctgagtcaggggcctcagtgccaccccaggacagcagaaccacgagccctgacctctttgagtctcaatccttgacttctgcgtcaagcaagcctagcagtgccaggaaaacacctgagtccttcctgggccccaatgcagccctggtgaacctggactcattggtgactaagcctgctccaccagctcagtcccttaatcccttcctggcaccaggtgctgctgctccagcccctgtcaaccccttccaggtcaaccagccccagccgctgacactgaaccagctccggggaagccctgtcctgggaagcagtgcatcctttgggtctggtccaggggtggagactgtggctcccatgacctcagtagctccacactcatcagtgggggccagtggctcctccttgacaccactgggccctacagcaatgaacatggtaggcagtgtgggcattcccccatcagcagctcagtcaacaggcacaacaaaccctttccttctctagtgaccaggtgggaacttgcccgagtgaacacccagagtgccgagccaaggatgtcaagtggggactcactctgttttgtgtagtggctgagaatacggtggtaggggtattagagcttcaggtccagcttcctggtgaaagagtggttgttacaatccagaccttcaggctgtgggtagggtggcctcactgtcctagtcgggcccctgtgtctcttcctaagtgctcagcactactgaggtctggaaaggagtgttaccagtgttgctcaagattctgggatgctgtctagcccagaacttggacagtcacattgtgtgtgccccacccccagttatcttcagggtgtggacaaggtaaagctctggccccacttgacactgactgttgggaagtggttgtgcattttttattttcctttgactcaatgtgagtccaaggtgaacactcctaccagtgtggagctttaagctgactgagcgcaaccctgccctgtggctctgtgcttgtgcacgtttgcacagtttgttgagtacagtttcatatttgagtttgcaaaattatctaatagtctttttttggctaatatttttataacgtggttcttatttaactgtctagttttgatagaattgaccaagtctggctgaattaaggtcttggcatgtattattttagtggtctaatttctcttatttatggttttaactgtaagaaaactttaaaagaagagatatttggatgacaaaaatatgccttatggaaaactaagcaaatctttataggaaaaa

SEQ ID NO: 1701 - DNA, 2495 bp, Mus musculus
ccgcccccgccccgccccccgctatgcggccctcccagacagagctgtggctgggtctgactttgactttggccctcctggctgtgaggtgggcctcagcccaggcccccatctatgtcagcagctgggcagtgcgggtgaccaaaggttaccaggaagctgagcgcctggcccgtaaatttggcttcgtcaacctgggacagatcttccctgacgaccagtatttccatctgcggcaccggggtgtggcccagcagtccctgactccacactggggccatcgtctacgactgaagaaagatcccaaggtgcgctggtttgagcagcagactttgaggcgccgggtgaaacgctccctggtggtgcccacagacccctggttttccaagcagtggtacatgaacaaggagatacaacaagatctcaacatcctaaaggcttggaaccagggactgaccggccggggagtggtgatttccatcttggacgatggcattgagaaagaccacccggacctctgggctaattatgaccctctggccagctatgacttcaacgactatgacccagacccccagcctcgctacacacccaacgatgagaaccgacatggaacgcgctgtgctggggaggtgtctgccacagctaacaacggtttctgtggtgccggtgtggccttcaatgctagaattggaggcgtgcgcatgttggatggagccatcactgacatcgtggaggctcagtccctcagcctgcagccgcaacacatacacatctatagcgccagctggggcccggaggatgatggtcgcacggtggacggacctggcctcctcacacaggaggccttcaggcgtggtgtaaccaagggccgccaagggctgggtacactgttcatctgggcctcgggaaacggtggcctccattacgacaactgcaattgtgacggctacaccaacagcatccacacactgtcagtgggcagcaccacgcggcagggtcgagtgccctggtacagcgaggcctgtgcctccacgtttaccaccaccttcagcagcggtgtggtcaccgacccacagatcgtcaccacggacctgcaccaccagtgcaccgacaagcacacgggcacctcggcatctgccccgctggctgctggcatgatcgccctggccctggaggccaacccgctcctgacctggagggacctacagcacctggtggtccgcgcgtccaggccggcgcagctgcaggcggaggactggaggatcaacggcgtggggcgccaagtgagccaccattatggctatgggctgctggacgcggggttgctggtggacctggctcgcgtgtggctgcccactaagcctcagaagaaatgtgccattcgggtggtgcacacccccacccccatcctgcctcggatgctggtgccgaagaacgtgaccgcgtgctcagatggctcgcgccgccgcctcatccgctcgctcgagcacgtgcaggtccagctttcgctctcctacagccgccgcggggacctggagatcttcctcaccagccccatgggcacgcgctccacgctcgtggccatcagaccgttggatatcagcggccaaggctacaacaactggatcttcatgtccactcactactgggatgaggacccgcagggcctgtggaccctgggcctggagaataagggctactattttaacacaggaactctgtactactacaccctgctgctgtatgggacggccgaggacatgacagcacggccccaggccccccaggtgaccagccgcgcgcgcgcatgtgtgcagagggacacagaggggctgtgccaggaaagtcacagtcccctctccatcctggcaggactctgcctcatctccagccagcagtggtggtggctctacagccacccacagcagccagtgaccgaaggacaggccagctgtcaccctcctgttacacctgctgcagcagcctgagcagcgactacactgcctgtcccctgtcccttgtgttgggagagctccagagcccctccaaggcttgccacctctggtggccccccagctaccagtcttgggccatggtgctggctctgctggccagggcctttgggaggcccctcggcttgaggaaggcccacctgccccaggctagataccccagtgcccaaaaccatgcatgcacagatccctggaggctggagagccagagatgcctggctgtcaggacagaaggccggtaccccaaggtcctgctctcaggctggaagagaagcctgccccagaaggccagggcagagcagctgcatgggtcaggtgacagcccaccgctcagcctcagctgctcccagtggaagagatgtgtccttactcattttggagcaggtacagtgggcaagaggtcagaccacagccaccaatcatctgccccttccctgtctccaagccatccatagccccatgtctaacctcatagttgcc

SEQ ID NO: 1702 - DNA, 6730 bp, Mus musculus
  misc_feature 6666, 6713: n = A,T,C or G
gcgattcagatctggtggacccgtgagccgtggagccgcggggagcttatgggcccggtcgcagcagagctggcagcggttcctggaggaaatagggccgagcaagccaggagcagaagggaaggaagcgcgggatcgctgatgtcagagcagcccggaaagtcgtgctggagaaaactgaagacacccggctttgagccgccccggaggaccctgcgggaccccacgccccttcacaaccgggtccctgcgcacaagcgactgggacgaagacgcgaggaaccattcgggggccacccaggaatacaggcaagcggccggcgcgggccgaggattttaatgatcctgggttacatgtggaactggctgccagtgtgactcccgtcaggcaggactgggcgcacgctgccctgggcaaccgccagttgagcggacgaagaggggacgcagggacagacagacactgccgagctggaaccatgtgagagctgatcttgaaaagtggactaatacatagaggagctgtcccccagcctcacccctgtagggatggagcagaggaggttctatctgcgggccatgcaggctgacaacctgtctgtggttctgctctcagtggcctggctcctgctagctcgtgggaccacaggtatgcctcagtacagcactttccactctgagaatcgtgactggactttcaaccatttgactgtacaccgaagaacaggggctgtgtatgtgggggctatcaatcgtgtctacaagttgactggcaacctcaccatccaggtggctcacaagacagggccagaagaggacaacaaggcttgctacccacccctcattgtacagccctgcagtgaagtgcttacactcaccaacaatgtcaacaaactactgatcattgactactctgagaatcgcctgctggcctgcggaagcctctaccagggtgtttgcaagctcctgcgactagatgacctcttcatcctggtggagccatcccacaagaaggaacactacttgtccagtgtcaataagacaggcaccatgtatggtgtgattgtgcgctctgagggggaagatggcaagctttttatcggcactgctgtggatggcaagcaggattacttccctactctgtccagccgcaagctgccccgtgaccctgagtcttcagcaatgctggactatgagctccacagtgattttgtctcctccctcatcaagattccctctgacaccctagccctggtctctcacttcgacatcttctacatctatggctttgccagtggggggtttgtctactttctcactgtccagccagagacccctgacggcatggccatcaattcagctggagacctcttctatacctcaagaattgtgcgtctctgcaaggatgaccccaagttccactcctatgtgtccctgccttttggctgcacacgtgctggggtggaatatcgccttctgcaggcagcttaccttgcaaagccaggggaagctctagctcaggccttcaacatcagcagcgacgaagatgtcctgtttgccatcttttccaaggggcagaagcagtaccaccacccccctgatgactctgccctctgtgccttccccatccgggccatcaacttgcaaatcaaggagcggttgcagtcctgctaccacggagagggcaacttggagctcaactggctgctgggaaaggatgtgcagtgcaccaaggcgcctgtcccaatcgatgataacttctgcggcctggacatcaaccagcctctgggaggctccactcctgtggagggactgaccctgtataccaccagcagggaccgcctgacctctgtggcctcctatgtttacaatggctacagtgtggtttttgtggggactaagagtggcaagctgaagaagattcgagctgatggtcccccccatggtggggtccagtatgagatggtctctgtgttcaaagatgggagcccaatcctccgggacatggccttctccatcaatcagctatacctatatgtcatgtctgagagacaggtcaccagggtccctgttgaatcatgtgaacagtatacaacttgtggagagtgtctaagctcaggggatcctcactgtggctggtgtgccctgcacaacatgtgctcccgaagagacaaatgccaacgggcctgggaagcaaatcgatttgctgccagtatcagccagtgcatgagccttgaggtacaccccaacagcatctctgtgtcagatcacagccggctgctcagcctggttgtgaatgatgctcccaacctctctgaaggtattgcttgtgcctttgggaatctgactgaggtggagggacaggtatctgggagtcaagtcatctgcatctcacctggacccaaggatgtccctgtcatccctctggatcaagactggtttggcctagagctgcagctgagatccaaagagacaggaaagatctttgtcagcaccgaattcaagttctataactgcagtgcccaccaactgtgcctgtcctgtgttaacagcgccttccgctgccattggtgcaagtaccgtaacctctgcacacatgaccccactacctgttccttccaggaaggcaggatcaatgtttcagaggactgtccccagctcgtgcccacggaggagattctgatcccagttggggaagtaaaaccaatcacccttaaggcccgaaacctgccccagccccagtctggccagcgaggctacgagtgtgtgctcagcattcaaggggctgtccaccgggtccctgccctgcgtttcaacagttccagtgtgcagtgccaaaacagctcgtaccagtatgatgggatggacatcagcaacctagcagtggactttgctgtagtatggaatggcaacttcattattgacaaccctcaggacctgaaagtacatctctacaagtgtgcagcccagcgggaaagctgtggtctctgcctcaaggctgaccacaagttcgagtgtggctggtgcagtggtgagcgcagatgtaccctccaccagcactgccccagcacttctagcccctggcttgactggtccagccacaatgtcaagtgttccaacccccaaatcacagagattttgacagtatcaggaccacctgaaggagggactcgtgtgaccatccatggcgtgaacctgggcttggacttctctgagattgctcaccatgtgcaggtggctggagtgccctgcacacctatcccaggggaatacatcatcgctgagcagatcgtctgtgagatgggccatgccgttataggtaccacatctgggcctgtgcgcctgtgcattggggaatgcaagccagagttcatgaccaagtcccaccagcagtatacttttgtgaatccttctgtgctgtcactcagcccgatccggggaccagagtcaggaggtaccatggtgaccatcacaggccattaccttggtgctgggagcagtgtggcagtgtacctgggcaatcagacctgtgaattctatgggaggtcaatgaatgagattgtatgtgtttcacccccatcatccaatggactaggaccagtccctgtctccgtgagtgtcgacagagcccgggtggatagcagtctgcagttcgagtatatagatgacccacgggtccaacgtattgagccagagtggagtatcactagtgggcacacacccctaaccatcacaggcttcaacttggatgtcattcaggagcccagggtccgagtcaaatttaatggcaaagaatctgtcaatgtatgcacagtggtaaacacaaccaccctcacctgtctggcaccctctctgaccagtgactaccgcccaggtctggacactgtggaacggccagatgagtttggatttctctttaacaatgttcaatccttactcatctataacgacaccaagttcatctactaccccaacccaacgtttgaactgctcagccccactggaatcttggatcagaagccaggctcacccatcatcctgaagggcaaaaatctctgtcctcctgcctctggaggggccaaactcaactacacagtaatgattggagagacaccttgtacagtcactgtgtctgagacacagctgctttgtgaacctcccaacctcacagggcagcacaaggtcatggttcacgtgggcgggatggtgttctcacctggctccgtgagcgtcatctccgacagcctgttgaccctgccagccatcatcagcatcgcagctggtggaagcctccttcttatcatcgtcatcattgtcctcatcgcttacaagcgcaagtctagggaaaatgacctcacactcaagcggctccaaatgcaaatggacaacctggagtccagggtggcactggagtgcaaggaagcttttgcggagcttcagacagacatcaatgagctaaccagtgacttggatcgatcaggaatcccttacctggactaccgtacctatgccatgagagtcctgttcccaggcattgaggaccaccctgttctgcgggaactggaggtacagggaaatggacagcagcacgtggagaaagccctgaaactcttcgcccagcttatcaacaacaaggtgttcttgctgaccttcatccgtacactggaactacagcgcagcttctccatgcgagaccgtgggaacgtggcctctctcatcatgacaggccttcagggtcgcctagaatatgccactgatgtcctcaagcagctgctctctgacctcattgacaagaacctggagaacaagaaccaccccaagctgcttctccgcaggactgagtctgtggccgagaagatgctgactaactggtttgcttttcttctacacaagttcctgaaggagtgtgctggggaaccactcttcatgctatactgtgcaatcaagcagcagatggaaaaaggccccattgacgctattactggtgaggcccgatactccctgagtgaagacaagctcatccggcagcagatcgagtataagactctgatcctgaactgtgtcaaccctgacaatgagaacagcccagagatcccagtgaaagtactaaactgtgacaccatcactcaagtcaaggagaagatcctcgatgccgtatataagaatgtcccctactcccagcggccaagggctgtggacatggatctggagtggcgccaaggccggattgccagagtggtgttgcaggacgaagacattaccaccaaaatagagggtgactggaagcggcttaacacactgatgcattaccaggtgtcagacagatccgtggtggctctggttcctaagcagacctcctcctacaacatccctgcctctgccagcatctctcggacatccattagcagatatgactcttccttcaggtacacaggcagcccagacagcctccggtcccgggtccccatgatcaccccagacttggagagcggtgtcaaggtttggcatctggtgaagaatcatgaccatggtgaccagaaggagggtgaccggggcagcaaaatggtgtctgagatctacttgacccggcttctagccaccaagggcaccctgcagaaatttgtggacgacttgtttgagaccttgttcagcactgtgcaccggggtagtgctctccccctagccatcaagtacatgtttgatttcctggatgagcaggcagacagacacagtatccacgacacagatgtgcggcacacctggaaaagcaactgccttccacttcgtttctgggtgaatgtcatcaagaaccctcaatttgtatttgacatccacaagggcagcatcacagatgcctgcctctctgtggtagcccagacctttatggactcctgttccacatcagagcaccgactaggcaaggactcaccttccaacaagctgctctatgccaaggatatccccagttataagaactgggtagaaagatactatgcagatattgccaagctcccagccattagtgaccaagatatgaatgcctacctcgcggagcagtcccgcctgcatgctacagagttcaatatgctgagcgccctcaacgagatctactcatatgtcagcaagtacagtgaggagctcatcggggcactagagcaggatgaacaggcccgacggcaacgactggcctacaaggtggagcatctcatcaacgccatgtccatagagagctgaaaggaagacatcttgttcttggaagagagactcatataagctatcacactggcttctcaaaaggaaagatgggatgagtgaagggtatcagaccccagagctggctatcctctgaaacctcactgacggaagaaggaaaggctcctctgtcaatggcagccatgtttcatcacagccggttccttccagaaggacagtgaacaccacccatcacagtgtgagctcaggacacaacgggcaaggagaaggtggccctttaagctgagaggcttgagccagatggttctgcctctgtgactgctgctttgcatgaaaattcatttgatgtatattgggaaataatgagaactttatttaattttttaagaaaaagggaaaaaaacagaaataaaacagaaacataaatcctccctgtcaaaaaagcggccgcgnattcgatatcaagcttatcgataccgtcgacctcgagggggggcccntacccaattcgccctat

SEQ ID NO: 1703 - DNA, 1061 bp, Mus musculus
  misc_feature 2, 46: n = A,T,C or G
anattatcaggaagcccagactagcaaggcccgggttggtctgctntggacaccagcactatgcttatgacactaggttactgggacatccgtgggctggctcacgccatccgcctgctcctggaatacacagacacaagctatgaggacaagaaatacaccatgggggacgcctctgactatgaccgaagccagtggctgagtgagaagttcaagctgggcctggactttcccaatctgccctacttgattgatggatcacacaagatcacccagagcaatgccatcctgcgctaccttgcccgaaagcacaacctgtgtggagagacagaggaggagacgattcgtgtggacattttggagaaccaggctatggacacccgcatacagttggccatggtttgctacagccctgactttgagaaaaagaagccagagtacttagagggtctccctgagaagatgaagctctactctgagtttctgggcaagcagccatggtttgcagggaacaagttcacctatgtggattttcttgtttatgatgtccttgatcaacaccgaatatttgagcccaagtgcctggatgccttcccaaacctgaaggacttcatgggtcgctttgagggcctgaagaagatatctgactacatgaagagcagccgcttcctctccaagccaatctttgcaaagatggccttttggaacccaaaataggattacaaagcccagacctgggggaatactcatgagtgctctgctggccctagctcttaccacgtgcagctttcttctccttcccattccctattcctccatttcctcttcccagcccttccctcagccaagcctctgggtccttgggctctccatttcttcattagtctcctcctatcccttgtctctgccctgcatccagcccttccctcagtgatggttggaggaatgtactagacccgagaatccccggcctggcctgagagattagatctgtctgtgtgctgccttggtcctcagagtaagcagctaagccccatttggttctcaataaagtgtgaatc

SEQ ID NO: 1704 - DNA, 4494 bp, Mus musculus
atgatggcaaactgggtgggagcaagacctctcctcattctttctgttttattagggtactgtgtctcaataaaagcccaggaacaagagaatgatgaatatgatgaagaaatagcctgtactcaacatggacagatgtatttaaatagagacatttggaaaccttctccatgtcagatctgtgtctgtgacaatggtgccattctttgtgacaagatagagtgcccagaggtgctcaactgtgccaatcctataacaccacctggggagtgctgtccggtgtgcccacaaactggaggtggagatactagttttggtagaggaagaaagggacaaaaaggagaaccaggattagtgcctgttgtaacaggtatacgcggtcgtccaggacctgcaggccccccaggatcacaaggaccaagaggggaccgaggccctaaaggaagacctggtcctcgtggtcctcagggaattgatggagagccaggtatgcctggtcagccaggtgctccagggcctcctgggcacccctctcacccaggacctgatggcatgagcaggcctttttcagctcagatggctgggctggatgaaaaatctggacttgggagtcaagtaggactcatgcctggctctgtgggtcctgttggcccaagaggaccagtgggtttacaaggacagcaaggtggtgcaggacccgcaggacctcctggtgagcctggcgagcctggaccaatgggtccaattggttctcgtggaccagagggcccacctgggaagcccggagaagatggtgaacctggaagaaatgggaatacaggtgaagtgggattctcaggatcaccaggtgctcgaggcttccctggtgctcctggtctccctggcttgaaaggtcacagaggacacaaaggtcttgaaggccccaaaggtgaaattggagcacctggtgctaagggtgaagctggccccactggtccaatgggtgctatgggccctctgggaccaagaggaatgccaggagagaggggaagacttgggccacagggtgctcctggaaaacggggtgcccacggtatgcctggaaaacctggaccaatgggtcctcttgggatacctggctcttccggttttccaggaaatcctggaatgaagggagaacgaggtcctcatggagcccgaggccctgaaggtcctcaggggcagagaggtgaaactgggccacctggtccagctggctctcagggtcttcctggtgcagtggggactgatggtacacctggccgcaaaggcgccacaggctctgcaggaacctctggccctcctggcttggcagggccccctgggtctcctggccctcaaggcagtactggacctcagggaatccgaggacaatcgggtgatccaggagttccaggtttcaaaggagaagctggtccaaagggagaaccagggccacatggtattcagggtcccattggtccacctggtgaagaagggaaaagaggtcctcggggtgatccaggcacagttggtcctccaggaccaatgggagaaaggggcgctcctggcaatcgtggttttccagggtctgatggtttacctggaccaaagggtgctcagggagagcgtggtcctgtaggttcttcggggcctaaaggaggccagggagatccaggacgtccaggagaacctgggcttccaggtgctcggggtctgacaggaaatcctggtgttcaaggtcctgaaggaaaacttgggcctttgggtgctcctggggaagatggtcggccaggtcctccaggctccattgggatcagaggacagcctggaagcatgggcgttccaggccccaaaggtagcagtggtgaccttggaaaaccaggagaagcaggaaatgctggtgtgcctgggcaaaggggggctcctggcaaagatggagaagttggtccttcaggccctgtgggacctccgggcctagctggggaaagaggagaggcaggacctccaggccccactggctttcagggacttcctggacctccagggccacctggagaaggtggaaaggctggtgatcaaggtgttcctggagagcctggagcagttggcccattaggacctcggggagaaagagggaatcctggagaaagaggagagccagggataactggactgcctggggagaaaggcatggctggaggacatggccctgatggtccaaagggcaacccaggtccaactgggaccattggagacacagggccaccaggtcttcagggcatgccaggagaaagaggaattgcaggaacacctgggcctaagggtgaccgaggtggcataggagagaaaggtgctgaaggaacagcaggaaatgacggggcaaggggtcttccaggtcccttgggacctccaggtcctgcaggcctactgggagccccgggtgaacctggtcctagaggcttagttggccctcctggctcccgtggcaatcctggttctcgtggtgaaaatggtccaactggagctgttggttttgctggaccccagggttccgatggacagcctggtgtcaagggtgagcctggagagccaggacagaagggagatgctgggtctcctggaccccaagggctagcaggatcacctggcccccatggaccacatggtgttcctggactgaaaggcggtagaggaacccagggtccacctggtgctacaggatttcctggttctgctggccgagttgggcctccaggccctgctggagctccaggacctgcagggcccgcaggagaacctgggaaggaaggacctcctggtcttcgtggtgaccctggctctcatgggcgagtgggagatagaggaccagctggcccacctggtagcccaggagataaaggggacccaggagaagatggacaacctggtccagatggtcctcctggtcccgctggtaccactgggcaaagaggaattgttggaatgcccggacaacgtggggtaacaggaatgcctggccttcctggcccagcgggtacaccaggaaaagtaggaccaactggtgcgacaggagataaaggtccccctggacctgtaggacctccaggttccaatggtcctgtaggagaacctgggccagaaggtccggctggtaatgatggtaccccaggacgagatggtgctgttggagaaaggggtgaccgtggagaccccgggcctgctggtctaccaggctctcagggtgcccctggaactcctggccctgttggtgcccctggagatgcaggacaaagaggagagccaggttctcgaggccctgtaggaccacctggtcgagctggaaagcgtggtttacctggaccacaaggacctcgaggtgacaagggtgacaatggagacagaggtgaccgaggtcagaaaggccacagagggttcactggcctgcagggtcttcctggacctcctggtccaaatggtgaacaaggaagtgctggcattcctggtcctttcggtccaagaggtcctccaggaccagtaggttcttcaggaaaggaaggaaaccctgggccacttggaccaattggacctcctggtgtgcggggcagtgtaggagaagcaggaccagagggccctcctggtgaacctggtcctcctggccctccaggtccccctggccatcttactgctgctcttggtgatatcatgggacactatgatgagaacatgccagatccacttccagagtttacggaagaccaggcagctccagatgacacaaacaaaacagaccctgggatccatgttaccctgaagtctctcagtagtcagattgaaaccatgcgtagccctgatggttccaagaaacacccagcccgcacttgtgatgatttaaagctttgccatcccacaaagcagagcggtgaatattggattgatcctaaccagggatcagctgaagatgcaatcaaagtttactgcaatatggaaacaggagagacatgtatttcagcaaacccagccagtgttccacgtaaaacctggtgggccagcaaatcccctgacaataagcctgtgtggtacggtcttgacatgaatagaggatctcagttcacatatggagattaccagtctcctaacacagctatcactcagatgacctttttccgtcttttatcaaaagaagcctcgcagaaccttacttacatctgtaggaacactgttggatatatggatgatcaagctaaaaacctcaagaaagctgtggtccttaaagggtcaaacgacttagaaataaaaggagaaggaaacatcagattcagatacacagttcttcaagacacctgctctaagcgaaatggaaatgtaggcaaaactatctttgaatacagaacacagaatgtggcccgcttgcccatcatagatgttggtcctgtggatattggcaatgcagaccaggaatttggccttgatattgggccagtttgtttcatgtaa

SEQ ID NO: 1705 - DNA, 3674 bp, Mus musculus
ggcctcagacctggatccccaaaggcgtgtgcctagggagactgaaactcaggagaacctggagagatgctgtcccctcctccatagaccagagggatccagagcgatggggacagggaccctctcatctctactgctgctgctactcttggtgacaattggagatgctgacatgaagggacattttgaccctgccaagtgccgctatgccctgggcatgcaggaccgcaccattcctgacagcgatatctctgtgtccagctcctggtcggactctaccgctgcccgccacagcaggctggaaagcagtgatggagatggggcttggtgccctgcagggcctgtgttccccaaagaagaggagtacttgcaggtggaccttcgtaggctacacctggtggctctggtgggcacccagggacgccatgctgggggtctgggcaaagagttctcccgaagctatcggttgcgttactcccgagatggccgccgctggatggactggaaggaccgctggggacaggaggtgatttcgggtaacgaggatcccgggggagtagtgctgaaggaccttgggccccccatggtggcccggctggtccgcttctaccccagggctgaccgggtcatgagtgtctgtcttcgggtggagctctatggctgcctctggcgggatggactcctgtcatatacagcccccgtggggcagaccatgcagttatctgaggtgatggtacatctcaatgattccacttacgatggatatactgctggagggctgcagtatggcggtctgggccagctggcagatggcgtggtgggcctggatgatttcaggcagagccaggagctgcgggtctggccaggctatgactatgtgggatggagcaatcagagcttccccacgggctacgtggagatggagtttgagtttgatcggttgaggaccttccagaccatgcaggtccactgtaacaacatgcacactctgggagcccgcctaccaggtggggtggaatgccggtttaaaaggggtcccgccatggcctgggaaggagagcctgtccgccatgctctgggaggcagccttggagaccccagagcccgggccatctcagtgcccctgggtggccacgtgggccgctttctgcagtgcagattcctctttgcaggtccttggttactcttcagtgagatctctttcatctcagatgtggtgaacgactcctctgacaccttcccaccagccccctggtggccacctggcccgcctcccaccaacttcagcagcttggagctggagccccggggtcaacagccagtggccaaggcggaggggagcccaactgccatcctcattggctgcctggtggccatcatcctgctgctgcttctcatcatcgcgctgatgctctggaggctgcactggcgccggctgctcagcaaggctgagcgccgcgtgttggaggaggagctgacggttcacctttctgtccctggggacaccatcctcatcaacaaccgcccaggaccccgagagccacccccttaccaggagccccggcctcgggggactccaccccattctgcaccctgcgtccccaacggctctgcgttgctgctctccaatccggcctaccgcctccttctggccacttacgcccgtccccctcgaggcccgggcccccccacacccgcctgggccaaacccaccaacacccaggcctgcagtggggactatatggagcccgagaagccgggtgccccgcttctacccccacctccccagaacagcgtcccccattatgccgaagctgacattgtcaccctgcagggcgtcactgggggcaacacctacgctgtgcctgcactgcccccaggggcggttggggatgggccccccagagtggatttccctcggtcacgactccgcttcaaggagaagcttggcgagggccaatttggggaggtacacctgtgtgaagtagaggacccgcaagatctggtcagtagtgacttccctatcagtgtgcacaagggacaccccttgctggtagcagtgaagatcctccggccagatgccaccaaaaatgccaggaatgatttcctgaaggaggtaaagatcatgtcacggctgaaggacccaaacatcatccggctcctgggtgtgtgtgtgcaggatgaccccctctgcatgatcacagactacatggagaacggcgatctgaaccagttcctcagtgcccgccagctggagaacaaggccactcaggggctctctggggacacagagtctgaccaggggcccacaatcagctaccctatgctgttacacgtgggggcccagatcgcctctggcatgcgttatctcgccacgctgaactttgtgcatcgggacctggccacccggaactgcttggttggggaaaatttcaccatcaaaatcgccgactttggcatgagccggaatctctacgctggggattattaccgtgtccagggccgggcggtgctgcccatcaggtggatggcttgggagtgcattctcatggggaagttcacaacagccagtgacgtttgggccttcggagtgaccctgtgggaggtgctgatgctctgcaggtcccagccctttgggcagcttacagatgagcaggttatcgagaatgccggcgagttcttcagggaccagggccggcaggtctacttgtccaggccacccgcctgcccacagaccctgtatgagctgatgctccggtgttggagccgggagcccgagcagcggccgcccttcgcccagcttcatcggttcctggcggatgatgcgctcaacacggtgtaaactcaggacccggcagccctttcccaatggaaggccatccaggggaagctggactcgaaaaccgagagacctatgcgaccgcaccccaccgtctccatacttgcccattccccaagaggtcagtgtctctgcagggttatggctgggactgggactgccaaggaatcagattacacacactccttacgtttcttccttccatctgccaagtgccaccctcccagctggccctgtggttgggatcctgcctgacttcttccagctatccccttgggaagaacgggggcaaatgctgggcgtacactggacaaggcccactggacttcactggttcctgggaggtgacggtgccccccagctttcttcttgtcacacactggacgccgccagctgagaattagaggggtgagggggacagaggacggccaacccctacagcggtcctcagccctggcttccttctgttccgccccctgacacactgacctgggcgatccctgccgtgatcctcagtcacacacccctccttctcacctgccatgctgcagctagaacttcgcaaagcctctatgtttctgtggagtaaatattaggatggggaacagagggagcaatagcttgaggctgggggtggggatttctattgtagctaccacattggtttttctataatcacgcggggtttgtacattttttggggggagagaaacacagatttttacactaatatatggacctagcttaaggcgattttaatcccctgtcctaggcaggtaataataaaagttgagttgagttgttttttgttttttgtttttccacaaaaaaaaaa

SEQ ID NO: 1706 - DNA, 905 bp, Mus musculus
gaattcaagtgtgatccccatgaagcaacgtgttatgacgatgggaagacctaccatgtaggagaacagtggcagaaagaatatctcggagccatttgttcctgcacgtgtttcggaggccagcggggctggcgctgtgacaactgccgtagacctggggctgctgaacccagtcccgatggcaccaccggccacaactacaaccagtatacacagagatacaatcagagaacaaacactaacgtaaattgccccattgagtgcttcatgccgttagatgtgcaagctgacagagacgattctcgagagtaatctttccagccccaccctacaagtgtctctctaccaaggtcaatccacaccccagtgatgttagcagaccctccatctttgagtggtcctttcacccttaagccttttgctctggagcctagttctcagcttcagcacaatttacagcttctccaagcatcgccccgtgggatgtttgagacttctctcctcaatggtgacagttggtcaccctgttctgcttcagggtttcagtactgctcagtgttgtttaagagaatcaaaagttcttatggtttggtctgggatcaatagggaaacacaggtagccaactaggaggaaatgtactgaatgctagtacccaagacctgagcaaggaaagtcacccagacacctctgctttcttttgccatctgacctgcagcactgtcaggacatggcctgtggctgtgtgtcaaacacccctcccacagaactcactttgtcccaacaattcagattgcctagaaatacctttctcttacctgtttgttatttatcaatttttcccagtatttttatacggaaaaaattgtattgaagacactttgtatgcagttgataagaggaattc

SEQ ID NO: 1707 - DNA, 1800 bp, Mus musculus
ccggagcctcccactgcccccttgctttgcgcgcgcgtgacccgcagcacagctgtctttggggacgccagcaacccagtggacgcaccggagtttgtgcctgaggctaatctgctctgagatagctgtccctttgaactgaaacaggcaccgctcctctgatcccgagcccaactcccagccaccatgctcctactcttgttggggatcctgttcctgcacatcgcggtgctagtgttgctcttcgtctccaccatcgtcagccaatggctcgtgggtaatggacacacgactgatctctggcagaactgtaccacatccgccttgggagccgtccaacactgctactcctcatcagtgagcgaatggctgcagtctgtccaggccaccatgatcctgtctgtcatcttcagcgtcctggctctgttcctgttcttctgccagctcttcactctcaccaaaggcggccggttttacatcactggattcttccaaatccttgctggtctgtgcgtgatgagtgcagcggccatctacacagtgaggcacagtgagtggcatgtcaacactgactactcctatggcttcgcctacatcctggcctgggtggcctttcccctagccctcctcagtggtatcatctatgtgatcctgcggaaacgcgaatgaggcgcccgacgacgcaccgtccgtctaggctctgagcgcgcatagggtccacagggagggaggaaggaaaccagagaacaaaaccaaccaaccaaaaaagagctagccccaaacccaaacgcaagccaaaccaaacagaacgcagttgagtggggattgctgttgattgaagatgtatataatatctatggtttataaaacctatttataacactttttacatatatgtacataggattgttttgctttttatgttgaccgtcagcctcgtgttgaatcttaaacaactttacatcctaacactataaccaagctcagtatctttgttttgtttcgtttttttttttaatctttttgttttgctcagacataaaaactccacgtggccccctttcatctgaaagcagatacctccctcccactcaacctcataggataaccaaagtgtggggacaaaccccagacagttgaagacctttacactatgggtgacccagtgcatttagcaggagtatccactgcccgaatccatgtgtgaagccctaagcactcacagacgaaaagccctgaccggaaccctctgcaaaaacagtaatagctggtggctcctgaacacttgaccctgtagacggagtactggggccacacgtttaaatgagaagtcagagacaagcaatctgtgaaatggtgctatagatttaccattccttgttattactaatcgtttaaaccactcactggaaactcaattaacagttttatgcgatacagcagaatggagacccgatacaaacggttcataactgctttcatacctagctaggctgttgttattactacaataaataaatctcaaagccttcgtcagtcccacagttttctcacggtcggagcatcaggacgagcatctagacccttgggactagcgagttccctggctttctgggtctagagtgttctgtgcctccaaggactgtctggcgatgacttgtattggccaccaactgtagatgtatatacggtgtccttctgatgctaagactccagacctttcttgtttttgcttgctttctctgattttataccaactgtgtggactaagatgcatcaaaataaacatcagagtaactc

SEQ ID NO: 1708 - DNA, 5128 bp, Mus musculus
cagacacctctgcgacgccagcttgaaaactgccagcgggctgggatttaactccactttatcaactcccacccccgacccttctcaactgcaaccccaactccgtgagaaagccctgactttgcggggtcccaggtgcaaacttgagacacttttgtccctgtcctccatcctaatctaagtttaggctctgattgagtcaagagtaggtgctaaagcagcgggcctcaggtgtctaggtctcggggtccctggggactctcaggttgaagccttgccagaatctgggcagaggctccagagcttctcccagatcccgctgctctacaccgctggaaaccacgcttcatcgcagcatggccaccagccttagtgcagacagtccacagcagctgagctcgctgtctacccagcagaccactcttctgctactcttctccgtcctggccgccgtgcacttaggccagtggctgctgcgacagtggcaacggaaaccgtggtcctcgcccccaggtccctttccttggccactgatcggaaacgcggcggctgttggccaggcgtcgcacttgtacttcgctcgccttgcaaggcgctatggcgacgttttccagatccgtctgggcagctgtcccgtggtggtgctgaatggagagagtgccatccaccaggccctggtgcagcagggcagcatcttcgcggaccggccgcccttcgcctctttccgtgtggtgtctggtggccgcagtctggcgttcggtcactactctgagcactggaagacgcagcgacgctcggcctatagcacgatgcgtgctttctccacgcgccacccgcgcagtcgcggtcttctcgagggccacgcgctggcagaggctcgagaattggtggcagtgctggtgcggcgctgtgcgggcggcgccttcctcgatccaacgcagccggtcattgtggcggtggccaacgtcatgagcgctgtgtgcttcggctgtcggtacaaccacgacgatgcggagttcctagagctgctcagccacaatgaggagttcgggcgcacagtgggtgcgggcagcctggtggatgtgctgccctggctgcagctatttcccaacccggtgcgcaccaccttccgcaagttcgagcagctcaaccgcaacttcagcaacttcgttctggacaagttcctgaggcaccgcgaaagcctggtgcccggggctgctcctcgagacatgacggacgccttcatcctctctgccgaaaagaaagcgtctggggcccctggcgacgattcctccgggctggacttggaggatgtgcctgccactattacggacatcttcggagccagccaggacaccctttccaccgcgctgctgtggctgctcatcctctttaccagatacccggatgttcaggcccgcgtgcaggctgagttggaccaggttgtggggagggaccgcctgccctgcatgagtgaccagcccaacctgccatatgtcatggcttttctttatgaatcaatgcgattctccagctttttgcctgtcaccattccacacgccaccaccgccaacacctttgttttaggttactacatccccaagaatacggtcgtttttgttaaccagtggtctgtgaatcatgacccagccaagtggcctaacccagaggactttgatccagcccgcttcctggacaaggacggcttcattaacaaggcgctagccagcagtgtgatgatattctcagtgggcaaacggaggtgcatcggtgaggaactgtctaagatgcttctgtttctcttcatctccatcctcgctcatcagtgcaatttcaaggctaaccaaaatgagtcctcaaacatgagtttcagttatggcctgaccattaagcccaagtcgtttagaatccatgtgtctctcagagagtcgatggaactcctggataatgctgttaaaaagctgcaaactgaggaaggctgcaagtgagaggccggagggagctggaatgtttaaggaatacctatctcattaactggggaggaaatagattttttcccccagcttcatttttggcctcagctctcagcagtgaatggaaaccaagtggtctgaaggtggggcatgctcaccaattcatggctcctcttggacctgtgctggagttcctggaagtattttggaattgaagagcaaaagggcccaaggaatttggagcctgttgttttttgggtttttcagctaaacacatgcacacatatcaacatgtatgcacaactatctaagaaagtatttcagtaattctgcctttttgggtagatttgtgagggaacttctatgtgcagaaattgaccccataggaaactgcagtaagcaaaggcttaggatatacccaagattcaaagacatgtgatttcagtgtaaaatgtaaagaccagaagtcctcctaccaagagacagcttgcttggaaaaatgcttcaactcctttatagccctggatgaggctttctgcctgcctgttgatgggcctcccactttagaatggaccataaagtcagttgtcccctaagaatttatggctgatttaacaactgcagtaggttttagagattagcgaatttaaaggtaaattgtttaggtggtaaaaaatgtttataagttaaagccgaacctcatttgggtgctcagatgaagtattccagttataagggagaaaaagatttgctgggctagcttacggtttcaagtttgggattgtaatgaactggtttcagtaataagtctgataaactaaaaaaggaacccagtgttcccaaatagtattcaatgcatataaaaatttacctaactgctcataaacatcatatgaatattaactattcaatcaggaaaacacttgaataatatatttcttatgtcatattgcaaaccaaaaagtataatcagttgagtgaaatttgcccaattccaggaaacgagcctgactaaatcaatccgttttgacatcagggaactgagtaacagaacagtcttttcttatttatagttcatacaagggacaaatctcaaaactaaaccagcgaaatatgttctgatctggtaattgtagttacaacatggatggttcttttggaattgaccccattaatatgttaagcttacaaattcttggtttgcttcgatttttaaattagtttaaaatccatcttgattatttcgttccagttgaagctagagaaaatgtgatcattatctcgcagaaggtgagaaacctaacctttgcctaagaacaaatgccaaatgtaaaaataaataaatgataagtaaataaaggccatgaatgttctgggtgttcattagagaccatatgataggaggctcactacaaccagtaattggtagtttctttttccgagttcttactattgttgttgtagttgttttttaagttgagtattaaagtctgtgtgtcttttgtttttgtttttaaagtcagaatctgaagattgtcttgggaggttgtttaacaactgcttcttgagacagcagagatgcctaaaatcagtttcttttatttaggatggcacaccacgatgagcagccacttcctggaagctgagagaggttagaaatacatgtattccgattatgtaaacaatccgaaagccctttgagaagcgttggatgggtggaaaagtggggacagggcccgtggggggtttcccatttctgttttcatttcgattagcctgaacaaaagaagccctcagcactcagagagcttactgctggctctgtttcattaggcttcttggaattttcctatcaaaattacaaaggaaggggagtgcgatagtctctgtgtgcagaggctgcaagacagagaaagcatgaggagaagagagaagtctagatggtccccattcactccaaattagtttcctgaagtataaaatttgaggcatgaatgtttagacaaaaggagttttgagtggcaggctttaccttcaagtgtctcttaagagtggctggagccctggccctttcctcctatctcccccatctattttgtggttgcaagttgaattataaaaaattacaatgtaaaccttatttaaatttctccacaacagaaccccttgaatgtgatacgcaggttgtgtcagtattttaaaggccttaatttcaacaaaaattaactctatgcaataatttttaagtttttcagacattttaaaagcatgcgccttagtaaggctgggacggtgatttgagcttccatggcccttttactatgagaaatttacaatagtgaaagtcttcatgtatcagtctggactccttattaaaccaaccagacccggatgttttgtgaatgtaggggtcattttcatctgatgctttcagcaaaggagaaagtagagggggctactttgtttattatatttagaacctagtgaaaggaagaagggtacaagccaggaaagagtaataattgtcatatttggaagctcgaatagattacaggcttagtcagaaagcctgcttttgtttctgccacagagggacttcttttgctgctcaccatgttcctcagagtatctacttcagatcagtgcggcaaaagcatgtctcattaaatgcctcatctgtacagtatagcttggactgtgtcagaacgttgcttttccccccaaaacaaaaacagatgcctcaggtgtgtttgatggattaatcacaagaattcatgccccagaacttagccttgacctgtgaaatattagcacactcttatgcattcccaccagggctgtactacattaagcagatagatcaccatgtatgctaattagtatgcttttcgctgtgacacaattgtatggtaaaaggtgtatgttaccaggtgataataacccaggaataactccccatttagctgcttcttgtgttattgtactttgtcatatatgttcttaacatgtatatagctgatacagtgcacacagatcctccgtacacagaattaactaacatgtagcttctacctttgatataccaaaatttaaaatgttctgtcttcattatctctcatgaaacattgttacctaaacaataaaacccaatgtca

SEQ ID NO: 1709 - DNA, 4589 bp, Mus musculus
atgttcagctttgtggacctccggctcctgctcctcttaggggccactgccctcctgacgcatggccaagaagacatccctgaagtcagctgcatacacaatggcctaagggtccccaatggtgagacgtggaaacccgaggtatgcttgatctgtatctgccacaatggcacggctgtgtgcgatgacgtgcaatgcaatgaagaactggactgtcccaacccccaaagacgggagggcgggtgctgtgctttctgcccggaagaatacgtatcaccaaactcagaagatgtaggagtcgagggacccaagggaggccctggcccccaaggcccaaggggacccgttggcccccctggacgagatggcatccctggacagcctggacttcctggtcctcctggtccccctggcccccccggaccccctggccttggaggaaactttgcttcccagatgtcctatggctatgatgaaaaatcagctggagtttccgtgcctggccccatgggtccttctggtcctcgtggtctccctggcccccctggtgcacctggtccacaaggtttccaaggcccccctggtgaacctggcgagcctggcggttcaggtccaatgggtccccgaggtccccctggccctcctggcaagaatggagatgatggggaagctggcaagcccggccgtcctggtgagcgtggacctcctggacctcagggtgctcgtggattgcctggaacagctggcctccctggaatgaagggacaccgaggcttcagtggtttggatggtgccaaaggagatgctggtcctgctggtcctaagggagagcccggcagtcctggtgaaaacggagctcctggccagatgggtccccgaggtctgcccggtgagagaggtcgccctggacctcctggcactgctggtgctcgcggcaacgatggtgctgttggtgctgctggaccccctggtcccaccggccccactggccctcctggcttccctggtgcagttggtgctaagggtgaagctggtccccaaggagctagaggctctgaaggtccccagggtgtgcgtggtgagcccggaccccctggccctgctggtgctgccggccctgctggaaaccctggtgctgatggacaacctggcgctaaaggtgccaatggtgctcctggtattgctggtgctcctggcttccctggtgcccgaggcccctctggaccccagggccccagcggccctccaggtcccaagggtaacagcggtgaacctggtgctcctggcaacaaaggagacactggtgccaaaggagaacccggtgctactggagttcaaggtcccccaggccctgccggagaagaaggaaaacgaggagcccgtggtgagcctggaccttccggactgcctggacctcctggcgagcgtggtggacctggtagccgtggtttccctggtgctgatggtgttgctggccccaagggtccttccggtgaacgtggtgctcccggacctgctggtcccaaaggttctcctggtgaagctggtcgccccggtgaagctggtctccctggtgccaagggtctcactggcagtcctggcagccctggtcctgatggcaaaaccggcccccctggtcccgctggtcaagatggtcgccctggacccgcaggtcctcctggagcccgtggccaggctggtgtgatgggattccctggacctaagggtaccgctggagaacctggaaaggctggagagcgaggccttcccggaccccctggcgctgttggtcctgctggcaaagatggagaagctggagctcagggagcccctggccctgctggtcctgctggtgagagaggtgaacaaggtcccgctggctcccctggattccagggtcttcctggtcctgccggtcctcctggtgaagcaggcaagcctggtgaacagggtgttcctggagaccttggtgcccctggaccctctggcgcaagaggcgagagaggtttccctggtgaacgtggtgtacaaggtcccccaggtcctgctggtccccgaggaaacaatggtgcccccggcaacgatggtgccaagggtgatactggtgcccccggagctcccggtagccagggtgcccccggtcttcagggaatgcctggtgaacgtggtgcagctggtcttccaggtcctaagggtgacagaggtgatgctggtcccaaaggtgctgatggttctcctggtaaagatggtgcccgtggtctgactggtcccattggtcctcctggccctgctggtgcccctggtgacaagggtgaagctggtcccagtggtcctcccggtcccaccggagcccgtggtgctcccggagaccgtggtgaggctggtccccctggtcctgctggctttgccggcccccctggtgctgatggccaacctggtgcgaaaggtgaacctggtgatactggtgttaaaggtgatgctggtcctcctggccctgctggtcctgctggaccccccggccccattggtaacgttggtgctcctggacccaaaggtcctcgtggtgctgctggtccccctggtgctactggcttccctggtgctgctggccgtgtcggtccccctggtccctctggaaatgctggaccccctggccctcccggtcccgttggcaaagaagggggcaaaggtccccgtggtgagactggccctgctggacgtcctggtgaagttggtcccccaggtccccccggtcctgctggtgagaaaggatctcctggtgctgatggacctgctggctctcctggtacccctggacctcagggtattgctggacaacgtggtgtggtcggtcttcccggtcagagaggagaaagaggcttccctggtcttcctggcccctctggtgaacctggcaaacaaggtccttctggatcaagtggtgaacgcggtccccctggccccatggggccccctggattggctggtccccctggtgaatctggacgtgagggatcccctggtgctgaaggctcccctggaagggatggtgctcccggggccaagggtgaccgtggtgagactggccccgctggcccccctggtgcccctggtgctcccggtgctcccggccctgttggtcccgctggcaagaatggcgatcgtggtgagactggtcctgctggtcctgctggtcccattggccctgctggtgcccgtggccctgctggaccccaaggcccccgtggtgacaagggtgagacaggcgaacaaggtgacagaggcataaagggtcatcgtggcttctctggtctccagggtcctcctggttctcctggttctcctggtgaacaaggcccctctggagcttcaggtcctgcaggcccccggggtccccctggctctgctggttctcctggcaaagacggactcaacggtctccctggccccattggtccccctggtcctcgaggtcgcactggtgacagcggccctgctggtccccccggccctcctggaccccctggccctcctggacctcccagtggcggttatgacttcagcttcctgcctcagccacctcaagagaagtctcaagatggtgaccgctactaccgggccgatgatgctaacgtggttcgtgaccgtgaccttgcggtggacgccaccctcaagagcctgagtcagcagattgagaacatccgcagccccgaaggcagccgcaagaaccctgcccgcacatgccgcgacctcaagatgtgccactctgactggaagagcggagagtactggatcgaccctaaccaaggctgcaacctggacgccatcaaggtctactgcaacatggagacaggacagacctgtgtgttccctactcagccgtctgtgcctcagaagaactggtacatcagcccgaaccccaaggaaaagaagcacgtctggtttggagagagcatgaccgatggattcccgttcgagtacggaagcgagggctccgacccgaccgatgtcgctatccagctgaccttcctgcgcctaatgtccaccgaggcctcccagaacatcacctatcactgcaagaacagcgtagcctacatggaccagcagactggcaacctcaagaaggccctgctcctccagggatccaacgagatcgagctcagaggcgaaggcaacagtcgcttcacctacagcagggttgtggacggctgcacgagtcacaccggaacttggggcaagacagtcatcgaatacaaaaccaccaagacctcccgcctgcccatcatcgatgtggctcccttggacattggtgccccagaccaggaattcggactagacattggccctgcctgcttcgtgtaaactccctccaccccaatctggttccctcccacccagcccacttttccccaaccctggaaacagacgaacaacccaaactcaatttcccccaaaagccaaaaatatgggagataatttcacatggactttggaaaacattttttttcctttgcattcacctttcaaacttagtttttaccaaagaccaactgaacgtgaccaaaaaccaaaagtgcattcaaccttac

SEQ ID NO: 1710 - DNA, 1250 bp, Mus musculus
cttctgtccagccactcttccccagagttctcttcttcatcctcccccttgcagagtagggcagcttgcaggtcctcctgcaagtctctcccaattctctgcgcccaaaagacttgcagtgcatctccttacgcgctgcagggaccttgccagggcaggactgcccccgcccagttgcagagttggacgaagacgggatcctgctgtgtttggaaggctgagttccacatctaacagctcagagaggtcaggaaagaatccaccttgacacatggccctctggctcttcaaagcactgcctcttcatggtccttgctggtgaggtccttaagaacacagaaacccatgtcagcagataaccagcctacaggaggccaagaagagttctggatggatggcagctggaagcccatcgccatagccagctcatcttcaacattgaagctcttacctgggcattaagtaatgaaaattttgaaaccatatatgaggaatacatccatctcgtgctacttgtgtttccttctaaacagtcactttttaactgaggctggcattcatgtcttcattttgggctgtgtcagtgtaggtctccctaaaacagaggccaactggatagatgtaagatatgacctggagaaaattgaaagccttattcaatctattcatattgacaccactttatacactgacagtgactttcatcccagttgcaaagttactgcaatgaactgctttctcctggaattgcaggttattttacatgagtacagtaacatgactcttaatgaaacagtaagaaacgtgctctaccttgcaaacagcactctgtcttctaacaagaatgtagcagaatctggctgcaaggaatgtgaggagctggaggagaaaaccttcacagagtttttgcaaagctttatacgcattgtccaaatgttcatcaacacgtcctgactgcatgcgagcctcttccgtgtttctgttattaaggtacctccacctgctgctcagaggcagcacagctccatgcatttgaaatctgctgggcaaactaagcttcctaacaaggagataatgagccacttggatcacatgaaatcttggaaatgaagagaggaaaagagctcgtctcagacttatttttgcttgcttatttttaatttattgcttcatttgtacatatttgtaatataacagaagatgtggaataaagttgtatggatattttatcaattgaaatttaaaaaaaa

SEQ ID NO: 1711 - DNA, 4049 bp, Mus musculus
ggcacgagcagaggtgaggctgttgtttaaaactgtggagccaagagaggggaccccacattcccagggagctctccgagagggatctggagaaaggcaggggagcataggagctcagggtgaggcgacccctctgaggacctgcactggctcaggatgacagcatttttcctcctgtggcttgccttgcctggcttcctgtgtgcccagcaagcctgctcccgaggggcctgttatccacctgtgggggacttgttcattggaaggactcagcttcttcgagcctcatctacctgtggattgaccaaacctgagacctattgtacccaatatggacagtggcagatgaaatgctgcaagtgtgactccaggctgcctcgaaattacaacagtcaccgagtggagaatgtcgcatcgtcttcaggccccatgcgctggtggcagtcacagaatgatgtgagccctgtctctctgcagctggacctagacaagaggatgcagcttcaggacatcatgatggattttaagggtctcacaccagctggcatgttgattgagcgctcttctgactttggcaagacatggagggtgtaccagtacctggcgacagactgtgccagcacctttccccaggtccaccagggccagcccaagaactggcaggacgtccggtgccggcccttgtcccagaggcctaatgggcatctgactgggggaaaggtccaacttaaccttatggatttagcatcagctatccctgcatctcaaagtaaaaagattcaagaacttggggacatcacaaacttgagagtcaacttcaccaagctggcccctgtgccccagaggggctcctatccacccagcgcctactttgcagtgtcacagctacgtctacaggggagttgcttctgtcacggacatgccgaccgctgtgcccctaatcctggaggttctaccactgctgtgcgagtcaacaatgtctgtgtctgccagcataacacagctgcgcccaattgtgaccgctgtgcccctttctacaacaaccgtccatggagacctgcagagggccaggacacccacgagtgccaaaggtgtgactgcaatgggcactcactaacctgccacttcgacccagctgtgtttgctgccagccaggggacaaatggaggtgtgtgtgacaactgccgggaccacaccgagggcaagaactgcgagccctgtcagctacactatttctggaatagacgacccagcgctcccattcatgagacttgtattccctgtgagtgtgatccagatggagcagtccagggagctccctgtgaccgactgacgggccagtgtgtgtgcaaagagtacgtgcaaggagagcgctgcgacctttgcaagcctggcttcaccgggctcaccttcgacaacccgaagggctgccatgcctgtgactgcagtatcttaggtgcccggaaagatatgccttgtgaggaggaaaccggacgctgcttgtgtctgcccaatgtagtgggccccaaatgtgaccagtgtgccccttcccactggaagctggccagcggcctgggctgcgagccctgtgcctgtgaccctcgcaactccctaagctcccagtgcaaccagtttacaggacagtgtccttgtcgggaagggtttggcggcctcacgtgtagttctgcagccatccgccagtgtcctgaccagacctatggacacgtgcccacagggtgccgagcttgtgactgtgacttcagaggaacagagggtcctgcctgtgacaaagcctcaggccgttgcctctgccgccctggctttaccgggccccgctgtgaccaatgccaacgaggtcactgtgaccgctacccagtatgtgtggcctgccactcctgcttccaggcctatgacacagacctccaggagcaagctcgacgccttcacagtctccgtaatgccaccgaaggcctgtggacagggacaggtctggaagaccatggcctggcttctcggttgctagatgccaagagcaagattgagcagatcagacagattctggaaggcacttctgtcacagagcaggatgtgcctcaggtggccaatggcatcttgtctatcaggagaactcttcagggcctgccgctggacctgcccttagaggaggagatggaatccttctctggagacctggggaatctagacagaagcttcagtcggctcctccttatgtaccgaagcaagaaggagcaatttgagaagctaagcagtgaagacccttcaggagccttccgcatgctgaccatggcttatgagcagtcctcccgggctgcacagcaagtgtctgacagttctagcctgctgagccagttgagggacagtcgcagggaagcagagggcctggagagacaggctggaggaggaggcaccggaggagctcagctcatggccctgcgcctagaaatggcttcgctgcctgacttgacacccaccatcaacaagctttgtggcaggtctaggcagacagcctgtactccaggagattgccctggagagctgtgtcctcaggacaatggtacagcttgtggctctcactgcaggggagccctgcccagagccaaaggggccttccacatggcagggcgggtagctgagcagctacgaaacttcaacacccagctccagcagaccaggcaaatgatcagggcagccgaggaagcagcatcaagggtccaagccgatgcccagcgccttgagacccaggtgagtaccagccgcttgctgatggaggaagatgtccagcgcacacggcttctcatccaacaggtccggggctttctcacagatcctgacacagatgcagccaccatccaacaggtcagcgaggcagtgctggctctctggctgcccacagactcagccacagtgctgcgcaagatgaaagagatccaggccattgcggccaggctccctaatgtggactcagtgctatcccagaccaaacaagacatcgcacgggcccgcaggctccaggctgaggctgagcaggccagaagccgagcccacgctgtggaagggcaggtagatgatgtggtcgggaaccttcggcagggcaccgtggctctgcaggaagctcaggacacaatgcagggtactggccgctctcttcggctcatccaggaaagggttggtgaggttcagcaggtccttgtaccagctgaaaggctggtgaaaggcatgaaggaacagatgagtggattctgggcacggatgaaggagcttcgccgtcaggcccaggaggagcaggcccaggcaatgcaggcccggcagcttgcagagggtgccagccagcaggcaatgaatgcccaggagggctttaagagacttaagccaaagtatacagagttgaaggaccggctgggtcagagtcctgtgctgggcgagcaaggcaatcgaatcctgagcatcaagatggaggcagaggagctctttggggagagcatggaaatgatggacaaaatgaaagacatggagtcagaactgcttcgagggagtcaggctatcatgctgcgctctgcagacctgtcggggctggagaagcgtgtggagcagatccgcagttacatcaatgggcgagtgctctactatgccacctgcaagtgaccttaagtcccaacctcagaccctccccctgaccccaccccgccttggaagggcacactggggaggggaatgtctccaccattgatagcatagactggtcaccctggacgtgcttcaaggtactgttcccactgagcctgtgcttgcatgactacattgaggagagagatggtaccgggggtggggctgtcacaactgaaaaccctccagctggaatggacaatgtgcccccaacaccaactcctcctgccctccactgtggtagagtctgggaccaactcaaaaacggaacaaggagtgatgatgtatgaacacaaaacccaataaaaatctttgaataggagcctggaagctcaagaagaaaatgaaaaaaaaaaaaaaaaaaa

SEQ ID NO: 1712 - DNA, 2684 bp, Mus musculus
gaaaaacagagcggggctgactgtagcgtggagcgcgagccgggctggacgcgcgcaagcccttgccggggacccgcgaggcaagcagtctccctgtggagcgtcgtcctccatccctgtaagcaccgttacagagaatgaaacaagggcagaagttacagagcccgtgaggcatcttcaaatagaagactggagactagaaaaagaatattgccaggagttggcatccattggaagaccttgagatcctctcagctcagaactccaggaccgatgcatcttcccaccaccttgaagcactgagccctccagagctgcatctgggaagactcgcctgcctccagcatgagttctgaatgtgatgttggaagctctaaagctgtggtgaatggcttggcatctggcaaccatggaccagacaaagacatggaccctaccaaaatctgcactgggaaaggaacagtgactcttcgggcctcgtcttcctacaggggaaccccaagcagcagccctgtgagcccccaggaatctccgaagcatgaaagcaagtcagatgaatggaaactttcttccagtgcagataccaatggcaacgcccagccctccccacttgctgccaagggctatagaagtgtgcatcccagcctttctgctgacaagccccagggcagtcctttactaaacgaagtttcttcttcccacattgaaaccgattcccaagacttccctccaacaagcagaccttcgtctgcctacccctccaccaccatcgtcaaccctaccattgtgctcctgcagcacaatcgagagcagcaaaagcgactcagtagtctttcagatcctgcctcagagagaagagcgggtgagcaggacccagtaccaaccccagcagaactcacttcgcccggcagggcttctgagagaagggcaaaggatgctagcagacgggtggtgaggagcgcacaggacctgagcgatgtgtctacagatgaagtgggcatcccactccggaataccgagcgatcgaaagactggtacaaaactatgtttaaacagatccacaaactgaacagagatgatgattctgatgtccattcccctcgatactccttctctgatgacacaaagtctcccctttctgtgcctcgctcaaaaagtgagatgaactacatcgaaggggagaaagtggttaagaggtccgccacactccccctcccagcccgctcttcctcactcaagtccagcccggaaagaaacgactgggagcccctagataagaaagtggatacgagaaaataccgagcagagcccaaaagcatttacgaatatcagccgggcaagtcttcggtcctgaccaatgagaagatgagctcagcagtcagcccgactccagacattacgtcagagcctcctggatatatctattcttccaacttccatgcagtgaagagagaatcggacgggacccccgggggtctcgctagcttggagaatgagaggcagatctataagagtgtcttggaaggtggcgacatccctcttcagggcctcagtgggctcaagcgaccttccagctcagcttccactaaagattcagagtcaccaagacattttataccagctgattacttggagtccacagaagaatttattcggagacggcacgatgataaagagatgagacctgctcgagccaaatttgactttaaagcccagaccctgaaggagctgcctctgcagaagggagacgttgtttacatctacagacagattgaccagaactggtatgaaggtgaacaccatggccgggtgggaatcttcccacgcacctatatcgagcttcttcctccagctgagaaggctcagcccagaaagttggcacccgtacaagttttggaatatggagaagccattgcaaagtttaactttaatggagatacacaagtagaaatgtctttccgaaagggggagaggatcacgctgctccgacaggtggatgagaactggtatgaagggaggattcctgggacatctcgccaaggcattttccctatcacctatgtagatgtgcttaagaggccattggtgaaaacccctgtggattacatcgacctgccttattcttcttccccaagtcgcagtgccactgtgagcccacagcaacctcaagcccagcagcgaagagtcaccccagacaggagtcagccctcactggatttgtgtagctaccaagcgttatatagttatgtgccacagaacgatgatgagttggaactccgagatggagatattgttgatgtcatggaaaaatgtgacgatggatggtttgttggcacttcgagaaggacgaggcagtttggtacttttccaggcaactatgtaaaacctttatatctataagaagactaaaaagcacagagattattttttatcggaggatgaagcatcattcatgaactggtctctttatttaagtactgagtcagtaagaaaactaatgcagttggtaaagaattcaaagaaggaacagagaagtgtgtttgaaacccattgtgtatcagggattaactatctgctgaagacatctgtatttacatgactgcttctgggagctgctctagcccccgctgcttggggaatctgatctggagcatgtccatgagcaacattagccaaaaaaaaaa

SEQ ID NO: 1713 - DNA, 1240 bp, Mus musculus
ggccgcgcgggagtctgagaatgcaaagtgccatgttcctggctgtccagcacgactgcgtacccatggacaagagtgcaggcaacggccccaaggtcgaggagaagcgggagaaaatgaagcggacactcttaaaccattggaagacccgtttgagctacttcttgcagaattcctctgctcctgggaagcccaaaactggcaagaaaagcaaacagcaaacttttatcaagccttctcctgaggaagcgcacgtctgggcagaagcatttgatgaactgctggccagtaaatatgggctggctgcattcagggcgtttttaaagtccgagttctgtgaagaaaacattgaattctggttggcttgtgaagacttcaaaaaaaccaaatcaccccaaaaactgtcctcaaaagcaaggaaaatctataccgacttcatagagaaggaagctcccaaagagataaacatagacttccaaacgaaatctctgattgcccaaaatatccaagaggctacaagtggctgcttcaccacagctcagaagagggtgtacagtttgatggagaacaattcttatcctcggttcttggagtccgaattctaccaggacttatgtaaaaagccacagatcaccacggagccccatgctacatgagaccaggagtccccccacacacaaaggacattccattctgtctcccaagagcaaaggctgtgacctgccagaaaaaaaaaaaaaactgaccttgaattcagcctgagtgttaggaaaacatcgctcagaactattgattcaatgttgggtagtgaatcaggaagtcagcaacctaggagaggctctgtgtgagaacggcttccctcactgtgtgaagaacagagggagggaacaggcctctgaatgtgttcttcctccttgtcgggaaagcagagtttgagatgaaagatccgatgcaatgttgttggagcatttaaaatcaagaggtctgggattatgtggccttagctagttggctgtacaccttccctaaactagtccatgttacacatagtggtgttagttctagttttaatattttagtactaagtaacattacaatgtttactgtgtgcaagggtgttgacgttcttaggactacagatcattagtactagtgtgtcacgtatcactgaaactgagaagtatgtttgagttgttaaatggtgtgtgtgatggaccgaatgctgtgccgtgctgtagaa

SEQ ID NO: 1714 - DNA, 1945 bp, Mus musculus
cgtcgcctggaccgttatctgcccgcgcccgcccgcagccaccatgccgcgctccttcctggtcaagaaacatttcaacgcctccaagaagcccaactacagcgaactggacacacacacagttattatttccccatatctctatgaaagttaccctatacctgtcataccaaaaccagagatcctcacctcgggagcatacagccctattactgtatggacatcgtcggcagctccactccactctcctttacccagtggcctttctcctcttactggatactcctcatccttggggcgtgtaagtcccccgccttcctctgacacttcatccaaggatcacagtggttcagaaagtcccattagtgacgaagaggagagactgcagcccaagctttcagacccccatgccatcgaagctgagaagtttcagtgcaatttatgcaataagacctattctacgttctctgggctggccaaacacaagcagctgcactgtgatgcccagtctaggaaatcgttcagctgcaagtactgtgacaaggaatatgtgagcctgggtgccctgaagatgcacattcgaacccacacattgccttgtgtctgcaagatctgtggcaaggctttctccagaccctggctgcttcaaggacacattagaactcacactggggaaaagcctttctcttgccctcactgcaatagggcttttgcagacagatcaaacctgagggcacatctgcagacccactctgatgtaaagaaataccagtgcaaaaactgctccaaaaccttctccagaatgtcgcttctgcataaacatgaggagtctggctgctgtgtggcacactgagtggcgcaaccagtgtttactcaaacagaatgcatttcttcactccaatgacaaatgacaaatgaaagtccaaagacattttctcatgtgcttaccaaccaaatagtatgtataaaaccacaaaagagtcacacacacacacacacacacacacacacacacacacacagagagagagagagagagagagagagagacagacagacagacagacagatacacacacactacagaacagaatctatgtacttaaagttaattcgctctatgtgaagtttaaaattatatttactgacagctagattgagaggataaaagataaggaatctttctctttaaagatgaagtgaaaagcacattgcatcttttcttactaagaaagaatacagagatttacactgctgccaaaccatttcaaccaaaggaacagtatttcttcttaatagaattgtaatagtgtttccaagaggaagagagtctgccagacactatctcaggtgccttataaagtactccaagtttacttccttaaatgtatgatgcctggttgtcatcagtgaatgacagccttttctggattacctacaatgttttaaaactatattgttaagagaaaaaaaaccaaaaacaagaaaaagaacagaacacaagagaatgtattaaagtattcttgttttatttttgccatgtgtgccttggaagaggagggaaagacaaacttcaaacattcctggtgcgtgtcccatgtctttctttttaaaaaagaatcttaatgttttataatacaaagtaatgaaaatgtgcaaaagaatttcttagacattcagtaatgtacttagacttttgaaaattcatgtgatggatgcagtaatacaatgcccctccaagtgcctgtcttaatgacttgtgtagttggatgagctgatgtaaatttggtgtttatttttatacaactgaatgaactctgtatgaaagtgaggtacggttaatagccacgcctatattcaaccagaatacttgtgaaatcaatgtccttttttaaaaagtaactttcaaggtctcttttttacaataaacatttgggagtaaaaa

SEQ ID NO: 1715 - DNA, 2079 bp, Mus musculus
gcattcctgcagcccttcagaccgccagaactcttctgccgcctgcctgcctgcctgcctgcctgcctgtgccgagagttcccagcatcatgagggcctggatcttctttctcctttgcctggccgggagggccctggcagcccctcagcagactgaagttgctgaggagatagtggaggaggaaaccgtggtggaggagacaggggtacctgtgggtgccaacccagtccaggtggaaatgggagaatttgaggacggtgcagaggaaacggtcgaggaggtggtggctgacaacccctgccagaaccatcattgcaaacatggcaaggtgtgtgagctggacgagagcaacacccccatgtgtgtgtgccaggaccccaccagctgccctgctcccattggcgagtttgagaaggtatgcagcaatgacaacaagaccttcgactcttcctgccacttctttgccaccaagtgcaccctggagggcaccaagaagggccacaagctccacctggactacatcggaccatgcaaatacatcgccccctgcctggattccgagctgaccgaattccctctgcgcatgcgtgactggctcaaaaatgtcctggtcaccttgtacgagagagatgagggcaacaacctcctcactgagaagcagaagctgcgtgtgaagaagatccatgagaatgagaagcgcctggaggctggagaccaccccgtggagctgttggcccgagactttgagaagaactacaatatgtacatcttccctgtccactggcagtttggccagctggatcagcaccctattgatgggtacctgtcccacactgagctggccccactgcgtgctcccctcatccccatggaacattgcaccacacgtttctttgagacctgtgacctagacaacgacaagtacattgccctggaggaatgggccggctgctttggcatcaaggagcaggacatcaacaaggatctggtgatctaagttcacgcctcctgctgcagtcctgaactctctccctctgatgtgtcacccctcccattacccccttgtttaaaatgtttggatggttggctgttccgcctggggataaggtgctaacatagatttaactgaatacattaacggtgctaaaaaaaaaaaaaaaacaaagtaagaaagaaactagaacccaagtcacagcattttcccacataactctgaggccatggcccatccacagcctcctggtcccctgcactacccagtgtctcactggctgtgttggaaacggagttgcataagctcaccgtccacaagcacgagatatctctagctttcatttcaattttgcatttgactcttaacactcacccagactctgtgcttatttcattttgggggatgtgggctttttcccctggtggtttggagttaggcagagggaagttacagacacaggtacaaaatttgggtaaagatactgtgagacctgaggacccaccagtcagaacccacatggcaagtcttagtagcctaggtcaaggaaagacagaataatccagagctgtggcacacatgacagactcccagcagcccgggaccttgctgtcttctcgactcttcgggcgtttctttccatgtttggctgttggttttagttttggtgagccatgggtgggccagaacatcactcaactgcaattgggctttcaggttcttgccgggagctctaggcactgggaggctgtttcaggaaagtgagactcaagaggaagacagaaaaggttgtaacgtagaggaagtgagactggtgaattggtttgatttttttcacatctagatggctgtcataaagtttctagcatgttccccctcacctctccccaccccctgccacttgaaaccttctactaatcaagagaaacttccaagccaacggaatggtcagatctcacaggctgagaaattgttcccctccaagcatttcatgaaaaagctgcttctcattaaccatgcaaactctcacagcgatgtgaagagcttgacaagtctttcaaaataaaaagtaacaacttagaaacgg

SEQ ID NO: 1716 - DNA, 5110 bp, Mus musculus
ctcagggttttccgcaatcaggccagcccttctactgctgtccgttttttgggtccagcaaaataacagaagacagcgaggtggacttcctggagggggtgatagctcacatcagaagccatctgtagcccggacaccatggggcttccaggagtgataccagctttagtcctcagaggccagttgttgctgtccgtgttatggctcctgggaccgcagacctcccggggcctagtcatcacgccccctgggccagagtttgttctcaacatctccagcacctttgttctgacctgctcgggctcagctccggtgatgtgggaacagatgtcccaggtgccctggcaagaagcggccatgaatcaggacggcaccttctccagtgtgctgacactgaccaatgtcactgggggagacactggggaatacttttgtgtctacaacaactcactagggccggagctcagtgagaggaagcgtatctatatctttgtgccagatcccaccatgggcttcctccctatggactccgaggacctgttcatttttgtcacggatgtcactgagacgacaattccgtgccgagtgacagacccccagctggaggtgacgctacatgagaagaaagtggatatccccctacacgtaccctacgaccaccagcgaggtttcactggtacttttgaggacaagacttacatttgcaaaaccaccattggggacagggaagtggactccgatacttactacgtctacagcctccaggtgtcatccatcaacgtctctgtgaatgccgtgcagactgtggtccgccagggcgagagcatcaccatccggtgcattgtgatgggcaatgatgtggtgaacttccaatggacgtacccccgcatgaagagtgggcggctggtggagccagtgacagactacctctttggagtgccctcccgcattggctccatcctgcatatccccacggctgagctgagtgattcgggcacctatacttgcaacgtgtcagtgagtgtgaacgaccatggcgatgagaaagccatcaacatctctgtgatcgagaatggctacgtgcggctgctggagacactgggagatgtagaaattgctgagctgcaccggagtcggacgctgcgggtggtgttcgaggcttatccgatgccttctgtcctgtggctcaaggacaaccgtaccttgggtgactccggcgctggcgagttagttttgtctactcgcaacatgtctgagacccggtacgtgtcagaactgatcctggtacgtgtgaaggtgtcagaagcgggctactatactatgcgagccttccacgaggacgatgaggtccagctctccttcaagctgcaggtcaatgtccccgtccgtgtgctggagctgagtgagagtcaccctgccaatggggagcagacaatccgctgtcgtggccggggcatgcctcagccaaatgtcacctggtctacctgcagagacctcaaaaggtgtccacgaaaactgtcacccacacccttggggaatagttccaaggaggagagccagctagaaacgaatgtgactttctgggaggaagatcaggaatacgaggtggtgagcacactgcgcctgcgccacgtggatcagccactgtccgtacgctgcatgctgcagaactccatgggtggagattcgcaggaggtcaccgtggtcccacattccttgcccttcaaagtggtggtgatctcagccatcctggccttagtggtccttaccgtcatctctctcatcatcctcatcatgctgtggcagaagaagccacgctatgagatccgatggaaggtcattgagtctgtgagctctgacggtcatgagtacatctacgtggaccctgtgcagttgccttacgactccacctgggagctgccacgggaccagcttgttctgggacgcactcttggctctggggctttcggacaggtggtggaggccacagctcacggtctgagccattcgcaggccaccatgaaagtggctgtcaagatgctgaaatcgacagccagaagtagcgagaagcaagccttaatgtccgagctgaagattatgagtcatcttggaccccacctgaacgtggtcaacctgctgggggcctgcaccaaaggagggcccatctacatcatcacggaatactgccgatacggtgatctggtggactacctgcaccggaacaaacacaccttcttgcagcgacactccaacaagcattgtccgcccagtgctgagctctacagcaacgccctgccagtggggttctccctacccagccacttgaacctgactggggagagtgacggtggctacatggatatgagcaaggatgaatctatagattacgtgcccatgttggacatgaaaggagacatcaaatacgcagacattgagtcccccagctacatggccccttatgataactatgtcccatctgcccctgaaaggacctatcgcgccaccttaatcaacgactcaccagtgctcagctacacagacctcgtgggcttcagctaccaagtggccaacggcatggacttcttagcctctaagaactgtgttcaccgagacttggcggccaggaatgtgctcatctgcgagggcaagctggtcaagatctgtgacttcggcctggctcgagacatcatgagggactcaaactacatctccaaaggcagcacctacctgcctctgaagtggatggccccagagagcatcttcaacagcctctacaccactttgagtgatgtctggtcttttgggatcctactctgggagatcttcacactgggtggcaccccttacccagagctgcccatgaacgaccagttctacaatgccatcaagaggggctaccgcatggcccagcctgctcatgcctccgacgagatctatgagatcatgcagaaatgctgggaagaaaagtttgagactcgaccccccttctcccagctggtgctgctcctggagaggcttctgggtgaaggctataaaaagaagtaccagcaggtagatgaggagttcctgaggagtgaccatcctgccatcctgaggtcccaagcccgctttccggggatccacagcctccgatcccctctggacaccagctctgttctctacactgccgtgcagcccaatgagagtgacaatgactacatcatccccttacctgaccccaagcctgacgttgctgatgaaggtctcccagaggggtcccccagccttgccagttccaccttgaatgaagtcaacacttcctccaccatctcctgcgacagtcccctggagctccaagaagagccacagcaagcagagcctgaggcacaactggagcagccacaggattcaggctgcccaggacctctggctgaagcagaggacagcttcctgtaggaactgacatcactccattttgcccgaatctcccttctgcctcccagaacccaaccctcttggcctggcctggcctggcctggcctcccagcagctacactgccacaagctgtcccctcgaggaaagcccttggtttgcagcactcaaggtccagggacccagcttagcttaggaggcaagagaactctgcctcgggaaggtcatgggactctgaaccagggttcctccaggggactcagtttccccaaatgtaagaggaagagttgtacttggctacaggacaggtctggagcccggattcctgcagaaatccacgactgtacggtggtgtgttcatatcctcctgtgtagcagctgcccctcagctggattgctctactttgatcttcctaagaatcaggcaaggacctggtgtctggctcctggccaaactgtaaccagccttggacaaggtcttttcattcagagcccacctcccctggtcttagctttcccaggcccgagctggtctggggccagccatgcttaatgaatgctgttagtggtgaaggtaggccgagtacagaatgctctggcctgcagccctgcctgggcactcagggcacacctggccacaggaagcacccactcctttcagccccaccagtcctagaatagtccccaggtcactctcagctgacccacccaccagagtctgcagggccattgtccacgcctgtgataggtaagcatctgcctgaagtgtgtacctaccactaggagccctggctctgcgctggacctgctatgagaccttgggggctttccttgttctctctggggaccagttttctttcccctttgaaaagcaagttggacacatagactctgagtaccctgtcaatagtacaattcttgtatgttctgggagtttgctcttgtcccgaggaagcagggtcaagtccttaaactgatctttctaggggtcagctgagctcttggaagatccctgatacacttcacactctgggggttcaggaaccgagcctcttcttcaagtctccaagtgcaactgcccagaccttgacttggagtgacagtgagtgtcctaggaaacccccttacagctgtcctgaggacacagaagagaccacgagacccttttttcatatcatgaagccagcaagagtggcagagaaggcaagccaggttacctcgggccactgtcaccagcagcgtgtggacagacatgatggacagtgaggacagacgtcccatgcaggacaagagacttgagatgggcaatgagaggaagatgctgacgggattaccacctcaactgccagctgcccccgtccccagggagcaccccacagaaacagttctaaccctgaaccaatgaacattgcaagtgcctggggactagggagtggggggaagtcagcctttctggggaccctccctgctagctggttggctagctggcatctccccgcttggagcagcagaggctggggagtactgctcacaatggtaccaaagatagaatcacctaggtttacaagtacttgtaggactcgagataacccacatttagacaccggaagtgctattttatatgctgttaagttttcctatctgtactttttttttaaatgggaaagattttaatattaaacttggtgcttctcactg

SEQ ID NO: 1717 - DNA, 4072 bp, Mus musculus
gaggatgggcagggtcccgctggcctggtggttggcgctgtgctgctgggggtgtgcagcccataaggacacacagaccgaggctggcagcccgtttgtggggaacccagggaatatcacaggtgccagaggactcacggggacacttcggtgtgagctccaggttcagggggaaccccctgaggtggtgtggcttcgagatggacagatcctagaactggctgataacacccagacccaggtgcctctgggcgaagactggcaagatgaatggaaagttgtcagtcagctcagaatctcagccctgcaactttcagatgcaggggagtaccagtgtatggtgcatctagaaggacggacctttgtgtctcagccgggctttgtagggctggaaggtctcccgtacttcctggaggagcctgaggacaaagctgtgcctgccaacacccctttcaacctaagctgccaggcccagggacccccggaacccgtgaccctactctggcttcaagatgctgtccccctggccccagtcacaggacacagctcccagcacagtctgcaaactccaggcctgaacaagacatcttctttctcatgtgaagcccacaatgccaagggagtcaccacctcccgcacagccaccatcacagtgctcccccagaggcctcaccatctccacgtggtttccagacaacctacggagctagaggtagcttggacccctggcctgagtggcatctacccgctcacccactgcaacctgcaggccgtgctgtcagacgatggggtgggtatctggctgggaaagtcagatcctcctgaagaccccctcaccttgcaagtatcagtgcccccccaccagcttcggctggaaaagctccttcctcacaccccgtatcacatccggatatcctgcagcagcagccagggcccctcaccttggacccactggcttcctgtggagaccacagagggagtgcccttgggtccccctgagaacgttagcgccatgcggaatgggagccaggtcctcgtgcgttggcaggagccaagggtgcccctgcaaggcaccctgttagggtaccggctggcatatcgaggccaggacacccccgaggtacttatggatatagggctaactcgagaggtgaccttggaactgcggggggacaggcctgtggctaacctgactgtgtctgtgacagcctatacctcggctggggatgggccctggagccttcctgtgcccctagagccctggcgcccagggcaaggacagccactccaccatctggtgagtgaacccccacctcgcgccttctcgtggccttggtggtatgtactgctgggagcacttgtggctgccgcctgcgtcctcatcttggccctgttccttgtccatcggaggaagaaggagactcgatatggggaggtgtttgagccaaccgtggaaagaggtgaactggtagtcaggtaccgtgtccgaaagtcctacagccggcggaccactgaagccaccttgaacagtctgggcatcagtgaagagctgaaggagaaactacgagacgtcatggtagatcggcataaggtggccttggggaagaccctgggagaaggagaatttggcgctgtgatggaaggtcagctcaatcaggatgactccatcctcaaggtcgctgtgaagaccatgaaaattgccatctgcacaagatcagagctggaggatttcctgagtgaagctgtctgcatgaaggaatttgaccaccccaacgtcatgaggctcattggcgtctgttttcagggctctgacagagagggtttcccagaacctgtggtcatcttgcctttcatgaaacacggagacctacacagtttcctcctgtactcccggctcggggaccagccagtgttcctgcccactcagatgctagtgaagttcatggccgacattgccagtggtatggagtacctgagtaccaagagattcatacatcgggacctggctgccaggaactgcatgctgaatgagaacatgtccgtgtgtgtggcagacttcgggctctccaagaagatctacaacggggattactaccgccaagggcgcattgccaagatgccagtcaagtggattgctattgagagtctggcagatcgggtctacaccagcaagagcgatgtgtggtccttcggtgtgacaatgtgggagatcgccacccgaggccaaactccctatccaggggtggagaacagtgagatttacgactacctgcgtcaaggaaatcggctgaaacagcctgtggactttctggacggcctgtattccctgatgtctcggtgctgggaactgaaccctcgagaccggccaagttttgcggagctccgggaagacttggagaacacactgaaggctctgccccctgctcaggagccagatgaaatcctctatgtcaacatggatgagggcggaagccaccttgaaccccgtggggctgctggaggagctgaccccccaacccaacctgatcctaaggattcctgtagctgtctcactgcagctgacgtccactcagctggacgctatgtcctttgtccttctacagccccaggacccactctgtctgctgacagaggctgcccagcacctccagggcaggaggacggagcctgagacaatcttccacctgggacatcctctcaggacccaagctaggcactgccactgggggaaagctcacccccccactccgtcactccaggccttctccccagatgcagaatggccttccctcccttctcagatgcagtccatgccttatgcaccctatccataacagtttcaagggatcgtctcacatcttccatcccagcgttctagattttaaggtttgagtttagagttcaaagttctcaaagatgatgagtctttggaccgagatgcttgtttctaggtctgcagcgctgttgctatagacaggcccactgctcgaaggctctgagattctatggctctagatttttctggctctataattcgtggcaatgctcccatggttttaggttgcacgactctgagattccaggacctaaggcttctagactttatttttctggagccaggggtcctgtcagtggaagattgtagatttttaaattctaaagattctaggcatgaaggttctaaggcatactgcttctccagtttaacagtttagggctcatgttggaatactccagatcataatgtttcaaacttttattttttttaatttctaagaccccagtgatggtcaactacagattctgaagccttatgaccatagattcttttatataaaaatcctgtatctcaaggaaatatgattctagactctgaaattccaaagctttaagagtctccagatggagtttctaagctatgatgtggtgataatctaaagtttagtccaaggttctagattcctaagcttccacgtcatctgctcccaggattccagattattaaactctaaaactctaatgttggcctgatcttcgtctcaggccctgtaggatgctgtgggtcctcagcatctaagtcacaagaggctccagttaacgaggactaatgagacaccaaagttctaaccacttctaatgctggacacctctaggttctatgctgctttttgcctttctagcacataattaaatgcccaagaatacatatgtctaaagatcttaaatctctaagcactatggagccaatgttttgagtgtctgagattctaaaggtccacagtctagagtattaggtacgactccagggtgggcgcttgtagccatcctaagtcctttccctccttaagcacctatgctcctcctctccttgtgtggggtacaccccaccttaagcctgtgcgatgcactgggaatgcctgctttcctccaagggatgggtcatctcccctcatttggggccatgttgccccttgagccagtcccctatgcctgttctgaagtgtggactctggtgcctccagagaggctcagatcacataaaacttttgtcagtcactaaaaaaaaaaaaaa

SEQ ID NO: 1718 - DNA, 14849 bp, Mus musculus
cgctgctccccgccagtgcactgaggaggcggaaacgggggagcccctagtgctccatcaggcccctaccaaggcacccccatcgggtccacgccccccaccccccaccccgcctcctcccaattgtgcatttttgcagccggagtcggctccgagatggggctgtgagcttcgccctgggagggggagaggagcgaggagtaaagcaggggtgaagggttcgaatttgggggcagggggcgcacccgcgtcagcaggcccttcccagggggctcggaactgtaccatttcacctatgcccctggttcgctttgcttaaggaaggataagatagaagagtcggggagaggaagataaagggggaccccccaattggggggggcgaggacaagaagtaacaggaccagagggtgggggctgctgtttgcatcggcccacaccatgctgaccccgccgttgctgctgctcgtgccgctgctttcagctctggtctccggggccactatggatgcccctaaaacttgcagccctaagcagtttgcctgcagagaccaaatcacctgtatctcaaagggctggcggtgtgacggtgaaagagattgccccgacggctctgatgaagcccctgagatctgtccacagagtaaagcccagagatgcccgccaaatgagcacagttgtctggggactgagctatgtgtccccatgtctcgtctctgcaacgggatccaggactgcatggatggctcagacgagggtgctcactgccgagagctccgagccaactgttctcgaatgggttgtcaacaccattgtgtacctacacccagtgggcccacgtgctactgtaacagcagcttccagctcgaggcagatggcaagacgtgcaaagattttgacgagtgttccgtgtatggcacctgcagccagctttgcaccaacacagatggctccttcacatgtggctgtgttgaaggctacctgctgcaaccggacaaccgctcctgcaaggccaagaatgagccagtagatcggccgccagtgctactgattgccaactctcagaacatcctagctacgtacctgagtggggcccaagtgtctaccatcacacccaccagcacccgacaaaccacggccatggacttcagttatgccaatgagaccgtatgctgggtgcacgttggggacagtgctgcccagacacagctcaagtgtgcccggatgcctggcctgaagggctttgtggatgagcataccatcaacatctccctcagcctgcaccacgtggagcagatggcaatcgactggctgacgggaaacttctactttgtcgacgacattgacgacaggatctttgtctgtaaccgaaacggggacacctgtgtcactctgctggacctggaactctacaaccccaaaggcatcgccttggaccccgccatggggaaggtgttcttcactgactacgggcagatcccaaaggtggagcgctgtgacatggatggacagaaccgcaccaagctggtggatagcaagatcgtgtttccacacggcatcaccctggacctggtcagccgcctcgtctactgggcggacgcctacctagactacatcgaggtggtagactacgaagggaagggtcggcagaccatcatccaaggcatcctgatcgagcacctgtacggcctgaccgtgtttgagaactatctctacgccaccaactcggacaatgccaacacgcagcagaagacgagcgtgatccgagtgaaccggttcaacagtactgagtaccaggtcgtcacccgtgtggacaagggtggtgccctgcatatctaccaccagcgacgccagccccgagtgcggagtcacgcctgtgagaatgaccagtacgggaagccaggtggctgctccgacatctgcctcctggccaacagtcacaaggcaaggacctgcaggtgcaggtctggcttcagcctgggaagtgatgggaagtcttgtaagaaacctgaacatgagctgttcctcgtgtatggcaagggccgaccaggcatcattagaggcatggacatgggggccaaggtcccagatgagcacatgatccccatcgagaaccttatgaatccacgcgctctggacttccacgccgagaccggcttcatctactttgctgacaccaccagctacctcattggccgccagaaaattgatggcacggagagagagactatcctgaaggatggcatccacaatgtggagggcgtagccgtggactggatgggagacaatctttactggactgatgatggccccaagaagaccattagtgtggccaggctggagaaagccgctcagacccggaagactctaattgagggcaagatgacacaccccagggccattgtagtggatccactcaatgggtggatgtactggacagactgggaggaggaccccaaggacagtcggcgagggcggctcgagagggcttggatggacggctcacaccgagatatctttgtcacctccaagacagtgctttggcccaatgggctaagcctggatatcccagccggacgcctctactgggtggatgccttctatgaccgaattgagaccatactgctcaatggcacagaccggaagattgtatatgagggtcctgaactgaatcatgccttcggcctgtgtcaccatggcaactacctcttttggaccgagtaccggagcggcagcgtctaccgcttggaacggggcgtggcaggcgcaccgcccactgtgacccttctgcgcagcgagagaccgcctatctttgagatccgaatgtacgacgcgcacgagcagcaagtgggtaccaacaaatgccgggtaaataacggaggctgcagcagcctgtgcctcgccacccccgggagccgccagtgtgcctgtgccgaggaccaggtgttggacacagatggtgtcacctgcttggcgaacccatcctacgtgcccccaccccagtgccagccgggccagtttgcctgtgccaacaaccgctgcatccaggagcgctggaagtgtgacggagacaacgactgtctggacaacagcgatgaggccccagcactgtgccatcaacacacctgtccctcggaccgattcaagtgtgagaacaaccggtgtatccccaaccgctggctctgtgatggggataatgattgtggcaacagcgaggacgaatccaatgccacgtgctcagcccgcacctgtccacccaaccagttctcctgtgccagtggccgatgcattcctatctcatggacctgtgatctggatgatgactgtggggaccggtccgatgagtcagcctcatgcgcctaccccacctgcttccccctgactcaatttacctgcaacaatggcagatgtattaacatcaactggcggtgtgacaacgacaatgactgtggggacaacagcgacgaagccggctgcagtcactcctgctccagtacccagttcaagtgcaacagtggcagatgcatccccgagcactggacgtgtgatggggacaatgattgtggggactacagcgacgagacacacgccaactgtaccaaccaggctacaagacctcctggtggctgccactcggatgagttccagtgcccgctagatggcctgtgcatccccctgaggtggcgctgcgacggggacaccgactgcatggattccagcgatgagaagagctgtgagggcgtgacccatgtttgtgacccgaatgtcaagtttggctgcaaggactccgcccggtgcatcagcaaggcgtgggtgtgtgatggcgacagcgactgtgaagataactccgacgaggagaactgtgaggccctggcctgcaggccaccctcccatccctgcgccaacaacacctctgtctgcctgcctcctgacaagctgtgcgacggcaaggatgactgtggagacggctcggatgagggcgagctctgtgaccagtgttctctgaataatggtggctgtagtcacaactgctcagtggcccctggtgaaggcatcgtgtgctcttgccctctgggcatggagctgggctctgacaaccacacctgccagatccagagctactgtgccaagcacctcaaatgcagccagaagtgtgaccagaacaagttcagtgtgaagtgctcctgctacgagggctgggtcttggagcctgacggggaaacgtgccgcagtctggatcccttcaaactgttcatcatcttctccaaccgccacgagatcaggcgcattgaccttcacaagggggactacagcgtcctagtgcctggcctgcgcaacactattgccctggacttccacctcagccagagtgccctctactggaccgacgcggtagaggacaagatctaccgtgggaaactcctggacaacggagccctgaccagctttgaggtggtgattcagtatggcttggccacaccagagggcctggctgtagattggattgcaggcaacatctactgggtggagagcaacctggaccagatcgaagtggccaagctggacggaaccctccgaaccactctgctggcgggtgacattgagcacccgagggccatcgctctggaccctcgggatgggattctgttttggacagactgggatgccagcctgccacgaatcgaggctgcatccatgagtggagctggccgccgaaccatccaccgggagacaggctctgggggctgcgccaatgggctcaccgtggattacctggagaagcgcatcctctggattgatgctaggtcagatgccatctattcagcccggtatgacggctccggccacatggaggtgcttcggggacacgagttcctgtcacacccatttgccgtgacactgtacggtggggaggtgtactggaccgactggcgaacaaatacactggctaaggccaacaagtggactggccacaacgtcaccgtggtacagaggaccaacacccagcccttcgacctgcaggtgtatcacccttcccggcagcccatggctccaaacccatgtgaggccaatggcggccggggcccctgttcccatctgtgcctcatcaactacaaccggaccgtctcctgggcctgtccccacctcatgaagctgcacaaggacaacaccacctgctatgagtttaagaagttcctgctgtacgcacgtcagatggagatccggggcgtggacctggatgccccgtactacaattatatcatctccttcacggtgcctgatatcgacaatgtcacggtgctggactatgatgcccgagagcagcgagtttactggtctgatgtgcggactcaagccatcaaaagggcatttatcaacggcactggcgtggagaccgttgtctctgcagacttgcccaacgcccacgggctggctgtggactgggtctcccgaaatctgttttggacaagttacgacaccaacaagaagcagattaacgtggcccggctggacggctccttcaagaatgcggtggtgcagggcctggagcagccccacggcctggtcgtccacccgcttcgtggcaagctctactggactgatggggacaacatcagcatggccaacatggatgggagcaaccacactctgctcttcagtggccagaagggccctgtggggttggccattgacttccctgagagcaaactctactggatcagctctgggaaccacacaatcaaccgttgcaatctggatgggagcgagctggaggtcatcgacaccatgcggagccagctgggcaaggccactgccctggccatcatgggggacaagctgtggtgggcagatcaggtgtcagagaagatgggcacgtgcaacaaagccgatggctctgggtccgtggtgctgcggaacagtaccacgttggttatgcacatgaaggtgtatgacgagagcatccagctagagcatgagggcaccaacccctgcagtgtcaacaacggagactgttcccagctctgcctgccaacatcagagacgactcgctcctgtatgtgtacagccggttacagcctccggagcggacagcaggcctgtgagggtgtgggctcttttctcctgtactctgtacatgagggaattcgggggattccactagatcccaatgacaagtcggatgccctggtcccagtgtccggaacttcactggctgtcggaatcgacttccatgccgaaaatgacactatttattgggtggatatgggcctaagcaccatcagcagggccaagcgtgaccagacatggcgagaggatgtggtgaccaacggtattggccgtgtggagggcatcgccgtggactggatcgcaggcaacatatactggacggaccagggcttcgatgtcatcgaggttgcccggctcaatggctcttttcgttatgtggtcatttcccagggtctggacaagcctcgggccatcactgtccacccagagaaggggtacttgttctggaccgagtggggtcattacccacgtattgagcggtctcgccttgatggcacagagagagtggtgttggttaatgtcagcatcagctggcccaatggcatctcagtagactatcagggcggcaagctctactggtgtgatgctcggatggacaagatcgagcgcatcgacctggaaacgggcgagaaccgggaggtggtcctgtccagcaataacatggatatgttctccgtgtccgtgtttgaggacttcatctactggagtgacagaactcacgccaatggctccatcaagcgcggctgcaaagacaatgctacagactccgtgcctctgaggacaggcattggtgttcagcttaaagacatcaaggtcttcaacagggacaggcagaagggtaccaatgtgtgcgcggtagccaacggcgggtgccagcagctctgcttgtatcggggtggcggacagcgagcctgtgcctgtgcccacgggatgctggcagaagacggggcctcatgccgagagtacgctggctacctgctctactcagagcggaccatcctcaagagcatccacctgtcggatgagcgtaacctcaacgcaccggtgcagccctttgaagaccccgagcacatgaaaaatgtcatcgccctggcctttgactaccgagcaggcacctccccggggacccctaaccgcatcttcttcagtgacatccactttgggaacatccagcagatcaatgacgatggctcgggcaggaccaccatcgtggaaaatgtgggctctgtggaaggcctggcctatcaccgtggctgggacacactgtactggacaagctacaccacatccaccatcacccgccacaccgtggaccagactcgcccaggggccttcgagagggagacagtcatcaccatgtccggagacgaccacccgagagcctttgtgctggatgagtgccagaacctgatgttctggaccaattggaacgagctccatccaagcatcatgcgggcagccctatccggagccaacgtcctgaccctcattgagaaggacatccgcacgcccaatgggttggccatcgaccaccgggcggagaagctgtacttctcggatgccaccttggacaagatcgagcgctgcgagtacgacggctcccaccgctatgtgatcctaaagtcggagcccgtccacccctttgggttggcggtgtacggagagcacattttctggactgactgggtgcggcgggctgtgcagcgagccaacaagtatgtgggcagcgacatgaagctgcttcgggtggacattccccagcaacccatgggcatcatcgccgtggccaatgacaccaacagctgtgaactctccccctgccgtatcaacaatggaggctgccaggatctgtgtctgctcacccaccaaggccacgtcaactgttcctgtcgagggggccggatcctccaggaggacttcacctgccgggctgtgaactcctcttgtcgggcacaagatgagtttgagtgtgccaatggggaatgtatcagcttcagcctcacctgtgatggcgtctcccactgcaaggacaagtccgatgagaagccctcctactgcaactcacgccgctgcaagaagactttccgccagtgtaacaatggccgctgtgtatccaacatgctgtggtgcaatggggtggattactgtggggatggctctgatgagataccttgcaacaagactgcctgtggtgtgggtgagttccgctgccgggatgggtcctgcatcgggaactccagtcgctgcaaccagtttgtggattgtgaggatgcctcggatgagatgaattgcagtgccacagactgcagcagctatttccgcctgggcgtgaaaggtgtcctcttccagccgtgcgagcggacatccctgtgctacgcacctagctgggtgtgtgatggcgccaacgactgtggagactacagcgatgaacgtgactgtccaggtgtgaagcgccctaggtgcccgctcaattactttgcctgccccagcgggcgctgtatccccatgagctggacgtgtgacaaggaggatgactgtgagaacggcgaggatgagacccactgcaacaagttctgctcagaggcacagttcgagtgccagaaccaccggtgtatctccaagcagtggctgtgtgacggtagcgatgattgcggggatggctccgatgaggcagctcactgtgaaggcaagacatgtggcccctcctccttctcctgtcccggcacccacgtgtgtgtccctgagcgctggctctgtgatggcgacaaggactgtaccgatggcgcggatgagagtgtcactgctggctgcctgtacaacagcacctgtgatgaccgtgagttcatgtgccagaaccgcttgtgtattcccaagcatttcgtgtgcgaccatgaccgtgactgtgctgatggctctgatgaatcccctgagtgtgagtacccaacctgcgggcccaatgaattccgctgtgccaatgggcgttgtctgagctcccgtcagtgggaatgtgatggggagaatgactgtcacgaccacagcgatgaggctcccaagaacccacactgcaccagcccagagcacaaatgcaatgcctcatcacagttcctgtgcagcagcgggcgctgcgtggctgaggcgttgctctgcaacggccaggacgactgtggggacggttcagacgaacgcgggtgccatgtcaacgagtgtctcagccgcaagctcagtggctgcagtcaggactgcgaggacctcaagataggctttaagtgccgctgtcgcccgggcttccggctaaaggacgatggcaggacctgtgccgacctggatgagtgcagcaccaccttcccctgcagccagctctgcatcaacacccacggaagttacaagtgtctgtgtgtggagggctatgcaccccgtggcggtgacccccacagctgcaaagctgtgaccgatgaggagccatttctcatctttgccaaccggtactacctgcggaagctcaacctggacggctccaactacacactgcttaagcagggcctgaacaatgcggtcgccttggcatttgactaccgagagcagatgatctactggacgggcgtgaccacccagggcagcatgattcgcaggatgcacctcaacggcagcaacgtgcaggttctgcaccggacgggccttagtaacccagatgggctcgctgtggactgggtgggtggcaacctgtactggtgtgacaagggcagagataccattgaggtgtccaagcttaacggggcctatcggacagtgctggtcagctctggcctccgggagcccagagctctggtagtggatgtacagaatgggtacctgtactggacagactggggtgaccactcactgatcggccggattggcatggatggatctggccgcagcatcatcgtggacactaagatcacatggcccaatggcctgaccgtggactacgtcacggaacgcatctactgggctgacgcccgtgaggactacatcgagttcgccagcctggatggctccaaccgtcacgttgtgctgagccaagacatcccacacatctttgcgctgaccctatttgaagactacgtctactggacagactgggaaacgaagtccatcaaccgggcccacaagaccacgggtgccaacaaaacactcctcatcagcaccctgcaccggcccatggacttacatgtattccacgccctgcgccagccagatgtgcccaatcacccctgcaaagtcaacaatggtggctgcagcaacctgtgcctgctgtcccctgggggtggtcacaagtgcgcctgccccaccaacttctatctgggtggcgatggccgtacctgtgtgtccaactgcacagcaagccagtttgtgtgcaaaaatgacaagtgcatccccttctggtggaagtgtgacacggaggacgactgtggggatcactcagacgagcctccagactgtcccgagttcaagtgccgcccaggccagttccagtgctccaccggcatctgcaccaaccctgccttcatctgtgatggggacaatgactgccaagacaatagtgacgaggccaattgcgacattcacgtctgcttgcccagccaattcaagtgcaccaacaccaaccgctgcattcctggcatcttccgttgcaatgggcaggacaactgcggggacggcgaggatgagcgggattgccctgaggtgacctgcgcccccaaccagttccagtgctccatcaccaagcgctgcatccctcgcgtctgggtctgtgacagggataatcactgtgtggacggcagtgatgagcctgccaactgtacccaaatgacctgtggagtggatgagttccgctgcaaggattctggccgctgcatccccgcgcgctggaagtgtgacggagaagatgactgtggggatggttcagatgagcccaaggaagagtgtgatgagcgcacctgtgagccataccagttccgctgcaaaaacaaccgctgtgtcccaggccgttggcaatgtgactacgacaacgactgcggagataactcggacgaggagagctgcacacctcggccctgctctgagagtgagtttttctgtgccaatggccgctgcatcgctgggcgctggaagtgtgatggggaccatgactgtgccgacggctcagacgagaaagactgcaccccccgctgtgatatggaccagttccagtgcaagagtggccactgcatccccctgcgctggccgtgtgacgcggatgctgactgtatggacggcagtgacgaggaagcctgtggcactggggtgaggacctgcccattggatgagtttcaatgtaacaacaccttgtgcaagccgctggcctggaagtgtgatggagaggacgactgtggggacaactcagatgagaaccccgaggaatgcgcccggttcatctgccctcccaaccggcctttccgctgcaagaatgaccgagtctgcctgtggattgggcgccagtgtgatggcgtggacaactgtggagatgggactgacgaggaggactgtgagccccccacggcccagaacccccactgcaaagacaagaaggagttcctgtgccgaaaccagcgctgtctatcatcctccctgcgctgtaacatgttcgatgactgcggcgatggctccgatgaagaagattgcagcatcgaccccaagctgaccagctgtgccaccaatgccagcatgtgtggggacgaagctcgttgtgtgcgcactgagaaagctgcctactgtgcctgccgctcgggcttccatactgtgccgggccagcccggatgccaggacatcaacgagtgcctgcgctttggtacctgctctcagctctggaacaaacccaagggaggccacctctgcagctgtgcccgcaacttcatgaagacacacaacacctgcaaagctgaaggctccgagtaccaggtgctatacatcgcggatgacaacgagatccgcagcttgttcccgggccacccccactcagcctacgagcagacattccagggcgatgagagtgtccgcatagatgccatggatgtccatgtcaaggccggccgtgtctactggactaactggcacacgggcacaatctcctacaggagcctgccccctgccgcccctcctaccacttccaaccgccaccggaggcagatcgaccggggtgtcacccacctcaatatttcagggctgaagatgccgaggggtatcgctatcgactgggtggccgggaatgtgtactggaccgattccggccgagacgtgattgaggtggcgcaaatgaagggcgagaaccgcaagacgctcatctcgggcatgattgatgagccccatgccatcgtggtggaccctctgaggggcaccatgtactggtcagactgggggaaccaccccaagattgaaacagcagcgatggatggcacccttcgggagactctcgtgcaagacaacattcagtggcctacagggctggctgtggactatcacaatgaacggctctactgggcagatgccaagctttcggtcatcggcagcatccggctcaacggcactgaccccattgtggctgctgacagcaaacgaggcctaagtcaccccttcagcatcgatgtgtttgaagactacatctacggagtcacttacatcaataatcgtgtcttcaagatccacaagtttggacacagccccttgtacaacctaactgggggcctgagccatgcctctgatgtagtcctttaccatcaacacaagcagcctgaagtgaccaacccctgtgaccgcaagaaatgcgaatggctgtgtctgctgagccccagcgggcctgtctgcacctgtcccaatggaaagaggctggataatggcacctgtgtgcctgtgccctctccaacaccccctccagatgcccctaggcctggaacctgcactctgcagtgcttcaatggtggtagttgtttcctcaacgctcggaggcagcccaagtgccgttgccagccccgttacacaggcgataagtgtgagctggatcagtgctgggaatactgtcacaacggaggcacctgtgcggcttccccatctggcatgcccacgtgccgctgtcccactggcttcacgggccccaaatgcaccgcacaggtgtgtgcaggctactgctctaacaacagcacctgcaccgtcaaccagggcaaccagccccagtgccgatgtctacctggcttcctgggcgaccgttgccagtaccggcagtgctctggcttctgtgagaactttggcacctgtcagatggctgctgatggctcccgacaatgtcgctgcaccgtctactttgagggaccaaggtgtgaggtgaacaagtgtagtcgctgtctccaaggcgcctgtgtggtcaataagcagaccggagatgtcacatgcaactgcactgatggccgggtagcccccagttgtctcacctgcatcgatcactgtagcaatggtggctcctgcaccatgaacagcaagatgatgcctgagtgccagtgcccgccccatatgacaggaccccggtgccaggagcaggttgttagtcagcaacagcctgggcatatggcctccatcctgatccctctgctgctgcttctcctgctgcttctggtggctggcgtggtgttctggtataagcggcgagtccgaggggctaagggcttccagcaccagcggatgaccaatggggccatgaatgtggaaattggaaaccctacctacaagatgtatgaaggtggagagcccgatgatgtcgggggcctactggatgctgattttgcccttgaccctgacaagcctaccaacttcaccaacccagtgtatgccacgctctacatggggggccacggcagccgccattccctggccagcacggacgagaagcgagaactgctgggccggggacctgaagacgagataggagatcccttggcatagggccctgccccgacggatgtccccagaaagccccctgccacatgagtctttcaatgaaccccctccccagccggcccttctccggccctgccgggtgtacaaatgtaaaaatgaaggaattactttttatatgtgagcgagcaagcgagcaagcacagtattatctctttgcatttccttcctgcctgctcctcagtatcccccccatgctgccttgagggggcggggagggctttgtggctcaaaggtatgaaggagtccacatgttccctaccgagcatacccctggaagcctggcggcacggcctccccaccacgcctgtgcaagacactcaacggggctccgtgtcccagctttcctttccttggctctctggggttagttcaggggaggtggagtcctctgctgaccctgtctggaagatttggctctagctgaggaaggagtcttttagttgagggaagtcaccccaaaccccagctcccactttcaggggcacctctcagatggccatgctcagtatcccttccagacaggccctcccctctctagcgccccctctgtggctcctagggctgaacacattctttggtaactgtcccccaagcctcccatccccctgagggccaggaagagtcggggcacaccaaggaagggcaagcgggcagccccattttggggacgtgaacgttttaataatttttgctgaattcctttacaactaaataacacagatattgttataaataaaattgtaaaaaaaaaaaaa

SEQ ID NO: 1719 - DNA, 1943 bp, Mus musculus
cctggcggtcttgcggagtgctagggcagcggaggaaaagaaaagggaacggctcggaatttgctccagcggctgctgcaagacctcggcgccaacctcgcaccgggagcgcctcacagcccatcggctgtccctctatgtgctgctgagccggtcctggactcgacgagcccgccttcggtgttccgagcagaaatcgcaaagacggaaggactggaaatggcagaccatatgatggccatgaaccacgggcgcttccccgacggcaccaacgggctgcaccaccaccctgcccaccgcatgggcatggggcagttcccgagcccgcatcatcaccagcagcagcagccccagcacgccttcaacgccctcatgggcgagcacatacactacggcgcgggcaacatgaatgcaacgagcggcatcaggcacgccatggggccggggactgtgaacggggggcaccccccgagcgctctggccccggccgccaggtttaacaactcccagttcatgggtcccccggtggccagccagggaggctccctgccggccagcatgcagctgcagaagctcaacaaccagtatttcaaccatcacccctacccccacaaccactacatgcctgatttgcaccccactgcaggccaccagatgaacgggacaaaccagcacttccgagattgcaaccccaagcacagcggaggcagcagcacccctggcggtgcgggtggcagcggcacccccggcggctccggcggcacctcgggcggcgcgggtggcagcagcgcgggcggcacgtgcggtggcagcaccatgcccgcctcggtggctcacgtccccgcggcaatgctgccgcccaatgtcatagacactgatttcatcgacgaggaagtgcttatgtccttagtgatagaaatgggtttggaccgcatcaaggagctgcccgaactctggctggggcaaaatgagtttgattttatgacggacttcgtgtgcaagcagcagcccagcagagtcagctgttgactcggttaacctcgcaggcggaaacaaatcaccctccccaccccacccccacccccaacttcttcggtgtgaattaaaaaaaaaacaaaaaaacaaacattcccttagacgcagtatctcgcttttcagatcctgaaagggttgagaacctggaaacaaagtaaactataaacttgtacaaattggtttaaaaaaaaaaaaagattgctgccactttttcctattcttgtttcgttttttgtagccttgacattcacctcccttatgtagttgaaatatctagctaacttggctcttttttgttgtttgtttttactcctttatttcctcactttatttcctcactttctcccgtgctcaactgttagatattaagcttggcaaactgcttaatcttgtggattttgtagatggtttcaaatgactgcgctgctttcagattcatgagtgaaaggaaacattgcatttgttggctgcatgatctttgaagggcagatattactgcacaaactgccatctcgcttcattttttttaactatgcattcgagtacagacttaagttttcaaatatgctaaactggaagattaaacatgtgggccaaaccgttctggatcaggaaaagtcataccgttcactttcaagttggctgtctcccctcccccatatgtacagacaataatagggtgtggaatgtcgtcagtggcaaacatttcacagatttttattttgtttctgtcttcaacatttttgacactgtgctaatagttatattcagtacatgaaaagatactactgtgttgaaagctttttaggaaattttgacagtatttttgtacaaaacatttttttgagaaaatacttgttaatttattctattttaatttgccaatgtcaataaaaagttaagaaata

SEQ ID NO: 1720 - DNA, 7642 bp, Mus musculus
ggcgcgctctcgagtgccggtcggaagtcgggggtcggcgcacagtgcaggctgcgcaccgggaggtagcggaggcagcgcgatcttggctcggacgcccacccatcggctctcgctccggctctcggcctccagcccggtccacagcccggcctcggcccgcagcggaggatcggcctcgggatacgccgctaggcgagtgcagcgcggcaccccagcctttgccgagggcccgcgcgcagcgggatgacgggcggcgggcgggccgcgctggccctgcagccccgggggcggctgtggccgctgttggctgtgctggcggctgtggcgggctgtgtccgggcggccatggacgagtgcgcggatgagggcgggcggccgcagcgctgcatgccggagtttgttaatgccgccttcaatgtgaccgtggtggctaccaacacgtgtgggactccgcccgaggagtactgcgtgcagactggggtgaccggagtcactaagtcctgtcacctgtgcgacgccggccagcagcacctgcaacacggggcagccttcctgaccgactacaacaaccaggccgacaccacctggtggcaaagccagactatgctggccggggtgcagtaccccaactccatcaacctcacgctgcacctgggaaaggcttttgacatcacttacgtgcgcctcaagttccacaccagccgtccagagagcttcgccatctataagcgcactcgggaagacgggccctggattccttatcagtactacagtgggtcctgtgagaacacgtactcaaaggctaaccgtggcttcatcaggaccggaggggacgagcagcaggccttgtgtactgatgaattcagtgacatttcccccctcaccggtggcaacgtggccttttcaaccctggaaggacggccgagtgcctacaactttgacaacagccctgtgctccaggaatgggtaactgccactgacatcagagtgacgctcaatcgcctgaacacctttggagatgaagtgtttaacgagcccaaagttctcaagtcttactattacgcaatctcagactttgctgtgggcggcaggtgtaaatgtaacggacatgccagcgagtgtgtaaagaacgagtttgacaaactcatgtgcaactgcaaacataacacatacggagttgactgtgaaaagtgcctgcctttcttcaatgaccggccgtggaggagggcgactgctgagagcgccagcgagtcccttccttgtgactgcaatggccgatcccaagagtgctactttgatcctgaactataccgttccactggacatggtggccactgtaccaactgccgggataacacagatggtgccaagtgcgagaggtgccgggagaatttcttccgcctggggaacactgaagcctgctctccgtgccactgcagccctgttggttctctcagcacacagtgtgacagttacggcagatgcagctgtaagccaggagtgatgggtgacaagtgtgaccgttgtcagcctgggttccattccctcactgaggcaggatgcaggccatgctcctgcgatcttcggggcagcacagacgagtgtaatgttgaaacaggaagatgcgtttgcaaagacaatgttgaaggcttcaactgtgagagatgcaaacctggattttttaatctggagtcatctaatcctaagggctgcacaccctgcttctgctttggccattcttctgtgtgcacaaatgctgttggctacagtgtttatgacatctcctccacctttcagattgatgaggatgggtggcgcgtggagcagagagatggctcggaggcgtctctggagtggtcctcagacaggcaagatattgccgtaatctcagacagttactttcctagatacttcatcgcccctgtgaagttcctgggcaaccaggtcctgagttatgggcagaatctttccttctccttccgagtggacagacgagacactcgcctctccgcagaggaccttgtgctcgaaggagctggcttgagagtatccgtgcccttgatcgctcagggcaactcctaccccagcgagaccactgtgaagtacatcttcaggctccatgaagcaacggattacccttggaggcccgctctctccccgtttgaatttcagaagctcctgaacaacttgacctctatcaagatccgtggtacatacagcgagaggaccgctgggtacttggatgatgtcaccttgcaaagtgctcgccctgggcccggagtccctgcaacgtgggtggagtcctgcacctgtccagtgggatacgggggacagttctgtgagacgtgcctcccagggtacagaagagaaactccaagccttggaccttatagcccgtgtgtgctctgtacctgtaatgggcacagtgagacctgtgacccggagacaggtgtctgtgactgcagagacaatacagccggcccccactgtgagaaatgtagcgatgggtactatggggactcaaccctgggcacctcctctgactgccagccttgtccctgccccggtggctcaagttgtgccattgtcccaaagacaaaggaagtggtgtgcacgcactgtccgactggcactgccggcaagagatgtgaactctgtgatgacggctactttggagaccctctgggcagcaatgggcccgtgagactgtgccgcccgtgccagtgtaacgacaacatagaccccaacgcggttggcaactgcaaccgcctgacgggcgagtgcctgaagtgcatctataacacggctggtttctactgcgaccggtgcaaggaagggtttttcggaaatcccctggctcccaatccagccgacaaatgcaaagcctgcgcctgcaatccctacgggacagtgcagcaacagagcagctgtaacccggtgaccggacaatgccagtgtctgcctcatgtgtctggccgcgactgcggtacttgtgaccctggctactacaacctgcagagcgggcaaggctgcgagaggtgtgactgccatgctttgggttccaccaatgggcagtgtgacatccgcaccgggcagtgtgagtgccagcctggcatcaccggtcagcactgtgagcgctgtgagaccaaccactttgggtttggacctgaaggctgcaaaccttgtgactgtcaccatgaaggatccctttcgctccagtgtaaagacgacggccgttgtgaatgcagggaaggctttgtgggcaatcgctgtgaccagtgtgaagagaactatttctacaatcggtcctggcctggctgccaggagtgtccggcttgttaccgacttgtgaaggataaggctgctgagcatcgagtgaaactccaggagttagagagcctcatcgccaaccttggcactggggatgacatggtgacagatcaagcctttgaggacagacttaaggaagcagaaagggaggtgacagaccttctccgtgaggctcaggaagtcaaagatgtagatcaaaatctgatggatcgccttcagagagtaaatagcagcctgcatagccaaattagccgactgcagaatatccggaatactatcgaagagaccgggatcttggctgagcgagcacggtcccgagtggagagtacagagcagctgattgagatcgcctccagggagctcgagaaagcaaaaatggctgccgccaatgtgtcaatcactcagccagagtctacaggggagccaaacaacatgaccctcttggcagaagaagcccgaaggcttgcagagcgtcataaacaggaagccgatgacattgtacgagtggcaaagacagccaacgagacttcagctgaggcatataatctgcttttgaggaccctggcaggagaaaatcaaactgcgctggagattgaagaacttaaccggaagtacgaacaagcaaagaacatctctcaggacctggagaagcaggctgcccgagtccatgaggaagccaagcgtgcaggtgacaaagccgtagagatctatgccagtgtggcccagctgacccctgtggactctgaggccctggagaatgaagcaaataaaatcaagaaagaagctgcagacctggaccgtctgattgaccagaagctaaaggattacgaggacctcagggaagacatgagaggaaaggaacatgaagtgaagaaccttctagagaaggggaaagctgaacagcagaccgccgaccaactcctagctcgagccgatgctgccaaggcccttgctgaagaagctgctaagaagggacgcagtaccttacaagaagccaatgacattctcaacaacctgaaagattttgatagacgtgtgaacgataacaagacagccgcggaagaagctctaaggagaattcccgccatcaaccggaccatagctgaagccaatgagaagacaagggaggcccagctagcgctgggcaatgctgccgctgacgccacggaggccaagaacaaggcccatgaggcagagaggatcgccagcgccgtgcagaagaatgccaccagtaccaaggcggacgcggaaagaaccttcggggaagttacagatctggataatgaggtgaacggtatgctgaggcagctagaggaggcagagaatgagctgaagaggaagcaagatgacgccgaccaggacatgatgatggcggggatggcttcgcaagccgctcaggaggctgagctcaatgccagaaaggccaaaaactctgtcagcagcctcctcagccagctgaacaacctcttggatcagctaggacagctggacacagtggacctgaacaagctcaatgagatcgaaggctccctgaacaaagccaaagacgaaatgaaggccagcgacctggacaggaaggtgtctgacctggagagcgaggctcggaagcaggaggcagccatcatggactataaccgggacatagcagagatcattaaggatattcacaacctggaggacatcaagaagaccctaccaaccggctgcttcaacaccccgtctatcgagaagccctagtggcgagagggctgtaaggcagtgtccctgacaggggaccctgtgaggcctcggtgccttgacacaaagattacacttttcagacccccacttctctgctgctctccatcactgtccttttgacccaagaaaagtcagagtttaaagagaagcaagttaaacatctttaaccaggaacaaagggttttgcctaataaagtctctcctccacttctgtcagcaccctaccggaactttcccttgtttgcctgaagtcacggcatcttccaggggcctacccacatcatgtgaaccttttaatgccagggcagacccagccccctcccctctctcaacaccagcaggacctatctcagtactcatgtttctatgaaggaaatctttggctcctcatcgtagcattgagatggccagtatgtccgctctgcatcttctgcctcctctttgaaaggaaataaacatcctgtgccaaaggtattggtcatttagaatagtggtggccatccatcagacatgctggctggctgagcataggacacagagccatcgtgggtgacagcgtagttacatgtgggtccccaggagaacatggctcaaaagatgcttagggtttcctcctgttttcattgactaggaagatgaatgtttcccaaatcctcaggcagctgataaaaagtctggatgggcagctcgcacgcaccactacgtgaggtagcttttgatatttttataagcaggacttaatgcagaagaaacagatgtgataaccactcaagtttttttccccaagtagtactaattcttaaagctttgttagtgttagtcttggaactgttggtgaagatagctgtcaaaacagttgtcctctaaggtcatgaccaatgaaagaagagcaaatctccttttccccatattttctgggaagtggctgtaatcgggatgtaaccgctctcattaggattccatgagtgcatttctttttctctttttcttggagagagatgtgacgtttggcccttagctccattctcttctgatgtttccgttctttctagaactcttcagagcacatcgttgtttgccaggtcctggtggcaaacacccgctcacagtgtttctcaaggctgccaaccccatctagttcctgcactttgtgctccgcccactccaagcctttcctctgtgtggagagggaagatccatacgtggcatttcctagtgggcttctcaacctctgatcctcagctcggtggtctccttaagaccacactgtgacagttccctgccacacatccccttcctcctacctacctgcctctgagattcatatttagcctttaacactatgcaattttgtactttgcgtagcggggggaaagaaactattatctgacacactggtgctattatttgaaagtttatattttttgtgtgaatggattttgtttatcatgattatagagtaaggaatttatgtaaatatccccggtcctcctagaacggcactgtctgctcacgtctctgctcagttgtccctctcactggcacaggaacctgtaccatgcctggtcacgtcgtgcctggtccccagtgttttgctccacctctgccttgtgtttgcagcaccttcactgtctgaccggaagcctgctcacctccacaacttgactgaagagggccctcttccccgtggctctgaccatctgagctgcagctcctcaaggttctctgcctgcccggagcagtagccaagctgacagggtaaagggattaggaacgtttgttttgtggaaccttcccacacgggtcagttttctaagggagcatgtgatgactggaacacttgagggcatcagcaccgtgctactgatgacagaggggaggctctgttcagcctgtctccatctcggagattgccacaaaattctcagcttggcatcctgccgaggccttttgtgcacggcagaggcgtcggcctcaccaagttcagtgctgattggctagttcctctattccgagctcaccaccttaacattttggtcacagttgcaagaaaatggctgaaacagaccaccaccagcatcctttgggtcaactccactccagcaggcccgaggcgctggtgggtggggtgttttggtttgttttctccagcttttggctggtatatttttaaacagaattttattttttaaaatgaaagttactttacaagatgataccttattacgctccttcgacacagccattgcctttattgtatagttccaataatctgtattttatgtaatgaaatgggacagaatggctgctgtagaagtgcggggtgcccgcacagaacagattgttttatccctcccccgcccccgcccatggaattttcctttgattccaactgtggcccttttcaatgtgccttcactttagctgtttgccttaatctctacagccattcccccctcagggagggcaataaagcgcaacacttggcatttttttatgtttaaaaagaaaacagtattttatttataataaaatctgaatattttaaccctttaaaaaaaaaaaaaaa

SEQ ID NO: 1721 - DNA, 897 bp, Mus musculus
gcgagcgaacggccgtgttctgaggagagcagcggtcgtgtaaacctcaataatgttgtgtcgggcggcgtgcagcacgggcaggaggctgggccctgtggccgtggccgcgggctcccggcacaagcacagcctcccagacctgccttacgactatggcgcgctggagccacacattaacgcgcagatcatgcagctgcaccacagcaagcaccatgcggcctacgtgaacaacctcaacgccaccgaggagaagtaccacgaggctctggccaagggagatgttacaactcaggtcgctcttcagcctgcactgaagttcaatggtgggggacatattaatcacaccattttctggacaaacctgagccctaagggtggtggagaacctaaaggagagttgctggaggctatcaagcgtgactttgggtcttttgagaagtttaaggagaagctgacagccatgtctgtgggagtccaaggttcaggctggggctggcttggcttcaataaggagcaaggtcgcttacagattgctgcctgctctaatcaggacccattgcaaggaacaacaggccttattccgctgctggggattgacgtgtgggagcacgcttactaccttcagtataaaaacgtcagacctgactatctgaaagctatttggaatgtaatcaactgggagaatgttactgaaagatacacagcttgcaagaagtgaaacctcactcacggccacattgagtggccaggctccgggctggtttatagtagtgtagagcattgcagcactatgactggggtgctgtagtctttattgatgtctttccacatacctgataattctatgataatttcttattttaacttaaatctattcttaggccaactactttg

SEQ ID NO: 1722 - DNA, 2235 bp, Mus musculus
cgagatcgcatccgcaaacggggcctagagtgtgatgggcggaccagcctctgttgcaggcaacagttcttcatcgactttcggctcatcggctggaacgactggatcattgcgcccactggctactacgggaactactgtgagggcagctgcccggcctatctggccggggtccctggctcagcttcctccttccacacagccgtggtgaaccagtaccgcatgcgtggcctgaaccctgggcccgtgaactcttgctgcatccctaccaagctgagctccatgtccatgctctactttgatgacgagtacaacattgtcaagcgggatgtgcccaacatgatcgtggaggagtgtggctgcgcctgacagaggcaacgggggcggagcacaggcccatgggtctttgagggagcaggagaggcaggtgggctgagtgtggttgttccattgggccgtgaagagtgccagggtgaggcctgaaataatgttctcccgctttgtagaaaaccagtcaggaccagagggagaatccctctgtggcacgagagactcctaactgcacacatagacacgcatagccagactcacgcagtctgccacccacacagcagcctctgggataccagcaaacggatgcggtgacaaatggcaccaatgcctgtcagtctgaaagaatggggtgagcagccaccattcccaccagctggccgggcactctgaattgcgccttctgagcacacataaaagcacgcaaagacagaggacacagagagagtgagccagagagccaccaagaggaaaagcagggtgggagcacaggcgggtggagggccatgtgtccctgacttgtcccaggttcttcaccgaagcgcctggcacagtcctgcctgctcactgcccgcctggcatcctccatgctttgaggccagcagagctgtgccacccctgttcttggagagggcaagtagcccaggagcgactcacctgtcacagagaccatgagcaggacagtgaccttgatgtctgtcacttgcgtcccccatgtgacttatatatgtgtgtatgtgtgtttcttttcgggggtgttgggggagggagagaagaagggtcttaattttatgctttaaattcatctccaacaactgacaggtcactggtgccagttgcagaattgaaaagagcctatcagctatggcctttgaagcggaaaggccaaacgattcgaagtgagaaggaaagaaaaatgttgcaatcggtgccctttgctggggacttcctcctggtgttatgcttagaggggagggccactggcaagggggagagacaggggaggcagtgggcagagtgaggctgttctgaggagctgctcagctgggcttggagagagagggagagcttttggttgctttgcagaagttgttcccgagggtgagaactggcttcagggttgtccgtggacatgtcccctgcccagttcacttgccctcccgcctgctccacaatgcactttcggtcctgagtgaatgcacaccacaatagcacttgcaggtctacgtgtgtccagaagtggccctggggcgagagcttgacgtggctgtcctcgtggatgtccaagtgccacgtgaaccaagcaatttaaagggttgacccacacaggcgaaactgtactcgtacgactcttttatatttttatacttgaaatgaaatcttttgcttcttttctaagcgaatgattgctttcaatgtttgcactgatctagttgcatggttagtcagaaactgccatttgaaaaaaaagttatttttatagctgcagaaaaatgaatacagttaaatgtattatacataattttggaaccaaagaaggccagcggatcagttttaatttttattagatggtgaggccatcttctatgaggtagatgttctaaacaatccttcgagtggcctgccagtgtttcagggtataaatgatttttttttttatttttattcagttgatgtgtcttttctgtccgtacacacccagaaggtagagtaaaataaatgactggtggagtgaaggtgtgtgctgtaagtcctcacctttagtttatttaataaatccctccttaggttctgtttcataataacttaaaaccaaagaattttcccccacagactggctgtcttaagtattttacgttcatgtacagtataagacaataaaagatggagtgccacgggaaaaaa

SEQ ID NO: 1723 - DNA, 673 bp, Mus musculus
ttttttttttttttttaaaaccaaaaaataaattttaatttaaatatagtactttggtatgtgattcttttgttgtacaaaaatagttgtaaaagtgttttttccatttttaagtatacactacagactatttttaaatagtacattgctatgatagactgtataaattacacattccccagccaagcccttcttttccaggctgtcatctgtgagagaacacagtacgaacttgatgccctgtcaagacaatcagaaacaattatccctcctaacagaattgaatgtgcttctctttaacaagccttcatgtttctgtctcaatcctgtagattaaaaacttttaacagtaatctaaaattctgctgttggggacagaccgtcttctctcaaggaaaatgtcaggaatctgctgaaggtaaacagccaggacttcttgagacacatcatagtaatccagtttgtagtagcagagggccacatacacattgagggccaggtattccctgttgtccagcaggatccgcttgtatatatcaatagcttcttggtaatgggatcgcatgtagtggattgaggccaaactaagctggtcttccttgatatcctgaagattctgatgaaagttcattaatttcttctcatcattaaacttgtgagccagatggaacag

SEQ ID NO: 1724 - DNA, 716 bp, Mus musculus
  misc_feature 606, 619, 653, 664: n = A,T,C or G
atgatttgagtaaccaatttataagaattggattatttatatacacttgactgtaaaaaacaaaatacctctttgtaatgttcacaccatcaagctcaatcaagccaaacaagatagttaactaaaatgattaatggatgcagatttagctgagagctttaaatcaagaatgtcttgctgatgtcagggttgaatagctctccatctgatgctggcgctgttaaaagccttaagcaattcagataaactcattgagcaaaattccaaaggggtgagagaaattccatgagggtgcattttttctggtagagtggcgggtgcacaagtttgcaggaagggggctttcctgatggggtggaagaatgagagtcagaggggctgagcaggtgcatcagaagttcctccttggtatcaaacagaaatttctcaacttggttgatgttctggtattcttctaggtccatatcaatgtttttatacattgtcttttctccctctgtaataggtgccatttgatcatagattccaggaattaggatgtggcctgatgaatccaccaggctacctagaagagcaaccaagtcagccattggttcgttgaggatngccaccaaagttnctgagtggaaatcttgatctctacacttcacctncaccgtgaagntagcagttccccgggtttcataagtgagtgcagttttcctctggctgagcca

SEQ ID NO: 1725 - DNA, 9737 bp, Mus musculus
  misc_feature 2002, 2030, 2068, 2082, 2164, 2240, 4178, 4212, 4214, 4385,9487: n = A,T,C or G
tctctcttctcttgcttcgctctcttgctttctctctctcttgctttttcgctctcttgcttctcgctctctcttgcttcttgctctcttttcctgaagatgtaagaataaagctttgccgcagaagattctggtctgtggtgttcttcctggccggtcgtgagaacgcgtctaataacaattggtgccgaattccgggacgagaaaatccgggacgagaaaaaactccggactggcgcaggagggatacttcattccagaaaccagaactgcgaatcaaggttataaggttcccgtaaagcagactgttgagaaggattcaactgccgaatcagaactcatcagctggggaacggaagtgagaaatggctttaccaggtatgtttggccttgaactttttctagtgttaggtgcccttttgttccttttcacatgttatatagtgcttaaggcagggctaaaaattctagaggaaattcaggacagtctatcagaagtaaagcggagagagagagtaggaacaaggagaaacggtaagtatacaggcctttccaagggtcttgaacccgaggaaaagttaaggttaggtaggaatacctggagagagattagaagaaaaagaggaaaaagggagaagaaaaaagatcgattagcggaggtctctaggagatactcgtcactagatgagctcaggaagccagctcttagtagctctgaagcagatgaagaatcctcctctgaggaaacagactgggaggaagaagcagcccattaccagccagctaatcggtcaagacaaaagccaaaagcggctggcgaaggccagtttgctaattggcctcagggcaatcggctaccaggtgcactcccgccctatgcggagtccccgccctgcgtagtgcgtcagcccgtagtgcgtcaccaatgcgcagagaggcagtgcgcagactcattcattccccgagaggagcgggggaaaatacagcaggcatttccagtctttgaaggagccgagggtgggcgtgtccacgttgcggtagaatatgtgcagattggggaacttgccgagtcggtccgtaaatatggaatcaatgctaattttaccttgatgcagttagacaggcttgccagcatggcactaactcctgccgactggcaaatgattgcaaaagccgctctccctagtatggccaaatatgtggaatggcgagctctgtggcaggaggcggcacaggcgcaggaccgagcaaacgctgctgctttaactccagagcagagagattggacttttgacttgttaacgggtcagagagcttattgtgctgaacctgataagaggtatcaatggaaaggtcttaccacagggaatgtccaatagtcctacaatgtgccaactttatgtgcaagaagctcttttgccagtgaggaaacagttcccctctttaattttgctcctttacatggatgacatcctcctgtgccataaagaccttaccatgctacaaaaggcatatccttttctacttaaaactttaagtcagtggggtttacagatagccacagaaaaggtccaaatttctgatacaggacaattcttgggctctgtggtgtccccagataagattgtgccccaaaaggtagaaataagaagagatcacctccataccttaaatgattttcaaaagctgttgggagatattaattggctcagaccttttttaaagattccttccgctgagttaaggcctttgtttagtattttagaaggagatcctcatatctcctcccctaggactcttactctagctgctaaccaggccttacaaaaagtggaaaaggccttacagaatgcacaattacaacgtattgaggattcgcagcctttcagtttgtgtgtctttaagacagcacaattgccaactgcagttttgtggcaaaatgggccattgttgtggatccatccatccaaacgtatccccagctaaaataatagattggtancctgatgcaattgcacagcttgcccttnaaggtctaaaagcagcaatcacccactttgggcaaagnccatatcttttaantgtaccttataccgctgcacaggttcaaaccttggcagccgcatctaatgattgggcagttttagttacctccttttcaggnaaaatagataaccattatccaaaacatccaatcttacagtttgcccaaaatcaatctgttgtgtttccacaaatancagtaagaaacccacttaaaaatgggattgtggtatatactgatggatcaaaaactggcataggtgcctatgtggctaatggtaaagtggtatccaaacaatataatgaaaattcacctcaagtggtagaatgtttagtggtcttagaagttttaaaaacctttttaaaaccccttaatattgtgtcagattcctattatgtggttaatgcagtaaatcttttagaagtggctggagtgattaagccttccagtagagttgccaatatttttcagcaaatacaattagttttgttatctagaagatctcctgtttatattactcatgttagagcccattcaggcctacctggccccatggctctgggaaatgatttggcagataaggccactaaagtggtggctgctgccctatcatccccggtagaggctgcaaaaaattttcataacaattttcatgtgacggctgaaacattacgcagtcgtttctccttgacaagaaaagaagcccgtgacattgttactcaatgtcaaagctgctgtgagttcttgccagttcctcatgtgggaattaacccacgcggtattcgacctctacaggtctggcaaatggatgttacacatgtttcttcctttggaaaacttcaatatctccatgtgtccattgacacatgttctggcatcatgtttgcctctccgttaaccggagaaaaagcctcacatgtgattcaacattgtcttgaggcatggagtgcttgggggaaacccagactccttaagactgataatggaccagcttatacgtctcaaaaatttcagcagttctgccgtcagatggacgtaacccacctgactggacttccatacaaccctcaaggacagggtattgttgagcgtgcgcatcgcaccctcaaagcctatcttataaaacagaagaggggaacttttgaggagactgtaccccgagcaccaagagtgtcggtgtctttggcactctttacactcaattttttaaatattgatgctcatggccatactgcggctgaacgtcattgttcagagccagataggcccaatgagatggttaaatggaaaaatgtccttgataataaatggtatggcccggatcctatcttgataagatccaggggagctatctgtgttttcccacagaatgaagacaacccattttgggtaccagaaagactcacccgaaaaatccagactgaccaagggaatactaatgtccctcgtcttggtgatgtccagggcgtcaataataaagagagagcagcgttgggggataatgtcgacatttccactcccaatgacggtgatgtataatgctcaagtattctcctgcttttttaccactaactaggaactgggtttggccttaattcagacagccttggctctgtctggacaggtccagacaactgacaccattaacactttgtcagcctcagtgactacagtcatagatgaacaggcctcagctaatgtcaagatacagagaggtctcatgctggttaatcaactcatagatcttgtccagatacaactagatgtattatgacaaataactcagcagggatgtgaacaaaagtttccgggattgtgtgttatttccattcagtatgttaaatttactagggcagctaatttgtcaaaaagtctttttcagtatatgttacagaattggatggctgaatttgacagacccttcgaggcttgccatcattcaggtcaactcgcacgcgcttggacctgtccctgaccaaaggattacccaattggatctcctcagcattttctttctttaaaaaatgggtgggattaatattatttggagatacactttgctgtggattagtgttgcttctttgattggtctgtaagcttaaggcctaaactaggagagacaaggtggttattncccaggcgcttgcaggactagaacatggagcttncnctgatatatctatgcttaggcaataggtcgctggccactcagctcttatatctcacgaggctagtctcattgcacgagatagagtgagtgtgcttcagcagcccgagagagttgcaaggctaagcactgcaatggaaaggctctgcggcatatatgagcctattctagggngacatgtcatctttcatgaaggttcagtgtcctagttcccttcccccaggcaaaacgacacgggagcaggtcagggttgctctgggtaaaagcctgtaagcctaagagctaatcctgtacatggctcctttacctacacactggggatttgacctctatctccactctcattaatatgggtggcctatttgctcttattaaaaagaaaagggggagatgttgggagccgcccccacattcgccgttacaagatggggctgacatcctgtgttctaagtggtaaacaaataatctgggcatgtgccaagggtatcttatgactacttgtgctctgccttccccgtgacgtcaactcggccgatgggctgcagccaatcaaggagtgacacgtccgaggcgaaggagaatgctccttaagagggacggggtttcgttctctctctctcttgtctctctctctcttctcttgcttcgctctcttgcttttctctctctcttgctttttcgctctcttgcttctcgctctctcttgcttcttgctctcttttcctgaagatgtaagaataaagctttgccgcagaagattctggtctgtggtgttcttcctggccggtcgtgagaacgcgtctaataacactactgtccgtattgccctacaatgtagtagggtttctcttttgtttttgagacagcgtctcactgtgttaccctggctggtctggaaagaattgatgtataccagactagcaaactcagaaacctgcctgccactgccgcctaagtgctgggattaattggacaatcaactctgagttctcttttgcacttgctctccctctgtccagactgcccttcagtagatctgttgggctgattttccagcctcccgtatctttgaagacccatcctggaccatcacagataagcaagcgatttctctgctacccagattcctacctcacctctcctgtttttctccattaaagttttcgccaaatgtacactctggccctttggtcttcccactacaagatatgctgcctgggaacaagggattggtctgtttggtcaccagtgtgtcacaggaggctagggtagtgtctgacacacagtgggcattgaaacagtgagatgttgatgtgcaaatgtgggctgtgcttgtatgggtgaggcaggggttgatggagattactgtgatggactcagtaagtggtgtgtattcacaatgagtgttgtatctctaagtacctcttcaagtttattttttgttttattttttgagatggggtctcactacatagctctggctgcctggaacttgccgtgtagaccaggctgacctggaactaacagatctgcctgccactacctcaagcactggggttaaagttttgagtgttcaaccatgccagccttttaaaagacttttctggttatttttggcactttgaggctaggtcccaggtaactcagcctctcattcaccttgtatgctagtatgtgatatgctggctttcaggagaaatgtcgagaaactaactgtgatgactaagggacagttaggagttgtttttaacatttgttatatgtgttttctgtgtatgtgtgcatgcatgggagacagaacacagttcctgggagtcagtcctcttctatcgtgtggattctgaggatcagactcgggttgtcagactagagatgagagcaggagctcttcccactgggccatcctgccagcttctgcttttaggatagagtgttcccttcactctgccctcctttgtgttgtgttttttatgtattccttgttgagcagttagcttttgtataaataattttttctttagacttgaatatctaggtggggaggaccaatttgaattaaggaaaattaacaaaaagaagatacctgggccgggcatggtggcgcacgcttttaatcccagcactcgggaggcaggggcaggcggatttctgagttcgaggacagccagggctacacagagaaaccctgtctcgaaaaaccaaaaaaaaacaaaaaaacaaaaaaacaaaaacaaaagaggatacacctgactacaccaattgattttgatactcagggacaactgtgaccagccagggtcactaatttgaaccaactgcttgttattagccagcccaattttttttttaataaagataacttggtctttgtctctcaagagacagtaagttgggaccggagagatggcttaatgaataagaatgcatacttaccgaagccccagttcagttcacagcagttgtgttggacagctcacaaactacctgggactgtagctccaggggagtccagacccttttctggccttcccttcagttacctgcacacactggtacactcacaactgggaaatttgggcttcagggcctctggaagagcagccagtgctctaacccgctgagccatctctccagcctcaccctgtacttttttaatgagaatatgttcaatgctgatcacaggattctccaagaagccccatccctgattggacgtctgaaaatgagagaagcgaaggttaaacccaccactaccggggagggggtggtcccctcagacagcacagctaggacctcggctttctacgttcacccttcaaaacccattggagtgtttggttctgttgttggtttgttgagacagggtttctctgtgtagccttgactgtcctgaaacgccctctgtagcccaggctggcatagaactcatagagatctgcctgccttcctttccctctgtgggattaaaggtgtgcagcgtgcaccaccactgccgggcacaaaatccaattctttaagatacaaacttgggagaaggctgtgtctttggttaaaggatgcttgtataagactgggcgggtgtgtcaacacaagaggctattgaggttacaagcataagcttagtttcgcgagagattagttagcagcaatacttaaattacctgcccgtgtaagacgctggaggccagaagctcccatcacccacccacccctagagatggcgtgatgcccacaggcagtggggccctggctcataccggagagggacagtgaaggccctgactgacagctggctatgggactgtttctcctgcagtgagttccatgggaaacggcaccagtcgactctacagtgctctcgccaagaccgtcaacagcagtgcagctgctcagcacccggagtacttggtgtcaactgaccccgaacatctggagcccatcgatcctaaggaacttctggaggaatgcagggctgttctgcacactcggccaccccgctaccagcggattttgtggacctgaggacagattgctccagcagccactctcccattcgcgtcatgcagtggaacatcctcgcccaagctctcggagaaggcaaagacaactttgtgcagtgccccgtggaagcgctcaaatgggaagagaggaagtgcctgatcctggaggagatcctggcttaccagccagacatactgtgcctccaggaagtggaccactactttgacaccttccagccactcctcagtagactgggctaccaaggcacgtttttccccaagccctggtcaccatgtctagatgtggaacacaacaacggtccagatggctgtgccttattttttctccaaaaccgattcaagcttatcagcagcaccaatattaggctgacagccatgaccctaaaaaccaatcaggtggccatcgcacagaccctggagtgcaaggagtctgggcgacagttctgcattgctgtcacccacttaaaagcccgcactggctgggagcggttccggtcagctcagggctgtgacctcctccagaacctgcagaacatcacccagggagcaaagatccccctgatcgtctgcggggacttcaacgcagagccaaccgaagaggtctacaaacactttgcgtcctccagcctcaacctcaacagcgcctacaagctgctgagtcccgatggacagtcggagcctccctacacaacctggaagatccggacctcaggcgagtgtcgccacacgctggactatatctggtactccagacatgctctgagtgtcacgtccgccctggatctactcactgaagaacagattgggcccaaccggctcccatccttccattacccctcggaccacctgtccctggtgtgtgacttcagctttaacgaggagccccatgagctcttttaatcacaagcgtcttaaccagggatgttttgggaaactgaactaggataggaagttgcctgaaaaggacacccagtttctgccactactctccatcatttccagcatgcccttgaaaaaacattgttcacaaacctttccagctaaaacccgcattgaaaaggtgtttgcactccagtttgagcttgttgttcatctgtgtaccatcctctaccatttaggggcattagtagcataggctttcttgttttttagttgagggtattataaaaacccagtttgtaagcccttcagaattaaagtaagatgtaggaagttttctagacatcatttcaagttatttatttgtgggatttttaaatgtcagtgggaaaaaaaatgcatggtaatatttatttttttatatcttaatgtaaaataaagtggattatctagcattgtggacattttagaaccatgcaggtacagtcttaattccttaaaaattaaaatgtctctatttgctgatcgaacaggatgtacactaaggaactatttagccctggggggattggtgactttgtgtgtacattcttcacaaataattcctgtttgctatgcctttgacttctctgttgtgttttaaagaaattccgtagcattcagttctttagtttccactgtttagtcactgctaggcacttgtgccttttctgttgtgatgacgttggtagacgtgtgaagattactccaatcacttctcctgggatgtgctttttataagtagctttaggaacagctctggaacagttgctaagaatattagtgagaaaccttgccaagacgacagacatgagcccaacattcagctgagacaanaaagctcacgtcttggaggccagcttgggctatatgtcaagaccctttcttgaaaaagccagatgactggattcaagttttctagaaaaatataagagtcaaaaagataacctggagttctctttcaattgttgaagcctcttccaaacaaaatatccttccagtggtaaaatggtaaatatcttaatgtatgagttctaaatattacttaaggttaataaatggacttacaaagagaaaaaaaaaaaaa

SEQ ID NO: 1726 - DNA, 728 bp, Mus musculus
ctgacaaggagatctgtggagtttttctccaagtgaaccaatcccctgtgtcctggctcacactgtggttagggtgggcacatccactctgccatctttaacacacagaaaccaaacatcagtgctccagtagcttactaatggaaagaggttggggtgagactcacccacagatgagccactctgctaggagccagctgtccctgtgctccttggtggggtctaggaggagtcaccctgttactagaattaccagcttgattcggcttcctctctgcatttccctggttctgccccacctgcgaggtccagagccatctcattcagggttcgccgcttcacagtcatccgaagggaggaggggatggccgccacccattcctttgtattattgcaactggtgctataaacaccaagtgctattgctcacagagacccatgaaggtaggtggaggagagacaaaaaacctagctggaactgaaagcagacatggagaccaggacccaggagaagagtcagtcgtgtatttaagagttcactttgtgaagcagtagctttcagtgcggtgttaaattataacgaaggcatggagtaccagggtgctttatatttagattatattttaagtcatggtgcatacttgagggggtttattaaaaatgaaagtactaacttaatgtctactaagtttaataaacaaagaatttggaagtaaaaaaaaaaagct

SEQ ID NO: 1727 - DNA, 3462 bp, Mus musculus
aggcgggcgggccctggcaccggaccgcaggctccgagaggcggcgggaggcgccaggagtgaacggaagccgcgggaaggagctgcgggtgctttgttccctcgccgtaagggcctgctgccgggcgtgtgttcgtggacggagctgttgtatcggaaatcccggtccccagccctcagtactcggttcgggccggaccagactggttctcgtccagggcccgccatggcccagcagagagcccttccccagagcaaggagacgctgctgcagtcatacaacaagcggctcaaagacgacatcaagtccatcatggacaacttcaccgagatcatcaagaccgccaagattgaggatgagacgcaggtgtctcgggctactcagggcgaacaggacaattatgagatgcacgttcgagcagccaacatcgttcgagctggtgagtcactgatgaagctggtatccgatctcaagcagtttctgatcctcaacgacttcccgtctgtgaatgaagccatcgaccagcgtaaccagcagcttcgagccctgcaggaggagtgtgaccgcaagctcatcaccctgcgggacgaggtctccattgacctatatgagctggaggaggagtactactcgtccaggtacaaatagggctggactgccatgcaggtgctgcctgctgcctgcccagaccagctagggcctgcaatggccttgtgtttttccaagttctccttggcagcagagcccctgactagctcgtttgacggacagacagtcatagccagccaccagcaggggcccaggccttcccttcaatgaagagggatgaaaacacaggacttggttgtgtgtcaacggctgtggccagaaaagggtatcccccagggggcgaggaagccctccacgggcaacacagtctctgtcttactgctttaaatctcttgtctgtctagacagtttagtcaaggctggattggccccttgtggcttccaggtctctaacgacgttcactttctgggacagccctgcctactgcttgctcagagattcagttccatgtgaatgtcatcagactcacagtggagaggtgggatgggggaggggtaaggaactcaagcagggtggctttgactcctgggcccaagatacctggatgtcagctcggccttattcatggagctggagtctcctggtgtcagacctatgttagtctcagaggatagcagcaggcaggatctgtcacatagctctctacagggccacttagaatgttgatacctgaaactttctgatccagagaggccttgagaaatcaagagtccagtgtaaaatatgtcgtcggaaccgggctggagaatggaggccttgcccaccccattagcttgaagttaaggttccggtcagcagcaccctgcctgactccccctggtggtaggtttgctcctgctgctgctgcacagaagctgcagtcaactacagatgtccagtgctgcagtggacatcttgttcccatcttagactcagtgtcactgccaagcttcagtagttctaaagttctccagagagttctggggttatctttggtctcagtgttcatcagcttagcagaaaagtgggagtatctactgtaccccaaagtggcagagacttagaccaacccagggtgagttcctcacatcttcctgtcactaccttgtagtacttcaaggacacttgagcggatgagtactgggacagtgactcagtcctgtacaagggttgaggggataaattgctcagataggaacccagagtgctggtttccaaagcctcggcccctctgcatcacgtgcatacgtttctgggatgatctgcgtcctctttgggcaatcacctctctcatattcctcatggtaaagcagctgccccatgcctaggaatttccttaaatggcagagttcttcggtaggtgaggcagtaggttttgtctgcccctatcagcctcctgcccacaccaccaccagttgcccagcttcccctctgcatggctactcttgcctgtatacgaactgcttgctctttctggctttgcttccctccattctcctggggatgctactccctttgtcttgggtagttctgcgagagactagctaggggacaggcatgggagaaagctagggccttgtgcatattagacagctgtagaaacagatgtggtccaagtagccactgctatgaccactgaggcattgtgcttgcctcctcctgtctctggctttccctgtgtaatgtaaggaaatggaatgtgtaaagcctggggcttagagctgtagagctagagtagtggtatatagagaatgctcagacctgtattgctgactgttacccagttaggccaggaccctgtaggatggaaacaggtctgcccaccaggagctctttgtaaagtctcatcactaccctactggtaagggatgggtaacaggtagaggctgataggaacaaggagagtcctatgtgtcaagaaggacccatggggacagtttgcctaagtcacatggcctgttgataccacctttctttggatgcaagagtggccagaaccgcttagcagaggggccagcacagaggagaagaaggggaggcagtcaggtgatgttcatttcttaactctgcatctgtcttgctttcccctccctggctttcctctgcctgctcctgtcactcctgggggtttcttgtggtggcaaagctcaagtctctgcgaagctaatgacctgcctctgtgtgaagcttactggaggctggacctcgacgcagattctgctgatggcctctcagcccctcttctggcgtccccggagactggtgctggtcccttacagtctgcagcccctgtccactcccatggtggtggccctggccctacagaacacacctgagcctcttggggtaccatcgcagggtagccctccctagggcctagtttatcagaaaggaagtgctgtggatacccagcacagcctagcttttttcagttttagctccctctggggactttgggatcaggagccactgtagcctcaggaacctgtccaggccagggcagttccccgtgatggttggggaatgctgtccagttatttacagcaggtggctcccttcctgactgccagtggaagtttgtcccattgaagaccttgaatagggagggtggttggtgataggaagacagctcagtttgtttagaattgtgaggtattcagtggaccttagtcaagtccagttacccatccttaggttcaggttctatagagagccctgtccactgcctgctgcctggagcataaatgtctctgccacagctgactgtccaagattgtgtgagaggcagctagccagggtgtcttcctggattctcccaccatttccttctgctacttttgagatgagactgttgaataaaacattagctttt

SEQ ID NO: 1728 - DNA, 4174 bp, Mus musculus
  misc_feature 2636, 2666, 2759, 2789, 3326, 3352, 3503, 3666, 3668: n = A,T,C or G
tgacaacccacgagctgccaagcaggcgcagccatgggaagaggaggcggtctagggagcggcggcactggcagaggcggctgctacagcggcggtggtggcgacggctgttactgaaccccggcagccgcggggatcccgggctgggtccacgcggcctgaggcctcggctccagcagcccccaagcggacacgaacccgcgttctgtctcccgaggcgaaactccgaggtctcaggtatggatctttgtcaggtcttcttaaccttggcactggcagtcaccagcagcacattttctggaagtgaggctacaccagctactcttggcaaagcttccccagttctgcaaagaatcaatccaagcctggggacaagttcttctggaaagcctcgattcaccaagtgtcgttcccctgaactggagacattttcatgctactggacagaaggagataatcctgatttaaagaccccaggatctattcagctgtactatgctaaaagggaaagccaacgacaagctgcaagaattgctcatgaatggacccaggaatggaaagaatgccctgattatgtctctgctggaaaaaacagctgttacttcaactcatcatatacctccatttggataccctactgcatcaagctaactacaaatggtgatttgctggaccaaaaatgtttcactgttgacgaaatagtgcaacctgatccacccattggcctcaactggactttactaaacattagtttgaccgggattcgtggagacatccaagtgagttggcaaccaccacccaatgcagatgttctgaagggatggataattctggagtatgaaattcagtacaaagaagtaaatgaatcaaaatggaaagtgatgggccctatatggttaacatactgtccagtgtactcattgagaatggataaagaacatgaagtgcgggtgagatccagacaacggagctttgaaaagtacagcgagttcagcgaagtcctccgtgtaatatttcctcagacgaacatattggaagcatgtgaagaagatatccagtttccatggttcttaattattatctttggaatatttggagtagcagtgatgctatttgtagttatattttcaaagcagcaaaggattaagatgctgattttacccccagtcccagttccaaagattaaagggattgatccagatcttctcaagggagggaagttggaggaggtgaacaccatcttaggcattcatgataactacaaacccgacttctacaatgatgattcctgggtcgagttcattgagctagatattgatgaagcagatgtggatgagaagactgaagggtctgacacagacagacttctaagcaatgatcatgagaaatcagctggtatccttggagcaaaggatgatgattctgggcgtaccagctgttacgaccctgacattttggatactgatttccataccagtgacatgtgtgatggtaccttgaagtttgctcagtcacagaagttaaatatggaagctgatctcttgtgccttgatcagaagaatctgaagaacttgccttatgatgcttcccttggctctctgcatccctccattacccagacagtagaagaaaacaagccacagccacttttgagcagcgaaactgaggcaacccaccaactcgcctctacaccgatgagtaatcccacatcactggcaaacattgacttttatgcccaagtaagcgacattacaccagcaggtggtgatgtcctttccccaggccaaaagattaaggcagggatagcccaaggcaatacccagcgggaggtggccacgccctgccaagaaaattacagcatgaacagtgcctacttttgtgagtcagatgccaaaaaatgcatcgctgtggcccgtcgcatggaagccacgtcttgtataaaaccaagctttaaccaagaggacatttacatcaccacagaaagccttaccactactgcccagatgtctgagacagcagatattgctccagatgctgagatgtctgtcccagactacaccacggttcacaccgtgcagtctccaaggggccttatactcaacgcaactgctttgcctttgcctgacaaaaagaattttccctcctcgtgtggttatgtgagcacagaccaactgaacaaaatcatgcagtagcctttcctatctttaaatggcaagggaaaggctgggcacaaacgcttaaaccaaaactatgttttaaatctgtgttgggagagcatgagagtggatatggattctaaaatactttttctggaaatgtcaaaatatcaataagtggaaaatcaagaattcgtaatcagataaatgctcccattgtgaattataaatattttaatgaattgtctttaagactgtatagtggcagtgattgtctgtactgtgggtcttaattttgtgatactaagcattaaatagctacgttttttatgtatgtagatcatgcttttggaaaaagcaaaacaatcaggtggcttttgcagttcaggaaattgaatgcagattatagcacaggctgattttttttttcttttttaaataactgggaactaaaactctaggtgagaaggtaaaactagnttggatatgcaaaacatttattttgacatnaaattgataaagatatttttaataatttacactttaagcatgagkmctttataatatgctacacacatattgtagttcagaacaatccatctnaggatgtagcagctacagtgtaaagagggnttcatgttttggtcaatgaacgtaaagaaaaccaaacaagttagatttttacaaagcccttttataacttccaaaacttcttaactctaaaaatgtctaataacctgcattattagaaaaaaacattttaaatttgtaaacgaatatttttttaattttgaaaactttatttttttttaatgttgaatcaacgtatcatacaccaaacagtaaacagaaattataataatggaagaagtgctttcttcgacaaatttccattcaagccacacagctacatgtaagagaagtagaagtgatgtggtgtgattggctaggatgcagaagagcttcaggaatacaagaagtgagagcccaaggattgggaggagggggctctcacatctccacagtgcagtctgtcaaacccagcttggtttttatagtattctaagaattattgtgtacaaggaaaagtctcacatgtatgaaatccagtatccagatggggtaaagttagcagataataggataggaaattaaagacctagatctagnactagtggacttttttcacagacagnacacaaatttttaattcagggagaagggacagaataaatgacttcccactcacaaagcacaactcagaagtaattaaacaggtaacagaaaccttgccatcaaacctttgataagatgtattttaagtagtaagcagtatttcaatgcttnttacttaccctcccaggacaaccgatctcaaataagggagataaggtagataaaaatcactttttgattctgtaataacataaacatagttctttgggttagcacccccccaaaaaaaaatttatgggagaaagaggactctcagctgactgaagaatacatntnatttaaatattttttagatgcctgaaactttaaaattacctttaagttttaatggattaccattttgccaagacctttgtggggaaacaagcttaatgtttagtgattttgaaatctctttcatgcaggagagacagtgaaaatctagccttgggtgtttaaggttcgccttgttactttgtaatagattttaataagtttttctgctactttgctgctatggtttctccaatggctacatgatttagttcatatgaagtatcatcaacttagaatctattcagcttaaagatgtgtgttttgatgaactatcttaccatttcaccataggctgaccacgtttctatagccaaaaatagctaaatacctcaatcagttccagaatgtcattttttggtactttgctggccacacaagccgttattcaccgtttaactagttgtgttctgcagtctatatttaactttctttatgtctgtggatttttcccttcaaagttcaataaa

SEQ ID NO: 1729 - DNA, 406 bp, Mus musculus
tttttttgtcctgaagtgattttatttttatttccttcactttaagcctatcattaaatttcacagtgctttccggggtggggtagaaggaaggcattgttcaaaatgttggagactatgggctgattggccggagaaggtgaagcaggggaggcctcactagggaagcttgaggggcacagtctgccccactggcaggtaggtgacattctgagagcgggagagttggtacgcaatgtcctcagcagcctccagcttgcgcagctcgatcaggccatcgcctgctgtggccagcgagttggcgatcagctctgccgccttagcgtccccctcagcagaaatgatggctgccaccttctgctgctcagccttttccaccacaaatctggctgtctccgcttcctgc

SEQ ID NO: 1730 - DNA, 503 bp, Mus musculus
ttattgatagacatcaactcttttattcttgacaatagctggtaatttacacattatgatatgactattaaaatttattaagtctggagaaatgactcaaaagtgcttgctgttcttatacagctgggtttccagcacacactgttgggtggcttacctataattatagctccaggggatccaatcccctcttctggcctcatcaggcacctacgtacatgtgcatgcacacacatgcatgcacacccacacgtgtgcgcacacatactacaaaaataaaactccatctaattcctgtgaattcatctctgtgtgtacaagtccagtaattatttcactgtctgtctgaagcactaagagcactacatccaatgctcggcgccatgcttcaatctttggtgtaacagtatcataaactcttggaaccagctccaggttatctgaaatacctgaatgaaaaactccactacttagtttactatattcactcaagatgtaagatg

SEQ ID NO: 1731 - DNA, 60 bp, Artificial Sequence
  oligonucleotide probe
tctcagttttctatctgcacaatggaaataaaacagccttaacaaaacagcctatcgtcg

SEQ ID NO: 1732 - DNA, 60 bp, Artificial Sequence
  oligonucleotide probe
tatctatcagtgagggctctcaacctccccatagctaagggttaagtctttgtagccaaa

SEQ ID NO: 1733 - DNA, 60 bp, Artificial Sequence
  oligonucleotide probe
gtgtgaaaaagcttttgttctcttaaaccattcttaagacaatttctacaggcacttgac

SEQ ID NO: 1734 - DNA, 60 bp, Artificial Sequence
  oligonucleotide probe
aaccaagtttacaaagaggaccatcacacacattgatagtgcagctaggatgcaggagct

SEQ ID NO: 1735 - DNA, 60 bp, Artificial Sequence
  oligonucleotide probe
gctcagctgttgaatcacactacgaggaaataaaatgtttcttagtaattctttgactca

SEQ ID NO: 1736 - DNA, 60 bp, Artificial Sequence
  oligonucleotide probe
cggtgtatttttccacttggaatgaaattgtatcaactgtgacattatatgcactagcaa

SEQ ID NO: 1737 - DNA, 60 bp, Artificial Sequence
  oligonucleotide probe
ctcagctcatcgtgttttcaaccagttaatgtgcctgctttgattttcaaattaaaaaga

SEQ ID NO: 1738 - DNA, 60 bp, Artificial Sequence
  oligonucleotide probe
aactgacttctgctctggtttccaactccacttggcttggaagcagttctttttcttgct

SEQ ID NO: 1739 - DNA, 60 bp, Artificial Sequence
  oligonucleotide probe
caaaggtgtgcaacttaactggagatctttcttcaaaacaattaacctttgttatctacc

SEQ ID NO: 1740 - DNA, 60 bp, Artificial Sequence
  oligonucleotide probe
gagttccgtatattgggtcagttatagggtttttcagatgaaatttctttgcaaagtcat

SEQ ID NO: 1741 - DNA, 60 bp, Artificial Sequence
  oligonucleotide probe
ctccgcctgaattaggtctctacccaacagtttgtaccttcgtaatactgtttgcaagat

SEQ ID NO: 1742 - DNA, 60 bp, Artificial Sequence
  oligonucleotide probe
ccccaggaaacttttcttggtgaaactggggccaccgtctcagtcctctcaataaatact

SEQ ID NO: 1743 - DNA, 60 bp, Artificial Sequence
  oligonucleotide probe
ggcaggtacagtaatttctttttcatgcttttctgaaagacaatcttcactgagtttaca

SEQ ID NO: 1744 - DNA, 60 bp, Artificial Sequence
  oligonucleotide probe
gcagtaggtatcacttgaacatcaagtgacattgatgctcctttaatgaatatactcatt

SEQ ID NO: 1745 - DNA, 60 bp, Artificial Sequence
  oligonucleotide probe
ggctgtcaacagagggtaaaattctgggctcctcccttttgccacttacccagctccaag

SEQ ID NO: 1746 - DNA, 60 bp, Artificial Sequence
  oligonucleotide probe
tttcttggcaaataactaaagttcttgtccatgtaatttctgtggtctctattcagcttg

SEQ ID NO: 1747 - DNA, 60 bp, Artificial Sequence
  oligonucleotide probe
ctgtgccttttccttgattaacgtagcaattatgatgagaattcttcacagtactgataa

SEQ ID NO: 1748 - DNA, 60 bp, Artificial Sequence
  oligonucleotide probe
cccacactgattccttgaactatgtaccatgcatgataactgaaaagttagctgctctat

SEQ ID NO: 1749 - DNA, 60 bp, Artificial Sequence
  oligonucleotide probe
tgcttagaggttttcaattttacacacttgctaatgggatgtaagaaccattagagaagc

SEQ ID NO: 1750 - DNA, 60 bp, Artificial Sequence
  oligonucleotide probe
gtaaaatttgttccatgtataaattggcattgccagtgaaaatcaacagcctcattcatg

SEQ ID NO: 1751 - DNA, 60 bp, Artificial Sequence
  oligonucleotide probe
gatgtctcagtgaaaccaaagttctgatgctgtttacatgtgtgtttttatcacatttct

SEQ ID NO: 1752 - DNA, 60 bp, Artificial Sequence
  oligonucleotide probe
gatcttctgactgtggaaaccaaccttcctctcactttcacacctttaatttaaatctat

SEQ ID NO: 1753 - DNA, 60 bp, Artificial Sequence
  oligonucleotide probe
aattcaacttgaagatatgtattccccctgaccttcaaaagatgttctgaggtggtcttg

SEQ ID NO: 1754 - DNA, 60 bp, Artificial Sequence
  oligonucleotide probe
cttctgttttgctcctaccttgtagttatttattgacttttcagagtggtggaaggtacg

SEQ ID NO: 1755 - DNA, 60 bp, Artificial Sequence
  oligonucleotide probe
gctcagcacttaacaactgacaccccaaaagacgtagaaaaggtttacaaaataatctag

SEQ ID NO: 1756 - DNA, 60 bp, Artificial Sequence
  oligonucleotide probe
ttgagagatttgtggaggaatgttttcaggctggaataatttccaaacaactccgtgatc

SEQ ID NO: 1757 - DNA, 60 bp, Artificial Sequence
  oligonucleotide probe
cattggtccattggaactaagccaaatgtagtatctctgatgttacttggttttacttaa

SEQ ID NO: 1758 - DNA, 60 bp, Artificial Sequence
  oligonucleotide probe
tatttagagagagaaagatatttttaaggtgaagcccatgattagctgtcctttaatgcc

SEQ ID NO: 1759 - DNA, 60 bp, Artificial Sequence
  oligonucleotide probe
tcaccactgatcagtttaattaatgtggcgttaatgtgacatcaaaggttattactgact

SEQ ID NO: 1760 - DNA, 60 bp, Artificial Sequence
  oligonucleotide probe
ccaacttgataaacgacacaatagagcttcgggagtctcaaacaataggtgaccagtgtg

SEQ ID NO: 1761 - DNA, 60 bp, Artificial Sequence
  oligonucleotide probe
gtggtctgtcttccatttctcagtatgtaactgaatgaccactacatggttttgtttttt

SEQ ID NO: 1762 - DNA, 60 bp, Artificial Sequence
  oligonucleotide probe
tggcaggagacctgtatattcagaagcaacgaaaggcccatgaataaagtttctgaccct

SEQ ID NO: 1763 - DNA, 60 bp, Artificial Sequence
  oligonucleotide probe
ctaagagcaaatggtgctgaatacttttttaagccacagttttaacttagttaaagcagc

SEQ ID NO: 1764 - DNA, 60 bp, Artificial Sequence
  oligonucleotide probe
ccgttttactgtagtgttgtatctgtgtcctgttgtcatttctgttaaatggtattaaac

SEQ ID NO: 1765 - DNA, 60 bp, Artificial Sequence
  oligonucleotide probe
gtggggtccattgacttaaagtccttctgaaatttgtgcttatttatgcttttccatttt

SEQ ID NO: 1766 - DNA, 60 bp, Artificial Sequence
  oligonucleotide probe
gcttgccttaaatcgtttgaactttgtcaactcaataattgagactattcctatcgaatg

SEQ ID NO: 1767 - DNA, 60 bp, Artificial Sequence
  oligonucleotide probe
ggattccatcctggtttgtatagtagtctcaagaatttgtgagtcttttctgaacagacg

SEQ ID NO: 1768 - DNA, 60 bp, Artificial Sequence
  oligonucleotide probe
gttcggggcctttcaatgtgtgactgatgacttcttcatgttctgtgtcattgtctctgt

SEQ ID NO: 1769 - DNA, 60 bp, Artificial Sequence
  oligonucleotide probe
ggtgaaggagacgatgaggttgaggaattttaaatcatttcttccattctatacttttgt

SEQ ID NO: 1770 - DNA, 60 bp, Artificial Sequence
  oligonucleotide probe
tgtacctttccactggcaggacattaccattgttagttctgtacactagctttttgtaaa

SEQ ID NO: 1771 - DNA, 60 bp, Artificial Sequence
  oligonucleotide probe
gctgtaaatactgagtactaactgagaattttgactttgcattctgtcagaatacttgtg

SEQ ID NO: 1772 - DNA, 60 bp, Artificial Sequence
  oligonucleotide probe
tgtgcctctagagcacttctaagtagagcttctctttaaccacaaccgtactgcaataaa

SEQ ID NO: 1773 - DNA, 60 bp, Artificial Sequence
  oligonucleotide probe
ccaagatgcaaattgcacatttcctagattttgtatctgcaaatatggataagggatggg

SEQ ID NO: 1774 - DNA, 60 bp, Artificial Sequence
  oligonucleotide probe
gaagcccttcagattcctagacttgtagagggcaacactttttattacaataaaaacata

SEQ ID NO: 1775 - DNA, 60 bp, Artificial Sequence
  oligonucleotide probe
ctacactcttgtgtaaaagtaaatgtttcttccggctctgaaggtcgagacagcgacaca

SEQ ID NO: 1776 - DNA, 60 bp, Artificial Sequence
  oligonucleotide probe
ggacatgtgcataagtcacagagacatatgttctgtaataagttggatttctacacaata

SEQ ID NO: 1777 - DNA, 60 bp, Artificial Sequence
  oligonucleotide probe
taaaaaacatcctgaccaaaaccaaccaaacaaaaacatcctcacagttccccagaaaaa

SEQ ID NO: 1778 - DNA, 60 bp, Artificial Sequence
  oligonucleotide probe
gctgttgactgtgtttacacattttcatgtaaaatgtcctgggaataaatgtaactgcat

SEQ ID NO: 1779 - DNA, 60 bp, Artificial Sequence
  oligonucleotide probe
cctgtaaaagggaaatgatggacagaggagaaaatgtggtggctagagttgttttgtaaa

SEQ ID NO: 1780 - DNA, 60 bp, Artificial Sequence
  oligonucleotide probe
ttactaacgttagattctcataggaccaggtttacagagcttaaaaccagggctggaatc

SEQ ID NO: 1781 - DNA, 60 bp, Artificial Sequence
  oligonucleotide probe
cccaagggtgattcctagaaacttcgacatcagatctgcccctttaatttactcttggct

SEQ ID NO: 1782 - DNA, 60 bp, Artificial Sequence
  oligonucleotide probe
gcaacaggacaaatgagcaaaagaaccttgaacgagaggtcattaaaggccttttgtgat

SEQ ID NO: 1783 - DNA, 60 bp, Artificial Sequence
  oligonucleotide probe
ttttctttggcgggtgctttgaggcctatttgtttttgaaaaacaaaacaaaacttgtgc

SEQ ID NO: 1784 - DNA, 60 bp, Artificial Sequence
  oligonucleotide probe
actgatgagattggcgtggctttcggcatcactattgactttgatacagtgaacaagacg

SEQ ID NO: 1785 - DNA, 60 bp, Artificial Sequence
  oligonucleotide probe
ggcggcattctgtcatttacacatgttgttccaattaaaaagcaaatatactcaagtgaa

SEQ ID NO: 1786 - DNA, 60 bp, Artificial Sequence
  oligonucleotide probe
ctttcaaaattgaggaaaataaaccagaaaatgccaaaagtactgttttagcagtgcacg

SEQ ID NO: 1787 - DNA, 60 bp, Artificial Sequence
  oligonucleotide probe
agttttacactgtactgtactgtaggggtgctgaataaagttgaggtgtgagtttgtttc

SEQ ID NO: 1788 - DNA, 60 bp, Artificial Sequence
  oligonucleotide probe
tctcatgtgacctcacagtgttgctactgttcctaataaagttttaagttatgagaaccc

SEQ ID NO: 1789 - DNA, 60 bp, Artificial Sequence
  oligonucleotide probe
gcttttgcttgtagccccctaaagatattactggcacataataaatatgaaagtcctttg

SEQ ID NO: 1790 - DNA, 60 bp, Artificial Sequence
  oligonucleotide probe
caggtactactttctaattcatggtagaatggctaagtaattttctctacatggtactgt

SEQ ID NO: 1791 - DNA, 60 bp, Artificial Sequence
  oligonucleotide probe
gcagattatggaatagttgcagatttatttaaggtggttcctgaaatgacagaaatactg

SEQ ID NO: 1792 - DNA, 60 bp, Artificial Sequence
  oligonucleotide probe
agcagaagtgttttgtgaccctattgctggagagatgtgaataaatttatataccagagg

SEQ ID NO: 1793 - DNA, 60 bp, Artificial Sequence
  oligonucleotide probe
ttgtttgccaggacatgcaataaaatttaaaaataaatgaaaaaagtcgtacgcggccgc

SEQ ID NO: 1794 - DNA, 60 bp, Artificial Sequence
  oligonucleotide probe
tattgtcctggggagatctacttctaggtgatcaaaagacattgttaggaaaatgtcttg

SEQ ID NO: 1795 - DNA, 60 bp, Artificial Sequence
  oligonucleotide probe
aaggtttacctgcctgtagacaattctgtcatacctacagaactgctggtacttccagac

SEQ ID NO: 1796 - DNA, 60 bp, Artificial Sequence
  oligonucleotide probe
ggaggaggaagacaactgaacatttgtataaaacgtaaaaagtttactgattggggtggg

SEQ ID NO: 1797 - DNA, 60 bp, Artificial Sequence
  oligonucleotide probe
cctttgctatgaagaacagtgtttcatatgacccattttttcctagtgcatgagaaataa

SEQ ID NO: 1798 - DNA, 60 bp, Artificial Sequence
  oligonucleotide probe
aattgggctagaggaagccttgtcatcagatactgaccatagcatgtgacactcagactt

SEQ ID NO: 1799 - DNA, 60 bp, Artificial Sequence
  oligonucleotide probe
aaagaggtgtttgcactttgtaatgatacctttcagttcaaataaaaggaccacatcgtc

SEQ ID NO: 1800 - DNA, 60 bp, Artificial Sequence
  oligonucleotide probe
tgtgaagtaaaaggctggccatagttgacacccattaatctagagagaccttatctgaaa

SEQ ID NO: 1801 - DNA, 60 bp, Artificial Sequence
  oligonucleotide probe
ccagagagagttaaatgggaactagtatatgtgaagaactctttctgtattgctttctat

SEQ ID NO: 1802 - DNA, 60 bp, Artificial Sequence
  oligonucleotide probe
ctctgttatgttaccatgcatttctaaaaccactccagctgttaatctgtttgcgcctcc

SEQ ID NO: 1803 - DNA, 60 bp, Artificial Sequence
  oligonucleotide probe
cagaggtcttcgtgttcacatttaaaactagataaatgacctcattttcttgagcttgaa

SEQ ID NO: 1804 - DNA, 60 bp, Artificial Sequence
  oligonucleotide probe
catgtcatgaatttttattagagcctaaacctacagattgaaagcctgctgcaaactttt

SEQ ID NO: 1805 - DNA, 60 bp, Artificial Sequence
  oligonucleotide probe
gttacctgttcacacaagcttattgatgagtctcatgttaatgtcttgtttgtatgaagt

SEQ ID NO: 1806 - DNA, 60 bp, Artificial Sequence
  oligonucleotide probe
gccaccactgtcatttattgttgttatgtcttttcttggcaatagccttgtgtatatttg

SEQ ID NO: 1807 - DNA, 60 bp, Artificial Sequence
  oligonucleotide probe
gtgccaatattttcgttaatgaaatgttgaatgtcgcattacagtctgatcagaattctc

SEQ ID NO: 1808 - DNA, 60 bp, Artificial Sequence
  oligonucleotide probe
tttctgatcagcctgggagagccccttcagcgttcagccaggattccaaggtggagacaa

SEQ ID NO: 1809 - DNA, 60 bp, Artificial Sequence
  oligonucleotide probe
gaatgtatgaatagactatataatatgtcccgagaaactttgttactctcagctctgttg

SEQ ID NO: 1810 - DNA, 60 bp, Artificial Sequence
  oligonucleotide probe
atcttaagagtgtacatttggaggtggaaagattgttcagtttaccctaaagactttgat

SEQ ID NO: 1811 - DNA, 60 bp, Artificial Sequence
  oligonucleotide probe
ccatttctactttgaagtcattatcgatgaaagtgatgtatcttcacctaccattttcct

SEQ ID NO: 1812 - DNA, 60 bp, Artificial Sequence
  oligonucleotide probe
gttcccagggtaaacctcagttgcttgtactttcagtaataaatatatcctggcagtttc

SEQ ID NO: 1813 - DNA, 60 bp, Artificial Sequence
  oligonucleotide probe
aaacggcattggctttttccatgttaataaattggtgcttacaaaacattgcttcagtgt

SEQ ID NO: 1814 - DNA, 60 bp, Artificial Sequence
  oligonucleotide probe
atggaagagtcaagcaagcaacagtggctgttttggtcttgagtgtcgagactcatatag

SEQ ID NO: 1815 - DNA, 60 bp, Artificial Sequence
  oligonucleotide probe
cttttcagcctacgcctacgacatcgaggatgagttatttccaaatttctggacatcagc

SEQ ID NO: 1816 - DNA, 60 bp, Artificial Sequence
  oligonucleotide probe
aagctgtaaaatgatagcctctggcctttatggtattgggaaacttgaagtgtttaatga

SEQ ID NO: 1817 - DNA, 60 bp, Artificial Sequence
  oligonucleotide probe
tggtctaactcctgcactacagtggacacccttcctaataaaactcaaaggttcaaaaaa

SEQ ID NO: 1818 - DNA, 60 bp, Artificial Sequence
  oligonucleotide probe
tggtgtcctccctcctacagcaattccttgcacatataaacaaaaaccattttgtttctg

SEQ ID NO: 1819 - DNA, 60 bp, Artificial Sequence
  oligonucleotide probe
atgattgaacccttcttggggacctggaaactggtctccagtgaaaacttcgagaattac

SEQ ID NO: 1820 - DNA, 60 bp, Artificial Sequence
  oligonucleotide probe
agaattgtggcctagtcaccgttaaccctttgggattttgagatttccaattaggccctg

SEQ ID NO: 1821 - DNA, 60 bp, Artificial Sequence
  oligonucleotide probe
gaagaagagcgtatgattttgctacagggtaaaattctctcagagatgaagaaagcaacc

SEQ ID NO: 1822 - DNA, 60 bp, Artificial Sequence
  oligonucleotide probe
agaaaggattttttctttttcttttggcctcttctaggtagctgcaatgctttcttaagg

SEQ ID NO: 1823 - DNA, 60 bp, Artificial Sequence
  oligonucleotide probe
accggtgatggagtgctcttgagctcctaataaaagcccatatgtgtttacatcaaaaaa

SEQ ID NO: 1824 - DNA, 60 bp, Artificial Sequence
  oligonucleotide probe
agtgacaggccttgtgttatttctttataaccgtctggatgaatctgtctgtggggaacg

SEQ ID NO: 1825 - DNA, 60 bp, Artificial Sequence
  oligonucleotide probe
cagcttccctgctcatccttgagttaaatgtagacttgtaaaggaagaaataaactaatt

SEQ ID NO: 1826 - DNA, 60 bp, Artificial Sequence
  oligonucleotide probe
aactaggcaagctaatgatgataagggaaaagctctcagggaattgatgtgttgttgcta

SEQ ID NO: 1827 - DNA, 60 bp, Artificial Sequence
  oligonucleotide probe
tcagtaatggagtagtattcaccagttttatcttttgaaaggcacagtctaaatcgaacc

SEQ ID NO: 1828 - DNA, 60 bp, Artificial Sequence
  oligonucleotide probe
aagtgactgacagtggactgttcattctgagcacccgattaaagttttgacctgtttgcg

SEQ ID NO: 1829 - DNA, 60 bp, Artificial Sequence
  oligonucleotide probe
ctattcacattttgaccaaccagtgcttttagaagaatgctttcctttttcctacacaga

SEQ ID NO: 1830 - DNA, 60 bp, Artificial Sequence
  oligonucleotide probe
gttcatttgaaaacaacacatttacctatcttgatggcttagtttttaatggctggctac

SEQ ID NO: 1831 - DNA, 60 bp, Artificial Sequence
  oligonucleotide probe
gctctctgtagatcagtggatattaggtttcaatttctgttttctttgatgaagctttca

SEQ ID NO: 1832 - DNA, 60 bp, Artificial Sequence
  oligonucleotide probe
ggagcctatatcactcgtgtaagttggtatttgggccttttatatttttctaaaaatgtg

SEQ ID NO: 1833 - DNA, 60 bp, Artificial Sequence
  oligonucleotide probe
ggttgttctgttagtatcatttcggtaattttgctatatttgtgtccaaggaagtaagag

SEQ ID NO: 1834 - DNA, 60 bp, Artificial Sequence
  oligonucleotide probe
ctacataacgtgtttgtaagcatccaaactgttagctatttggaagataaccaaattagg

SEQ ID NO: 1835 - DNA, 60 bp, Artificial Sequence
  oligonucleotide probe
gcattaacatgcgtggaaaatgctaacagttcttgctgtggaaataataaatgtggattt

SEQ ID NO: 1836 - DNA, 60 bp, Artificial Sequence
  oligonucleotide probe
cgcaagttttatactctaatatttatatggcttttttcttcgaaaattaaaaataaaaaa

SEQ ID NO: 1837 - DNA, 60 bp, Artificial Sequence
  oligonucleotide probe
acggccaagcctgtatgtaaagacaaggaaccaaagaatccaggagctcattaatgcagt

SEQ ID NO: 1838 - DNA, 60 bp, Artificial Sequence
  oligonucleotide probe
ctccagatacatctctctgctgacttcatagcctatttaaaaatatatttacagattccc

SEQ ID NO: 1839 - DNA, 60 bp, Artificial Sequence
  oligonucleotide probe
gtctttgttgacagggagagtttttactgaaaagatcctttgtacctatttcacacttta

SEQ ID NO: 1840 - DNA, 60 bp, Artificial Sequence
  oligonucleotide probe
gaccctcatgtttgggatatttggtgccaatttatttacaacactttcatttttatgcca

SEQ ID NO: 1841 - DNA, 60 bp, Artificial Sequence
  oligonucleotide probe
gatttgtttactccacagcctgtattcatggaacactgtgttaaatactgttttctaaga

SEQ ID NO: 1842 - DNA, 60 bp, Artificial Sequence
  oligonucleotide probe
caggtctatttcacatcctatgaatgtatgtaaataaactgtacataggtacgcatctac

SEQ ID NO: 1843 - DNA, 60 bp, Artificial Sequence
  oligonucleotide probe
acagatctcttgtaagcatgcacactatactcagcttgatgtaatttgggagattgggtt

SEQ ID NO: 1844 - DNA, 60 bp, Artificial Sequence
  oligonucleotide probe
tacttgtgactgtgttctatttgtaaaactcagggtaataaaggagtttcagatgttggc

SEQ ID NO: 1845 - DNA, 60 bp, Artificial Sequence
  oligonucleotide probe
gagactaatttcacatcttattttgcagtcatttacagtgaaacaatgttccagctagct

SEQ ID NO: 1846 - DNA, 60 bp, Artificial Sequence
  oligonucleotide probe
aagttcactaaaggcattggtgttagatttaatcgacttgtaatcattgtacccatgggg

SEQ ID NO: 1847 - DNA, 60 bp, Artificial Sequence
  oligonucleotide probe
cttgaagaggagaatgctaaagccgacagagagtacgaagaattcatgtctgaagatctc

SEQ ID NO: 1848 - DNA, 60 bp, Artificial Sequence
  oligonucleotide probe
cacaggacttcatattgttgtgctttatggcaaattcccagtattataatccacactttc

SEQ ID NO: 1849 - DNA, 60 bp, Artificial Sequence
  oligonucleotide probe
taataaaaagtaatgcgtcttgggaacacccaaggttcttgctcatgtggcagcatagcc

SEQ ID NO: 1850 - DNA, 60 bp, Artificial Sequence
  oligonucleotide probe
cataaaatgcacaaaccgcgtctgtatttgatatgtgaaattcttctataagcctatctg

SEQ ID NO: 1851 - DNA, 60 bp, Artificial Sequence
  oligonucleotide probe
gaacctagtgtatttgcttaccgataaggtgatgctaaattctgataacattcgaaaaga

SEQ ID NO: 1852 - DNA, 60 bp, Artificial Sequence
  oligonucleotide probe
ctttcctgcatcttagcccagtttttacgaagaccccttaatcatgctttcttaagagtt

SEQ ID NO: 1853 - DNA, 60 bp, Artificial Sequence
  oligonucleotide probe
gtgggaaacaaacacaccctgacaataaatgaaactaaaacttgagtttgcctttttaac

SEQ ID NO: 1854 - DNA, 60 bp, Artificial Sequence
  oligonucleotide probe
tatattgtccttttttaccgaagacatgcatactccatcgatgttgtattcacagtggct

SEQ ID NO: 1855 - DNA, 60 bp, Artificial Sequence
  oligonucleotide probe
tgagtgataggtactactgttcagacctgtttgtgagtttagatgtacaaagatctcggc

SEQ ID NO: 1856 - DNA, 60 bp, Artificial Sequence
  oligonucleotide probe
ctccatgaaataccactgaaaaaaggtgaaggtgctcagttataacctgcgaatccatga

SEQ ID NO: 1857 - DNA, 60 bp, Artificial Sequence
  oligonucleotide probe
gactgttttgttttcccctttagacaaagagcaacttagaagtatttgcaaacttttcca

SEQ ID NO: 1858 - DNA, 60 bp, Artificial Sequence
  oligonucleotide probe
gttgaatgactccttccttttcccccaccccagaaattcactgtgaaatttcttgtttgg

SEQ ID NO: 1859 - DNA, 60 bp, Artificial Sequence
  oligonucleotide probe
cacgagatccagaaccaaagaatcaacagggcacaagatctatatatatttttaagagaa

SEQ ID NO: 1860 - DNA, 60 bp, Artificial Sequence
  oligonucleotide probe
tgaaagccatttgtgagtgcttggagtgttcttcctaataaacacacttcatgtaaaaaa

SEQ ID NO: 1861 - DNA, 60 bp, Artificial Sequence
  oligonucleotide probe
tattgtgtgtatcagggataccctccagcctaacgataggctctgaattactcagtctct

SEQ ID NO: 1862 - DNA, 60 bp, Artificial Sequence
  oligonucleotide probe
gatctcgtgttctttcctggatcacagacattaacaaaaaagttaatttatgtgacttgg

SEQ ID NO: 1863 - DNA, 60 bp, Artificial Sequence
  oligonucleotide probe
tgagaaaacccaacaggaactagcttggttgagtccttagggtagatggcaagaaacctt

SEQ ID NO: 1864 - DNA, 60 bp, Artificial Sequence
  oligonucleotide probe
tgtccctcttctgagatggactttaattgctgttaaataaaattgtgtacctgtcctcgc

SEQ ID NO: 1865 - DNA, 60 bp, Artificial Sequence
  oligonucleotide probe
ctgtttttgtttagttcagatctattttgtttgtggtttggaaactttcagaccgaacag

SEQ ID NO: 1866 - DNA, 60 bp, Artificial Sequence
  oligonucleotide probe
ggctctcagtattgtgacagtacatttttacaaggttgtttttctaccaccgtattttta

SEQ ID NO: 1867 - DNA, 60 bp, Artificial Sequence
  oligonucleotide probe
cacctgctgggacatgagcatcttgggatatctctttaacactcaagtagcaattaaagt

SEQ ID NO: 1868 - DNA, 60 bp, Artificial Sequence
  oligonucleotide probe
cattgtcgatcatgaagccttgagagtaaggaatccacagaaatatttgttcagtcatgt

SEQ ID NO: 1869 - DNA, 60 bp, Artificial Sequence
  oligonucleotide probe
tgcctacccgactcttttaaagcactttatatctctttaaatacaaaggaaattggaagg

SEQ ID NO: 1870 - DNA, 60 bp, Artificial Sequence
  oligonucleotide probe
aaacctttgcaaaggtcggttctcttcactgaacagcactatagcgaacgaagactgttc

SEQ ID NO: 1871 - DNA, 60 bp, Artificial Sequence
  oligonucleotide probe
atcccagactctgataaaacgatacttcggacaagtttattcaatgcagtgttgtagaaa

SEQ ID NO: 1872 - DNA, 60 bp, Artificial Sequence
  oligonucleotide probe
cattgttgtggtattttgtatggacaaatgtcatgagactctttgcaacttgagtgtaaa

SEQ ID NO: 1873 - DNA, 60 bp, Artificial Sequence
  oligonucleotide probe
atgttgaaatcaaggaacgagagaactgccctacagagagtcttaacagccagacagtac

SEQ ID NO: 1874 - DNA, 60 bp, Artificial Sequence
  oligonucleotide probe
ggactggggagatacttggtgtttgttctattagtgttatatgaacagaaaatacatctt

SEQ ID NO: 1875 - DNA, 60 bp, Artificial Sequence
  oligonucleotide probe
cagttctgttaaaatatgcctctggttaaaactatctggatcaattaggaaaagtgcaga

SEQ ID NO: 1876 - DNA, 60 bp, Artificial Sequence
  oligonucleotide probe
aattctgcaaattgtctcacagtggaatgaggaaatgagttagagatcacagccagttca

SEQ ID NO: 1877 - DNA, 60 bp, Artificial Sequence
  oligonucleotide probe
gtggctctgggattttatcgcctgtggatataataaagtgtctatttaaagacattttca

SEQ ID NO: 1878 - DNA, 60 bp, Artificial Sequence
  oligonucleotide probe
ccagacaacaaaaggcttgaaaacatgtaaattaagggagagtaaaattgcatgcagttt

SEQ ID NO: 1879 - DNA, 60 bp, Artificial Sequence
  oligonucleotide probe
ccctccttgggttatctgttagattgttttgattgcatcaaaatgtatttcatctgttac

SEQ ID NO: 1880 - DNA, 60 bp, Artificial Sequence
  oligonucleotide probe
ggttagaatggttacattatttattcagctagtgtacttctggacagtctgatcgtctct

SEQ ID NO: 1881 - DNA, 60 bp, Artificial Sequence
  oligonucleotide probe
caagctatcttggcaaagtgtcaaactagaactctgtgatggttatggcaacaaatggga

SEQ ID NO: 1882 - DNA, 60 bp, Artificial Sequence
  oligonucleotide probe
aaggtattcttcagtgaaggagcccaagccaacagacatgcacctttagtggaatttgag

SEQ ID NO: 1883 - DNA, 60 bp, Artificial Sequence
  oligonucleotide probe
ccttatttgggaagcgtaactgcttttagcatatgggagtattttttcacattttctttg

SEQ ID NO: 1884 - DNA, 60 bp, Artificial Sequence
  oligonucleotide probe
tggttttgtggctttgctctattgtgacgtggacttaagcaataaggaagtgatgaaggg

SEQ ID NO: 1885 - DNA, 60 bp, Artificial Sequence
  oligonucleotide probe
gcaccccaagtcatggggcgacctccaataaatcactgaaatagtgtggattccaaaaaa

SEQ ID NO: 1886 - DNA, 60 bp, Artificial Sequence
  oligonucleotide probe
ccaagaagctgaagaagctctttgaagcccaggagaaactgtacaaggagtatctgcaaa

SEQ ID NO: 1887 - DNA, 60 bp, Artificial Sequence
  oligonucleotide probe
gagcagtttataagccacgtgatgactgataatgtctatagagtatctctgtagtaaaat

SEQ ID NO: 1888 - DNA, 60 bp, Artificial Sequence
  oligonucleotide probe
ctctgtatgttaagtgggaaaagaaagggttagtaatgaatgatgatagttgggtttgga

SEQ ID NO: 1889 - DNA, 60 bp, Artificial Sequence
  oligonucleotide probe
tgtggaaagctttgcagaatccacataaccttcttgacttcggaagccttacactaggca

SEQ ID NO: 1890 - DNA, 60 bp, Artificial Sequence
  oligonucleotide probe
ctccgcactgtgtgtacagtattggacaaaggatttattcattttgttgcattattttga

SEQ ID NO: 1891 - DNA, 60 bp, Artificial Sequence
  oligonucleotide probe
tgggcagtttgttcaagataaaaaagttgaaccatggtgaacccaactctcacctcccac

SEQ ID NO: 1892 - DNA, 60 bp, Artificial Sequence
  oligonucleotide probe
gcctttttccccactactttaaatccttgtgaataaatgttcttcagtgttttaggaaga

SEQ ID NO: 1893 - DNA, 60 bp, Artificial Sequence
  oligonucleotide probe
gggaaaatctgtttcttgttctgttacaactttctgaatgttctgaagtcttttagaagg

SEQ ID NO: 1894 - DNA, 60 bp, Artificial Sequence
  oligonucleotide probe
ctcgactgaatacagaaatggcttttcttcttatccacgatcattctgtattttgaagtt

SEQ ID NO: 1895 - DNA, 60 bp, Artificial Sequence
  oligonucleotide probe
ctagcttcctcatgaactgacataaccctgatcagtttccttgattattgtataaatgtt

SEQ ID NO: 1896 - DNA, 60 bp, Artificial Sequence
  oligonucleotide probe
gactagactgatgtcccagaataggcatatattaagattttgaggttatagaataggcat

SEQ ID NO: 1897 - DNA, 60 bp, Artificial Sequence
  oligonucleotide probe
cagtcgagacttttaaccctgtaataatgtacagagaagttgttggtgttcgaagactcc

SEQ ID NO: 1898 - DNA, 60 bp, Artificial Sequence
  oligonucleotide probe
tactggatactgtaactatgagaataaaatatagaagtgacagacgtctacagcattcca

SEQ ID NO: 1899 - DNA, 60 bp, Artificial Sequence
  oligonucleotide probe
acagattcagccaaggctattgtgtgtctgtggaaagaaagctggaccaaaatagctgct

SEQ ID NO: 1900 - DNA, 60 bp, Artificial Sequence
  oligonucleotide probe
catggtggctgtctcttcatctagggcagaaatctatagattcttttgaaatgtaaataa

SEQ ID NO: 1901 - DNA, 60 bp, Artificial Sequence
  oligonucleotide probe
acttgtacctataaacagcctgaagtggctcagaaacagaaaaggtgccaggatcttctc

SEQ ID NO: 1902 - DNA, 60 bp, Artificial Sequence
  oligonucleotide probe
gaagatgcttgaaaaactcaaccaaatcccagttcaactcagactttgcacatatattta

SEQ ID NO: 1903 - DNA, 60 bp, Artificial Sequence
  oligonucleotide probe
gatggcttcactttcagcacacgagattggaatgtgaataaaagtaatttttgtcctttt

SEQ ID NO: 1904 - DNA, 60 bp, Artificial Sequence
  oligonucleotide probe
gaagtggaccaaattttatgcaaaagattggagcgatgaagtattacctttggctttttt

SEQ ID NO: 1905 - DNA, 60 bp, Artificial Sequence
  oligonucleotide probe
tttggcattgccttgtaattagggacttcatgagcaacaccttaacgagggtaccacagt

SEQ ID NO: 1906 - DNA, 60 bp, Artificial Sequence
  oligonucleotide probe
cagacatttaaatcaataaatagttgtgccctagactgaaagttaatgtttaggagaggg

SEQ ID NO: 1907 - DNA, 60 bp, Artificial Sequence
  oligonucleotide probe
agcagccagggacttgctattgatgaattttacattaaatagtcctgttgccttacctgt

SEQ ID NO: 1908 - DNA, 60 bp, Artificial Sequence
  oligonucleotide probe
ccagaagggttttgttttaagtaagctaggaatgagttcatatgttagtgtaaggaacaa

SEQ ID NO: 1909 - DNA, 60 bp, Artificial Sequence
  oligonucleotide probe
cactggagagttttaaaccttagttttaagaggaatgacatggtatttttggtgtgagaa

SEQ ID NO: 1910 - DNA, 60 bp, Artificial Sequence
  oligonucleotide probe
cacatggttcatggctatggagacttttgctgtcaataaatagtttggtttgaggattgc

SEQ ID NO: 1911 - DNA, 60 bp, Artificial Sequence
  oligonucleotide probe
ctgacaacccagtgccctatcgctgtcgagaacctggaactgtttcccatctggagagtg

SEQ ID NO: 1912 - DNA, 60 bp, Artificial Sequence
  oligonucleotide probe
ccacaacctgaatattttctgagttttatgggattttctgtgacagtgaagtttaggtta

SEQ ID NO: 1913 - DNA, 60 bp, Artificial Sequence
  oligonucleotide probe
tacctagggtcatgctctttgaatccgtggaattggaaagatggacagaaatcaggagct

SEQ ID NO: 1914 - DNA, 60 bp, Artificial Sequence
  oligonucleotide probe
ccaggaaccacacttcagtgaccacttcatgtgaaagacatttctgaagctactgaaggt

SEQ ID NO: 1915 - DNA, 60 bp, Artificial Sequence
  oligonucleotide probe
aaactaagatctcctggtagtttttgttcacaatttagtagacgatgcaacaagtaccta

SEQ ID NO: 1916 - DNA, 60 bp, Artificial Sequence
  oligonucleotide probe
agattagagtgctgcgatttttgtaagtgttgtaaagttgtgtgaagagaaacagagaaa

SEQ ID NO: 1917 - DNA, 60 bp, Artificial Sequence
  oligonucleotide probe
gcaatcgatttgtaacgcactttcgctaattgggagttcagaattaaactttaataaagc

SEQ ID NO: 1918 - DNA, 60 bp, Artificial Sequence
  oligonucleotide probe
tctgggttaaccattcattccaagatggaaagtaaacatgaatcagtaatgttgccttta

SEQ ID NO: 1919 - DNA, 60 bp, Artificial Sequence
  oligonucleotide probe
catcagagttagaatagggatttgtttttcatcctcggtgataaaaactaaagccacaca

SEQ ID NO: 1920 - DNA, 60 bp, Artificial Sequence
  oligonucleotide probe
cagctgatcctgtatattcatgagagtatctatcaattttgggctaacatgccttgattc

SEQ ID NO: 1921 - DNA, 60 bp, Artificial Sequence
  oligonucleotide probe
tttttgggaatgggttgtagttcagaacacttgtctaatatgggcaatgctctgggttcc

SEQ ID NO: 1922 - DNA, 60 bp, Artificial Sequence
  oligonucleotide probe
caatttctcattaaaatgagagctggtgttgatgaaagctgagagtactttctatcctat

SEQ ID NO: 1923 - DNA, 60 bp, Artificial Sequence
  oligonucleotide probe
gggggacagaaactaaatagttcagggcatcaaaatggatgtatttttaaaagctttgta

SEQ ID NO: 1924 - DNA, 60 bp, Artificial Sequence
  oligonucleotide probe
ttcaagcgttcctagttcagtagggaatgaaatccagtaagtagtcctggtatctgcagg

SEQ ID NO: 1925 - DNA, 60 bp, Artificial Sequence
  oligonucleotide probe
acgacgggcgggtttctgtgtctttttggaacagtgggaatcaatgtttcttctggttaa

SEQ ID NO: 1926 - DNA, 60 bp, Artificial Sequence
  oligonucleotide probe
ggccagatgtcacaggaagggatggttgaatgctgtattttgtaaagaataaaatatttt

SEQ ID NO: 1927 - DNA, 60 bp, Artificial Sequence
  oligonucleotide probe
taaggtcgaagtgaaaccagtcacagggggttaccccgcagctgcagagaatcttcccca

SEQ ID NO: 1928 - DNA, 60 bp, Artificial Sequence
  oligonucleotide probe
cagagtgttgagtgcattcagacagacaagaactacgatattttgtttaaacagcttttt

SEQ ID NO: 1929 - DNA, 60 bp, Artificial Sequence
  oligonucleotide probe
tcctttcaatttgtcaaatgttgaatgttatttttaaaatattataagccatttaataca

SEQ ID NO: 1930 - DNA, 60 bp, Artificial Sequence
  oligonucleotide probe
ttgacattctttcctggaccgggaggatttctttattttgccctttggaacgacaaggca

SEQ ID NO: 1931 - DNA, 60 bp, Artificial Sequence
  oligonucleotide probe
gtagctgtgctgtcttagttcagttctgtagaactgaaactttgcagtttttattttgat

SEQ ID NO: 1932 - DNA, 60 bp, Artificial Sequence
  oligonucleotide probe
ttccactccagacttggggcttaaagtaccattttctgttatcaataaagtgctgaatcc

SEQ ID NO: 1933 - DNA, 60 bp, Artificial Sequence
  oligonucleotide probe
ctatcttggaactataccagataaaatcacttctgtttgttcagtttttcactgctagca

SEQ ID NO: 1934 - DNA, 60 bp, Artificial Sequence
  oligonucleotide probe
cctgaaggactgggttcaggaaaccatggccaagaactagttcagggctcactagaaggc

SEQ ID NO: 1935 - DNA, 60 bp, Artificial Sequence
  oligonucleotide probe
ggaagagaagaccactataataccatttacttttcttttcgaggttctatttatctgcag

SEQ ID NO: 1936 - DNA, 60 bp, Artificial Sequence
  oligonucleotide probe
catacaaatatacaaatgcacacacctacactctctagctttaatctttttgctcaacct

SEQ ID NO: 1937 - DNA, 60 bp, Artificial Sequence
  oligonucleotide probe
gccaaggatcacattctattcctgaaattccagaactagtgaaattaaggaaagaatact

SEQ ID NO: 1938 - DNA, 60 bp, Artificial Sequence
  oligonucleotide probe
caaagagctgtcataggttgttaagaaaaagaaacaaagacagtagaagtccattatctc

SEQ ID NO: 1939 - DNA, 60 bp, Artificial Sequence
  oligonucleotide probe
aacacacgtaaggtatccagtggatttctctctcctgaaatttcaacatccctaattcta

SEQ ID NO: 1940 - DNA, 60 bp, Artificial Sequence
  oligonucleotide probe
ttgcgggtcactcacccacctctctctgttcttgatgaggaatgtactgctttgttcatg

SEQ ID NO: 1941 - DNA, 60 bp, Artificial Sequence
  oligonucleotide probe
gactcttagttcatttggactactgccatcattgagaatctacttatgattttgagcatt

SEQ ID NO: 1942 - DNA, 60 bp, Artificial Sequence
  oligonucleotide probe
taatccaccgactgctcgtaaattcatctggacaaaccataaattcaatgtgtctgccac

SEQ ID NO: 1943 - DNA, 60 bp, Artificial Sequence
  oligonucleotide probe
tggctggatcaggagctggcattggcacagtgtttggtagcttgattattggctatgcca

SEQ ID NO: 1944 - DNA, 60 bp, Artificial Sequence
  oligonucleotide probe
gttttcttacctgcaggtcacaagtgtaatactattctacttcttcgtacattttgtagt

SEQ ID NO: 1945 - DNA, 60 bp, Artificial Sequence
  oligonucleotide probe
aaataatagagcgagcacccattccaaagctttattaccagtgacgttgttgcatgtttg

SEQ ID NO: 1946 - DNA, 60 bp, Artificial Sequence
  oligonucleotide probe
cggcaactttctgaacatcccacagcagtctcagtcctggttcctctgattaagatcaac

SEQ ID NO: 1947 - DNA, 60 bp, Artificial Sequence
  oligonucleotide probe
cagaagccagatgtgttttagatcttacttcagtacgctaccaataaaaatgcaccacac

SEQ ID NO: 1948 - DNA, 60 bp, Artificial Sequence
  oligonucleotide probe
tttcctttgcattcacctttcaaacttagtttttaccaaagaccaactgaacgtgaccaa

SEQ ID NO: 1949 - DNA, 60 bp, Artificial Sequence
  oligonucleotide probe
ctgggatacaatcctgtatagttcccatttttatgtaatcctcaagaaataaaaggaagc

SEQ ID NO: 1950 - DNA, 60 bp, Artificial Sequence
  oligonucleotide probe
cctttctcacctggaagacagctcctcctcgaaggtttacaaaatgtgtgatgcctttgt

SEQ ID NO: 1951 - DNA, 60 bp, Artificial Sequence
  oligonucleotide probe
gcagactgtacttgtaaagaggattgtgatcttaccttccaattggatcttttaaaaaag

SEQ ID NO: 1952 - DNA, 60 bp, Artificial Sequence
  oligonucleotide probe
tttagatgcattgagactcgacattcctcggtatttattgtctgtccccacctacgacct

SEQ ID NO: 1953 - DNA, 60 bp, Artificial Sequence
  oligonucleotide probe
gatctcaagagaaaaatgtgatgtgttcatatttgttgtatgcctaaaggaaatctgagc

SEQ ID NO: 1954 - DNA, 60 bp, Artificial Sequence
  oligonucleotide probe
tgttctccttcatgtaagtgcctgttcagagtctcaaagtttcaaaatgccaaatatttt

SEQ ID NO: 1955 - DNA, 60 bp, Artificial Sequence
  oligonucleotide probe
acagaaatgtagttcgcagtaagcatttgcacggttacttaggtggaaacttttcttgag

SEQ ID NO: 1956 - DNA, 60 bp, Artificial Sequence
  oligonucleotide probe
ttgtacagaatcgaactctgcacttctctctcctttacgagacgaaaaggaaaagcaaac

SEQ ID NO: 1957 - DNA, 60 bp, Artificial Sequence
  oligonucleotide probe
agagaaggggcattacttaaaggactctgtcacagatattaaagttcccaagacaaaaaa

SEQ ID NO: 1958 - DNA, 60 bp, Artificial Sequence
  oligonucleotide probe
attctgacttgctgggaagttaaaactctaggagagaaacagcacagaatccttccctcc

SEQ ID NO: 1959 - DNA, 60 bp, Artificial Sequence
  oligonucleotide probe
ccaagtctggctgaattaaggtcttggcatgtattattttagtggtctaatttctcttat

SEQ ID NO: 1960 - DNA, 60 bp, Artificial Sequence
  oligonucleotide probe
aagagatgtgtccttactcattttggagcaggtacagtgggcaagaggtcagaccacagc

SEQ ID NO: 1961 - DNA, 60 bp, Artificial Sequence
  oligonucleotide probe
ctctgtgactgctgctttgcatgaaaattcatttgatgtatattgggaaataatgagaac

SEQ ID NO: 1962 - DNA, 60 bp, Artificial Sequence
  oligonucleotide probe
tggtcctcagagtaagcagctaagccccatttggttctcaataaagtgtgaatcacattt

SEQ ID NO: 1963 - DNA, 60 bp, Artificial Sequence
  oligonucleotide probe
ggtcaaacgacttagaaataaaaggagaaggaaacatcagattcagatacacagttcttc

SEQ ID NO: 1964 - DNA, 60 bp, Artificial Sequence
  oligonucleotide probe
aacacagatttttacactaatatatggacctagcttaaggcgattttaatcccctgtcct

SEQ ID NO: 1965 - DNA, 60 bp, Artificial Sequence
  oligonucleotide probe
ctcactttgtcccaacaattcagattgcctagaaatacctttctcttacctgtttgttat

SEQ ID NO: 1966 - DNA, 60 bp, Artificial Sequence
  oligonucleotide probe
ctctgattttataccaactgtgtggactaagatgcatcaaaataaacatcagagtaactc

SEQ ID NO: 1967 - DNA, 60 bp, Artificial Sequence
  oligonucleotide probe
ataaataaatctcaaagccttcgtcagtcccacagttttctcacggtcggagcatcagga

SEQ ID NO: 1968 - DNA, 60 bp, Artificial Sequence
  oligonucleotide probe
gagacaagcaatctgtgaaatggtgctatagatttaccattccttgttattactaatcgt

SEQ ID NO: 1969 - DNA, 60 bp, Artificial Sequence
  oligonucleotide probe
tgacttggctatatttatagctgtcattattctcagtggagaccgcccaggcttgctgaa

SEQ ID NO: 1970 - DNA, 60 bp, Artificial Sequence
  oligonucleotide probe
aagtatggtgtccatgagatcatctacacgatgctggcctccctgatgaataaagatgga

SEQ ID NO: 1971 - DNA, 60 bp, Artificial Sequence
  oligonucleotide probe
cagatcctccgtacacagaattaactaacatgtagcttctacctttgatataccaaaatt

SEQ ID NO: 1972 - DNA, 60 bp, Artificial Sequence
  oligonucleotide probe
accatgtatgctaattagtatgcttttcgctgtgacacaattgtatggtaaaaggtgtat

SEQ ID NO: 1973 - DNA, 60 bp, Artificial Sequence
  oligonucleotide probe
ttagtttttaccaaagaccaactgaacgtgaccaaaaaccaaaagtgcattcaaccttac

SEQ ID NO: 1974 - DNA, 60 bp, Artificial Sequence
  oligonucleotide probe
cttggaaatgaagagaggaaaagagctcgtctcagacttatttttgcttgcttattttta

SEQ ID NO: 1975 - DNA, 60 bp, Artificial Sequence
  oligonucleotide probe
acggaacaaggagtgatgatgtatgaacacaaaacccaataaaaatctttgaataggagc

SEQ ID NO: 1976 - DNA, 60 bp, Artificial Sequence
  oligonucleotide probe
gaggcagtttggtacttttccaggcaactatgtaaaacctttatatctataagaagacta

SEQ ID NO: 1977 - DNA, 60 bp, Artificial Sequence
  oligonucleotide probe
ttaactatctgctgaagacatctgtatttacatgactgcttctgggagctgctctagccc

SEQ ID NO: 1978 - DNA, 60 bp, Artificial Sequence
  oligonucleotide probe
ttgacgttcttaggactacagatcattagtactagtgtgtcacgtatcactgaaactgag

SEQ ID NO: 1979 - DNA, 60 bp, Artificial Sequence
  oligonucleotide probe
gtgcctgtcttaatgacttgtgtagttggatgagctgatgtaaatttggtgtttattttt

SEQ ID NO: 1980 - DNA, 60 bp, Artificial Sequence
  oligonucleotide probe
atcaagagaaacttccaagccaacggaatggtcagatctcacaggctgagaaattgttcc

SEQ ID NO: 1981 - DNA, 60 bp, Artificial Sequence
  oligonucleotide probe
ccacatttagacaccggaagtgctattttatatgctgttaagttttcctatctgtacttt

SEQ ID NO: 1982 - DNA, 60 bp, Artificial Sequence
  oligonucleotide probe
acaatggtaccaaagatagaatcacctaggtttacaagtacttgtaggactcgagataac

SEQ ID NO: 1983 - DNA, 60 bp, Artificial Sequence
  oligonucleotide probe
aagcactatggagccaatgttttgagtgtctgagattctaaaggtccacagtctagagta

SEQ ID NO: 1984 - DNA, 60 bp, Artificial Sequence
  oligonucleotide probe
gccccattttggggacgtgaacgttttaataatttttgctgaattcctttacaactaaat

SEQ ID NO: 1985 - DNA, 60 bp, Artificial Sequence
  oligonucleotide probe
gtggaatgtcgtcagtggcaaacatttcacagatttttattttgtttctgtcttcaacat

SEQ ID NO: 1986 - DNA, 60 bp, Artificial Sequence
  oligonucleotide probe
tgtggcccttttcaatgtgccttcactttagctgtttgccttaatctctacagccattcc

SEQ ID NO: 1987 - DNA, 60 bp, Artificial Sequence
  oligonucleotide probe
actatctgaaagctatttggaatgtaatcaactgggagaatgttactgaaagatacacag

SEQ ID NO: 1988 - DNA, 60 bp, Artificial Sequence
  oligonucleotide probe
gtgctgtaagtcctcacctttagtttatttaataaatccctccttaggttctgtttcata

SEQ ID NO: 1989 - DNA, 60 bp, Artificial Sequence
  oligonucleotide probe
gaagcacattcaattctgttaggagggataattgtttctgattgtcttgacagggcatca

SEQ ID NO: 1990 - DNA, 60 bp, Artificial Sequence
  oligonucleotide probe
gacatcagcaagacattcttgatttaaagctctcagctaaatctgcatccattaatcatt

SEQ ID NO: 1991 - DNA, 60 bp, Artificial Sequence
  oligonucleotide probe
ttgtgttttaaagaaattccgtagcattcagttctttagtttccactgtttagtcactgc

SEQ ID NO: 1992 - DNA, 60 bp, Artificial Sequence
  oligonucleotide probe
gtgtatttaagagttcactttgtgaagcagtagctttcagtgcggtgttaaattataacg

SEQ ID NO: 1993 - DNA, 60 bp, Artificial Sequence
  oligonucleotide probe
gacagctcagtttgtttagaattgtgaggtattcagtggaccttagtcaagtccagttac

SEQ ID NO: 1994 - DNA, 60 bp, Artificial Sequence
  oligonucleotide probe
gctgaccacgtttctatagccaaaaatagctaaatacctcaatcagttccagaatgtcat

SEQ ID NO: 1995 - DNA, 60 bp, Artificial Sequence
  oligonucleotide probe
ccttccttctaccccaccccggaaagcactgtgaaatttaatgataggcttaaagtgaag

SEQ ID NO: 1996 - DNA, 60 bp, Artificial Sequence
  oligonucleotide probe
gtgaatatagtaaactaagtagtggagtttttcattcaggtatttcagataacctggagc

SEQ ID NO: 1997 - DNA, 1429 bp, Mus musculus
gagaaaggggcagctctcccggaacaggaggagctacaggaatatcgccgctctcgtgcgcgctccttctctttgcccgcagaccccatcctgcaggcggccaagctcctgcagcagaggcagcaggcgggacagccagctcagagggtggcgcgccggctggggactgctgctccaagtgtaagaagcgcgtgcagttcgccgactccctgggactgagcctggccagcgtgaagcacttcagcgaggccgaggagcctcaggtgcccccggccgtactttcccgtctccacagcttcccgctgcgcgccgaggacctgcagcagctcggggggctgctggcagtggcaacgatgcctgatcctctcttggtaccctgcgcccggctccgaccccacttccagctcccggagctgcgcgctgcggaggagcgtctgcggcgacagcgagtgtgcctggagcgtgtgcagtgctcccagccgccccgcgccgaggtgaccggctctggccgagtgatcagttgccccggacccagggcagtggcggtgcgctacactttcacggagtggcgtacctttctggacgtgcctgctgagctggacccggagtcagtggagcccctgcctccattgcagtcaggggactctggatcaaaggctgaggatagtgaggaggggcccggcaccgagcgtttccacttctcgctgtgcctgcccccgggtctgcagcccaaagaaggggaggatgctggcgcgtggggagtcgctattcattttgccgtctgctaccgctgcgaacagggagaatactgggacaacaacgagggggccaactacaccttgcgctatgtgtgctccacagacccgctctgagtccgggaacttcggaacttggaaagaggttgaccagctagcaagggctccccggggatccttagctgagcaacgcattgacagagcgtggagcgataggagtaaaatgttaaaccatacactctcagcgcagattcacggcaagctctggcagtgttctcagtgtttttctcatcacttccactgacctttctactcgcctcttagaattctcagcctgcatccaaataaggaacatcctcgtttcccagggagaggctctctccaagaaaagggctctgggaccctgaaccttggggatttgtttctaacttgagacttggtccttacaccttgatgaaaacctgcaggagaaagacatggcagcccacctccacgtgggagaagaaggccttcacacgtggaagcttcacagccaggcttgattttcagaaggctaggagggcgtcagcttgtccttttaactgggctctggaaacacctccccagattcgatgtattttcttccgtgattggatacaaatgtcttttaagaaagtaaaggccgcgtgaacatg

SEQ ID NO: 1998 - DNA, 2242 bp, Mus musculus
  misc_feature 1328: n = A,T,C or G
gtgggtggtggaggagcagcgtgtggctgagctgcgctgtgctccggtcctttccgctctccggcgccggcccgctcaccggctgtaaaaaatggtgaaagaaaccacttactacgatgttttgggggtaaaacccaatgccacccaggaagaattgaaaaaggcatatagaaaattggccttgaagtaccaccctgataagaatccaaatgaaggagaaaagtttaaacagatttctcaagcttatgaagttcttgctgattccaaaaaaagggaactatatgataaaggaggggagcaggcgattaaagagggcggagcaggtggtggttttggctcacccatggatatctttgatatgttctttggaggaggaggaagaatgcaaagagaaaggagaggtaaaaatgttgttcatcagctctcagtgaccttagaagacttatataatggtgcaacaagaaaactggctctgcaaaagaatgtgatttgtgacaaatgtgaaggccgaggtggtaagaaaggagcagtagagtgctgtcccaactgccgggggacaggtatgcagataaggattcatcagattggaccaggaatggttcagcaaattcagtcagtgtgcatggagtgccagggtcatggagaacgcatcagtccaaaagacagatgtaaaagctgcaatggaagaaaaatagttcgagagaagaaaattttagaagttcatattgataaaggcatgaaagatggtcagaagataacattccacggtgaaggagaccaagaaccaggactggagccaggagatattatcattgtgttagatcagaaggaccatgctgtttttacaaggcgaggagaagaccttttcatgtgtatggacatacagctggttgaagcattgtgcggcttccaaaagccaatatctactcttgacaaccgaaccatagtcatcacctctcatccaggtcagattgtcaagcatggggatataaaatgtgtgctaaatgaaggtatgccaatataccgtcggccatatgaaaagggacgtctaatcattgagtttaaggtaaactttcctgaaaatggctttctctctcctgataaactctctttgctggaaaaactccttcctgaaaggaaggaagtagaagagactgatgaaatggatcaggtagaactggtggactttgatccaaatcaggaaagacggcgtcattataatggagaagcgtatgaggatgatgaacatcaccccagaggtggcgttcagtgtcagacctcttaatgggccagtcactctttgacattctgtatgcagtagtgaatgngggaaggactgtaatcataataagctcactacttggctattgtttttgttttaatattcaactatagtagtgttttaaaaaaagttaaatgaagaataaacacaaatataaaagctctgactttgccctgtatgtatgatgacttcagtgttcaagatgaaaatgaatacttgtaaaaactagtttaaaaagttccctagcatctgttaggtcatatcttgtgtaactgataatagctgtgtacattagactgacatgctaggtatgtgttgtatgacccttcattgttaagctatgggattaaaattctgtatttaactggtaatcaaaagaaaacaattagttacatgtcggtctgtctagttatatgaagtgaaccaattgtgatgcctttgcattgtattgcctcagccattactagaaggtggcataatacatttcgcctgtgttattagtgatagaaatgattcattcctaaagaagtttatcataagctactgcttaagggcttgctcttctagattgcatccccttctgctgtgcaatttttaagatatatatataaacagaaaacatgatcacctttttccccttctcaaaccatgataagcccttgcttgggtgtagtgacttccaaagcccaagtaacttacaaatgaaagtgatgagatctgtacgtggaggggtgatttgcatgtataatccagggaaggtgctccttaggtctgttccaggctttctattcgacttaggctccaacgtaactgcaatttaatgttggtagtatagcaaattatgaatagatttgttgtatgttttgaagtcacatgcttacatgcttaaatctggatatcagaatttaagcagttactgaaatgtatggctgtctaatatactgattacaaagtgttaaa

SEQ ID NO: 1999 - DNA, 588 bp, Mus musculus
ttttttttttttcttttctgcttattctgcagctgaactcatgatctatcaggcaggacgaaggaccagatgggattttctagtactgggatactttcagggcttcagggtccaagggtcttaaggagataaggttagcgtctgaagcaagggtttcctaaaccaagttgtcacttgaagattcatggtcaccgcatctacagtagtctctggttaaacccaaaagaaggattactgagtgccaacccagccaggtggcaactgtgacagctaattttccgtggtggagtgagataaagtctcatcaagaacaccaaccagcttaggattttccctaaaactctcttcccagttcactgccctcgcccttccctttcctttcgtttcattgcttaagagactgcttagtaagtggccaaatagttaagagggggttggcttggaagcagataacaggagatcttaactatcagtaatagccagtctcaccgcctcacaccataatcaggcaatgacacagagatgtttaaaaacaacgtggcttgggagaggaaacatttgattaagacactccccatctgtagctgt

SEQ ID NO: 2000 - DNA, 2389 bp, Mus musculus
tggctcttgccggcttgccgcacctcactagcaagtccgtttctacaatggcactaggattccagagtgtactaaaaaccagctgagacatccagccctgtggactgagcagctacgggagtctccaacctgccatgcgtagacagcctttgttggactagctaaaccagagtctccccattacatggcaattctcctggtctcaatcctccaggccagtgaactagcccaagggaggcttcataataagacaaagccaagggaaacagaaaactcctggtcacctggtgagctgtaaggaacagctagctgtcaagtcctctgcctgacacctagacctggcagctgccatggacaccccagacagagaatgctttgttgagagtgtggttaactacctcctggacacatggagcacagaggacctgcggctcctgctgacagaagaagaaacctggaaacactttgtggcagaagttgatttgtccagggaagaggaagctgccttgcaggaatctcttgctgagatctttgcagatcctgatggagaagatgaagatgagctccaaaatgaccttcaggacaagaacgagaggaaagaggaagattccttgagtgaagatcttggtgagagtgtagctgatactgatgtagaagatgaagatggtgatgcagaagatgaagatagtgatacagaagatgaagatagagatatagaagatgaaaatagtaatagagaagatgaagatagtgatacagaagatgaagatagtgatacagaaggtgaagatagtaatacggaagatgaagaggagatccaaaatgttctgtggcacaaggaaaggttcttggatgcttatcctcaggtgaaactggagcttgaggagatcatcaggaagctccacgccctggcagacaaggttgacaaggtgcacagggactgcaccatctcacgggtggtggccagctccagcagtgctgtgtctggagtcccgatcatccttggtctgtctctggcacctgtgacagcaggagtcagtctggcattgtcagccactggcttggggctgggggcagcagcggctgtgactagtgtttccacaagcattgtggaaaaggtaagtgtggtgtctgctgaagatgaagccagcaagctggtgccaaccaacaaagacacaatgaagggcatgaaagaagttttggatcagagtggtcccagacttctttctttatctacagacaccattcagagattgcaaggcattcagaaatgcattaatgccattccgctggccaaagccaacactcgcctagcaaataatgccaagcgtctcatgaccacagggaagatatctgcccgaaacactaaacaggtgcagaaagcctttggaggtaccgctctggcaatgaccaaaggagcccgaatcatgggtgcagccactgcaggtttcttccttctgcaggatgtgatcagccttgtggaagactcgaagcatttgcatgaaggtgctaagtcacagactgctgcagagctgaggaagcaagctcaggacctggagcagaagttacaggagctcaaagaggttcatgacagcctgactaagtgacctcttcatcttctgtgcagctcagatgactggggagggagtgtgctggacagagccatgaacacatgggagcccctgactgtacccctcacagcagtgcctgctaaagggagagggcacattaaaatacaggaagccagaacagagatgggacaatctcatgaccacttaccagactccagctcttagatccatcaacttcccaattaacagccaagctcccaagctggggagcgcatccaagtcctgactaagccacatggctgctcctaagctttgcccactgcactgctcccagctgaggctcaccaacctcaccatccactgagctgtcaatcttcccactgctttgtgattggtggcacagagaccttctcttttcttcttctgcctcattgtgtgtttttccaaatatttctcaatcttacaatcagattctggttgtgaacgtcatttcctgttcttggttttgggtcacatgggtgctgttggtgaaaagctcaagactagaaagaggggatgctgggaataccacctgtccaatcatcacaagttcttggccttccatgccactgtggatgttaaggaaaggagaggtgacattgtacgactggtgagttcttctctctgctaccagactccagggaaccatcaataggcacaatttttaatgcctattgatgtttaaaatctgccgtaattggatgagatctgccaagatgaacaagaagggctacacttggtccataattttcgtagaataaatttgtgaaaattgacct

SEQ ID NO: 2001 - DNA, 640 bp, Mus musculus
gaaagagatacaaagaaacagaccagtgtagatcacaacagatgcttgtcagagaggcatgcttccctcacagaaatccaaatgacttaagttactagaaagatatcacctgggaattcttatttctgtaagaaatggtaacagcagtttttattctggttctcaactggtggcggaggttgtcccccaggagacgcttggtggcatctggtggaaggctgctactgacatctagtggatagagggcaaacattctagtgtgcgtggaacaacactaaggctccaatgactgtggagtgaaggatgagaaattctgcctttagtcaagctccatcacgaagccgcagagcacaggatgcatccggcccctcccacagccacagagggcctttgctgcaatggtacacgctctgctgagggcagctgttagatcgaccccagaaaattcactgtcaaggctgagaccacagtcatctttccaggactgtccttgggagacccttctgtctggtcttagttccaaagatagctagctctctctcctctttattttaaatcacggacactgttagctctggaatggactatactgtccttttggagttggctattaaacaagtgtgagccaaatttgggaccc

SEQ ID NO: 2002 - DNA, 763 bp, Mus musculus
gaacccccttcccctgaccaagagctaggggcctggctcgcagcctccgcggggctggaacccagaacctagtcaaagaagctagtggcagtcggactctcaggcttgagatctgatgtcccagagccttcagtaccacggtcccgtccgtagcactttggtgccgccgctgcagcgctgaccgcgctggcaacccaccctcccgggatacccgtcagctgggtggtccccggtctcgtgcggcctacgctcttctccggggacccgctctgaggacccctgggactcaggtggcccgttcgtgggtacagctgccgtgctgacgcgctgcacctaaaccccggcctggctgtggacaaggaccgagagggaaggcgggggccgcgacttgcacggtggagataccctgtgcagaaccttagattcccggcgggcctggggagcagagaaccgggggacacctcggacctaaggctgggcagccccggactggtaactggtgaagcagagtggccgaagcagcaaactcgggcacgggtgactgtgggctgctgtagtctatctcgcttgctgggatcatacggatggggtcagcctggagccctgaagcttggaaggggattctgatcaatttcagaaaagcgtaggggtgaggccagaggacgtggtggcatacacctgacttctcgggatttgggaggtggaggcagggggagtaggcgctcaaggtcattctctactgcctaacgttgggttgcaagag

SEQ ID NO: 2003 - DNA, 1812 bp, Mus musculus
tggcaaacactgaggttactctcctgtatcctggcatatttagagttaatctcacacatagaaataatcttgaataggataaagggctgactgaaatctccacctagcctgcacgatgctaggcctttcactctgattctgaaaaggaaatgtttgagaaattgaaagatccatcaagcagccctctctgccacctgcaccccaagctttgctaaaggtgggctgttctgcagtcttttttaaatgctgaagctgagagcttgttgcagtcctgttgcaacaaggagaaaggcgaacacctttctttatgaatggaccaaatgattgatgcacaattttcttcccagggaaagcttgtcaggttgtgggcattagtgggctagttggtgttaagcccgatccaccgtaaattccatttgataaatcccagggagtttccagagttttgtgtgttgtgttgtgttttgttttgctttgtttccacctccagctggatattgtgcttgaatttgtgagtcttctgacaagacacatttctctttaaaatagagtgatttttaaattgtcttgtgaaatcaacccaggttaccttgagccgtttacttacatcaagtctactcttgccagtgtgtgccaacaaccagtttggcaaagtgaaatcttagcatgttttggatggtaggagcactaaccttacagtgttgaggagacaaagaaagctaccaagatttgtcacatatctttttaattgtccataccatacctactatgactgtgttagacacaccaccgaatagatggtgttcttagcatcactatcatagtttcacatcatttccttgccatggttcttctagggagcactggggagtcagccaagaaaaatgagattagaggtagtgacttgttttagtgtccagaagcccagtatggagtggaccacagtccccggacaagtgtgtgtagagcatgctggctcttgtatgattcccagtctgcctgtctgcctgacttctcttcctttccctctttctctttgttgttgcttgagacagtcttgctacggagacccaggactcacttctgcttctgcctcccaaatgctaggatcacatacttactgaaatcgtgttcttccaatttcctttaattagcttgcttttagattggctcgccgccatctctaaagcctaggaaagaagtgcagacttggctgtaatgccagcagctttcaggccatagtgtcgacttcctgcctgcttgtggacaaaggaagtatgctgctgatgcccagacagtgccatttgaatattaggtgaccgtgaaacaccatactgccaagtgtctgcaaaccagaagacagtttagttcaggaaatattttgccaaattcaggggctttattaaaatcaaagaggagaaagaggaaatattttgtccttagatgctaatatgttttaggctttctttttctgttttataaagttaacccagtatttacatttccatattgtgtgaattgaaccatctaaatatatttttcttttgttattgaaaggtaccaaaggctttttatgttttgtttggtttgtttgattttattgtagggtttgtttttttttttctagaaataccttttatatagactagtccccaagtgtctgggtctacttcagtctgtgtaattggtttttacctcagttcatttgtatttgtctctcaaggcattggtgaaatctcagattttatattctgctttaaaggggaataaattccagaaaacatgcattataaaaaaaaaaaaaaaaacagc

SEQ ID NO: 2004 - DNA, 1302 bp, Mus musculus
acgttgttctggcctcaaatgaagaggaaacttcaacagcctgtactaagaatactcgttcaagcctacagtctataccttgagtatccattttggttttgatccttgcatccagaccttagatgaaattagacagcaaatcaagatcagagaagagaatggcatcaagcccttcgcttgcccttgcaaactggagtgctatttggtttctccagaatttgaaaagcttgttaacatacttaagtcaactactgatcctcttattcataaaatagcacagattgcaatgggtatacattaggttcatccatttgcccaggaattcatttatgaagtgggcgtggtgacacttattgaaagcttgctcagtttttcttcccctgaggttagtattaaataggctgtgattacctgaactcttccggggatgacagatacaacaaggtagagtttcatgttaagcatatgtgtaaagaaactgtgccctccccttgaacatcacctggccagcaatctggattaaagataatagggcagctgactaccgagtctgtccatcactacattgtagtcagctacttttcagagcttttccatttgctgtctcagggaaatcgtaagactaggaatcttgttttgaaagtatttttgaatatgtctgaaaatcccaaggcagccagagatatgataaatatgaaggcgttagcagcattaaaactcatctttaaccaaaaagaggcaaaagccaatcttgttagtgctgtggccatctttattaacataaaggagcatattagaaagggttcaattgtagtagtcgatcacttgagttacaatactcttacagccatattccgtgaagttaaggggattatcgaaagaatgtaaagtgacccagaaattaaagagaacactgaacagtgtccaaaatttgattggctgtacatgcccaaagagttttgcataatattttggtaattactgctcacacatttttgtcttaacatcttttacatattattacctgtggcaggttctagctcaaagctagaccatttttgatgtatcaaataaatattaacatcttgagataaaaaagtttattgatttctatcttatctagattagcaaatttgtaacattttacttaaggaaactgtgatccaactctcagaagtactgtgtcttgagggttagtatctgcttagatctgttggtggctccagagagcaaaagagaaactactgctcttgtaatctagttacagaaataaggcatacgcaaataaagatatctgatggc

SEQ ID NO: 2005 - DNA, 1089 bp, Mus musculus
ggctgagctgcgtcgtcctggttgctgtggagccggctcgcgtggcctcacgccctgcccgcctcctgtcatgggcagcgccgagagcgccgaggcccgaaggtggtccctcgagatggatgaggaggagcgggtccgggtgctgcagggcatccggctgtctgaaagtgttgtgaaccgcatgaaggattgcagccagccctcagcaggggaacagctggttcctggttttggtccttcgtcttctgctcctgtgcccactgtccctctaccagccatctctgtgcccactgtccctgcacctaccactcctgtgcctactgctccttcatcctctgtacgtggcctgccaggaggcacctgtaaaggccctctgacagacgttaaagtgcccagtgcagagagtggtggtggtctgcagtcctcagcagtgaaggaggatcttaagaagttccaacaggagcagttggcagtccaggatgagatggtcagggtggcaaaaaaggaaaaagaggcagctgagaagcacttgaaggcatccctgcccaagaagaaggccagcctcacccatgagcaacagcagtcagctcgactagccagggaactggaggacagagaggccgagctcagccgccgtgacaccttctacaaggagcagcaggggcgcatccaggaaaagaatgctgagctgtataaactgtcttcccaacaattccatgaggcggcttcaaaagcagagagcacaataaagccccgcagagtggagcctgtgtgctctggcctacaagcccagatcctccgctgttaccgggaccatctgcatgaagtgcttctgtgctcggacctggtcaaggcataccagcactgtgtgagcactgcccgcaagggctgaggagcagcatccttcctggagccttgaagaagggaccgatcataggaccacagaccatggcccccaggccctgcagtctctaactgagcacccatatgcctctgagtgtggggctgccatgctcgagaaacagtatgtgctactgattgaaaacaaataaagcagatgtctttgtttgcagtcattcactcattggc

SEQ ID NO: 2006 - DNA, 3339 bp, Mus musculus
cggtgagttcgctttcttggctgacctggctcggagccgggcattgcggggatccaggattggaaaggttccaggatggcttctgcatcagcatctaagtataattcacactccttggagaatgaatccattaagaaagtgtctcaagatggagtcagtcaggatgtgagtgagactgtccctcggctcccaggggagttactaattactgaaaaagaagttatttacatatgtcctttcaatggccccattaagggaagagtttacatcacaaattatcgtctttatttaagaagtttggaaacggattctgctctaatacttgatgttcctctgggtgtgatatcaagaattgaatatatgggaggcgcgactagtagaggagaaaattcctatggtctagatattacttgtaaagatttgagaaacctgaggtttgcattgaagcaagaaggccacagcagaagagatatgtttgagatccttgtaaaacatgcctttcctctggcacacaatctgccattatttgcatttgtaaatgaagagaagtttaacgtggatgggtggactgtttataatccagttgaagaatatagaaggcagggcctgcccaatcaccattggaggataagttttattaacaagtgctatgagctctgtgagacataccctgctcttttggtggttccctatcggacctcagatgatgatcttaggaggatcgcaacgtttagatcccgaaatcggcttcctgtactgtcgtggattcacccagaaaacaaaatggtcattatgcgctgcagtcagcctcttgtcggtatgagtggtaaaagaaataaagatgacgagaaatacctggatgtgatcagggaaactaacaaacaaacttctaagctcatgatttatgatgcacgacccagtgtaaatgcagtcgccaacaaggcaacaggaggaggatatgaaagtgatgacgcatatcaaaactcagaactttccttcttagacattcataatattcatgttatgcgagaatctttaaaaaaagtgaaagatattgtttatcccaacatagaagaatctcattggttgtccagtttggagtctactcattggttagaacatatcaagcttgttctgaccggtgccattcaagtggcagaccaagtgtcttcaggaaagagctcggtacttgtgcactgcagtgacggatgggacaggaccgctcagctgacatccttggccatgctgatgttggacagcttctacagaactattgaaggctttgagatattggtacagaaagagtggataagttttggccataaatttgcatctagaataggtcatggtgataaaaaccatgctgatgctgatcgatctcctatttttcttcagtttattgactgtgtgtggcagatgtcgaaacagttccccacagcttttgagttcaatgaaggctttttgattaccgttttggatcatctgtatagctgtcgatttggtactttcttattcaactgtgactcggctcgagaaagacagaaacttacagaaagaacagtttctctatggtcgctaattaacagcaataaagacaaattcaaaaaccccttctatacaaaagaaatcaatcgggttttgtatccagttgccagcatgcgtcacttggaactgtgggtgaattattacatccgatggaatcccagggtcaagcagcaacagcccaacccagtggagcagcgttacatggagcttttggccttgcgtgacgattatataaagaggctcgaggaattgcagctggccaactccgccaagcttgctgatgcccccgcttcgacttccagttcgtcacagatggtgccccatgtgcagacgcacttctgaggggactcacttctggcactgcacttgaactctagataagtgaaatagctgactctcattctgggcatgtggacaaagtagatttaaagtgtctgcctccatttagaagttcaactaacatcttagacttttgagtatgtgccttctgtaatacatatcacaagaaatcgatggtgtccgtgtggcaatcataaggaaggagtcaagagggggttctggaaaatcctcatacttttttttacaaagcacttttgcaaagataaaacttaaatttaatttacctctatataaattctacatatacagtatgtattttgtgggcttaattgaaatattattttaaatccaggggggagatttgtttgcaaaatgtattttcctccagctgcttataacagttgctttggattatctaaaattaatccaaatgtgaaagatgggtattactgccaaagccaaattgcactctgcttcttcagcaaattccaagagcaaggcgtttaaataattgccaatttttattttaccataagtggtaaggtaaaaagaaagatgaacatttcatcattttgaatttttgaaaataaaaggttctcccatcatttttcaagagaagcacatttttatattaagaaaaagtgataaggtttgatttttttttccctcaacattctcagctttgctttctaaattatcccatgatttttgtctaacactgagtcatactcaggttgaaggaaacccataaatagcactgtgcgaggagctggctggcttctgctgcttagaggaatatgttcgcaaacatgcctctagtcaattcgccttatctgctgaagtgtaggggcaccgccttgaatggatgagctatggctagagcatctttctttacagtaatgccccaggtgtattctgtttatgtctctctgtttaaatggtgtgcgtgcataaaaacttgctctgcacattattacttgaagtactgggcaatttgctttttcaggttttttttcattttgttttgtagtatgaaatggaattttaaatgcacagttctatttgatatccgaactaattcatttagtaaatatatttgtaaaagctaaagttaaatcaattaatgttttacagtgatttgtaaaggattatttatagctaatatggttttgttttcagtgaattaagagagattacatttatctttgtaaattattttatgtcatagcttaatggcctaccaaatgagacatctcaaatataatagtataatgtatggattttgtaagtataaaaattattagatattcgtttgctttttgtaaacactgtaaatatttcataaattaaaatgtgtcactccataagaagaaaaaactaatactaatagttgacaggaattggtgaaatttcatgaaaatattttcattgcaataaatattaaaagacctgctg

SEQ ID NO: 2007 - DNA, 539 bp, Mus musculus
tttgggagaaacagccttaaatataccaatatttatttttttatataaaagcaacaattcaaaacattttttttttctgttcttgtgtaagatcatagttcgtgagtgttagtcatggacatgtcatctacaaagccaagggcagggatcactgcatctccttccacagagcggacactgccgctcatttcttctctgctaacatacttgtgcagcatgctgtagaactggttcttgggattgaatgtgtacaacgctgagatttcctgccagtctttactgcttggagtgttgcattccttcggcttcgagcactcaaagaaacatctaacattctcttcggccaactgtgtcgcattctctgcagcttgattttgaagaatctgcttctccttttcccaatagatttcccagaattttaactgcagataactaaccggagagaagcatcgggtcacagacttaacaagaagaagtaagataataacggcagctatcagaatccaaccgaacacctgagactgagccttgagctggct

SEQ ID NO: 2008 - DNA, 3175 bp, Mus musculus
gagtctcgcgctgtggttcgtcggcgcaccgctgatccgctccacgccttgcgctctccgctctcagccaaagcccggcagccccggccacgcagctccgcaaccatgtccaagctggcgcggctcgagcgcgaggagatcatggagtgccaggtgatgtgggagcctgacagcaagaaggacacgcagatggaccgcttccgggcggccgtgggtaccgcctgcggcctggcgcttgggaattacaatgacttataccactggtctgtccggtcgtatatggacttttgggctgagttctggaagttcagtggaatcgtctactcacgcatgtatgatgaggttgtggacacatccaaagggattgcagatgtccccgagtggttcagaggcagccgcctcaactacgcagagaacctcctgcggcacaaggagaacgacagagtcgccctttacgtggcccgggaaggcagagaggagatcgtgaaggtgacttttgaagagctgcggcagcaggtggctctgttcgcagctgccatgaggaagatgggcgtgaagaaaggggaccgtgtggtcggctatctacccaacagtgcgcatgcggtggaggccatgctggctgctgccagtattggggccatttggagttctacctcgccggactttggtgtaaatggtgtcctggaccgcttttctcaaattcagccgaaacttatcttctcggtggaggctgttgtctacaatggcaaggagcatggtcacctggagaagctgcagcgagttgtgaaaggactgcctgacctgcagcgagtggtgctgatcccctatgtcctcccaagggagaagattgacatttccaagatccccaacagtgtgttcctggatgatttcctggcaagcgggaccggcgcgcaggcgccgcagctcgagtttgagcagctgcccttcagccaccctctgttcatcatgttctcctcaggcacgacgggagcgcccaagtgcatggtgcactcagccgggggcaccctcatccagcacctgaaggagcacatgctacacggcaacatgacaagcagtgacatcctgctctactacaccacggtcggctggatgatgtggaactggatggtgtcagccctggccacaggagcatccttggtcctgtatgatggctccccgctggttccgacccccaacgtgttgtgggaccttgtggacaggatagggatcaccatcctgggaacgggagccaagtggctgtcagtgctggaggagaaggacatgaagccagtggaaactcacaacctccacacgctgcacacgatcctgtccaccggctcgccgctgaaagcccagagttacgagtatgtgtacagatgcatcaagagctccgtgctcctgggctccatctcaggaggcactgacatcatctcctgtttcatgggccagaactcctctattcctgtgtacaagggtgagatccaagcccggaaccttggcatggctgtggaagcctgggacgaggaagggaaggccgtctggggagcgagtggcgagctggtgtgcactaagcccattccctgccagcccacgcacttctggaacgacgagaacggcagcaagtaccggaaggcttacttctccaaattcccaggtgtctgggcacacggtgactactgcaggatcaaccccaaaacaggaggcattatcatgctgggccgtagtgatggcaccctcaaccccaatggcgtccgctttggcagctcggagatctacaacatcgtggaagccttcgatgaggtggaggacagcctgtgtgtaccccagtacaacagagatggcgaggagcgggtggtcctgttcctgaagatggcgtccgggcacactttccagcctgacctcgtgaagcgcatccgagacgccatccgacttggcctgtctgcccgccatgtgcccagcctcatcctggagacccgaggcattccatacacactcaatggcaagaaagtggaggtggccgtgaagcaggtgatggctgggaggactgtggagcaccggggggccttctccaaccccgagaccctcgacctgtaccgggacatccctgagctgcaggacttctgagccagcagctcgcactccatccagctgtgcatgtgatggaacttagggacactttagagacaacagctgctccaggtggccctggcactgcacactccacaggctcaggaacagctttcctctttcggagtcattggtgggggccaggtctcccgagctccaggatgtgcctggccttcggagaccctaagcatacactgaggcttgtctcggccctgctgctataggtcagcacacagccttgcaggggcagggctggtgacatttggtgacagcacactggaggagcgatgtggccttcagcctcatgagcccgctgttgtatctcgctctatgaaggtgaagtcttacctatactctctgtccttaactggcctggcttcctcagcgttactgtcttctcaagagctgactaaagccagggcacctggcccagcatgcctgtcacctcacagctggctgttgggacacctgggctgacggctcctgtaccgtctaccaaggccagaacaccattctagggaatggtgagtgaattgtccagacagccaagagctctctgctatggcaagtcccctctgctgtcgggtgtccccgactgtttctgggtcttaccagcacagtgtttgaatgggtcaaacggtttaatgttaattgagggcctgggggcacttgaatccctgggtgtctaccccaggttaccacttagctgtgtgctgggcagtgtgatcctggagtccgccagggatggagctgccccgcctcagagggaaatggccccgtgctccctcctaatagttcctgggctctttctattgtgactgtcctctacatttgtaaatgaagtctcaggctttggctgccaggacttaatggtgcttctcctctagcacacggaatatgtcataaatcctggtgattgcttttgtatttttttttttaaaaactgagcacaacataaaaccttttaaagatatcctggatcttaagtctataaaggaaaagtgctatgaagaattttatggaataaatctgtgccatgcacacctgg

SEQ ID NO: 2009 - DNA, 676 bp, Mus musculus
cgaagacagctgaagttggtgtctgttagacactagctgttaacatgcagtacaccgggagccagtatttcggggaatacataaacgggaggatggagggcagtgccgagtacatcctccctactgacacgagatacatcggggagatgaaggacggcatgttccacggagaaggaaccctgttcttccccagtgggagccgattcgacgccatctggaagaagggattggtggtgaagggcaagtataccttcaatgatgggctgcagtatgaggacaaacactggcactactgtgacagctatgaccggaggttctacaccgagatctgctatggcctgaagccctcaggtatctctcagctcaccaacatggacccacccagaagaattcccctgggctactatgactgtggagatggcttctataaccccacgaccagggtcatcaaggattaccggaaccgctttctgagaaatgctgatgatgacgaacatgagtggattgtcaggacctgccgcaagggctggttgccaatgcccaaacagaagtcctagccatgagcacctcggcctcagcatctcaccagggacttccttctgcccactgctggcctgggaaactggctgtagtcctagcttcgacttaagtttcagaataaaggttttctgcactg

SEQ ID NO: 2010 - DNA, 1703 bp, Mus musculus
  misc_feature 406, 411, 524: n = A,T,C or G
gattcgtcatacgcgcgcccgaccaatttgtccggattctgcgggcgggagtcctgcccttggagctcatgtcgctgcggttcgctttgttgagaaatatgaaatttcattgataacctgagaatcttcaccaaagggggagcggtggatgggttaccctcgtttaggtggagaaggtggaaaagtggtgacgtctgggttgtggcccataaaaatatgaccttaaaacaacttaaaaacaaatatcctcagaaacgggttgtggccggaggaggaggaaacaatcgaatgagcgcgctgcagggctccaagggaaaaggctgtgaaatgcctgctcctgtgggtatctcaataactgatgaaaacgggcaagtgctagggggactcaataaaaaagaagacaganttctngttgctaaggggggccttggtgggaaattacatacaaatttcttacctttgaaagggcaaaagcgcataattcaccttgagctaaaaatcaagactggtgtaggcctagtagnattcccaaatgctggaaaatcctccttactgaggtcgggttctcatgctacacctgtgattgcaggttatgcgtttacaacactaaggcctgaactcggaaagattatgtacaatgatttcaaacagatttcagtagctgatctcccaggtttgatagaaggagcgcatatgaacaaaggcatgggccacaagttcctcaagcatttagagagaaccagacaactgctttttgttgttgatatttctgggtttcagctttcttctgtaactccatataggactgcctttgaaactataatacttctcacaaaagagttggagttgtacaaagaagaactacagacaaaacccgcactcttagcaattaataagatggacttgccggatgcccaagttaaacttcaggaactgatgaagcagctcctgagccctgaagattttctgcatttatttgaaacaaagatgattccagagaaggctctagagttccagcatatcgttcccatctcaacagtcactggggaaggcatcgcagagttgaagagctgtataaggaaagcactggatgaacaggatggcaaagaaagtgatgcgcatcggagcaaacagttgctcaatttgcagagtcccagttgagcatcttagactgagccacatcaaagtgtgcggctactgtctccagaaaaggcagcattcaaacctagtacagcgtattgacgcaatactctttcttttaaggatcagaaaatcatgtttaaaacgtggccgagcctgaaaagcatgatgttcaaagaagccagccacgacagcaagacaaatatcatgacttcccatgctggaatcttagaaagcaaatctgaactgatagaaatcctgaaaaatgataattttgtgtagtataaataggagctagaagattaagagatgttggtcaaaagatacaaagtttcagttaagctttacagatctgttatgtaccttgtttgtagaataatgtatcatatttaaaaatttgtaagaaagtagtttttaagtgttctgaccccaatttttgagaaaaatatatattttaaaatagatttgactctgttttaaaacatgctgtatatgatatagacacgtgtataattttatatcagttaaaaatagtattgaattaccattaatttgacactctt

SEQ ID NO: 2011 - DNA, 2077 bp, Mus musculus
gagggtccggaccgctgtgggcaggcattgctgcagattgggattaacatgatggcactgcctggaggccgccacctggattccgttcctctgcaagagcagaggctacacttcatgcaggtagactcggttcagcgctggatggaggatctgaagctcatgaccgagtgtgagtgcatgtgcgtcttgcaggcaaagcccatcagcctggaggaagacacgcaaggtgaccttatcctagcaggtggtcctggtccaggagatcctctacagctgctcttgaaacggggctgggtcatcagcaccgagcttcgaaggatcgggcagaagctggcccaggaccgctgggcccgtgtgcacagcatgagtgtgcgtctgacgtgccatgcacgctccatggtcagcgagtacagcaccatcagcaggacagcctcacaggaaatgggccaggcggagaagctgctcatggagaaatgctctgagctctctgcggtcacggagaggtgcctccaggtggaaaatgagcatgttctgaagtcaatgaaggcctgcgtgagtgagaccctgagcctgctgggcgagcactttggtcagctactggagctggccctcacacgggaagtgcaggcacttgtgagaaaaatcgatacctcagacaatatctacatcacggagtctaccacagggaatctgttcggcctgacccaggagggggctcctctgtgccgcatcatagccaaggaaggtggggttgtagccctcttcaaggtctgccggcaggacagcttccggtgcttgtacccccaggcactccgcacactggcctctatctgctgtgtagaagagggtgtccatcagctggagaaggtggacggtatcctgtgcttggctgacatcttgactgatgagagccactcggaggccactagagctgaggctgcagccgtggtagcccaggttacctccccacatctgtccttcacccagcacctcactagcttcctggagaacatggaggagattgtgacagcccttatcaaactgtgccaagaggcctcgtcaggggaagtcttcctgctggcctctgcggccctcgccaatatcaccttattagtcaaaatggcctgtgaaatgcttctaaagttgaatgcaatctgtgtctctcgtgaaagcctgtggtcacaagcatagagtgtacgaccccttatactcggaccagattgtgaccatcttggctaacatgtctgtgttggagcagtgtggcttgggcatcattgaggagaacggtgtacagctcatcatgggcatgctgtctgataagccaaggtctgggacacttgctgaagtggcagcctgtgaaaaagtacagcaaagagctgcagtgacccaggaccgcctctgccgagacccagatgtggcccaggaggccgttcggctcagctgtatgtctcgcctgattgagctctgccggtccccctctgagaggaacagtagtgatgctgtcctggtggcctgcctggctgccctgcgtcggttggccggggtctgcccggaaggccttcaggactctgacttccagcagctggtccagcctcggctggtggattccttcttactgtgtagcaatatggaggagagttttgtgtagtgagcatgagagagaaggcacactgtgtgcacttaccacgctagctctcttcagctccttatttatatgtaatttattttttacatgaaatagaaagggaatctttatcagtgagtagctggtcctcggggacccctacccccccacttctgtgactaggtgcagaagttgaattgtgtcaaggctaacatgacaggttgtcacaggtgactccccttcatactgctccctctcttctcagcatatattcttgcctgtttaaaaaacaagacaaaacaaaacaaaaaagcccaactttgaaccagggcattttaactgcccagcattttttaaaagttagttttactcttttgagaaatttaaattgaattttgcagtttgaaagatatactgtaagaaaatgtttttctttaataaatggaatcatgg

SEQ ID NO: 2012 - DNA, 2297 bp, Mus musculus
  misc_feature 2244: n = A,T,C or G
gcggcgggaggaactcacgagcttctccgtgtggaaaacgtctcccgacgctttctcgaactcctcttcgacgagtgactggtgctccgcgtgcacggacaaaccgtgcgccgcccactgcgcccgagtatcctcggattcccggcgggacgccgtgggctgccgactctatgcttgactacgacgaggtgaccgccttcctgggcgagtgggggaccttccagcgcctcatcttcttcctgctcagcgccagcatcatccccaatggctttactgggttgtcagccgtgttcctgacggcgatcccggagcaccgttgccggataccagacaccgtgaacctgagcagcgcgtggcgcaaccacagtatcccgatggagacgaaggacggaccagaggtgcctcagaaatgccgccgctaccgactggccaccatcgccaacttctctgagctggggctggagccgggacgggacgtggacctggagcagctggagcaggagaactgcctggatggctgggagtacgacaaggacatcttcctgtccaccatcgtgacagagtgggacctggtgtgtaaggatgactggaaagccccactcaccacctccttcttttacgtgggtgtgctcttaggctccttcatttcgggacagctctcagacaggtttggtcgcaagaatatcttgtttttgaccatggccatgcacaccggattcagcttcatacaagtcttctctgtgaacttcgagatgtttactctgctctatacccttgttggaatgggacatatatccaactacgtggcagcatttgtcctgggaacagaaatgctttccaagtcagttagaattatattcgccaccttaggagtttgcatattttttgcgtttggcttcatggtgctgcctctgtttgcatacttcatcagagagtggaggaggctgctgctggcaattactttaccaggcgtgctgtgtggggctctctggtggttcatccctgagtccccacgatggctcatctctcaaggccgaattaaagaggcagaggtgatcatccgcaaagctgccaaaatcaatgggattgttgcaccttccactatcttcgatccaagcgagaccaataaattacaagacgatagttccaagaagccccagtcgcaccacatttatgatctggtccgaacaccaaatatcaggatcctcaccatcatgtctataatcctgtggctgaccatatcagtgggctattttggactatctcttgacactcctaacttgaatgggaacatctatgtgaactgcttcctactggcggctgttgaagtcccagcctatgtgctggcctggctgttgttgcagcatgtgtcccggcgttattctatggctggttccctcttcctgggtggcagtgtccttctcttagtacaactggtgccttcagacctacattacttgtctactaccctggtgatggtggggaagtttggaatcacctctgcctactccatggtctatgtgtacacagctgagctgtaccccactgtggtcagaaacatgggtgtgggggtcagctccacagcatcccgccttggcagcatcctgtctccctactttgtttatctaggtgcctatgaccgccgcctaccttatatcctcatgggaagtctaaccatcctgacagctatcatcactttattcttcccagagagttctggggtttctctcccagaaaccattgacgagatgcaaaaagtcaaaaaactaaaacaaaggcaatccctaagcaagaaagggtccccgaaggagtctaaaggaaatgtatcccgaacctcccgaacctccgaacctaaaggcttttaacacctggtccagaagctgattgaactgaatggaaaacctgcatgttgtcagaaacactgtcagtgaccgacaacagtgctttctgttgtgttggcattgtgtctaacaagcatctgtcctggagagtcaccttcctctagggccgccaaggcgaactacacacagcttgcacatcccatcacagtggtggacatgggccttccaaagaaatgaattgagtctcttgaacaagcaggacttggaagactatgagaaacatctgctagacatgctttgttattttgtaagacctgataagggtgcacatagaacagcaggtccgtttttccctcctttccctaactgcagaacttataggaaaggaataattgtggctcangggcagtgtccttgtctaggttacacagggccctgggtttgatcaagtgcacc

SEQ ID NO: 2013 - DNA, 1246 bp, Mus musculus
ggggagaaacaagcagggcaaccaagggagcaagatgccagacatcggttgtcggcaggtacccgcagagagcagaagggagactggaagcgtccccacaggaccggaacccatgcaagtcctggcagctccggtggatgtcgcatgcggatgcccgtgcgcggatcagccttgtccctccacctctgtacccagaatgtcctgcactgaggccccacagcctatcccagcgggtaccaccaccaccagcaccatcattgccttggggcccaccgggcggctcagcatctctgtggagggtgacctggaatgcttggtgtgccgagagccctacaactgtgctcggtcccccaagctgcttagctgtcagcacaccttctgtgccgtatgcctgaagcttctgctatatgtgcaggaagacacctggtccatcccctgtccgctgtgccgaaaggtcactgctgtcccgggaggcctcatctgcagcttgcgagaccaggaggcgatggtggggcgtctgggccctgccatgcccagaggtgcgcctatgtcctcagaggctagtgggttctgccgcttcagcaacgtcggccagccaactggacaggagaagaagaacaggacactgtaagtgtcaaccgtgtagctgcccggcgcctggctgtacacttgctcttgttggctcttgtcattgtccttatcctgcctttcatctacccgggtgtcatccggtgggtgttggcctttgtcattgctctggctctcctgatgtccaccctattctgctgtcacccccagagccagaacagcaactggctttgccccaggactctgttctgcagagagcaaaagcaaacccagatcacttctattgcctgagaactctggatccctacaggcccagtgctgccaaggttccctcctcccccagacctcacagtctgcatgggtaaggggctaggggccgcctttcaaaatcacattcgaactggacttgcgtgtcaaagccagactggccatgttggatcaaggattctgtgctggaacagtgggatcgcacctgcctgttcctgtgtagcataggaaggaaagggggaaagagaggagacaccccctgaatgagtgactcaagggtggtggggtccctacccctattccagagctcctaagttttgtatatatccctttgtacacatattgggacattggccttactacaaagcaaatagaaccaggtctcttttgt

SEQ ID NO: 2014 - DNA, 356 bp, Mus musculus
ttttttttttttttttttttttttttttttttttttttttttttttaaaaaaaaaccccgtttttattaaggcaatgcaaatgcctgcaaggccccgccctcccagcaggaaaaggaaaacgggggctcctttgaaaacaaaagtccaaaggggggctaagtcccccccattgcccacccaatacaaagggggggcgactgaagctcatttcaaaacaaaagcccagcttccaggccccccagttacttgggtttatttgggatatgagcccaagggcgggcttccccccccttaaaaaaattgttctacccagggctggggggtccacttgcagttttaggacttgggaagctga

SEQ ID NO: 2015 - DNA, 3036 bp, Mus musculus
cttttaaggacttgattacatcattttcaagcctgctagttttggaaccaccattaaagcctaagacatctcccttcagtcagccacctttcttcacactgtaacgaagtgctttgtttcaacactccttctttgtctttggatcatttgcgttctcagtgacacatttctcttcagtaattgttgccaaatttataaggaaaaatgattcccaatggatatttgatgtttgaagatgaaaattttattgaatcatctgttgccaaattaaatgccttgaggaagagtgggcagttctgtgatgttcgacttcaggtctgtggccatgagatgctagcacacagggcagtcctggcttgctgtagcccctatctatttgaaatcttcaatagtgacagtgaccctcatggagtttctcatgtgaagttggatgatctcaatccagaagctgttgaagtcttgctgaattatgcatacacggctcagttgaaagctgataaggaattagtaaaagatgtttattctgcagccaagaagctgaagatggaccgagtcaagcaggtctgcggagattatttactatctagaatggatgttactagctgcatctcttaccgaaattttgcaagttgtatgggagactcccgtttgttgaataaagttgacgcttatattcaggagcatttgttacaaatttcagaagaggaggaatttcttaagcttccgagactaaagttggaggtaatgcttgaagataatgtgtgcttgcccagcaatggcaagttgtatacaaaggtaatcaactgggtgcagcgtagcatctgggagaatggagacagcctggaggagctcatggaagaggttcaaaccttgtactactcagctgatcacaagctgcttgatgggaacccactagatggacaggctgaggtgtttggcagtgatgatgaccacattcagtttgtgcagaaaaagccaccccgtgagaatggccataagcagataagtggcagttccactggatgtctctcttctccaaatgcttcaatgcaaagccctaagcatgagtggaaaatcgttgcttcagaaaagacttcaaataacacttacttgtgcctggctgtgctggacagtacattctgtgtcattttccttcatgggcggaacagtccacagagctcaccaacaagtactccaaaactgagcaagagtttaagcttcgagatgcaaccagatgagcttctagaaaagcccatgtctcccatgcagtacgcacggtctggactagggacagcagagatgaatggcaaactcatagctgcaggtggttataacagagaggaatgtcttcgaacagttgaatgctatgatccacatacagatcactggtccttccttgctcccatgagaacaccaagagcccgctttcaaatggctgtgctgatgggacagctctatgtggtgggtggatcaaatggacactcagatgacctgagttgtggagaaatgtatgatccaaacattgatgactggacccctgttccagagctgagaaccaaccgttgtaatgcaggagtgtgtgctctgaatgggaaattgtacattgttggtggctctgatccatatggtcaaaagggcctgaaaaattgtgatgtatttgatcctgtaacgaagtcatggacaagctgtgctcctcttaacattcgtcgacaccagtctgcagtttgtgaacttggtggttatttgtatataattggaggtgcagaatcttggaattgtctgaacacagtagaacgatacaatcctgaaaacaacacctggactttaattgcatccatgaatgtggcgaggcgaggggctggagtcgctgtgcttgatggaaaactgtttgtaggtggtggctttgatggttctcacgccatcagttgtgtggagatgtatgatccaactagaaatgaatggaagatgatgggaaatatgacttcaccaaggagcaatgctgggatcacaactgtagggaataccatttatgcagtgggaggattcgatggcaatgagtttctgaatactgtggaagtctacaaccctcagtcaaatgagtggagcccttacacaaagattttccagttttaacaaatttaagaaccccaaactaacaggcttagtgatgtaattgtgtttagtagaggtacacttgtgaataaggagggtgggtggggtagatgttgctaactgcaacacaaagcttttgcatattgcatattattaaacatgctgtacatactttttgtgtttggaacggaatgcaaagatgaaggtctgtttctgtattcttaagacatctttggttattttactttttgaaggttgatactgtaaaagaataaaccacaaattgattgggaacatcatttcaagaagtccctgctcctccacatttgttttgccgatttgcacattaaatgactcttccctcaattctgtcttaagaggcaagaggggtagggtttacacgtaggcagttgggttttttaagggccccttttcaataactggaacactctataacaagatacttatttaaatagataacaatgactatttttgtttttattaaaagaaagttgacatgcctaccaatatttagtcttttatgattacatttttataactttttatattctcagcagagtgctttatctgttgaagtaaaatgtgacagattcacattatcaaagcagagtggcagaggaaaggatgcagagtggctgtttcttttaaaaaatgctcagaactcatttgccgcagctgtacctttttttctttcctatctgagagtgcagtatcgatgttatttggatggagttgctgaatggtaacagtaattcaaacccaggtttgatgagttacttgacttactgaagcatttaaactgtctttatttatcattaaccaaacaaatgtaagtggaagcctttgattgaaaacaattaaactgtattgggtttgtgaatgcaaaaaaaaaaaaaaaaaaaa

SEQ ID NO: 2016 - DNA, 166 bp, Mus musculus
ttttttttttttttttttcttaaaccaacgaccaccaaaactctaaggaaaagcattatttaccttatactccacaaggaaaagcagttactcgcagtaaatggacctgatacatatcaccatagctcatatggtcagcatggtatagggggtgtgtggctttcag

SEQ ID NO: 2017 - DNA, 1479 bp, Mus musculus
gcgactcttttgaatggaatcgggctgattcatcgcctgttctccgagccagtccttgttgagtgtgaggcgctgccttcgccgccgcgtcgccacaaggccaggagagagaggaaaaactacttgtgaaaaattgtatctgccagaattagcaagacttggagttaataacaaatttgtcaaattcaacaaattgaagtttaacactgtaagaattacagttactgaacagaaatatggacagacttcttagacttggaggaggtatgcctggactggccaggccacctacagatgctcctgccgtggacacagcagaacaagtttatatctcttccttggccttgctaaagatgttaaaacatggtcgtgctggagtgcctatggaagttatgggtctaatgcttggtgaatttgttgatgattacaccgtcagagtgattgatgtgtttgctatgccacagtcaggaactggtgtcagtgttgaagcagttgatccagtgttccaagccaaaatgttggatatgctgaaacaaacaggaaggcccgagatggttgttggttggtatcacagtcaccctggctttggctgttggctttctggtgtggatatcaacactcagcagagctttgaagccttgtcggagagagctgtggcagtggttgtggatcccattcagagtgtaaaaggaaaggttgttattgatgccttcagactgatcaatgctaatatgatggtcttaggacatgaaccaagacaaacgacttcaaatctgggccacttaaacaagccatctatccaggcattaattcacggactaaacagacattattactccatcactattaattaccggaaaaatgaactggaacagaagatgctgttaaatttgcataagaagagttggatggaaggattgacacttcaggactacagtgaacactgtaaacacaatgaatcggtggtaaaagaaatgttggaattagccaagaattataataaggctgtggaagaagaagataagatgacacctgaacagctggcaataaagaatgttggcaagcaggatcccaaacgtcatttggaagaacatgtggatgtgcttatgacttcaaatattgtccagtgtttggccgcaatgttggatactgttgtatttaaataaagcgacgtagagagctgtcagtggcgctctgagtgtatcgtccttcttcgttcccaatgctcacagttaagggaactgaaggtgatctggtgatgtgtgagacacctgtgccacctcccatctcagttgtgcactcgcttctgtttattttgtccgggttttgcagattccaaagttgttcaggaatacaacaaagtgaacaaattttgttaagatcccatttactatttgaaaaaaatcagtagcacaaatatattttgattgttgcttacaaaataaaatacatttacaatccaaaaaaaaaaaaaaaaaa

SEQ ID NO: 2018 - DNA, 2811 bp, Mus musculus
agaaaagttagcatgcgtggtatgatttgtaagtaaagatggaagagagagagagagagagagagagagagagagagagagaggtagccatatctaacagcctacttaccaaagaccccaggcctctctgcttggcatgcctcctttctgtccatcctctgaaccccagagattagtgagatttgaataattaaatcattttcagagtgaagggggttaatgcagggtctgtgctaggggagggttttagcttttggtaactgaagattttttcatggaaaaagtcttcgtgttcaatgtgcctagaactgataactaaacagctgacatttgtcggggacagatatggtgtgaaactatgaaaatataagcaaaatcttcacttggaacatgaaactatttcacttagaaaataatcgaaggacccgaggtgttgcctgggttgccagtttctttcgtggctgggcaggaactagtgaggttgaggggcagtgtctgtaagtagctgctaagaggtgcatttccagatgaagcccttggggaacatctgccagggatccgcatggtgttggctccatccattgctttagtttcctccttggattgtgtagaaacttggcttcccatggttttgaaccttccatgccttctttgctttgtggccacccagcctgcctagtgctgcctaggaagctcttacccacctgatttcttctgacatttctttctttggcctttttttctttctccggacatgcagctagttgcctgagtgtatcaagagcacccaggacttgctgctgtccaggcctgttcctcccccagtatccgtgggtgtggaagagctgtgtagcttcaggaagcagagccaggtgccacctttctgtggcttccagatcctccctacctccaactcatgtgcctctgtcacagtgatttcaggaaagcttggtagaccctctagcaacatctcggttcagaaagtctctctggtttgtgagttaacagctcagctaagtgctgttttgtctcagtgagttaaccactgaatgcgagggttggttgttgatctgtctcggtgtgtgtcggagtagacagcatatgcacttctccctgtgcgctttgcaaggtaatgtggctttggctgatccatgcaggcaggtagtggtacagtgctgctgaaaggaagaagttccccattttatctgttaaaacaccagagacatgggcaagtgctaatggacctcacttcaggaagagggtctgcttcctgaagccagtgtgtgatgaaaagtgactgagacctgatatctaaggtgagacctgatacctaacactctgtcacacagtccagggccaacagtgctataggaaagtctagaagaaaacatcacatcagtattttagaaccatcaaccatctcttgtccctatagcccaatccagaggcctggtttttagaactggctgtgtaaggtgccaaacactcagttcacttgtagaatcagagccttttttcccccctatgttaattgaacacgcgctctgagctgttttgttgaagtagaaaatctcatagaaaaatcactgtagatctactgacctatagccctctggaaatgcctttgagatggttttacttttctaggtcatagatgcctgatttataagatgaacaataaaatcagctttctttctttctcttctgatcttattccccagatctgattcaggccatgttccaaagcaaggctacattgaggtcctggtgtctttaagtaaaggacatctttcagatcctctcaaagaaggatttataacagtttccagatgaatgtactaatagctttgggtgccttatctctttcctaatctgtagtgcctgtgagctcagtctcactccttcccttagcccggagaccccttagatcgagtgggaatagtcaagaggctggctggagagtcatcagtacattggtttgcagaaatcttttacaggctacattttggaatttttttttttttagtaagtgatcaaatttggtgggaagtaattcgagtgtattcgattgtattgtcgtcctcgttatcattgtcaaacatgttatagacggcagttggcactggggctgctaatctctgggtgtagtctctgaaactgtagctccagtgaggtggtgtgaaaggttagcaaagccaccatctgctggtggctccagccaaggtgcctcttagccactgaattgctatgttatcctttctcttgtaacaaacccaccccagagataaagcctttaatcaacccaagaaactcctgggctaagtatctgacagtctcacatctcaacagtgtgaattaagtgtccatagcatcagctcaggaggacactctgggagagtgctgacaaaaaagggttattaatactgacctactacttcaagggcagttctgaggtgattagagctttttttaaaaaccaagtatttggggatcctcagcagaggtattcatacagactcccaaagaactatatatgttcctgagaccatcgtttagtctacattgctcttcccagagactgacagatatgaccagtcaaagtgcaagactacctacccactgccatgaaaaccattgcaggaaacctttcccttccctgaatgagattttttttttccctttttatgtggggtaattatttgtgacccaagtgtaatttggatgatttccattaatatcaactcttgaagcctacttgtactgattgagattgtatttgttcctaataaaagtggatctggttgtactgtc

SEQ ID NO: 2019 - DNA, 1028 bp, Mus musculus
catgggaataatcaacactgtggatcttattggaatactctctatgatttgttttccttgtacttgtttttgatttaaggatgtggcatataaattgctaattaatctcacatactgtagtaatcaagtattgtgctagagaagtgactccaaggataaagaatcttgttaacgaccatgaggatctgagttcaatcctggcaccaacatagttgaaggaaagaagtagttcctgaaattattcttagacttccacaaatgcaccatgatggctccacccataaaatttctgtaattaaaatatttcttgatgtcaaatccttaaataatgaaataattatacaaatttgatttctgagtgtttcagacattttaaagaaaagtaaaattcagaaacaatcataactctgctcttggaccacttctgtacacctctatgtctggccctgtgggtcacaggtgactttcaaatcttagtaaggattttcctaaaatatgaccagctgttgaaaatccaggtcatgagcctactcagtttttatggttctctacttatggaagtagaaatttgtacagtttgataagaaagagattcagctgtttttgatgtttcttaacttctcccacccctttccagggaagcttcatgcctggacaagccatgaagcagtagagtgctcctcatacctttgaagtagaaaagatgcctgcctgtttgtgtaacaggctggggaagattccaatacagagctaatcaggttggcctcagaaaaaatactaacttattcgttttgttcctgtctttcagtgtagaagacttctgtattttttaaaatacaattttatttctttcaacgaatttaaaaaaaaaacccctttggaacaacaagaacaacaaaagtataattacttcttctattgcttgcattgaagaaatgctttaaagtatcatcatatttaatatttccccatcatttcacttataatcaataatgtcggtaaacaaaaattaaaaaaaaacaatcatg

SEQ ID NO: 2020 - DNA, 2258 bp, Mus musculus
ggttgctgccgggccctgtatccggtgtccgcccgccctccatcccgctgcctccgcgatgctgtcccggtcacgctgcgtgtcccgggcgttcagccgctcgctttctgccttccagaaggggaactgccctctagggagacgttccctgcctggggtctccttatgtcggggaccaggttaccctgacaacaggaagatggtcattaacagtggtagcgtcttcagggttcgcttcttccaaaccacggctgtgtgcaagaatgatgtgataacagtccaaaccccagcgtttgcagagtctgtcacagagggagatgtcaggtgggagaaagctgttggagatgcggttgcagaagatgaagtggtgtgtgagattgagacagacaagacttctgtgcaggttccgtcgccagcaaatggcatcattgaagctcttttggtacccgatgggggcaaagttgaaggaggaactcctctgttcacactcaggaaaactggtgctgctcctgctaaggccaaaccagctgaaactcctgctccagcccacaaagcagagcccgcagcaccggcggcccctcctccccccgcagcacctgtgctcactcagatgccaccagtgccctcaccctcacagcctccttctagcaaaccagtgtctgcaataaaacccactgctgcccctccactggctgaggcaggagctgctaaaggtctgcgttcagaacatcgggagaaaatgaacaggatgcggcagcgcatcgcccagcgtctgaaggaagcccagaacacgtgtgcaatgctgacgactttcaatgaggttgacatgagtaacatacaagagatgagagctcggcacaaggatgctttcctgaaaaaacataacctcaaattaggcttcatgtcagcatttgtgaaggcctcggcgttcgccttgcaggagcagcctgttgtaaatgcagtgattgatgatgcaaccaaggaagtggtgtatagagattatattgacatcagtgttgcagttgctaccccgaggggtctcgtggttcctgtcatcaggaatgtggaaactatgaactatgcagatattgaacggaccattaatgaactaggagagaaggcccggaagaatgaacttgccattgaagatatggatggtggtaccttcaccatcagcaacggaggagtttttggctcactttttggaacacccattatcaacccccctcaatctgccatcctgggcatgcacgccatctttgacaggcctgtggctgtgggaggcaaggtggaagttcgacctatgatgtatgtagccctgacctatgaccaccggctgattgatggcagagaggctgtgactttcctccgaaaaatcaaggcagcagtagaagatccaagagtcctcctcctagacctttaggaggaagccacacatcctacctatcgatcatgcaggaactgaaaaccactcttctccctgtaccctcatcaatcccagggctccgggatctgtgctccttttgaccctcgaggctttacagcctccatcattgttggcaaccacaatgtcgttatcaccgaaagctactacttcctcctgagttggctatcttggtggagctactggtggacgcaggatctttgtatattcttatctctgagcagcataccaagcccccatcccatattttaggcatattgcttttaacagccagccaggagagcccactaatgtcttagtgccctgggttcctgtcagggggccccatgcccctgagaagccaattcttgagaaattgaggctcccacctatgtgaatccccttcaaaacaccaggggcagtttccctttgaagggcttgcatcatttctgagatagagtggggaggcacgaacactcctaataccatttggacttggttgccacatgtgcatcattataagcacatgtctggttatgaacggtgagggccatctcctaggagcaggagtgtgcgaggggcaatggacaggatagggttggtcaccaacccaggatgaccccaatggataggcatgatggagtagaggcttcaacagagccttactttcccacacacctctcatctgctgatcctgtctgcagggaggccctccctctggtgccctgtcccaggaagaagcagggtccttaagaattgctgctggtaggggaattcagtgaattatgtaccaggtctagtgtttggtatgttgcaagttttaaaaatttctacc

SEQ ID NO: 2021 - DNA, 2010 bp, Mus musculus
gctacgccaggcacaaatatgccagctacctttggacatttggcaggagggtatgacggccagtattatggatatctttggagtgaagtcttttccatggacatgtttcacagctgtttcagaaaagaagggattatgaatccagaggttggaatgaaatacagaaacctaatcctgaagcctggggggtccctggacggcatggacatgctccagaatttcttgcaacgtgagccaaaccagaaagcattcctgatgagtcgaggcctgaatgcttcgtaaagcagggacgctgggggctgtccgtggctggaggacaagccaacaccgtccgccatgtggtgccggcctggagactgaaggcagttttacaaaggaaaacttagatttctattcatttgcttttgtttcttcattttaaaaattatacagatgtaaatggaattataaatactgtgacctaagaaaagacccactaaaaataattgtactataaagtttcataaaaacagatttgatttcttttgataaaagtttcatatgactgtaatttgatttttttactgttataatccagataatataatgtaagagggctaagacattttaaattgaatcacatacatgatataatttgatctttcttatatcttgaagttttatacttgagattcctggactgataagtgaatcagcatgttctctctggtaaatattttctcagagccctgtgtcaaccttgaccctctgcctcacaactaagtgacagtttgcctgtgtgtgtcaaggcccgcaggatacacttcaatgctgtttgtcttttgtagtgagctttgtgattctcggcttctgtcacacttacttacatagctccacttagatttggggttctttcccttctaaaatttaatttctaaagttaatattattatttagataatatttttaaattttgtttcaactggcctagtatataagttttgtgtcttgcactagaagctcaaatgtcaagtcttcggttgcagtcacagtgagagaagcagagaacttaggcatcttttgggttctcgacttttagtatttgctatgtatttgtttctgcttgttttgcttatatatatatattttttttattttgtttgcttgaggcaccatctcaccatggagccagattcgcctggaactcatggtaattcccctgcttcggcctcccaagccttaggggcgcaggtgtgagctgcctcactcagctcagttctcacgtttctaataagactctgaccttgcctccctgaaagtggtaggtcggccctgtagtcacagtgtgttgaagtgccagggggagagatgacatccactggaacttagctttgaaaactccagaaaagagtgcgttggagcagagcgtttgcgaacagctgctcccaagtgttccgtgggcaaccgagctgtgggaaaaggctgtccagcaggctgtttcatatggcgactgttaagtgaacctccagatctccaactccttttattgggacctaagtttccagctcagagtagtgagctcacagcattattttagccttgggagtctactccaaacggaagccaagtaggatagagaggagaaaatgtaaatgagctgtgatcggactttccacagggctttgagttgtttctccacacatacctgaggaatgactttcctggcaggaaacgaaattagagcctgtctgttctttagacccggtggactttgtgttcaataaaatattatgtcgtgtaataaagttatacagagtaccaagagctggtacacagcagggaagccctttgtttatgtagtttgatttgatttttacaaggctgggcatcaaacctccggcttcttcacccatgctagcaagtgctatgctctcccagctgcttttatggtggtggtagaaacctctggaagcgtctcacatctgtccccacccccatttttgtttcctactttcagacaaaaaaaaggag

SEQ ID NO: 2022 - DNA, 1147 bp, Mus musculus
ggttgggtagtggcccctggagctttctcagggattttgctgactcctatgtgattctgtctacctctctctcttcccctaggcctctgggccctggtgaacaacgctggcgtgggcctgcccagtggtcccaacgaatggctgaccataaaagactttgtgaaagtgatcaacataaacctggtggggctgattgatgtcactctgaacatgctgccgatgatcaagaaagcccggggcagggtggtcaacatgtccagctctggtggccgtgtggctatattcggcggtggttactgtgtctccaagtttggtgttgaagccttctctgatagcatcaggcgcgagcttcatttcttcggggtgaaggtcagcatcattgagccagggaactacaagacatccattctgggccaagaagctctggaatcacgcatgaagaagctgtgggatcggctgccacaggagacccgggatagctacggagaggagtatttccaaacctatactaaaaagttggttaacttgatgaggtcagcagagccaagaatcagcgatgtcaccaacagcatggagcacgccattgtctcccggagcccccgaatccgctacaaccctggcctggacgtcaagtttctctatctcaccctggctaagctgcccacccctgtgacagatttcatccttagcagataattgccaagaccagcagacagtgtttgagctggcgagctcaaggggtagccagtggagcacaggggagagggcaaaggactgggggatcacaagaggtgttgtcatatatcttgtgggcagagaagagcatactcagcttactcccactgcaggctgatgtctccttccatctgctggggcctctagaaacctgatgtgaccccggctgatgtagatagagcgttgcagtataggccgcaatacacccctcaccaaggcaggtactagtgctcctggactttaaaagccggcttctgttgacttacaagctgtcaccacctccgtaaaacaccatggtacaatctagcccacaggagaatttcggtcccctccccacagctctcaaagcaggcactggtttgtgtatatatggaatatgtaacatggcaacaagaactgccagagcatactc

SEQ ID NO: 2023 - DNA, 1700 bp, Mus musculus
gagtagtcccttcctgttttctccacggaggcttttccactccttgcttcgttattttgccacagagcttgatatctcttcaccgagtacgtcatggctcccaagaaatgcccagaaacccagaagtcccccgacgttgcggtgctcctcaggagcaaaggtcgcagaggtcctcaggagctggagcccgaagccaagaagctgcgtgtgcagggtcccgtttctagcaggacatgtgagtcgtgctgccttctggcagagttgtccagcctgcagatcccttcacggagtagcagcattgtcagggatctttaccagcataagttgggcaaagccacctggtcatcactacagcaggtgagatgtttcctgtctgacgtgctcaaaggtcacatagcttttcaactattgctctttctcactagatgataaattggttcaggatcatcaggtcacccccaggtatgatgattgacctactgtacactgagtcaaagagaaaaggttttactctgtagacttctagccacaacatgcgttctccctcttgctttccaggattagttcacttacattgcagatagttgatgcacaaggccagtgaagacttattgcctgtatataaaggggccagacattgacagtttatccaggacttgcgtttaatttttatttatgttttgagacacaatctcactgtgtagccttagctggcctggtcctctgtatgtagacctggctggcttcagtctcacagaaatccacctgcctctacctcctgagtactggagttaaaggcatgcatcactgtcagctcaggacatgagttttaattcagtgaatccagattaattctattttctctgtattagggtctgcagaagtcctttttgcactctctagcttcttaccaggtattccgaaaagctgccccctttgacaggaggactacgtccttggcatggcacccgactcatcccagtaccctggctgtgggctccaaagggggagatattatgatctggaactttggcatcaaggacaaacctatcttccttaaaggggcgacctggcattcacggcacaacctcattgttgtgggccgatacccagatcctaatcttaaaagttgtgttccctatgaactaaggacaatagatgtgtttgatggaagctcagggaagatgatgtgtcagctctatgatccaggatactccggtattacttcgctcaatgagttcaatcctatgggagacacactggcctctactatgggttatcatattctcatttggagccaagaggaagatgggtcacagaaagatcatgaaagactatgaagatggtgtgggacagcaatactggaccccacagatgggaacacattctgtgaggagtggcagctgtttgttaataggccaaaagtacccaattcttagggttggagcagggacacttgtgacaagggatactgtgggactaggatgctgacatgttactgctctagattttgctccagaaaattaaagagtaaaccagctacgctcagggtcccagctatatctagcctggaggccaagtttatgctagagccaaggtacttttcttttttctgatgtataggagcaaaataaccagagaattttaaaacttttatgttcaattttagcatggccaataaaagcatatcctttgtatct

SEQ ID NO: 2024 - DNA, 1065 bp, Mus musculus
ttttttttctaactcttgctgcgtctcccatgcccaccatgtcactctgaccctcttcagccagccatcctctttactcttaacgtgaggctgtgcccaaagacaagagtgagcagctccaagcttctctcccctgcgagcttactatcaaatcagagaagaaaatggagacttcgtgtgaaaaagtttaaggattataaaggaacatttggaaagcagagtattttcaagtgaatagtgcagaggcctctgagggaggggactgtgagccttggtgtgaggcttcctggagtgagcttctccataacatgctgagcccctgtatgagcttgtgacagccacagactttgcatactccagcacagtgaagcagaacttaaagaaggcactagaagaattccagagtgaggtcagctcctgccgctgtgctccttgcagagggaatggagtccctgtcctgaaaggatcccgctgtgagtgcatctgccccggtggcttccaaggcacagcctgtgaggttacctatcggaaagacatccccatagatgggaagtggagttgctggtctgactggtctgcatgctctggaggacacaaaacaagacacaggcagtgcaacaatccagcccctcacaaaggaggcagcccctgttcgggtcctgcttccgaaacactcaactgttaaaggagggcacacacagatgatcccgagtgaactccaaccctcacacacttagccaggcttccagtactccagctcccacccagggctgtcacaacaaaacgcaatgccactctgcccttttaagatttgtttgatcagtgcatgataatttgagtaaacagtggattgagcaaaaccctaagtccttgcatggtgaacctccctttgcacactctgcacttttgttacatccacaaggtcttggagccaaaaactctcttggtcaccatgtagtgacaaaggcacatagtaggtgttgaataatgaaacagtacattgataagttgttcatcccttggtaagcacagagtcttcttcagtaataaagacagccaatctct

SEQ ID NO: 2025 - DNA, 3873 bp, Mus musculus
cgtagaagttgtctctgtcggcgggcgggcgggcaggattggggcaccgagaccggcgtgcggacagcagggatcgcggggagcgaggggtgcggcatggagctccgggcagtcggtttctgcctggcgctgctgtggggttgcgcgctggcggccgcggcggcacagggaaaggaagttgttttgttggacttcgcagcaatgaagggagagctcggctggctcacgcacccctatggcaaagggtgggacctgatgcagaacatcatggacgacatgcctatctacatgtactcggtgtgcaacgtggtatccggcgaccaggacaactggctccgcaccaactgggtgtaccgggaggaggccgagcgcatctttattgagctcaagttcacggtgcgagactgtaacagcttcccgggtggcgcccatgcctgcaaagagaccttcaacctctactatgcagagtcagatgtggactatggcaccaacttccagaagcgccagttcaccaagattgacaccatcgcccctgacgagatcacggtcagcagtgacttcgaggctcgcaacgtcaagctgaacgtagaggagcgcatggtggggccccttacccggaagggcttctacctggccttccaggacatcggcgcctgcgtgcggctgctctccgttcgcgtctactacaagaagtgtcccgagatgctgcagagcttggcctgcttccccgagaccattgctgtcgctgtttccgatacacaacccctggccacggtggccggtacctgcgtggaccatgccgtggtgccttatgggggcgagggggctctcatgcactgcacggtggatggcgagtggctggtgccatccgagtgcctgtgccaggaaggctacgagaaggtcgaggatgcctgccgagcctgttctccaggattcttcaagtctgaggcatctgagagcccttccctggagtgtccagagcataccctgccatccacagagggtgccacctcctgccagtgtgaagaaggctatttcagggcacctgaggacccactgtccatgtcttgcacacgtccaccctctgcccctaactacctcacggcatgcatgggtgccaaagtagaactgcgttggacagctcccaaggacactggtggccgccaggacattgtctacagtgtcacttgtgaacagtgctgcgcagagtctggcgagtgtgggccctgtgaggccacggtgcgctattcagaacctcctcacgccctgacccgcacgagtgtgacagtcagtgacctggagccccacatgaactataccttcgctgtcgaagcacgcaatggcgtctcaggcctggtgactagccgaagcttccggactgccagcgtcagtattaaccaaacagagccccccaaagtgaggctggaggaccgaagcaccacctccctgagtgtcaccaggagcatcccggtgtcacagcagagccgtgtgtggaagtacgaagtcacctaccgcaagaagggggatgccaacagctataatggccgccgcacggaaggcttctccgtgaccctggatgaccttgctccggataccacgtacctggtgcaggtgcaggcatggacgcaggagggccaaggagccggcagcaaagtgcacgagttccagacgctgtccacggaaggatctcgcaacatggcggtgatcggcggtgtggctgtaggtgttgttttgcttctggtactggcaggagttggcctcttcatccatcgaaggaggaggaacctgcgggctcgccagtcctctgaggatgtccgtttttccaagtcagaacaactaaagcccctgaagacctatgtggatcctcacacttacgaagaccccaaccaggctgtactcaagtttaccaccgagatccacccatcctgtgtggcaaggcagaaggtcattggagcaggagagtttggagaggtctataaagggacgctgaaggcatcctcggggaagaaggagataccggtggccatcaagacactgaaagcgggctacactgagaagcagcgggtggacttcctgagcgaggccagcatcatgggccagtttagccaccacaatatcatccgcctggaggcggtggtctctaaatacaaacccatgatgattatcacagagtacatggagaatggagcgctagacaagttccttagggagaaggatggtgagttcagcgtacttcagttggtgggcatgctgaggggtatcgcatccggcatgaagtacctggccaacatgaactacgtgcacagagacctggctgcccgcaacatcctcgtcaacagcaacctggtgtgcaaggtgtccgattttggcctgtcgcgtgtgctggaggatgaccccgaggccacctacaccacaagtggcggcaagatccctattcgatggacagccccagaggccatttcctaccgcaagttcacctcagccagcgatgtgtggagctacggcattgtcatgtgggaagtgatgacttatggcgaacggcccttactggaactgtcaaaccacgaggtcatgaaagccatcaacgacggcttccggctccccacgcccatggactgcccttcagccatttaccagctcatgatgcagtgctggcagcaagagcgctcccgccggcccaagtttgccgacatcgttagcatcctggacaagctcatccgacgccccgactccctcaagacgctggctgacttcgatccccgagtgtccatccggctgcccagcaccagcggctcggagggagtccccttccgtacggtgtccgagtggctggagagcatcaagatcgaacagtacacggaacacttcatggtggctggctacacggccatcgagaaggtggtacagatgtccaacgaagacatcaaaaggatcggagtgcgtcttcctggccaccagaagcgcattgcctacagcctgctgggactcaaggaccaggtcaacacagtggggattcctatctgagtccattggggctgtcacacaatacttgaagagccacagtggtctccctgccgatctggtgctggcccactggaactttatttatttctgtttcctcgtctatgcctccctaggactctgcaggggctttttgaatgacacctgcctgagcctgggaaacttggattgctggtcagggctctctttcccctgaaaaggacccagctaagaacttagcagtttgccatggccttcccagcatcccctgaggctaaagttccaccaagagtcgatatcgacgagggacatttccaaacggacctccccatcttcatttggcctcctgagaagccactctggagctgaggctaagcactaagcccaggaccatatgactagcactgtaccgcccgcccctagttagagggtaggttttggacttggctgggttgtggtcacaagcaatctcccagtgccttttacagaccccagtctgccctcccgtcgagggccagcttcttgctttcctagggccctctcaggatgcttggctgtgctgaggtttttattaaatatatattttatacttgcggaaagaatgagtgtgtggcagggacttgccagggctggagacagaggatcccctgcaacaagacattcccgggctgggggctggcggacctgcaggagactttccgccaccaccccgtctccagcccctttggacaaatgtcgctgtcagtgttacagatttcttttattgggttgtttttttgttgtatttttttgaaccttaacttattattttttttatatttattgttagaaaatgacttatttctgctctggaataaagttgcagatggttca

SEQ ID NO: 2026 - DNA, 1152 bp, Mus musculus
gagctggagcctcggcctcccagtcggtagcagtaccacaaatcctgcgaaaggcatcctccgggtgaaaccatgatggtcgagttcgcgccactcaacaccccgctggcacggtgcctacagaccgctgcggtgctgcagtgggtcctgtccttcctcctgctcgtgcaggtgtgcattggaattatggtgatgctggtcctgtacaactattggttcctttacatcccatatctggtctggttttactatgactggagaaccccagagcaaggaggcagaagatggaactgggtccaaagctggcctgtgtggaagtatttttttctgtattttccaatctgtcttgtcaaaacgcaagatttggatccgggtcacaattatatatttggatttcaccctcatggaatattcgtgcctggagcctttggaaatttttgtacaaaatactcagacttcaagaagctatttcctggctttacatcgtatctccacgtggccaagatctggttctgtttcccgttgttccgagaatatctgatgagtaacgggccggtttcagtgtctaaggagagtttgtctcatgtgctgagcaaggatggaggtggcaatgtctcaatcattgtcctcggaggtgcaaaggaggcgctggaggctcacccaggaacattcaccctgtgcatccgccagcgcaaagggtttgttaagatggccttgacccatggtgccagtttggttccagtattttcttttggtgaaaatgatctatataagcaaattaacaaccccaaaggctcctggctacgaactatacaagacgcaatgtatgattcaatgggagtagccttgccactgatatatgccagaggaattttccagcactactttggcataatgccctatcggaagctgatctacactgttgttggccgccccatccctgttcagcagactctgaacccgacctcagagcagattgaagagctgcatcagacatacctagaggagctaaagaaactgttcaatgaacacaaagggaaatatgggattccggagcacgaaactctggtatttaaataacctccttcctccaaggcataagaaaggaaggcaagaaagcatcgttgagaaaataaataaataattcttctg

SEQ ID NO: 2027 - DNA, 1599 bp, Mus musculus
aacaaatttagaagaagccatgatgtgagcctgtgctgtgctgcttcgccacctaaggctatatcaggttaacctgatattacaaggttgtaggacaatgtgctgcttctggtgaaacaggggagacgctggagccttttcactcagcagcggctcctgtcccagtacagattaacttgtattctggctgtagtaaatatatcagcaaaacccaacaaccttacaaagaccacattctcgtcaaacgccgtattccatcagtgagacagacggcactgccggtacccagcagtagccctgcctgagcggaaaccggagctggtctcaaacagaaggaggatgcacactgcggagtcatcaacagaaacctagtgttttaatcacagacaccgatcatcgagttaatcactcagtcatatagccatctattcattttatcgacaaaaacttggcgtttgaacaacatcccaatctgcaccgtgaatgatgatgacacatgtcccagatcgctgtatatctctgaccagtttagcccttccgagaggaatgagacctcagtagcaaaattcactaaccctcccagcaccgcatccccagaaagcctgagagtgggaggactgtcaccagccccagcgaaactgcctgccaggcctcagtcggagccatgtagaaaatccagccagtgcttcaagacttccaaagacaatcccttggtgaaaaataaggttgaacataaagctaaaaggccactcccatctgcaaggatgtgctctgccgctgccttccaatcctcagacgcgatgagcaacagaatggatgggaatgagaacaccgtgcacattcccaactacctggatcaggagataaagatcctggcaaagctctctgaaattttgcataccgactctctggcggaggttctgaactggctgcttcaagcaagcaacaaagaaaaggaatgggtatcagctctggttcattctgagctagctgagataaacctgttgactcgccacagagcaaacaccccaacagaaccagcagcagagcccaggaagccgtacacctccggaacacccacaaccaaactgctgcaaaactcacgtgcaaagctgaaagcgctgactggatctagagagcgtcagctacacagaacgtcaagtcaaggatccaaagggaacaagctggtgtcacacggggctgagacaccactgtttataagaagaaacaagaagcaaacacctgttacagaatatctcaatccagagtctcctctagggtccaacagtgtggcgagcagatcaccaaatccggggtcagccaggagtgcacaaggctacagccctcaaagagtgttctatccttaacacagcaaaccagggtcagccaggagtgcgcaaggccacagccctcaaagagttttctatgcttaacacagcaaaggtagagatgagtgctgggtggttctttcacaaagatgggcttcacactgacagaacatcaaagtaatttttaaaataaccaacacgtcctctatatggtggcacatgtctcaaaaacacttacatatagtgctagaaataaatattagcgaagacc

SEQ ID NO: 2028 - DNA, 1479 bp, Mus musculus
gctactctgggcgccgattgagactggcgggagcgagaaccatggcgtgggttccagccgagtctgcggtggaagagttgatgccacggttgttacctgtggagccctgtgacttgacggaaggtttcgatccctcggtcccccccaggacgcctcaggaatatctgaggagagtgcagatcgaagcagcccaatgtccagatgttgtggtagcccagattgacccaaagaagttgaaaaggaagcaaagtgtgaacatttctctttccggatgccagcctgcgcctgaaggttactctccaacacttcagtggcaacaacaacaagtggcacatttttcaactgttcgacagagtgtacacaagcatagaaatcactggaaatcacaacagttggacagtaatgtggcaatgccaaaatctgaagatgaagaaggctggaaaaaattttgtctgggtgaaaggttatgtgctgaaggggccactggaccgtctacagaggaaagccctgggatcgattatgtacaagttggttttcctcctttgcttagtattgtaagcagaatgaatcagacaaccattactagtgtcttggaatatctaagtaattggtttggagaaagagactttactccagaattgggaagatggttttatgctttgttggcttgtcttgaaaagcctttattacctgaggctcattcactaatccgacagcttgcaagaagatgttctgaagtgaggctgctggtgggcagtaaagatgacgaaagagtcccagctttgaatctgctgatctgcttagttagcaggtattttgatcaacgcgatttagctgatgagccatcttgattggcgcttacctcctagggatggaagatgattctgtggaaggagcctaagtctgagaaacacagttccaacctgaggacagattacatcacttcttcaagttatgtgaagggcttcatcttaatctgcagctcaagctgatattcaaaatatagatttgattggtttaaagtgtctgaaatgtctgtgaaaaagcccatttggtatctgatgagcaattggaacagttttctctttttttggggggtggggggtggtggatatggagacagggtttctctgtgtagccctggctgtcctggaactcactctgtagaccaggctggcctcaaactcagaaatctgcctgcctctgcctcccgagtgctgggattaaaggagtgcgacaccaccgccgggctggaagttttcttaagttgcatgcattgaaaagaggtcaagtgtgacttactacttaagcagcttgtataaaaactgatggcattttatacaggcccctggggctgcttcattgggttttttttacaagtatacatatatatttatgttgaaatgtattttgtctatggaaatttttttgactcttgaacaaaataaaagacactggatgtctttagagttgaagttc

SEQ ID NO: 2029 - DNA, 3565 bp, Mus musculus
cgtgggggacacagcgtccaggccttggcaaggcttgggcgacactgccgggttcctgcttgcgagcggtcagcatgcatcttcacctgctcttgatattggcgctatttcgggccggctgcgtggtggcaggtcctagctacagcctgagcgggagctggcgggtgagcaacgggaatggctccctggagctaccggcgactgtccccggctatgtgcacagcgccctgcaccagcacgggctgatccaggatccttactacagatttaatgacctgaactatagatggatttccttagataactggacctacagcacggaatttaaaatcccctttaatctcagtgaatggcagaaggtaaagttgatctttgatggagttgacacggttgcagaaatcctgttcaacaatgtcaccattgggaagacagacaacatgttcactggatacagctttgacgtcaccaacgtagtcaaagacgtgaactccttaaagctgcagttccggtcagcagtgcagtatgcagagtgtcagagcaaggctcacactagctaccgggtgcccccagagtgccccccggtggagcagaagggtgaatgtcacgtcaacttcatccgaaaggcacagtgttccttcagctgggactggggcccttccttcccctctcagggaatctggaaagatgttagaatcgaagcctataacattgctcatctggattacctcacgtttttgccagtatatgataacgcttctcaggcctggaatattgaaatagaggcttcttttgatgtcgccagctcgaagtccgttagtggtcaggtgacagtagccatccctcaactgaaaacacagcagacaaacgacattgaacttcaacaagagcaaaggattgttaaactactggtcaaaattaggaaggacgttgctgtggagacctggtggcctcgtggacatgggaaccagactgggtacaacatgacaattctctttgctctggatggaggcttaaaaattgagaaagcagccaaggtttatttcaggacagtgcaactgatagaagagggcataaaagggtctcctggtctgagtttctacttcaaaattaatgggcttcctatatttctgaaaggctcaaattggattccagccgactccttccaagacaaagtcacttccgatcggctgcagctccttttccagtccgtcgtggatgcgaacatgaacactctgcgcgtgtgggggggtggcatctacgagcaggatgagttctatgcgctctgtgatgaacttgggataatggtgtggcaggactttatgtttgccagtgccctttatccaactgagcctggcttcttagcctccgtgaggaaagaagtcacctaccaggtcaggagactgaaatctcacccctccatcatcatatggagtggtaataatgagaatgaagtggctctcagcgtgaactggttccacgtaaatcccagggacatgaaaacgtacattgacgactacgtgaccctctatgtgaagaacatcaggaagattgtcttatcagaagacaagagccgtcctttcattgcatccagcccaaccaacgggatgaaaaccatggaggaaggctggatctcttacgacccttatagcatccagtatggtgatattcatttttataactatgccgatgactgctggaattggaagatcttcccaaaagctcgattagtgtctgaatatggctaccagtcctggccttcttttagcacactagaaaaggtctcatctcaggaggactgggcttacaacagccgcttctcccttcatcggcagcatcatgaagatggcaaccatcagatgctgcaccaggtcaagatgcatttcaaactcccccaggggacagacccattgcgcacatttaaagacactatctaccttactcaggtgatgcaagcccagtgcatcaaaacagaaaccgagttctacctgcgcagccgcagcgagatagtggacggaaaaggccacaccatgggggcactgtactggcagctgaacgatatctggcaggctccttcctgggcctctcttgagtacggagggaaatggaaaatgctgcattacttcgctcggcgtttcttcgctccactgttgccagtgggatttgaagatgaaggtgttttttacgtctatggcgtctcagatcttcacaaagaccaccacacgcagctcaccgtgaggctccatcactggagctccccgaagcctttgtgctccctcgtgaattcaagtattgtggttaaggccggagaggcagtggttctgttccagatgccggtgtctgagctgctgaagagatgcaggggatgcacgagggagacatgcgtggtctccttttacttttcaactgacaaagaactcttcagcccaaccaactaccacttcctgtcctccctgaaggacgctaaagggctgctcgaggccaacatcactgtcaacatctctcagaagggcaatgtttttgtttttgatctggaaacgtctgcggtcgctccctttgtttggttggatgtaggaagtatccccgggagatttagtgataacggcttcctcatgattcggaagaaactctcggtactgttttacccttggaagcccaccagcaagagtgagctgcagcaggccttcagcgtcacctccctgacggatacctactgaagggacatggcttgtaattcagtggacactggggacaaaggctttctaaagcatggctggagaagaaggcagcctgagataaaaccgtcaagaagtatctgctgcctggggtgctatgacttcccagtgaatactgttcatcctggtgatgtctttagacaaggtcatgcccggggattcttgaatctcccaggattgtggttttgtcccacagctaaagcacggccagaagactcataccacccaatgacctttttgggagaccactagactgtgacatgattgtgtggaaccaaatgtggaggttctgaagtaatgtaggcctttcatagcaccaggaattctacccactgtaggtgaagtgtgtggctaggattgccagaggaaatgggaactcagatcctacaatagagattgcttgatggcagccatattgattgttggtagacagctgaggggcctgaatgttgtatctgattactatctttaggtaggattccctttttcatatagtttggcaataactctctttctgaaaagaccaagagatctttgcagcctaggctgattgtgctgtcacctgtgtagtctcagactctggaggcagaggcaggaggaccacaaattcaaagttggccccgactatactgttgaatttttcacttctcctcgtcctgagtgttcttgtgagctttaggcttaccactgattctgatggactctcgaatccaaagttaggagctacatttaaactcattggctctgctgtggaagtggcaaaaaatgttaataagtagctattttgggcactggtttgtgggctttttggtatgacttttatacctcgtgcc

SEQ ID NO: 2030 - DNA, 1197 bp, Mus musculus
gatttttcaagtacattgaaaacagagatgtggccaaatcagttttgaaggagaggggtcttaagaagattagattgggaatagaaggctatcctacctacaaagaaaaagtaaagaaaaggccagggggccgtccagaagtcatttacaattatgtccaaagacccttcattcgaatgtcctgggagaaggaggaaggaaagagtcggcatgtagactttcagtgtgtaaagagtaaatccattaccaatctggcagcagctgctgcagacattccccaggaccagctagtagtcatgcaccctactccacaggtggacgagctggatatccttcccagccaccctgcctcgggcaacaatgacctcgatcctgatgcacagaatccaatgctgtgatgctgatgttcctgaaaccatagcatgctactcttcacagtgacgtcgtactcctcgttctgcactgcgaggccacttttcttcattgtgagatgcacatgtttaggatactgcagtgtaggcttttttaaagaccaaaggtagctgaatggttttttaatgagtacaactttagcatcctcgttcgagttctataaatgtatttgtttaccagtaggtttgtgaaattggttctttgtatggggacagtcctttttcacatatctaggttttctcagaagtggtgggaatttggcagctggggtactttaagtgtagattgatatttatcttgcctcaggtaagatgaatattacaaagttgcactttatagatggtggttaaatggagctgttgaagccattttagagctgtgatgcacagtataacataagtgcttctatcagagtattcctcagtacagtatgtatagttggcccacatcaagcaaaaacatatttatcttgggtttatttaaacaattaggataaaatttgatgcttatagtgttggttcactcatctccagagccctgcagccctattagagtgagtcacatgcagggagggtgaacgtcaagaggtggtttactgtccagtctgccttatccttaatctgttcatatatttatttactaatgcttttttcttaagagttatgggatagaaaaacaaactgtttgctcttcatttactaaatgattgtaaactcgagtttttcatcaaaataaaatttcattgttttaaaaaaaaaaaaaaaa

SEQ ID NO: 2031 - DNA, 1978 bp, Mus musculus
gagatgggtgttttgcttgcatatctgtgcacacatttgtatctggtgcctgcagaggccagaagagaacagcagatcctttggagctggacttacagatggttgtgagcaacagtgtggatgctgggaactgatccctggtccttgggaggagcaaaccactgagctatctttccaccccctgcttttgtgatttgaggcagtctcattatgtagtgcagatgagaaggctttgttcttgatggtattttactgcacattacaccttgaaactcatacactgcttttgtatatgatctctactaagaaaagggtacttctagaactcatgggaagcaggccttggagaaaagattggcagataaatatttgggtataggaggcaaccaggaagaactccacaaggattaaagaggagttttgttttgttgttgttattttcgagacagggtttctctgtgtagcccttgctgtcctggaactcactcagtagaccaggctggcctcgaagacagagatctacctgcctctgcctctcaagtgctgagattaaaaggcttgtgtcaccactgcccagcaaagaggagttttttgtttttgtttttttcgagacaaggtttctctgtgtagccctggctctcctggaactcactctgtagaccaggctggcctcgaactcagaaatctgtctgcctctgcctcccaagtgctgggattaaaggcgtgtgccaccatgcccagttaccaaagaggagtttttgatgaaagaaatacagttagttgggagttaaaagtggaactttttggtagagtacatatttggtatgcataaagttctggttctataatctctgaaaagttttttttaaaagtaaaacaagcaaacaaacaaacaaaaacccagacttcagtaatcaaagtatagggaccaggaaaacactgggacatttcaaaaatcagtggaggagtttggagggaactaaacagtcctccctttctttggcattttactctctagtctccaggatgcctgaattttagccatattctttcttgggtagttttgtaggcccagccttgactccacaggttgcctgtggagtcttttagttcccacttgagacagaaatgcccaggtctgactacacgggctgtaccattaggtggtatacccagggaattctggcacttgaaaggaggaagcaggaggatcaggatttgaactgtttcaagaaaaccaaaccacatccaacaaaacaaacaaacaccaaaagggagaagctcccatcaagaattgcacagcacaggaacctgaagccaggcaggactagcagggtgaggtgggagcactctaggggttggggaggagaaaggccaagcagagagcatccttggtagaaaaaaggaaagaatgaggtttgatgagatggtgggagaatccactcaaatgtctttccttccctttggatgaactcaagaaccaggatgggatcaagacgatgagagaacatggctgagaaggtgacagataaagaaaggcagttgggaaggaagtttcttcttgtcagccccttccccttcacattattttcgtcttgtttcctctatttttttgtttaggtttttgtttattttgttgttgctctagacaaggtctcatgtagccgaggctagcctcaatctcattgtgtagccgaggctagcctcaatctcattgtgtagttggggatgtccttgaacttctgatcctccttgtttccaacaccagagtcttgggattacaggtgtggaccaccatgatggggtaaatgtctatgtttaagataggcaaggaatatagttgaaaatgagaaagtttagttagactacataaaagaaaaaagaagattgaaaaagaaaaggaagaagggaattggggggtgcacatttttttgtgatttgttcataaagatgagcttaaataaaaaatttcgcatgg

SEQ ID NO: 2032 - DNA, 223 bp, Mus musculus
tcccttgcttctggggaaggaggaggagggggacccagggcctgtattatatatagtgtatattttttcaatattttagtgagcgcagatcctgtgtttatttatgcagcttacacccttgtatttgtgcgtttgcgtggtatttttatttcttgggatgagggtagggggtgggtttggtaaaggagggccccaccctagggtttttaaataaaacaactag

SEQ ID NO: 2033 - DNA, 705 bp, Mus musculus
cggccgttgcagcgcgcccggccctgtgcggagcccagggatgaagcagctgtgctgttcttgtctgttgtggcttggactcctactgactcctttctccagggaagaggaagaggaatccagacccaggaagctgtgcggcaggcacctgctgatagaagttataaaactctgtggccaaagtgactggagccggttcgagatggaggagcaaagtcctatgacacagttctttccccactactcacgcaagggcaaagccttcaaccctcacccttcttcctccgcctggagaagattcacaaacccagtccctgcaggcgtctctcagaagaaaggaacacacacttgggagcctcagtcactgcccgactatcagtttgaaaagacggagttgcttcctaaggcaagagtgttttcataccacagtggcaagccctatgttaagagcgtacaacttcagaagaaaagcacgaacaaaatgaataccttcagaagtttattttgggggaatcattcccaaaggaaacgcagaggctttgcagataagtgctgtgtgataggatgcaccaaagaagagatggccgtcgcgtgcctcccctttgttgatttttaaaccttaacgattaatcaaacatcactggtgatagagatgtacaaactgtcgtaggaactatgctcgcttaataaaagcttactaaatcc

SEQ ID NO: 2034 - DNA, 936 bp, Mus musculus
tgcgtttgtctttggggcttatttctatccagagcagtgcctgcgtggagcttccacgttgcgactcagccgaccttcttccttactcctgcacgacctggtgtgactgtgagcagccgtctctcaacttttccttctgaggatctagcagcagaaagcagctctacttccctgcaaaggagctgggcaccgtcgccatgaagttcatgctgaacctctatgtgctgggcatcatgttgaccctgctttccatctttgttagagtgatggagtctctgggaggcttactggagagcccactgcccgggagctcctggatcacgaggggtcagctagccaacacacagcctcctaagggcctgccagaccatccatcccgaggagtgcagtgaacctccctccctgcaggcatcacagcttcagcatgtccaaccacacgttccatttctcgggaggcagcatcaagtgtctccaaaggactcttactaggcctggaagggctgttcccttaccctggaaaagagcctatttcccctagagctgtgagtgggctgtctgtggctctgggatggaggtgtaccagttccagctgttgggagaatggattttggtttcgtttgtttcagacctctgtcctaaaggactcttttggacctaagtatcttctgttggtttaccattgagtctcttccctgagagttgtttggatggcatcaaaggggttgtggtttgactgtgaagacagagggtggactatccagtgtccaggtcaagttgtacatttaagttctttctccagtgtaatgcacatgtgtttgtatataatgtctaaagggctatgggatgatcaggcctgcttagggtatgggagttccagccactgtgtggcttaaacatgaatttttctaatgcaataaatgtgaatatatatgttcc

SEQ ID NO: 2035 - DNA, 307 bp, Mus musculus
ccctcctccccctccctcgagagggttccccctccgacagtgatgactagtgccagtgaaccccttacggatgtcctgtattccttttgcaaccaccagtgaccagaaactggaaccccagcccaccctaactgctgggggatcatcaagtgtcctggcgggatgaggtggggttctatgccccctcccccatctttgagaaaagggcagaactaaactgggtttatactggaccctccaatgaccagatgtatatagaaatttacaaagatttttttattaatttaataaaacaataaatagagtt

SEQ ID NO: 2036 - DNA, 944 bp, Mus musculus
aaacacaaaccaacaaatcaaaaaaattaacaataaaagcccaaatagcggcggagagggcttcggatcccatggcgaccccggaggccagcggcagtggcgagaaggtcgagggctccgagccctccgtcacctactaccggctggaggaggtggcgaaggaaaactcggcggaagagacgtggatggtgatccacgggcgagtctacgatatcacccgcttcctcagcgagcatcctggcggggaagaggttctgctggaacaagcgggtgctgatgcaactgaaagctttgaagatgtcggccactcccctgatgccagggagatgctaaagcagtactacattggagatgtccatccgagtgaccttaaacctaaaggcgatgacaaggatccttccaagaacaattcatgccaaagttcctgggcgtattggtttgtccccatcgtgggcgctattcttataggtttcttgtatcgtcacttctgggctgacagcaaatcctcctgaggagacctcgttgaagtgcggagcacgtgctcctgcgatgagaggaggagacttgtgtggaggctgcagggtgttccctccttggaacctgccagttgttttctttccccttggagccaagatggttgaccagatatctatcctccttcagtgtacgaccagagtctttcatccgccagagcctgacgcccaaagcacctgctcactctgtgtccttgccagggtttctctcattggttcccactccttcctttcatttcaaaagttgatgccaatgacttagagttcctatgttgtagtgacatggcctttggggacagtacatgatttctcataatttgaattcatagtagatatagttaagggaacagcagtcaggttatgaatcttttcccatttttctttttaagtaaatttatttttttaattctg

SEQ ID NO: 2037 - DNA, 2937 bp, Mus musculus
gagcgaggcagccgccgccatgggctctctcttccgcagcgagagcatgtgcctggcgcagctcttcctgcagtcgggcacggcctacgagtgtctgagcgcgctgggcgagaagggcctggtgcagttccgagacctcaatcaaaatgtaagttcttttcaaagaaaattcgtcggtgaggtaaagaggtgtgaagagctcgaacgaatactggtgtacctggtgcaggaaatcaccagagctgatattcccctgcctgaaggagaggccagtcctcccgcaccacctcttaaacatgtcctagaaatgcaggaacagctgcagaagctggaggtggagctcagagaagtcaccaagaacaaggagaagctgaggaagaacctgttggagctggtggagtacacccacatgctgagggtcacgaagaccttcctcaagcggaatgtggagtttgagcccacgtatgaagagtttcccgccttagagaacgactctctgttggactacagctgcatgcagcggctgggcgccaagctgggattcgtttctggcctgattcagcaaggcagagttgaagcatttgaaaggatgctgtggcgggcctgcaaagggtacaccattgtgacctatgcagagctggacgagtgcctggaggaccctgaaacgggtgaagtcataaagtggtacgtgttcctgatttccttttggggagagcagattggccacaaggttaagaagatatgtgactgttaccactgccacatctacccgtatccaaacacggctgaggagcgcagggagattcaggaggggctcaatactcggatccaagacctttacacggtgctgcacaaaacggaggactatctgcggcaagtgctctgcaaagctgccgagtccgtgtgcagccgtgtggtccaggtgaggaagatgaaggccatctaccacatgctcaacatgtgcagctttgacgtcaccaacaagtgcctcatagctgaggtctggtgccccgaggtggacctgccaggcttgcgcagagcactggaggaaggctcgagagagagcggagctacaatcccctcgttcatgaacacaatccctacgaaagaaacaccccccactctgatccgcaccaacaaattcactgaaggtttccagaacatcgtggatgcctatggagtcgggagctacagagaagtgaacccagctctctttaccatcatcaccttcccgttcctgtttgctgtgatgtttggcgactttgggcacggctttgtcatgttcctgtttgccctcttactggtgttaaatgagaatcaccccagactaagccagtcacaggagatccttaggatgttctttgacggccggtatatcctgctgctgatggggctgttctctgtgtacaccggcctcatctacaacgactgcttctccaagtctgtgaacctctttggttctgggtggaacgtatgtgccatgtacagctccagccactctccagaggagcagaggaagatggtactttggaatgacagcaccatcaggcacagcagaactttgcagctggacccgaatatccctggagttttccgaggcccctacccttttggcattgatcctatttggaacctggccacaaaccgcctcacgttcctcaactccttcaagatgaaaatgtctgtgattttaggaatttttcacatgacttttggtgttgttctgggaatatttaaccacttgcactttaggaagaagttcaacgtctacctggtctcggtgcctgagatcctgttcatgctctgcatctttgggtacctgattttcatgatcatttacaagtggctggcatactcggcagagacctcgagagaggccccgagcatcctgatcgagttcattaacatgttcctgttcccaaccagcaagacacacgggctctacccagggcaggcacacgtccagagagtgttggtggctctcacggtgctggctgtccccgtgctcttcttaggaaagccgctttttctgctgtggctgcacaacgggcgcaattgctttggcatgagccggagcggttacacactcgtgaggaaggacagcgaggaagaggtgtctcttctgggcaaccaggacatagaagagggcaacagccgcatggaagaaggctgccgagaagtgacgtgtgaggagtttaacttcggggagatcctgatgacgcaggccatccactccattgagtactgcctcggctgcatctccaacaccgcctcctacctgaggctctgggcactcagcctggcccatgcacagctctctgatgtgctgtgggccatgctgatgcgcgtggggctgcgtgtggacaccacctatggggtcttgctgctgcctgtcatggctttctttgcagttttgaccatttttatccttctggtcatggagggtctttctgcattcctccacgccataaggcttcactgggtagaatttcagaacaaattctacgttggtgcaggcaccaagtttgttcccttctccttcagtctgctctcctccaagttcagtaatgatgacagcatagcatgattgcacgctgcagcaagcccgctctgatcaacggaggactatcatgttacagaattcactcactcactccggtcagaacttaccaggggaaagttccaccctcgttgattgccttacgattcagccaaatggttctgtaagatacacctcttcctcatggtgaagattttgtaaaactcaccactccggacacagaaatttcgttggtttttattatgagcaaatataagttaatgccaacgctactttaaagttattttttaaagtgtaagattggaggagagaagccagctgaacagcctagctaaaaatggtcttagatacttgattccttttcaacttaaaaaaaa

SEQ ID NO: 2038 - DNA, 1887 bp, Mus musculus
cccggccatttgcttacttcgggcgggatgccgccgcttggagggttgcggtgcgtcatattcttggcctgcccgactgttttgttcgagtagaaaatgttaaaggggcagtgtggcctgtggccgaatcgaataccagaagcgaaggtcacaaaagataacaggaagtccaactttagtaaaaaatatacctacaagtttgggctatggagcagctctaaatgccagtctgcaggctgccttggcagaaagcagcttgcctttgctaagtaaccctggactgatcaataacgcctccagtggcctcctgcaggccgtccacgaagaccccaatggttccctggaccacatcgacagcaatgggaacagcagtccgggttgctcacctcagccacacatacattcaatccatgtcaaggaagaacccgtgattacagaggatgaagactgtccaatgtcattagtgacaacagccaatcacagtccggagttgcaagatgacaagagattgaggaagaccctttatctgaggacctggaatgagaacgaacttgtgacacctcagtgtgaagggacatatcactgaccttcataaccactccacaaccatgaatatttgacaaatttttactgtgactatttattaagcatggataaaggagacagccctaaaggaacttactaagccagccctttgggattcagtaccaacaggcaaattgcttgttttcttcttcttcttcttcttttttttttttttttagaaaaaaagacaaaaactgattttcttgaaaaaaaaaaatgaactgttctttctataatggctttgcccatttaaaaaatgtggctcttaagggttcatgaaatgactgaatatgaggatacatgtcctgtagaaagcaaatgcgcctcatatacctggcaaaaaaagtgttagtttcattaatgtgaattttccagcattcagtagtcgtaatgttagaaacaattgctggtcaagttcaacttgttgctatgtttttaatttgcacaggagtagtatcagaaattagtgtcactgcttgtatctagctgacttttaaacaacagaacattagttttttatgttggtgccaccaactgtaaatgacataagttagttattacaaaacacagtaattagactgttgcaaccatctaaaaccttaggcttccagtctgtgctgttagtgtaaagatgtaaagtgcaatcctaagctaacattatctgtgcaagcaccatagaaacatttgcatatctgcatagatcttacaactgtactctttacctccttgtgataaagctttgtctacctgcaaacacagtcaaaggctacagctgcaaaccaaagccaactctaaccatggccaagagctcaaggacagaagcagccacatgctttggtcagccttctgtaacttcaattagtacaaaggaaccttttccatgaactacctgctgttttctgatgacctctgggatcttttcatttagccctaaacaaagaaacgaatatgacaaaacaaaaacaaaaaaacaacccacaactaagagttcattcagtcacagagtaatcttctgaggccaaaagtccatctaaatgcaatgaagatttgctttcattaaagacagaggtgaggacaaaatctgcagtggaagttatgacactctagaaagcaacaaatgtggatcactgaccaaaacaattatgtacttgatgcaaacgcagattgcgtattgttatatatatagtacattgcgtttttgttttccccatctttttggtggtgagttcatgttgttagaagtacatgtcttgtatggtcttaatctctgttgtgtactatttttttatagtcttaagttat

SEQ ID NO: 2039 - DNA, 961 bp, Mus musculus
aaaactctctgaatgggtcctggcccacttctctttctctcctccaaatgaggagttaaaaatgttactagcatagcccacccgtgtaatccgttgaaaaggaacaaaaggaaaaaagaaaagaaagaaaagaaaaaaaaagaaaaagaaaaaacaaaacaaaacaaaaaaatcctcctagaaaccagaagtagagagatttctgctaattctgggctttgaagcgtacgtcttttgagggggcattttgatgtggtcctccttgcttctggagggacttggttccctttagaaaacctgccctgggaaaagacttcttggttttgaggaagatccttggttagcgatgatcttggaggtggactaagtccagagccatccctgaagccaggtgactgtcccaaggtcttccctcccgggagcccaacctttcgagtgcagccaaaccttactgcttttacaacattgcacagctgtgtagaaaccccgtgttctttcccataggtgccaatttgggtgggggaggaaggaacaattacaagatccccatctgtctgcccatgccacctaaacaagtcaggactccaattggattttgaagttattttaattatagaattatttttttagaagaaagatggatgtgatagtctatatttgtgtgtttctaaagttgtgtcttgtgggggaattggattccattttagttatttaatacctcactcccacccacctgcatactgcttgtgtgtcccggcctgtcccgcaagcctagttgtgctttttgttgtctgttccccgtgccccctcctgtgtctcactctgtcttcttgtcacttgatgtgcatttgctgttgttctttcgtttctgtctaaatgtcagtgtgttcaaacccccagagggttctgtttttcccattcccttctggactttaaataaatatttaaaactgagcaatgg

SEQ ID NO: 2040 - DNA, 2179 bp, Mus musculus
gaattccgttctccgctaagaagcctgaagaggaacatggcactgctccgggggctcctcgtactcagcttgtcctgcctgcaaggtccctgtttcacgttctctccggtgagcgccgtggatctcccgggccagcagccagtgagtgagcaggcccagcagaagctgcccctgcctgccctcttcaagttggacaaccaggattttggtgaccatgctaccctcaagaggtccccaggacactgcaagagtgtcccaactgcagaggagactcgcaggctggctcaggccatgatggcttttactactgacctgttctctttggtggcccaaacatctaccagctccaaccttgtcctgtcaccccttagtgtggccctagcactctctcacctggcactaggtgctcagaaccaaacactacacagcttgcatcgagtgttgcacatgaacacaggatcctgcctcccgcatctactgagccatttctaccagaacctaggcccagggacaatccgactggctgccagaatatacctgcagaaaggatttcccatcaaagacgatttcctggagcaatcggaaaggctctttggtgcgaagcccgtgaaactgactggaaagcaggaggaagacctggcgaacatcaaccaatgggtgaaggaggccacagaggggaagattgaggatttcctctctgagctgccggatagcaccgtgctgcttctcctcaacgccatccactttcacggtttctggaggaccaagtttgacccgagcctcacccagaaagatttcttccacctggatgagcggttcacagtgtcggtggacatgatgcacgcggtgtcatatcctcttcgatggttcctgctggagcaacctgagatacaggtggctcatttcccctttaagaacaacatgagctttgtggtcgtgatgcccacttattttgagtggaacgtgtccgaggtactagccaacctgacctgggatactctgtaccatccctcgctgcaggagaggcccaccaaggtgtggctgcctaaactccatctgcaacagcagctggacctggtggccaccctcagccaactgggcctgcaggaattgttccagggcccagaccttcgtgggatctctgagcagaatctggtggtgtctagcgtgcaacatcagtctaccatggagctcagcgaggctggtgtggaggcagccgcagctaccagcgtagccatgaatcgaatgtccctctcctccttcactgtgaaccgacccttcctcttcttcatcatggaggacaccataggcgtgcccctctttgtgggcagtgtgaggaaccctaaccccagcgcgctgccccagctccaggaacagcgagattcccctgacaacaggctcataggccagaatgacaaagctgacttccatggaggcaagacctttggtcctgacttgaaacttgcaccccgcatggaggaagactacccccagttcagctcccccaagtgaggaggggccctgggcagcagcatcctgagtccccacctggatcagcctctcagctcctgtgactctttctaaccagctttgtgggatagggtgggaccggaaggaccatcaccagtgtagaagctgttctcttgcagcaggtggggtggggcctggaggaaggcaggcatggggaatcttcatttcttcccaaggggctcagggggtgatcttttgtgggctggcacttgtggacacagttttggctagaggtaggttaggcaagtccctaacttagggtccctccacatttgtaagcagaggctggagaggccatctttagacatattccagacaccctgggtgggaaaaggagagacaagtgttggtctcccaagcttagactggccttggtgttatacttcatggttggaggctgacctaccctacaagagtgtcccttgctgaagacattcaggtccccaacctgtgtcctgtcacccaagtcacccctctggtatttggagatgccaacactgccaggagtcttcctccttcttctctctcttgtcctcccctgccaggaatcttggggactgaggcaaggaagggaccctttagctcccaagactcttttgtaaagtttttgtagtgatttttatgccacctgaataaagaatgaatgggc

SEQ ID NO: 2041 - DNA, 3337 bp, Mus musculus
aggagcgacggaagccagaccccaggaggatggaggatgaagctgtcctggacagaggggcttccttccttaaacatgtgtgtgatgaagaagaagtagaaggtcaccacacgatctacattggggtccatgtgcccaagagctacaggagaaggagacgccacaagaggaaggccgggcacaaggaaaagaaggaaaaggagagaatctccgagaattactccgacaaatctgatgtggagaatgcggatgaatccagcagcagcatcctcaaacccctcatctccccggctgcagaacgcatccgattcatcttgggagaggaagatgacagcccggcacctcctcagctcttcacggaactcgatgagcttctggctgtggatggacaggagatggaatggaaggagacagcgaggtggattaagtttgaagagaaagtggagcagggtggggagcgatggagcaaaccccatgtggccaccttgtccctgcacagcctgtttgagctgaggacatgtatggagaaaggatccatcatgcttgaccgggaggcgtcttctctcccacagctggtggagatgattgcagaccaccagatcgagacaggcctactgaagcctgacctgaaggataaggtgacctatactttgctccggaaacatcgacatcaaaccaagaaatccaaccttcggtccctggctgacattgggaagactgtctccagtgcaagtaggatgtttagcaaccctgataatggcagcccagccatgacccacaggaatctgacatcctccagtctcaatgacatttctgataaaccagagaaggatcagctgaagaataaattcatgaaaaaactgccccgagatgcggaagcttccaatgtgcttgttggggaggttgacttcttggacactcccttcattgcctttgttcgcctacagcaggctgtcatgctgggtgccctgactgaggtccctgtgcccacaaggttcttgttcattctcttaggtccaaaggggaaagccaagtcctaccacgagattggcagagctatcgccaccttgatgtctgacgaggtgttccacgacatcgcttacaaagcgaaagacagacacgacctgattgctggtattgatgagttcctagatgaagtcatcgtccttccacctggggaatgggatccagcaattaggatagagcctcctaagagtcttccatcctctgacaaaagaaagaatatgtactcaggtggagagaatgttcagatgaatggggatacgccccatgatggaggtcacggaggaggaggacatggggattgtgaagaattgcagcgaactggacggttctgtggtggactaattaaagacataaagaggaaagcgccattttttgccagtgatttttatgatgctttaaacattcaggctctctctgcgattctcttcatttatctggcaactgtaaccaacgccatcacttttggaggactgcttggggatgccactgacaacatgcagggcgtgttggagagtttcctgggcactgctgtctctggggccatcttttgcctttttgcgggtcaaccactcactattctgagcagcaccggacctgtcctagtttttgagaggcttctatttaatttcagcaaggacaataattttgactatttggagtttcgcctttggattggcctgcggtccgccttcctatgtctcattttggtagccactgatgccagcttcttggttcaatacttcacacgtttcacggaggagggctttccctctctgattagcttcatcttcatctatgatgctttcaagaagatgatcaagctagcagattactatcccatcaactctgacttcaaagtgggttacaatactcacttctcttgtgcttgtctgccacccgacccagttaatctctcagtatctaatgataccacactagccccagaggacctgccgaccatttcttctactgacatgtaccataatgtcacctttgactgggcctatttgtcaaagaaggagtgtgtgaagtatggagggaagctcgtgggaaacaactgtgacttcgtgcctgatatcacactcatgtccttcattctcttcctgggcacttacacctcatctatggctatgaagaaattcaaaaccagtcgctattttccaaccacagcaagaaaactgatcagtgattttgccattatcctgtccattctcatattcggtgtaatagatgccctagtcggcgtggacaccccgaagctcattgtaccaagtgagttcaagccaacaagtcctaacaggggttggtttgtcccgccatttggagaaaacccttggtgggtgtgccttgctgctgctatcccggctttgttagtcaccatcctgattttcatggaccagcagatcaccgctgtgattgtgaacaggaaagagcataaactccagaaaggagcagggtatcacttggatctcttttgggtggccatcctcatggttatatgctccctcatggctcttccgtggtatgtagctgctacggtcatctccattgctcacatcgacagtttgaagatggagacagagacttctgcacctggagaacaaccaaagtttctaggagtgagggaacaaagagtcaccggaacccttgtgcttattctgactggtctgtcagtctttatggctcccatcttgaagtttatacccatgcctgtactctatggtgtgttcctgtatatgggagtagcatcccttaatggtgtgcagttcatggatcgtctgaagctgcttctgatgcctctgaagcatcagcctgacttcatctacctgcgtcatgttcctctgcgcagagtccacctgttcactttcctgcaggtgttgtgtctggccctgctttggatcctcaagtcaacggtggctgctatcatttttccagtaatgatcttggcacttgtagctgtcagaaaaggcatggactacctcttctcccagcatgacctcagcttccttgatgatgtcattccagaaaaggacaagaaaaagaaggaggacgagaagaaaaagaaaaagaagaaaggaagtttggatagcgacaatgacgattctgactgcccatactcagaaaaggtccccagtattaaaattccaatggacatcatggaacagcaacctttcctaagtgataacaaacccttggacagagaaagatcctcaacattcctcgaacgccacacatcatgctgataaaattcctttccttgagtcgctgggtttacccagtcctccaagaactccagtgaaagtcgtgcctc

SEQ ID NO: 2042 - DNA, 960 bp, Mus musculus
cggctccggcgctacccggtcccctccggcggcagctgccatgggcaccgacagccgcgcggccggggcgctcctggcgcgggccagcaccctgcacctgcagaccgggaacctgctcaactggggccgcctgcgaaaaaagtgcccgtccacgcacagcgaggagcttcgggactgtattcaaaagaccttgaatgaatggagttcccaaatcagccccgatttagtcagggagtttccagatgttttggaatgcaccatgtcccatgcagtggagaagataaatcccgatgaaagagaagaaatgaaagtttctgcaaaactgttcattgtaggatcgaattcttcatcatcaactagaagtgcagttgacatggcatgctccgtccttggagttgcacagctggactctgtgatcatggcttcgcctccgattgaagatggagttaatctttccttggagcatttacagccttactgggaggaattagagaacttagttcagagcaagaaaattgttgctataggcacctctgatctagacaagacacagttggagcagctgtatcagtgggcacaggtaaaacccaatagtaaccaagttaacctggcctcctgctgtgtgatgccaccagatttgactgcctttgctaaacaatttgacatacagctactgactcacaatgacccgaaagaactgctctctgaggcaagtttccaggaagctcttcaagaaagcatccctgacattgaagcccaggattgggtgccgctgtggctgctgaggtactcggtcatcgtgaagagcaggggaatcatcaagtctaaaggctacattctgcaagccaaaaggaggggctcttaactccagctcacacccacagctcaccgacctgctgttgtctggaacataagatacaaattcatgataacattgagatgtgtttaaaaaaaaaaaaa

SEQ ID NO: 2043 - DNA, 1309 bp, Mus musculus
taaaggcaagacaagggtgatattacccagtaagagagaacaaacagggagatggtacagtcatgtgtagaggagagaggaagaggaggtaagtcgggatttgacgcctccagagagctccagaagagcaagtgaaaggcatgccagcatccttcagagggggctggtactagtcctgactccacccatcccagtcctgactccacccatccctgtcctctccttccctggcagcccttagcttccaccaggacacggggaagggatgggtgaagaaccaaaggtcctcgatggagaagtggcaagaagaggggtcctggagctctggcagagagaccagcagtgtgggcaggttcttcagaccatgttctgaaaaaaaaaaagctatgagaaaaatggactgaaaggaaaggagcagcatcaagaggcatgcttagtttttaattgactataataagcagtgtgaacaaaatgagaatgcgcttgtgtttggcgagcatcccctaataggacggtggtatgctcatcccagcctaaagcagagcttacatcccctcgggtcacttttgaacccacagcactgagctgctctatgctggtggtctctgtttccttatgaatatgcttgactttagagatgcctcagtcatccagttcacagccacccctgacttgattttactcttcggggggcctcagttcagaggaccacgggcagcttggccttttgtgtcccttcggagtgagcagaaagtgcccccttctcagaggctcactcctttccacgtggccatgagccacctccacataagggacagtgacctggggctgtgacctggatttcccgattccttctgcatgatctgggcccctcctcctgctgttgtcacctgctcctccagcaggaagcaggactgttgggagtgctggccctggctgctgggagatttttcacaccacctaaggtagtgcaaactctgtggtgtgagatccggaaggtgccaagaggtctgtataggcggggagcagtgagtgaggccttcctctgtgcacacttgttgaatgagttaagttttgcaggagggacattttgacaagcacagaaccacactgctctcatggtcaacttgagtggtgagccatctatctgtctgtctatctatctatgcctttccgcattttgtacaaaaggaaatcagagagccactactagggtccagctacccgctgccttgcagtcacattcgcccaggttttggctgtaccctcttggggaagaaatagggcactctgggcttttctcaattgt

SEQ ID NO: 2044 - DNA, 2916 bp, Mus musculus
  misc_feature 546, 559, 721, 723: n = A,T,C or G
taccctctcgcgttgcaggcagattgctcacccatcttcgtctccctcttcacctcccgcggggcgctgcacctcaaccttgtggttggctcctttccgtgcttgcttgctcattaggtgtgtgatagcacggaaatgtcccgagagctacatgacgtggacctcgctgaggtgaagcctctggtggaaaaaggggagagcatcactggtctcctgcaagagttcgatgttctggaggaggatattgagaccctacatggctccctgcatgtcaccctgtgtgggacccccaagggcaaccgtcctgtcatcctcacgtatcacgacatcggcatgaaccacaagacctgctacaaccccctcttcaactctgaggacatgcaggagatcacacaacaccccgctgtctgccatgtggatgcccctggccaacaggatggtccccttccttcccagtggtacatgtacccctcaatggatcagttggctgaaatgcttcctggagtccttcaccagtttgggctcaagagtgtcattggcatgggnacaggaccgtggngcctacatcctgacccgttcgcactcaacaaccctgagatggtagagggtctcgtgctcatgaatgtgaacccctgtgctgaaggctggatggactgggctgcctctaagatctcaggatggacccaagccctgcctgacatgtgtgtcccacctcttcggnanggaggagatacacaacaacgtggaggtatgcacacgtaccgccagcacatcctcaacgacatgaacccgagcaacctacacttattcatcagcgcctacaacagccggagagacctggagattgaggcgccaatgcctggaacccacactgtcactttgcagtgccctgctctgctggtagttggagacaactctcctgccgtggatgctgtggtggaatgcaattctaaattggacccaacgaagaccaccctgctcaagatggcagactgtggaggccttcctcagatctctcagcgcccaagcttgctgaggccttcaagtactttgtgcaggcatgggatacatgccttctgccagcatgactcgcctgatcgggtcccgcacccagtctggctccagtgtcacatcctggagggcacccgtagccgctcccataccagcgaggggtcccgtagccgctcccataccagtgaggatgcccgtctcaacatcacccccaactcgggtgccaccggaaacaatgccgggcccaagtccatggaggtgtcctgctaagcaatctgtgcatcagtcaccctggactggtggcctctcccttagcccccaacccttgcctgccaccctacgctaatgcggtattaatctaaagctgcttttgtaagaatgaactctggcggtggcagacccaggctgttctgactgcctcctgggaccagggtgggtggtggtggaccaaaggcaagaagctgttcagcgtactgttctgctaacaagtgacctggtggaccctctctctaccctcagacaccaaactgccaaaactaagaaatagatagctgtaacactgcctggctccaagccaggatctgatccagacttctggttcatagggcttttgcaacctgcctacttcctgtttcctcccactaactattctggaacaacttctgtttgaaaggagagagagaggcaggaaagttgggcgccttattttagtagagaaaccaagaaaggaagagaaaaaaaggcagggtctagggcaggtagaggaaaaacacaacaagtctactaggctcacttgaaggaattgattttaaagttctggacgctggaaacccacaacctgtttttctggcaaccttttaacgtcgcaagaaaaactggtaacaaaccccaggctttatagagaaagtgatccagcaaatgtggggcatcagtgatttaagactctttgcctatgcagtcttacctgtaccccgtcccattccacagtgaatgagtggatgacactctgtcctcagggaagatgtttgattgtgtcgatcttgaggcagaggagccagaaggcgtataccgggaatcctagtctggatgaagatcttagatggaaggtgggaatagaatggtacccatgggaacttttgaggaactcatggtagggccaagtggacttagaaacctggtgggtgtgatttcattgatctggaatcttggtgactgagtcacaccttgcctcccataattgatgtctggcattgattatgaacaagtgtgactcagtcacaccttgtctcccataattgatgtctggcattgatttgaaacttgatagctgaatgtctcttaactggcccatcgctggttcttcagagagaaccgtatgttctagtgggggaaggactggttttgggttctgtacattccacgggaacttgcttccctctcctgcccctcctgctgactgggtttgtagcattggcctcttaagcaatgccagcctaatgcccatgctccatactagctcctttgattcttactgtggctaaccttgaaccttcctataggaaatgtgatcagatcrgrgacacttgatcgttgggagtcagccctcaaggcctggcgacacttgatcgttgggagtcagccctcaaggcctggcgacttccaggatcttggagttgctagaggaaaagtagttatgcccatataggcggcatgagagacaagggatcagtttacctgccaactccgaccgtggagggggagttccactgaccttgtgtagaaagatcaggaatccaggccagggtgattgaacgctgacaagaaatcactgtatatgtctctccagggcagtttcttaataagatgtttgtatttatttccagaccaataaatttgtaactttgc

SEQ ID NO: 2045 - DNA, 1842 bp, Mus musculus
tgacccaccggatccgggatccgaggccggtgccccgagccccgcgcccctcaccgccatgggggcctgtctcggggcctgctccctgctcagctgcgcatcctgcctctgcggctctgcaccctgcatcctatgtggctgttgcccctcaacccgcaactccacggtgagccgcctcctcttcaccagcttcctcttcttgggggtgctggtgtccatcatcatgctgagcccgggagtggagagtcagctttacaagctgccctgggtgtgtgaggacaggacccagcaacccctggtcctgcaggggcccctggactgcggctccctgctgggtttccgcgctgtctaccgtatgtgctttgccacagcagcctttttcttcttcttcatgctgttaatgatctgtgtccgcagtagccgggatccgcgagcagccatccagaacgggttttggttttttaaattcctgatccttgtgggtatcactgtgggcgccttctacatccctgatggctcctttcccaagatctggttctactttggcgtcgtgggctccttcctcttcatcctcatccagctgatcctgtttgttgactttgcccactcctggaatcagcggtggctgtgtaaggccgaggagtgtgactctccagcctggtacgcaggccttttcttcttcaccttcctcttctacctgttgtccatcgctgctgtggcactgatgttcgtctactacacggagtctggtgcctgccatgagggcaaggtcttcatcagcctcaatctcaccttctgtgtctgcgtctccatcattgctgtcctgcccaaggtccaggatgctcagcccaactcgggtctgctgcaagcctccgtcataaccttgtatacaatgtttgtcacctggtctgccctatccaacgtccctgaccaaaaatgcaaccctcacctgcccactaaaaatggaacaggccaggtggacctggaggactacagcacggtgtggtgggatgccccgagcattgtgggcctcgtcatcttcatcctgtgcaccttcttcattagcctgcgatcctctgaccaccgtcaggtgaacagcctgatgcagacagaggagtgtccggcagagatggtgcagcagcagcaggtggccgtcagtgatggcagagcctatgacaatgagcaggatggtgtcacctacagctactccttcttccacttctgcctggtgctggcctccctgcatgtcatgatgacgcttaccaactggtacagccctggagagacccggaagatgatcagcacttggacctcagtgtgggtgaagatctgtgccagctgggcggggctgttcctctacctgtggaccctagtggccccctgctcctgcccaacagagacttcagctgagaatgccctgctgcctgcctacctggtgccttggggctcaacaagggtcagcccacccttggccacagctatctgctctcttccaggacccgctcaagtcaggattctccattctcagtgcctccagggtctgtgggacattatgctctgacccaagccctgccttcctttgcccatgatcatgcatacccacccttgggactgaagttaacccctgttctcagggtctccagaagagggcatgagagtagagagtggcccagagcttctcagctgacagggggggggggtcaccctatacactaaggcctgtgggggtacccaccctatacactaaggcctgtgctccaggcctccagagcccacccccttcctagaccatgtgccttaatgagtctctaagacttcactcaataaacatgccagtacccg

SEQ ID NO: 2046 - DNA, 1349 bp, Mus musculus
ggggcgggcgcctgggccgcccgcgcgcagggccgtcggcggctgcctgagggaggcgcggaccagcgggctcaagacccgcgcgtcccacgagcggctgcggcgggcgcgggccggcgcggccatggcgacgggcactcagcagaaagagaacacgctgcttcatctcttcgccggcgggtgcgggggcacagttggtgctattttcacatgtcacctagaagtcattaagacgcgactgcagtcttcgagactagctcttcggacggtgtattaccctcaggttcatctggggaccattagtggagctggaatggtgagaccaacgtctgtgacgcctggactcctacaggttctgaaatcaatcctggaaaaggagggaccaaagtcactctttagaggcctgggtccaaatttggttggagttgcaccatcaagggctgtgtactttgcatgttattccaaagccaaagagcaattcaatggcatcttcgtgcctaatagcaataatgtgcacattctctcagctggctctgcagcttttgtcacaaataccttaatgaatcctatttggatggttaaaaagaggatgcagctagaacgcaaggtgaggggctgcaagcagatgaacacactccagtgtgctcggcgtgtctaccagacagaaggcgtccgcggcttctatagagtgctgaccgcctcctacgctgggatctcggagacaatcatctgctttgctatttatgagagcttaaagaagtgtttgaaagacgctccgatcgtctcctccacagatggagctgagaaaagttcctctggcttctttggactcatggcagctgctgctgtttctaagggatgtgcctcctgcatcgcttacccacacgaggtcatcaggacgcgctccgcgaggaaggcagcaagtacaggtcgttcgtgcagaccgcgcgcctggtgttccgggaggaaggctacctcgccttctaccgaggactgtttactcagctcatccggcagatccccaacactgccattgtcctgtccacctacgagttcatcgtgtacctgctgggagagcgtgcttagtgacagggccacatggttgtgctctagaagaataaaactgaaaaccctagagattttcttttccgttgatgtttagtgttcaaaactgaaacagcgaaggccatagaatacctggctcatgtcacctgttggacatttccttttggattcttgtttctggaaggttgaaattcattaacgttaatatttaattataactttcttttttaacttaagaggactgaggattgaggagcaagtaaattaaatcatgctatttaatg

SEQ ID NO: 2047 - DNA, 2977 bp, Mus musculus
gagacgctgctcagccggcgcccgggaaacgtcgctgcggttgtggccgcggtcgcgggctcggacgaggaggcggcggcagagcgggaggctgagccggcagcaggcggtcgtccccgtctcgcagggcggccccagcagctgcgtcagggtcctgaggaggtggcgctgggcaggagccgctctgaggagcagccaggcctgcgtgggtcggagcccgcgattctcattgaaatctgttaattctattttttgaacacttatgaataaccacgtatcttcaacaccatcaaccatgaagctaaaacaaaccatcaaccccatacttttatatttcatacattttataatatcactctatactattttaacatacatcccattttattttttgtgtgagtcaaaacaagagaaaccaaaccaaattaaagcaaaacctgtcagttccaaaccggactctgcatacagatctatcaacagtgtggatggcttggcttcagtgctgtatcctggctgcgatacacttgataaagtctttatgtatgcaaaaaacaaatttaaaaacaaaagactattgggaacacgtgaaattttaaatgaggaagatgaaatacagccaaatggaaaaatttttaaaaaggttattctggggcactataattggctttcctatgaagatgtcttcatccgagcccttgactttggaaatgggttacaaatgttgggccagaaaccaaaggccaacatcgccatcttctgtgagaccagggctgagtggatgatcgctgcacaggcgtgttttatgtataacttccagcttgttacactgtatgctactctgggaggtccagccattgttcatggactgaatgagacagaggtgaccaacatcattactagcaaagaactcttgcaaacaaagctgaaggaaatagtctctttggtcccacgtctgcggcatatcattactgttgatgggaagcctccaacctggtctgagttccccaaaggtgtcattgtacacaccatggctgcagtgcaggctctaggagtgaaggccaacgtggaaaagaaagctcacagcaaaccactgccctcagatattgcagtaatcatgtacacaagtgggtccacaggaattccaaagggagtcatgatctcacacagcaacatcattgcttctataacggggatggcgagaaggattccaagactgggagaggaagatgtgtatattggctacttgcccctggcacatgttctagaattaagtgctgagcttgtgtgtctttctcatggatgccgaatcggctactcttcaccacagacattagcagatcagtcttcaaaaataaaaaaaggaagcaaaggagacacatccgtgctgaagccaacactgatggcagctgttccggaaatcatggatcggatctacaaaaatgtcatgaataaagtgaatgaaatgagtgcttttcaacgaaacttgtttattttggcatataattataagatggaacagatttcaaaagggtgtagtactccactgtgtgaccgctttgttttccggaatgtccgaaggctgctgggtggaaatattcgccttttactgtgtggtggtgctccgctttctgcaacaacgcagcgattcatgaatatctgtttctgctgtcccgttggtcaggggtatggactcacagaatctactggggctggaacaattacagaagtgtgggactacaataccggcagagtgggagcaccattagtttgctgtgaaatcaaattaaagaactgggaggaaggtggctattttaatactgacaaaccacatcccagaggtgaaattcttattggtggccaaaatgtgacaatggggtactacaaaaatgaagcaaaaacaaagacagatttctttgaagatgaaaatggacagcggtggctgtgcactggagatattggagagtttgaccctgacggctgtctgaagatcattgaccgtaaaaaggaccttgtgaaactacaggcaggagagtacgtttctctcgggaaagtagaggcagctttgaagaacctcccactgatagataacatttgtgcgtatgcaaacagctaccattcttacgtaattgggtttgttgtgccaaatcaaaaggaacttacagagctagctagaacaaaaggatttaaaggaacttgggaagagctgtgtaacagcagcgagatggaaaatgaggtccttaaagtgctttctgaagctgctatttcagcaagtctggaaaagtttgaaattccactaaaaatacgtttgagccctgacccatggactcccgaaactggtctggtgacagatgccttcaagttgaaacgtaaagagcttaaaacacactaccaggcagacattgagcggatgtatggaaggaaataattagttttggcattggtttgctacagcgagctcagatcaaataggaaaatacttgaaatgtatgtctcgggccgaggcaaactccattcctcatattaaatcccggctgttacttctcactacgtcaccatttttaactgacaggattagtaaagtattaagacagcaaactcgtgtctgtctgttccttcccctgctccagtttgcttctggcatctgtgactgtgcttgtcaacaggagactttttcagaatcgtactggggaagcagcgattttacagcctcaagtttttaaacatgatttatatgttctgtacagttgttcagtttgtaactttttaaagtttggatgtatagaaggataaataggaaatataaaaattggttatttggggggcttttttacttattgtatttaaaaataaaagggtatcaatgtgaaattatgtacattttaaatgcttatgaatcaagtcattgttgaacaaaagatttgttgctgtgtaattattgtcttgtatgcatttgagagaaataaatatactcagactt

SEQ ID NO: 2048 - DNA, 1223 bp, Mus musculus
gacacactttctgagctttctttgtctacctcaatatgatatagaagtaaaagttaaccgtggaagaatctggtgtgtcctgtgtttatttcccgcgggacggggataagctcgggatacttggttctagaaacccgggaaaaaacgccttaacaacgccggcaccagaggagaccctctgaccaaccggagcaggttcagaaccacggtggattttggaattccgagagcatgctgaatccttgtaagtaactctgatccttcttaatccctccccttaactggaaggtggcactaaaagccttttgttctcatgctggctgtgttaaccctatttctcccggtttgatcctgcactcaccagaagtggcgctgaaagaaaaagttttgaatgctgtaaagcacagtcagacggacgtatataagccgcagtgctcgtctcatatttaagcctctcgtagataagggagcagtatgggaaattcacattctgtaactacagctctacactctgttttaaaacagcgagagataaaagtttctacaagaaccttaaaaacgttcattaaaggaaatagaacgtatatcaaccttggtacgcgtgttcagggtcgttaactcttttcttcttgggagaaattaagggaagacttagctaaggaacaacagaatgggaaattaaaggcagggaccatgccattatggaaactggtgagatcgtgcctggaggatgagagatgccgtccagcaataataacagggcaggcaatattagaagaagcacaggacagcatggcagaaacggaatggtgtgaaaggttaggagctccaaaaaaggaaaatgtgcacaaagtaaaaagcccttccagagaccttgagtcagaggaagtgaaaaatttgaggataagtcctcagggagagaaaaaggaaaaggagaaagttcagaaaaggaaaagcctttatccggtaaaggaactagaggctttgaagcttgatagtttaaaagcagatgagcttagctcctctgaggaagaggagtcacattatgaggcagctcattataaaaaagaaagataccatccagaggaaaggcgagtgaagaagtcagagaaaattaaaagttactagagacacagagcaggccacctctgggccttctagtctcaatacacctccaccttatgtggagaaattttattctgattcttttctttcaaaggagg

SEQ ID NO: 2049 - DNA, 2300 bp, Mus musculus
cgcacggtcactctcccctggctaggcgcgcgccggcagacgcttggcccggccggggcgccaggtccgtagcagcagatccggagaccgaggtcagctgcctgccgaaaccagcccgggagccactaccccggacgctatcgcctcccttcccagcgctcctttctccccggcgatcgccaccgcttcctggaacagagacgcccttcgtcggctccctgcggtgaccgaggcaagaaccgcagccggttgtgtgcagaggccagccgccactactgagttgaaacaaaatgtcagtcagtgtgcatgagaaccgcaagtccagggccagcagtggctccatcaacatctacctgtttcataagtcctcctacgcggacagcgttctcactcacctgaaccttctgcgtcagcagcggctcttcacagatgtccttctccatgcgggaaacaggaccttcccttgccaccgggcagtgctggctgcgtgcagccgctacttcgaagccatgttcagtggtggcctgaaagagagccaggacagtgaggtgaacttcgacaattccatccacccagaagtcttagagctgcttctagactacgcatactcctcccgggtcattatcaatgaagaaaatgctgagtcgctcctggaggctggtgacatgctggagttccaggacatcagagatgcgtgtgcagaatttctagagaagaacctgcatcccaccaactgcctgggtatgctgctgttgtctgatgcccaccagtgcaccaagctgtacgaactctcctggagaatgtgtctcagcaacttccaaaccattcggaagagcgaagatttcctccagttgccccaggacatggttgtgcagctgctgtccagtgaagaactggagacggaagacgaaaggctggtgtatgagtctgcgatgaactggatcagctatgacctgaagaagcgctactgttacctcccggaactgttgcagacagtgaggctggccctccttcctgccatctatctcatggagaacgtggcgatggaagaactcatcaccaagcagagaaagagtaaggagatcgtggaagaggccatcaggtgcaaactaaaaatcttacagaatgacggcgtggtcaccagtctctgtgctcgtcctcggaaaactggccatgccctgttcctcctgggagggcagactttcatgtgtgacaaactgtacttggtagaccagaaggctaaagaaatcattcccaaggctgacattcccagcccgaggaaagagttcagcgcatgtgcaattggctgcaaagtatatattactggggggcggggatcagagaacggagtctcaaaagatgtctgggtttacgataccctgcatgaggagtggtccaaggctgcccccatgctggtggccaggtttggccatggatctgctgaactgaagcactgcctctatgtagtcggtgggcacacagctgcaactggctgcctcccagcctccccctcggtctccctaaagcaagtagaacagtatgaccccacaaccaacaaatggaccatggtagccccactccgcgaaggtgtcagcaatgctgctgtagtgagtgccaaacttaagctgtttgctttcgggggtaccagtgtgagccacgacaagctgcccaaggttcagtgttacgatcaatgcgagaacagatggtcagtgccggccacctgtccccagccctggcgttacacagccgcagctgtgctgggaaaccagatttttatcatgggtggagatacagagttctctgcctgctccgcttacaaattcaatagtgagacttaccagtggaccaaggtgggagatgtgacagccaagcgcatgagctgccacgccgtggcctccgggaacaagctttacgtagttggagggtacttcggcattcagcgctgcaagactttggactgttacgacccaactttagatgtgtggaacagcataaccactgttccctactctctgatccctactgcattcgtcagcacctggaaacacctgccttcctaatgtagagcatcctaaagaaagcacgcatgagctcattctgatgcacggcgagatgagatgtcatttctgctttggagaaggcaagtttaatgaagagaaagaaaaacaggagcagttgctactgagactcctcgaataccatcggctgcaccttgcaaacactctcaagtggacatgaaggaaggggtggggggaggggcgggtttttttttttttcaatataagtagcacatggtttaa

SEQ ID NO: 2050 - DNA, 672 bp, Mus musculus
cccgacatacccagctaatgctgctcgggagaaggctggccgccatgaccgagctgctcaagtctgtggactacgaagtgttcgggacagtgcaaggtgtttgcttcagaatgtacacagaaggagaagctaagaaacgaggtctggttggctgggtgaagaacacaagcaaaggcacagtgacaggtcaagttcaaggccccgaagaaaaggttgatgccatgaagtcctggctgagcaaggttgggagtcctagttctcgcatcgaccgggccgacttttctaacgaaaaaacaatctctaaattggaatactctgattttagtattcgatattaatggaagaaaaatatcaattgcactgcttatgttatagaaaataaaacattcttagattcataatagtaggagagttaaaaatggaaagtgtctcttctggaattatacattactgaaatgtctgaaactgaaaacatttactcacctatgttttagcaagcagaaactaaatattataaaataaaatgtcattataaattatctgatatgaacattcaagtacaatgttgttttatggagtcattcatataaaaatattatagtatatatgttattttatattacagtatatatgttattttggctagacataaaataaaattaactaaaattg

SEQ ID NO: 2051 - DNA, 240 bp, Mus musculus
actcatgattctatccgagtaccacctctaccctgacgttacacctgaggaagcgggagactttgacgaggaggctgaggaggaggtggcttagagcttttttagtcactaaagcttgggagcagtgtgaaatctttattcattcacaccctttttgctagccatttccactgtgcatttgctttcctgtatcctgacatcacttgtacagataccaccattaaagcaattcatagtttc

SEQ ID NO: 2052 - DNA, 1128 bp, Mus musculus
ggaagaccggcccaacgtggatctggcaagcaggttgctgtgactcgcacctgaacgccgcccaggatgtgaaaattccccagcagcgatggtgttggtgccaacgggtgagggctccaggaggaaaaccttggctggctctccttggggactcgttctaactttcaagtcactctctaggtcaggagagaagcatggagaggaggagcgggtctctctgggagaaaaactagagcgggccaaacgccggctgcttcgatgactggttgagtgggtctgggcaaggcgagcagtgcccatttcccagggctgcggcaaaagaccgaggctcccggcagccgacgcccccgctgccgggaaggacagacctccagtggcggagggggaattcactatagccgttctggtcgcgccggtcagcttcgggctgtcaccggggtccctccgccacggtggcccgccccgccagcacgcagcccccacccggcttcgcgtcccgggaccccgaactcacctttcccgggaatcagcgctccttgcccatagtccgcagcccagagtcggggctgctcggcgctccgtcccgggggccggggccgggccgggggcgtgggagccgctcaccaccgcctcccagcgcagccgccagagctgccgccgccgcctccctccatgggtgcggcgccgccacctgacaacggaagtgacgcataggctctcggccccgcctcccgccccctcgcctgagtttggggttggtgcgccatcttcaggatgggcggaagccttcaggcaggaagcccagataagatcgccaattggttctgggtggagtctgggtcgaaatctgtaaagtgattggacagtcagggggcggtacttaccgctaatctacatctacagtgggactgggacagaggcgccggtccgccttggctctgcagaacctcaccgacttatgctctccttgctggggttggggacgtctctaagtggttgcaaaacccgccaactgcactgcattctttagaaaagtagtctttctttgctccccatttctcggcttctggaaatttgtgtgggaaagtgctgaagttgggtacaagagaagtcaagaattggctgtcg

SEQ ID NO: 2053 - DNA, 1862 bp, Mus musculus
gctctgagcggcccgtggttcgggagttgagtggaggcaaccagggtaccctgtgctgattgggtccggaaccatggacgtgggcgaacttttaagctaccagcccaacaggggcacaaaacgaccccgggatgatgaggaagaagaactgaagacacgccgcaagcaaactggtcctcgagaacgcggccgctatcgcgaagaggaggccacggcagccgaagacacagctgatgacaagaaaaggctgctgcagattattgacagggatggcgaggaagaagaggaggaggaggagccgctggatgaaagctcagtgaagaagatgattctcacatttgagaagcgatcctacaaaaaccaggagctgcggatcaagtttccagacaatccggagaagttcatggaatccgagctggacctcaatgacatcattcaggagatgcacgtggtggccaccatgcctgacctgtaccaccttctcgtggagctgagtgccgtgcagtcacttctcggcttgctgggacatgataatacagatgtgtccatagctgtggtcgatctcctccaggagctgacagacatagacaccctccacgagagtgaagaaggagcagaagttctcatcgacgccctggtggacgggcaggtggtcgcattgttggtgcagaatctggagcgcctggatgagtctgtgagggaggaggctgatggcgtccacaacaccctagctattgtggagaatatggccgagttccgtccggagatgtgcacagaggctgcccagcagggactcctgcagtggctgttgaagaggctgaaggccaagatgcccttcgatgccaacaagctgtactgtagtgaagtgctggccatcctcctccaggacaatgacgaaaacagggaattgctgggagagctggatggcattgacgtgcttcttcagcagttatccgtatttaaaagacacaaccccagcaccgctgaggagcaggaaatgatggagaacctgttcgatgcgctctgttcctgcttaatgctcagctccaatcgagagcgcttcctgaagggcgaggggctgcagctcatgaacctcatgctcagggagaagaaggtctcccggagcagcgccctgaaggtgctggaccatgccatgattgggcctgaaggcacagacaactgccacaagtttgttgacattcttggcttacggaccatctttccactcttcatgaagtctcctcggaaaatcaagaaggtgggaaccacagagaaggagcatgaagagcatgtctgttcgatcctggcttccctcctgcgcaacatgagagggcagcagcggacccggcttctgaataaatttacggagaacgacagtgagaaggttgacagactaatggagctgcattttaaatatctcagcgcaatgcaggtggccgacaagaagattgaaggggagaaacatgacatagtgcggcgtggggagatcatagacaatgacatggaggacgagttctacctgcggcgcctggatgccgggctcttcatcctacagcacatctgttacatcatggcggagatctgcaatgccaatgtcccccagattcgccagcgggttcaccagatcctgaacatgcgtggcagctccatcaagatcgtcaggcacatcatcaaggagtacgcagagaacattggagatggccggagccctgagttccgggagaccgagcagaagcgcatcctggccttgttggagaacttctagaatgctagggagagcgtgacggccaccgacccctggctccctcctggaaaccatttttacagttgtatggcttgaacaaattaaagctagttttggt

SEQ ID NO: 2054 - DNA, 2028 bp, Mus musculus
ggttattcattagcaagaaggaaagctccggagagagcagaactctctcagctgcaggcttgaagcagggtgagagcagctggagcaggccgggctgggagcttgttcctggagttagtctctctctaactttttccggggacagagggagaggtggctgttctttgttctcaaatgtccctctaaataaaaccctttttattttacttattgttcggtgcccaggcagtcaggaagaagcaccttcccactggacctccagctcagtcctctcttggttttgcctcagggcagcagctacaaacagaaagccagctgtgagtgtcttgccaagcccagatctgccggagagaggagagatccgaagcgggaggtatggtgagttgcagctgatttggaagctgcctggtggaggaccgtggctctgtacagcttgtggggagaggactatcctctcctacaactactaagctagaacaacaccatgggcagcgtctgtgtgagactctgggcatacctgcagccttttctcccgtgctggtctcaagaggcagacaagtcagtagtaattgagaatccaggggccttctgtcccccagaggctcccaggtcacaagagcccgagagaagccatggccagtattttgtggctctgtttgattaccaagcacgtactgcagaggacctgagcttccgtgccggcgacaaactccaagtcttggacacttcgcatgagggctggtggttggccagacatttggagaagaagggaaccggcttaggtcagcagctacagggctacattccttccaattacgtggcggaggaccggagtctccaggcagagccgtggttttttggagcaatcaaaagagcagatgcagaaaaacaacttctgtattcagaaaaccagacgggcgcctttctaatcagagagagtgagagccagaagggtgacttttccctctcagttttagatgaaggtgttgtaaaacactacagaataagaaggttggatgaaggtggcttcttcctcaccaggaggaaagtcttttcaaccctgaatgaattcgtgaactactacaccacaacaagtgacgggctgtgtgtcaagctggagaagccatgcttaaagatccaggtaccaaccccttttgatttgtcatataaaactgcagaccagtgggagatagaccgcaactccatacagcttttgaagcgactgggatctggtcagtttggagaagtttgggaaggtctgtggaataataccactccagtggccgtaaaaacgttaaaaccaggttcaatggatccaaatgacttcctgagggaggcacagataatgaagagcctaagacacccaaaactcatccagctctatgctgtttgcactttagaagatcccatttatattattacagagttgatgagacatggaagcctgcaagaatatctccaaaatgatggtgggtcaaaaatccatttcattcaacaggtagacatggcggcacaggtggcttctggaatggcctatcttgagtcgcagaactatattcacagagatctggctgcaagaaatgtccttgttggtgaacataatatctacaaagtagcagattttggacttgcaagagtttttaaggtagataatgaagacatctatgaatctaaacacgaaataaagctgccagtgaagtggactgcacccgaagccattcgtactaataaattcagcattaagtctgatgtgtggtcttttggaatcctgctctatgaaatcattacttatggcaaaatgccttacagtggtatgacaggtgctcaagtaattcaaatgttgagtcaaaactacagacttccacagccatctaactgcccacagcaattctacagcatcatgctagagtgctggaatgttgagcctaagcaacggccaacatttgagaccctgcattggaaacttgaagactactttgaaacagactgttcctattcagatacaaataaattcataaactaaacatc

SEQ ID NO: 2055 - DNA, 3746 bp, Mus musculus
gtgactcaagtgggaccggctgacgcgctgcctcgcgaagctaatggagactcaagctctggaaccagggactctggaagcctttggtgccaccagtcctaacaaggggggcctgtctaagaccaaaaagaacttcaaagacttgatgtctaaggtgacagagggacagttcgtgctatgcaggtggacagacgggctatattaccttggcaagatcaagcgggtcagcagtcctaagcaaagctgccttgtgacttttgaagataattccaaatactgggtcctgtggaaggacatccagcatgctggtgttccgggagaggagcccaagtgtgacgtctgcatggggaagacttcagggcctatgaacgagatcctcatctgtgggaagtgtggcctgggttaccaccaacagtgccacatccccatcgcagttgatgccaactggcccctcctcactcattggttctgccgacgctgcattttcgcactggctgtgaggaaaggtggcgctttgaagaaaggcgccatcgccaagacgctgcaggcagtgaaaatggtgctgtcctaccagccggaggaactcgattgggactcgccccatcgcactaaccagcagcaatgctactgctactgcggcgggcctggagagtggtaccttcggatgctacagtgctaccggtgtaggcagtggttccatgaggcttgcacacagtgccttagtgagcctatggtgtttggagaccgcttctacctattcttctgctccgtgtgtaaccaaggcccagagtatattgagaggctgcccttgcgatgggtggatatagttcacctggctctctataacttgggagtacagagcaagaagcggtactttgactttgaggagatcctggcctttgtcaaccatcactgggagctcctgcagcttggcaagctcaccagcacccccatgacagaacgagggccacatctcctcaacgctctcaacagttacaagagccggttcctgtgtggcaaggaaattaagaagaagaaatgcatcttccgactgcgcatccgagtcccgcctgcccctccaggaaaactgcttcccgacagggcgttgatgccaagtgacaaagggacctccgagctgcttcgtaagaaaggaaagagcaagcctggtttgttgcctcaggaaccccagcagcagaaaaggcgagtttatagaagaaaaagatcaaagtttttgctggaagatgctattcccagtagtgacttcacctcagcctggagcacagaccaccacctagccagtatattcgacttcacactggatgaaattcagagtttaaaaagtggcagctcaggccagaccttcttctcagatgtggattctaccgacgcagccagcacctcggggtctgcctccaccagcctctcctacgactccagatggacggtaggcagccgcaagaggaagctgacagccaaagtgcacaggcccctgcgagcaaagcaaagggcggcggagctggaggggcgctgcgcctcagacagcaatgcagagggagctgtgggtcctgagcagccggatgaaggcatcgacagccacacacttgaaagcatcagtggagacgactcgtccctgtcccacctcaagtcctctatcaccaactactttggtgcagctgggcggttggcctgcggggaaaaatatcgggtgttggcgcggagggtcactccagaaggcaaggttcagtacctgttggaatgggaggggaccaccccttactgattaccctcagaggctgcccagatccctgcaaaccaaaggaggggcagaagaggccactgggtccctgttttcgccaggcttggggtggtggtggtgaaacaggacatcctgcctgtggcccctgcctgctgcctgccaggccaaggcctgtgtgctgctgtacctgagtctctgagaccccattggtattctctcgttgtcaatactacactccacacccctcaaactttttattggttcctctgacagtatcctggctccaacccctggatctgttttttgttgtccccaattctccatcttctgccctctcacccctttcaggtgttttgtgtggacacacatcttccacgggcatacacccatctgtccctcactgggcatgcttcactgggtcctcactaggaccacagtgagggaagggaaccttgggggtcttctgctttctcactagtacccctcaccccaggaaggtagggggtgcctgagaaagtttaggatgcctaggacccagagtctggggagtggtgagctgggtctctgcagaagggacaagaatcagggtcttttattgaggaggggagactaaggaagtcaggcagggccaaggtttccagaagtttgcctgtcccagcaacaaccctttactgttgtcaaggattgggacctggccctgctgcatagacgtgtcttaaacacacagatctgggaggaaaggatggggaagaagactaagccagattaaatcccatcccaaacactgtgtgtacagccaccacctactcctgccagggccccctggccccccgtccttggcctcttccagggatacatgctgcagttaaatgtgagaaccaaacccctgcctcctctggcctgtgaagcagccttggccccacagagaagcacaaaatatacccctctcctgcatggctcctgccttgccctggagctgacaatcactttggggacaggtttggagtttacaagggcctgaatcgttggttcccttcagaaaggaaggctttgtcatcaatggtacaaatagaattcttagaatggtcaagcttagccgtgtctggggagaaaccaggaggtgggcagggagcccttactttgcctacagaaacagaaattgactcactcagttggagaaatggaaagaactgccattgaagtgggaggcaagggcaccagactgagactagcctccctgactgctgctgtagcttccagctgggggtgggaagatggaccacatggtgacatcagactataccaaaggtgctgatattcccatgactaggtctgaccccttcacaccttcccgtgagcattaaggagggtccctgcagtaggttagatgtcccctgccttaaacctcagccaccatggtgccttgcaaagaaacctcgcctctcatagacacagctacctacttccctctgccttcctgtctgggctcaggcagggataagcagatggacactgggcccagttgtcagtcccacagctgccgccactgaggtcccaaagtggggcctggtggaaggagagttgggaagccaactcctaggcttgtgggaactggggtcaaatttgtggcttcctgttggcttcagtgaacatggcaacctccaacacgtgtttttccaggccactggggaagccagagttaggatggctatctgtacatctgcccctcctctgctgtgccccagaagctctgggcctgaggagcaggaaggcaggaggggtgcccgtcccgttggggatcctagcacaaggcctgaccaggtccctggacttcccatggcagcatttcactcctacaaaataatagctgcattactgccaactgatggtataaccctgtgcacctttgaaaagattttggttttaaattgctgcttttaataatatttgttatattaaagttataattgatgtgtctggtttacaatgg

SEQ ID NO: 2056 - DNA, 1836 bp, Mus musculus
atggatccaatcctggtcctggtgctcactctctcctgtctgtttctcctctcactctggagacagagctctgaaagggggaagctccctcctggccccactcctcttccaattattggaaacatccttcagatagatgtgaaggacatctgccaatccttcaccaatttatcaaaagtttatggccctgtgtatactctatatttgggcaggaagcccactgtggtgttgcatggatatgaggcagtgaaggaagctctggttgaccatggggaggagtttgctggaaggggaaggttcccagtttttgataaagctactaatggaatgggccttgcatttagtaaaggaaatgtatggaaaaacacgaggcgtttctcactcatgacgctgcggaatttaggcatgggaaaaaggagcattgaggaccgcgttcaagaagaagcacgttgccttgtggaggaacttaggaaaaccaatggctcaccctgtgatcccaccttcatcctgggctgtgctccctgcaatgtcatctgctcaattattttccaggatcgttttgattataaagatcgggattttcttaacttgatggaaaaactgaatgaaataacaaagattctgagcagcccttggttgcagatttgcaatacatatcctgctctgcttgattattgtccaggaagtcataaacaattttttaaaaattatgcttgtattaaaaatttccttttggagaaaataaaagaacatgaagaatcattggatgttacaattcctcgtgactttattgattatttcctaattaatggaggccaggaagacggcaatcaaccattgcaaaataggcttgaacacctggcaataacagtgactgatcttttttctgctgggacagagacaacaagcacaacactgagatatgctctcctactcctgttgaagtacccacatgtcacagctaaagtccagaaagaaattgagcatgtgatcggcaagcaccgaagcccttgcatgcaggacaggagccgcatgccctatactgatgccatgattcatgaggtccagagattcattgacctcatccccaacagccttccccatgaagtgacctgtgacattaaattcaggaactacttcatccccaagggaacaactgtaataacatcactgtcatcagtgctgcatgacagcacggagttccccaacccagaagtgtttgaccctggccactttctagatgggaatggaaagtttaagaaaagtgactatttcatgcccttctcaacagggaaacggatatgtgcaggagagggcctggcacgcatggagctgttcctgttcctaaccagcattttacagagcttcaacctgaaacctctggttcacccaaaggacatagatgtaaccccaatgctcattggattgggctcagtgcctcctgctttccagctctgcttcattccttcctgaaaatcaaatgcctggctccagttgggacatcttctgtgatcaccctgaggctttaattcactgctttccacactggacacactgacttttatccagttcttttgcctcctcgtaatttcataaggttctatgaacatacatttaccaatttgcagatcctgcacaaatatttctgactggtcctattttctgaaacactgttaccatatgctgtgatgatatggacctgattccaagttaaatatactctcataaaattgaaattactattacaggataattcactgtcgcttctcttctgcattttcttaataataaattgttttggtatacctaaaaaaaaaaaaaaaaaaaaaaaaaaaa

SEQ ID NO: 2057 - DNA, 3225 bp, Mus musculus
gggccacaccccgcgcacggcccaggcgcttcccgccggttgaatcatccccgcagcagcgctcccgcagtccgctgcagcccccgggcccggccgcgccccagccgagtgccgtgccccgcctctccgcgacccctttctccgtgcagtgcgccaaccggatcgctaccatggcgggcatcgcgataaagctggccaaggaccgcgaagcggccgaggggctggggtcgcatgagagagccatcaagtacctcaaccaggactacgagacgctgcggaacgagtgcctggaggccggggcgctcttccaggatccttccttccccgccctgccgtcatccttgggctataaggagttggggccctactccagcaaaactcggggcatcgaatggaagcggcccacggagatctgcgctgacccccagttcattattggaggagccacccgcacagacatctgccaaggagccctgggggactgctggctgctggctgccatcgcctccctcaccttgaatgaggaaatcctggctcgggttgtgcctccagatcagagcttccaggaaaactatgcaggcatcttccacttccagttctggcaatatggcgagtgggtggaggtggtggtggacgacaggctgcccactaaggacggggagctgctctttgtgcattcagctgaagggagtgagttctggagtgcccttctggagaaagcctatgccaagatcaatgggtgctatgaagcactctcagggggtgccaccacggaaggctttgaagacttcacaggaggcattggtgagtggtatgagctgaggaagcctcctcccaacttgttcaagatcatccagaaggctttggagaaaggttctctgcttggctgctctatcgatatcaccagcgctgcagattctgaggccgttacgtaccagaagttggtgaaaggacatgcgtactctgtcaccggagccgaggaggttgaaagttcaggaagcctgcagaaattgatccgcatcaggaatccctggggacaagtagagtggaccgggaagtggaatgacaattgccccagctggaacacggttgacccagaagtaagggcaaatctaaccgaacggcaggaggacggagaattctggatgtccttcagtgacttcctgagacactactctcgcctggagatctgcaacctgaccccggacaccctcacctgtgactcctataagaagtggaaactcaccaagatggatgggaactggaggcgaggctccaccgcagggggctgcaggaattacccaaataccttctggatgaaccctcagtacctaattaagctggaggaagaagacgaagatgaggaggatggggagagaggctgtaccttcctggtgggtctcatccagaagcaccggcgacggcagaggaagatgggcgaggacatgcacaccattggcttcggcatctatgaggttccagaggagctaacagggcagaccaacatccacctcggcaaaaactttttcctcacaacccgagccagggagcggtcagataccttcattaacctccgcgaggtcctcaaccgcttcaagctgcccccgggagagtatgtcctcgttccctccaccttcgaaccccacaaggatggcgatttctgcatccgagtcttctcggagaagaaggctgactaccaagctgttgatgacgagatcgaggccaacattgaagagattgacgccaatgaggaggacattgacgatggattccgaaggctctttgttcagctggctggagaggatgcagagatctctgcctttgagctgcagaccatcttaagaagagttctagccaaacgccaagacatcaagtcagacggcttcagcatcgagacctgtaagatcatggtggacatgctggatgaagatgggagtggcaagcttggcctgaaggagttctacatcctctggacgaagattcagaaataccaaaaaatctaccgggaaatcgatgtggacaggtctggaaccatgaattcctacgagatgcggaaagcactggaagaagcaggtttcaagctgccctgtcaacttcatcaagtcatcgttgcccggtttgcagacgacgagctaatcatcgactttgacaattttgtgcggtgtttggtccgtctggaaacgctattcaagatattcaagcagctagaccctgagaacactgggacgatacagctcaaccttgcttcgtggctgagtttttcagtactctgaagttacatgcctggagaggtctagtgggagaaaacaaccaatgactacacttagacactttgtatctggaccttgaacttacgggaacattgacttcatcggatgattataactgaagaatataaccgtctgggatagatgaacttttcacatatcagagtaacatatttgcatattattaaaccaaatgcaaatgaattgcataacccttggtaaggtcagaggaagcgttacacctgtaaatagtatatcctttttacttctacacattgtcctggccatagcaatattaaatcaggaaggaatgcagagagctttaaataactgggcaaatagtaaaccaatctcagaggctacaaggccttgatgggaatatttgaagaaattttaacttttaaatgcagtggtggcacctgccacagcagcccagagactgccgcttgccctgagcgaactgagaaatacaatgacgaagtagtctgatggaggcatctaaagaacccagtctgatggaggcatctaaagaatccaggagccaggagtgtctgacacaaggccaacctgggctgcctagcaagacccgatctcagaaaataaatgccaatttaaaaaaagggcatgcttgcttccatcatttggttctaacagaagatggtttttatatacctttagcattcttaaactcaagtccttgaccatatttggccttagacacttaggtctgacaagtagtaagtaatgagatcactctgaccaactgagccaggtgtgccgtctgcaagaagatcgtgataaaccccagggactgtgcctacagctggggaggacagggctcagaagatcttcttaaaacaaccaagctggcttcttcatcctgggaaaatgctagcaaccatacagacatattgccttatctacttccaaacgtactgttaataaagagttacaacac

SEQ ID NO: 2058 - DNA, 679 bp, Mus musculus
ccgagcggctgggcggctggagctgagagtcccctgctccttctgcgcgctggcaggaaaatcccacctcagcccggggacggacctgctcttcccgtggtgcacattccagatctcttcggatcgccggtgagctccttcgcgcggtgctggccggcttcggcgtgctcggcccggtaacggttggctcaggagaagtgtgctcttgaccgtccccgaaggtcccagccacaaaggccccagagacaccgttgtgccctgcgcgcggcccgagcgaaaggactgtgggactagcttcgtcacacgcaaccttgcatccggatgaagctctgcaggcctttggggataccagcatccgagatcatcaagtcagttgccttctgcctttcagccttcaactccatccacttctctcaccatccgagcacccggctcctttatccagtttaccccacaaccatctcacccttccccgtccacgctgtgcattgtaatgtcttcaccattctgtcacctgtagaccacctccttctgcttccctacaggaaggctttgcatggctgcacatttctcatcctccagcccagcagtccccgtaaagagtttccatttctctgcactgttgcaaattctctgtcttgggtgaacttgagatgggtgaagtaaatgatgcaaatgc

SEQ ID NO: 2059 - DNA, 1671 bp, Mus musculus
gaattccgaggcgagcgaggctggcgcggggtcggcggccggacgcatggcttaggacgctccgccgccgcgccccagcatggggaaacttcactcgaagccggccgccgtgtgcaagcgcagggagagcccggaaggtgacagctttgctgtaagcgctgcttgggcaaggaaaggcatcgaggagtggatcgggaggcagcgctgtccaggcagcgtctcaggaccccgtcagctgagattggcaggcactgttggtcgaggcactcgggaactcgtgggtgacacttctagagaggctctcggtgaggaggacgaggacgacttccccctagaagtggccctgccgcctgagaagatcgacagcctaggtagtggagatgagaagagaatggagagactgagcgaacctggccaggcctccaagaagcagctcaagtttgaagagctacagtgtgatgtctctgtggaggaggacagccggcaagagtggactttcactctatatgacttcgacaacaatggcaaagtgacccgtgaggacattaccagcttgctgcataccatctatgaagtggttgactcctctgtgaaccattcccccacatcaagcaagacactgcgggtgaagctcaccgtggctcctgacgggagccagagtaagaggagcgtccttttcaaccataccgatctgcagagcacaaggccccgagcagacaccaaacccgctgaggagctgcgtggctgggagaagaagcagcgagccccactcaggttccagggtgacagccacctggagcagccagactgctaccaccattgcgtggatgagaacattgagaggagaaaccactacctagacctggcggggatagagaactacacgtctcagtttggaccgggatccccttcggtggcccagaagtcagagctgccccctcgaatctccaaccccactcgctctcgctcccacgagccagaagctgcccacatcccacaccggaggccccaaggtgtggacccaggctccttccacctccttgacaccccatttgccaaggcatcagagctccagcaacggctccggggcactcaggatgggagcaagcactttgtgaggtcccccaaggcccagggcaagaacatgggtatgggccacggggccagaggtgcaagaagcaagcctccactggtacccaccacccatactgtctccccctctgcccatctggccaccagcccagcccttctccccaccctggcacccctggggcacaagaaacacaagcatcgagccaaggagagccaggcgagctgccggggcctgcagggccccctggctgcaggaggctccaccgtcatggggcgggagcaggtgagggagctgcctgccgtgatggtgtacgagagccaggctgggcaggccgtccagagacacgaacaccatcaccaccacgaacatcaccaccattatcaccacttctatcagccctagaccccagcaggctgccacgggaaggacccagcccacaccctaaggcattattattctattaattattgttattatggcaattattgttattaataattattgttactccactaatatttagccagccttcatgtagaagacacatggaaacacagaagtaaacttttatggaattc

SEQ ID NO: 2060 - DNA, 1484 bp, Mus musculus
tttcctccccaacttgctccttggacatggtgttttgtgcaggaatagaaactctgactaagacagggagcaagcatggagttctgtctacatgcccgttttccttctacaagacagccacctccaggaagcaactgctaaagtagagttggaaatagactcaagtcctcaacttacctgctgagcagggattggaaaaaatactcatgtgattccaaaggaaactcagctggtcctggtgtgtgtgtgtgtgtgtgtgtgtgtgtgtgtgtgtgtgtgtgtgtgtgtgtgtgtagggcgggagtacggataagggctgctctgtcaatccctgactttacagccactcatcctggcgcccacagatcacactcgggatctaggctcaattgaaaagtgcaaagccgctcccaccccttgttgatattcagccctggcaagtcctttgggcagcagagatgctgtgccctccaaatgtgcctttgtcgcaccacctgtcaatagggagcagatctccaaatacccaggttcccggtgttgcagttcccactctgcatctctgagcgtgcctctgagagagggcctctgttgacgtttcaggaaggtcacattccagaaagcctgaagccatggcagaaggcaggagaatgtggcttcctctgtccctgtccctatcctgtgaccgcctcattacaccctagaacatccctatctctgtggctcccacagtgaaggacacctcatagcctgcatcctttacccaccaagagtctccttcagctgtttatgtcacctgtgctgtgacaatccctggcagctccgagccagctaaaaaaaaaaaacctgttagcctctagaggacaatctgcgttttaaatgtcatcccctgtcgccttacagaatctgttatatggggctcacagaggttgtatattgatctacagaaggcgtttgtaccagactctttcttactctgtcctagaatgatgacggtcctcctcaacacgcgttgtatgctggggtgggagaatggaattatatatatatgatataggatctattttcctaaccgttcctctgggtcctacctgggatgtgtgcatcgcgatggggaaggactcgactcgcaaggctgcagcattctgacagctgccttactaatccacaagctgcaggccttctgaatgacagcagatggtgggcactggagccagtcccaggaagaacctaactgcgtgactgagaattcatctattaaaaaaaaaaacaaactatatttttactgtcaaaacaaatgggcttcccggacttcgcagtggccggatgtcccctgtgcttttatattttgtcactgtaagaggttttttggcacagacaagcaagtcagaaatccagctgactgcactgaatgggtgaactctgcatgtgcgaagggggcacacccagactccaaaagtagtaaataaagctttcctgtcagtggc

SEQ ID NO: 2061 - DNA, 1243 bp, Mus musculus
gcacacttccgtcgtctcctgcaagccagcctggtacgtgtttgctgctgcgggtcttatgaaaccggcgcgactcatgaaggtgttcgtcactggcccgttgcctgccgagggcagggctgcgctcgcccaggccgcagactgtgaggtggaacagtggaattcggatgaccccatccccagaaaggatctggagcaaggtgtggtgggggcccatggcttgctctgccgcctctctgaccgtgtggacaagaaacttctggatgccgcggagccaacctcagagtcatcagcaccttgtctgtgggggtcgaccacttggctttggatgaaatcaagaagcgcgggatccgggtgggctacacgccaggtgtcctgacagatgccactgcagaactcgccgtctccctcctcctcaccacctgccgccggttgccggaggccatagaggaagtgaagaacggcggctggagctcctggagcccattatggatgtgcggctacggactctcgcagagcactgttggcattgtggggctggggcgcataggtcaggccatcgctcgacgactgaaaccattcggtgtccagagatttctttacacggggcgccagcccaggcctcaggaagcagccgagtttcaggcagagtttgtgcctattgctcagctggccgcagagtcagacttcattgtcgtgtcctgctccttaacacccgataccatggggctctgcagcaaggatttcttccagaagatgaagaacacagctatcttcatcaacatcagcagaggagatgtggtaaaccaggaagacctgtaccaggcactagccagtggtcagattgcagcagcgggactggatgtgaccacccctgaaccactgcctccgagccaccccctgctgacccttaagaactgcgtgatcctgccccacattggcagtgccacctacaaaactcgcaacaccatgtccttgctggcggctaacaacttgctggctggcctaagaggggaggccatgcccagcgaactcaagctgtaaccagatgggctttcatgggctggagacatcttgccagacagagccaagctggacttcggactttggtgagagcctggggcaggcctcctctactgcattttcaggggacctggaaatgggcagatgggcttgccactttgggggcttgccacatacttgccaaaagcctgtaattctagcattaaacaacatctgacac

SEQ ID NO: 2062 - DNA, 285 bp, Mus musculus
gcaagaagaagaaggacccaaatgcccccaaaagacttccttttggatttttttttttttgttttgaattcccccccaagatcaaatccacaaaccctggcatttccattggagatgtggcaaaaaagttgggtgagatgtggaataacttaagtgacaatgaaaagcacccttatttcaccaaggcagcaaagctgaaggagaagtatcagaaggatgttgctgactataattttaaagggaagtttgatggtgccaaggttcctgctaaagttgcccggaaaa

SEQ ID NO: 2063 - DNA, 596 bp, Mus musculus
gctcagagttctccagtcctaactgtgtacagacaggatgtaagagaagaactggaggctctaagcagaggatccatcggctgcaggcagagggaagagggcctctgtgaggaacaggctgagcgtcagaggaggaggcccaggcctggttctctagctctgtaattaattaactaaagtggatcaaatgagaaggtgaaagttcacagaggaacactcctgtctgtcgtcttggactgggtctccatcccaccatccagcgtcctggtctacgaagagtccacagggaccttgtgaagaatcaacaaggcggggtccagaggagtcacgtgtcccttccactccgggtcaccctgtcggaatggggatgccactgccctgggccctcagcctcttgttggtcctcctgcctcagacctggggctcaggtaagaggccaccaggacctggagtgtgtcaggaaggggacaggaagaagagccaaagagtggaagagggacaataagtccactttttccatgatgtcctagccttcatggaaatctcactgtgggtaacttctctgtgcatctgagtcaaatacacttgacaatctc

SEQ ID NO: 2064 - DNA, 1694 bp, Mus musculus
ggagcaggagctgaggtcgcccttgttgtcctacagggaaggcaggtgagactcccttccttccaaatgggctcttcttccttttaccgagttctcctattggttggcttctgtgctccaatattctgcatgttgtcatccaatccctacaaccaagagtcctcccaccttccctctatgaagaaaaacccggcctcccaggtgtctcccagcaacaccagattctccttcctcctgtaccagaggctggctcaggaaaacccaggtcagaatatcctcttttctcctgtgagtatctctacctccctggccatgctgtccctaggggcccgctcagccaccaagacacagatcctccggactcttggcttcaacttcacgtgggtttcggagcccaccatccacatgggcttcgagtacctcgtccgctcactaaacaagtgccaccaaggccgggaattgcggatgggcagcgtcctcttcatcaggaaggagctacagctgcaggccacgtttctggacagggtcaagaagctttacggggcaaaagtcttttctgaagacttctcaaatgctgccaccgcccaggcccagatcaacagttatgtggaaaaggagaccaaagggaaggtggtggatgtaatccaagaccttgactctcagacagccatggtcctggtgaaccacatcttctttaaagccaactggacccagccttttagtactgcaaacacaaacaagagcttcccattcctcctgagcaagggcaccactgtacatgttcccatgatgcaccagaccgagtcgtttgcttttggagtggacaaggagctaggctgctctattctgcagatggactacaggggagatgctgtggccttctttgtcctccctggcaagggcaagatgaggcagctggagaaaagtctgtctgccaggaggctaaggaagtggagccgctcactccagaaaagatggatcaaggtgttcattccaaaattttccatctctgcttcctacaacctggaaaccatcctccccaagatgggaatccgcgatgcctttaactcaaacgctgacttctccggaattacaaagacacacttcctgcaggtttctaaggctgctcacaaggctgtgctggacgtcagcgaggaggggacagaagccgcggcagccaccaccaccaaacttatagtccgctcaagggacaccccgtcttctatcattgccttcaaggaacccttcctgattctacttctagataaaaacacagaatctgttctctttctagggaaagttgaaaaccccaggaagatgtaggttggagatgaactgttggctggtctcacactgatcatgcgcaagaaataggtgtgtgttggaagacgattgcagggtgacatcaagtctcgcttccttgcttgaggcccccttgactccaacaggagcctgttgtccctaaggattagcacaatggggcccaatcatagaagagacagcagggcctggtcaccctgccagtggcccctcccacctgttttcccataaagccttttcctggaatgtggcaggtcaggcagggctccattctaagagttccagggagctcttagaaatgatgacacacaggactcagtacctttgcttttatggctggctcccagcactgcattcaataaacctgaaatgcg

SEQ ID NO: 2065 - DNA, 281 bp, Mus musculus
cccaaacttagccccccttcgcgggtgaaaaagccaccgtcaatgaggcagccgcttgacagtaaattttaccactaggcccccaaggattttgtggctttcttcaagtattggaggaagacagttacaaccgcttcaagagtttcatcttttcagagcagtgttttgcgcccctgcccccatccattttcatggaacttgcaaacaagatttacaaacggagaaagtgaccccggaattggagaggctgggagggagggggtctcaataaattattgttc

SEQ ID NO: 2066 - DNA, 1420 bp, Mus musculus
gaagatgctgtctaatttgaggatcctgctcaacaatgcagctcttagaaagggtcacacttctgtggttcgacatttttggtgtgggaagccagtccaaagtcaagtacagctgaaaggccgtgacctcctcaccttgaagaacttcacaggagaggagattcagtacatgctatggctctctgcagatctgaaattcaggatcaagcagaaaggagaatatttacctttattgcaagggaaatccttaggaatgatttttgagaaaagaagtactcgaacaagactgtccacagaaacaggctttgctctgctgggaggacacccttcctttcttaccacacaagacattcacttgggtgtgaatgaaagtctcacagacaccgctcgtgtcttatctagcatgacagatgcagtgttagctcgagtgtataaacaatcagatctggacaccctggctaaagaagcatccatcccaattgtcaatggactgtcagacttgtatcatcctatccagatcctggctgattaccttacactccaggaacactatggctctctcaaaggtcttaccctcagctggataggggatgggaacaatatcttgcactctatcatgatgagtgctgcaaaattcgggatgcaccttcaagcagctactccaaagggttatgagccagatcctaatatagtcaagctagcagagcagtatgccaaggagaatggtaccaagttgtcaatgacaaatgatccactggaagcagcacgtggaggcaatgtattaattacagatacttggataagcatgggacaagaggatgagaagaaaaagcgtcttcaagctttccaaggttaccaggttacgatgaagactgccaaagtggctgcgtctgactggacatttttacactgtttgcctagaaagccagaagaagtggatgatgaagtattttattctccacggtcattagtgttcccagaggcagagaatagaaagtggacaatcatggctgtcatggtatccctgctgacagactactcacctgtgctccagaagccaaagttttgatgcctgtcaaaaggaaaaaaacagaaaacaaaacaataacaataacaacaacaacaacaaaaacccctctgttctttagcaatagaataagtcagtttatgtgggaaagagaagaatttaaaattgtaaacacatccctagtgcatggtatgattatgtaattgctttgctattatgagaatttcttaaagcttttagtttaagtgcctggcattttattatcctgcttgacttggtttaaacactctcttcaatttacaacctctgaatgacatttgggtatcatattaattatcatacacatttccttccactaaacattaaacactttgcttacaatgtctaagtcat

SEQ ID NO: 2067 - DNA, 2652 bp, Mus musculus
tctggcaactgcgggctcagggacatcgggataccactgttcccggaccggaatccgagtgtggacacggcatcccgccgtctcctccgtgacacatgcacggggcaccggacaccgggagcgatcgtgggttgaggcttgtactgggaccgtagtgtcgggacaacgctgactgctgcggacaagtttttactttgagtaatccttaaatgaagagtgggtaaagtgtgtatacggaagagagactccaatcaacaatatcaataagttgaaaaagaaaaatgttgtccttaaataacctacaaaatatcatctataacccgataatcccctatgttggcaccattactgagcaattgaagcctggctctctgattgtaatccgtgggcatgtccctaaagattcagaaagattccaggttgactttcagctgggcaacagcctgaagccaagagcagacgtggccttccactttaaccctcggttcaaaaggtctagctgcattgtttgtaacacactgacacaggagaagtggggctgggaggagatcacctacgacatgcccttcagaaaagaaaagtcctttgagatcgtgttcatggtgctcaagaacaaattccaggtggctgtgaacggaaggcatgttctgctgtacgcccacaggatcagcccggagcagatcgacacagtgggcatctacggcaaagtgaacatccactccatcgggttcagattcagctcggatttacagagtatggaaacatctgctctgggactgacacagataaacagagagaatatacaaaagccaggcaagctccagctgagcctgccatttgaagcaaggttgaatgcctccatgggtcctggacgaaccgttgtcattaaaggggaagtgaacaccaatgcccgaagctttaatgttgacctagtggcaggaaaaacaagggatatcgctctgcacttgaacccacgcctcaatgtgaaagcatttgtaagaaattcctttcttcaggatgcctggggagaagaggagagaaatattacctgcttcccatttagttctgggatgtactttgagatgataatctactgtgatgtccgggaattcaaggttgctataaatggtgtgcacagcctggagtacaaacacagatttaaagacctaagcagtattgatacactatcagtcgatggtgatatccgtttgctggatgtaaggagctggtagctaccatgactgccaaaacccccgaaatacaaaatggcttatccggtactggccatgtcaaatgcatctcgctttcaccatattgtttatattgctaagttgagctcctccaacatcaagtcctactggtgttgtcaggtctggccatgcagtacattcagaggaacagagccggggcaatcacagctcactgccagagaggctctgcacactgggtccctcttataaaccacactcagcaaatatttaagtgcctaatatactacatatactagctaatagggatggcaagcatacttcctttgtatattctctgagccgggcacagacatggcagggcccagaacttgtgtggtccatgttttctagcacttcgtaccagtttctggcctcctaatgtagggtcttcttgctggcattgcattaaccccactaggggcctttgcagttaaggtcagaaaaatatactaatggatggcaaacactacttccccagcaacccttttcataatcagcattctatcatatctcataattgaagactgcatagcatttacttagctctcaccgctttaaactttataaaatgtatgatgctgaacacagcagaaaaactgaggccaaaaccctgaattatgacaaaacaagtgttctgctccaagcagatttctgctggttgattggcgctcaagtccagggtgtgtgggtacctgtggcaaagtaaggcagaagttggataaaccgtgtgtgtaaaaccctcttggacgtatatataaaacaagcactatcaaagcaaacccaggggcgtagtgtgaaaggcttagttggtgtggagactagccctcgtgcctttgggtctgaagatgtcggtctgcagcagcagcgaggtcaggcacattaaaccacaggacagaattctgctggggtttaggagtattcagccaatctgcttagatatatgcacttgtgcatatgaaataataccatcagcagtcttactcaaggcagcaactgctagtccttcattttcatgcaaatttattatgttcactcttcaatatggggtggtgggtggaactgggtaatttgtacggaggccaggaggctctagaattctccagagttatgtcttcataaagaatgagtcttcataaagaatgcactactgagatattgggggctcaaaggcactcaggaaaaaaaaataaaagcctattcatacaacagcttattttcatttctatttttacacaattaagactgattctaagtagattcagtcttaagttcttagatttttttttttaaaaagctgctggaatttaggttgtgagaccttctgttgtatattccgaaattctatctctaaactgcaaaatgcctttttgcttgtcctaattctgcattaaagttttatatt

SEQ ID NO: 2068 - DNA, 2433 bp, Mus musculus
aaataagagcagggtagtctgtttctagacttgtgttggttgtgctaaattttcattagagctctaaaatctaatgttaaaattctacccaatcatctaatgtcttaggcagcagcttttagtgcggggttggacctacacttcaagtacaatggataacactttccatgtttgtgatatcttctcagattatctttaaaatttttgagtcctttgtaataacttcctctttgcttcatggtcatgaaaatgtcagaaccagttgtaagaacaatgctatatgtcctgagggcattaactagtgtcttttgaggtaggagaaagagtgtgcttgtggagggtcaacgtggtagttgggtagttggagattgccccgtctccatctgatcttccattgagctgtatgcccttaaggatgtagctggtttgcatttccctaaattagacagtaactttcagaagagatggaacttgttttcttgccagcaaggttgaaaataggtccttagctggaccaatttgtctgtttacaggaataagtaaggccttactggttaaccttggtgttctttatgatgagaccagaagccaaagacctcaagttttctctcctcttggcatctgccctatagtctttagttctttgtttttattttgtttttctttttttcccaacattttctgaaaaagaacaagttttagactcaatttgtcagacttgaaaagaacacactgccaagttttggccaaagtgttagtcttcaggaaagctttctatcattttggcactgagatatttattgtttatttatcagtgacagagttcactataaatagtgttgttttttttttatatatagaagataattatcggaagcagtgccttccataattatgacagttatactgtcgttttcttttaataaaagcagcatctgctaatgagacccacagatactggaagttttgcacttatggtcagcacttgcaactttaggaaggaagaatgccacaatccaaataatatgagctagaagaggattgggttaaataagagattcctaattgagttggggaaaaaaatgatagttttcctaagtgcagtgagttgtggccaagttaaatgtcatttaaaggctatggtagtacttacatctacaaaattttacagctcaatttattcaagatgtaactcaaaatcaattttgcaaaatttccagtacctttgtcacaaacttaactcacattatcgggagcagtgtcttccataatgcataaagaacaaggtagtttttgcctaccacagtgtctatatcggagacagtgatctccatatgttacactaagggtgtacgtaattatcgggaacagtgtttcccataattttcttcatgcaatgacatcttcagagcttgaagatcgttagtatctaacatgaattcctaacttcctgtagctccttagttttagttgcaaaaaacatttgtggtcattgagcatttggtgggtaaaatcaactgctgtaaaatcattacttccaagatccttttttaaaatgtgggtattttgttatctctggtttatggaataaaagcatacgtttataatgtttgctggtgacaaaggaatttaactatctccctttatttgcatgttacatgttatttcctaaatgtagttcttagaagtttgaattcatttttggtttttgggagggtagaaagtagagaataatgggtgttgggaagacaaagcttgcaaaaggatctttatgtacctgctcatcactatggtggctatgaattatgtaggtaatgagcaagatcacattaacaaagactagttaaccatcattacgcatctaatcagttttgccatggggtcagttcaaagctgccacctgagaatgtcactaggctctcagggtcttggcaccactcgcccaagttatatccaccagattattttgagcctcactgagttgttttgctactcagtcccttcagtcttcacagtgtttctcttgtaccagtatgagtatcaccgtgcataatgggattccaagtcttgaatgaaggcatgcattttacatagacgtctctgtgaaataacctttgttgtaagtggtgtttccagtcaaagcagtaagttggtaaggtttagtcttgggtgaaatgtggatctgagtaataagtagcttctgctacttatcaggttattgttggttaaaatgtagattttgaagataaaaatagatcttttgtcatgactcactgctagaatttgcatgacctttactgtgttagcttttgaatgccttttggtttggacttgccaacctatactgtctttgctgaaatgcccttataaatgtatacagctggtatgtaacaatgtgaagattccttacctgacttaataaaatacttcgat

SEQ ID NO: 2069 - DNA, 509 bp, Mus musculus
tcattgggtagaggtttttttaactgctcagtttctccaatcccaatgcctgcaccccaaccccagccatttagaaattgtgattatatttttaatcatctgttgttgagaaaccagagaaaggaacagtattcagggagggactttgggttttctgtgtagttgctttgctttgccaagagattctcagtgaggtgtaaggtttgcagttaacacttctgggaaacaaaagtttctgtttcactcaccctcagataggcttgctgcttattgggtggatgagcagtggctgggagccaaattgctcctcaggttagctagctttgtggctacaggtgatttgggaaggggtgatatcagggtgccattttggaattctgcaatgtctaagcattactacacagaccgttggaaattgcatactttgggcaaatgactttttgagtttccatggtaattctttagtaacttattagcaagctgatatgagataaaaagttactttattg

SEQ ID NO: 2070 - DNA, 3618 bp, Mus musculus
  misc_feature 26: n = A,T,C or G
ggtacctgggaccgggagcgcaggancggtgcgctttggcatcgcggtgatttcggcacctagggaatccttccctcgccccagtacttcgtgtattgaaagaagcctgaaaaagggggtcaagatcccaaagccctttgtaaatgcccggtcgtgcgcttagagcgcagaggctgaattggagggttgttctcaggccacttcacaagtccttccttctgagcctgtgcacgtgtgtgtcaggcgagaaacttcagcatctcccccgatgcaggctcggtgcgtgctccatcggaacccgggctcgtgcgctccgtccgcagcccggatcagtgcacaggatagtaaaaaactttaatcgattggactacttaaaccactggaacttggggaggaacttcagatttttcgtttttaaagacacactaaatgtatgaggaattgacaaaatggagaaccaaaaggaaaacctcttttctgagccacataaaaggggactgatgaaaagccccctgcatccgtcctcgaaggccaacatggtgttggctgagatccagcctgacttgggccctctaaccacaccaaccaagcccaaggaagtctcccaaggagagccatggacacccacagccaacctgaaaatgctcatcagcgccgtgagccccgagatccgaagtcgagatcagaaaaggggcctgtctgacaaccgaagtgcattacctgaagctagagactgtttgcacgaacacttatcaggagacgaatttgagaaatcccagccgagtcggaaggagaagagcttggggttgctatgccacaaattcctagcgcggtaccccaagtaccccaaccctgctgtgaataacgacatctgcctggacgaggtggccgaggagctcaatgttgaacgtcggcggatttatgacattgtgaatgtcctagagagcctgcacatggtgagccgccttgccaaaaacaggtacacttggcatggccggcacaacctcaccaaaaccctcgggacgctgaagagtgtcggggaagagaacaagtacgctgagcagatcatgatgatcaaaaggaaagaatatgagcaagagtttgattttatcaagagctgtggcatagaggaccacgtgatcaagtcacacactggccagaatgggcattcagacatgtgcttcgtagaactccctggagtagaattccgggcagcttctgtaaacagccgcaaagacaagtccttacgcgtgatgagccagaagtttgtgatgctgttcttggtgtcgacgcctcagatagtgagcctggaaattgctgccaagattttaattggggaagaccacgtggaagatctggataaaagcaagtataaaacaaaaattaggaggctgtatgacattgctaatgtcctgagtagcttggatcttatcaagaaagtccatgttacagaagaaagaggtcgaaaaccagcttttaaatggacgggcccagaaatcagcccaaacaacagtggttccagccccatcatgcctcttcctgcctccttagaggctgagcagtctgcaaaagagaactgtgccaaaaacctcttctctacgcgggggaaacccagcttcactcgacacccgtccctcatcaagttggtaaagagcatagaaaatgatcggaggaagatcagttccgctcccagcagccctgtcaagagcaacaaagctgagagttctcaaaattctccacccgtcccaaacaaaatggctcagctcgccgctatttgcaagatgcagttggaagagcagtcaagtgaacccaggaagaaagtgaaagtaaacctagcaagatctgggcactacaaaccactggctcccctggaccctacagtgaacactgagctagaactgcttacaccgtcccttatccagcccctgggcgtggtccccctgatccctagcccattgtcatctgcagtgcctgtgatcctacctcaggccccttcgggcccatcctatgccatctacttacaacctgcccaagcccaaatgttgacaccaccccctggcctgagcccaaccgtctgccccacccagccctctaatgctactggatccaaagaccctacagacgcccctgctgagaagacggccacagacgccgccacaaccggaagcttgcagccagcaccagaaaggcatggtgctaagcatcgaagcaaggagacgaccggagatcggggtacaaagaggatgatcaccgcggaggacagtggtcccagttctgtaaagaaacctaaagaggacctgaaagcgcttgagaacgtccccacccccacgcccctgttcccatcaggatacctaatccctcttacccagtgctcatccctagggccagactctgtgttgtctaacactgaaaactcaggtacaccctctccaaaccaccggatctatggctcccccattgcaggtgtgatcccagtggcatcatcggaactcactgctgtgaattttcccccattccatgtgacacctctgaaacttatggtctccccaacatctatggcggccgtacctgttgggaacagcccagccctcaactccggccaccctgctcccgcccagaacccaagctcggctatcgtaaactttaccctgcagcacttgggactcatctccccgggcgtgcagatgtctgccagcccggggcctggagctggcacagtcccggtatccccacgtgtagaagcagataacttgagctctcggcaaaggagggccaccaaccatgactcgccagtcctgggccagagccaactaaacggacaaccagtcgcggggacaggggcacagcagcctgttcctgtgacacccaaaggctcccagttggtggctgaaaatttcttccgtactccgggtggaccaactaagcctaccagctcaccctacacagatttcgatggtgctaacaaaacctccttcggaaccctctttgtcccacagcgcaaactggaagtctcaactgaggatatccactgattgacaagatggtggtttaatttaattttctaaagagctatttaatgagacaatatacacatatagatggagagaacaccacctttaacaatactgtaaatatttggggtttttactcaatatcacagcagatatacacacatgcgcatgcgagtgcacccacccatacacacacacacacacacacacacacacacacactcatacatgcgcacacatttgtacaagaccaaattcagccttcagtactataaaataaaatgttgaactaaggtacattaacttctgggggaggggaattaattttttcacctgtgcctctattattatgcaaagtaactttattaaagtttacttccctttcagcaaatgtttgacttacctaacacagcacctgctcaaactttttgcacaaaggaaatgctgtgtaatgtataatgtatttttacctagggaggcgatagctatatttttttgtaatttctttaatcctttgctgttgcagtctgtctttttgtagagtttacaaccctcctcaatcaagtctatggaaaaaaattatttataaaatgtatttttaatcaca

SEQ ID NO: 2071 - DNA, 1024 bp, Mus musculus
cgctgcgcggaagcccggagcccgcactcggccgccgcgcgcctgcgacctgacccgcacgggtactgcgcggctgcagggacactcgacggccagggcgcgggcccggggcacgcgggatccccggggagcggggcgcacccagcggacggctcggcggggctcctggccctggaagcccagatctgaccctacgaaatagcctgccctcagcaacgatgaacaacctaccggccacaccttctcctgaagaattgatgaccacgccggtttttcaggcccctgagaccctgtccccacaagctgaagaggccagcacagcgctcattgcagttgttatcaccgtggtgttcctcaccctgctctcggtggtgaccttgatcttctttcacttgtacaagaacaaaggcagctacgtcacctatgagcctgcagaaggggagcccagcgccatcctccagatggagactgactcagccaagggcagagagaaggaagagtacttcatctaatgcttcccaggctggaggggccaattcttggctccaacactaagccgctgcctctgtagttagggaacgtttgctctaaagccagggagtggcgttgggtgatactggcacatccactcacctcccaggacacagcccccaataccggaatcactgactccagggtccagagacacggagaaagctgttcatgatgctgggccttgataaggacagtgctcgaaaccgaccaccaaagaggggccatgcctgagttggaagtgaggtcacatgctggtccactttgtcccctccctagttgacgaccaatagccccagtcagtgctatccagtctttctggaggcaggacaccacagggaggggtcagaccagggaggggataggagtctgagaatgttactgcctttgtttgatctgagccccactgttccccaatcagcctcaaacttctactgtttttatcctaattaaacttatgaaaatcagaaaaaaaaaaaaaaaaaaaaaaaaa

SEQ ID NO: 2072 - DNA, 1594 bp, Mus musculus
catacatcccctgccctgccccaaagccctatccccacacagccctctccaccctccatcagtcctacccaagcttctccgagtcctgatgtggtggaggtgtcgacaggatggaatgtggcctgggaccctgtgctagaggctgacctgaagcccggacacggtgagctgccgtccactgtggaggtggcttctcctccacttcttcccatggccactgtgccaggcatctggggcagggacagccctcttgaaccaggaacgcctaccttttccagcccagaactgagctcacagcacctaaaaactctgacaatgcctgggaccttgcttttgacagtaccaactgacctgaggagcccgggaccatcgggccagccacagacccctaaccttgagggaacccagagccctgggttgctgcctacaccagctcgggagactcaaactaacagtagcaaggaccccgaggtccagcctttgcagcccagcctagaggaggatggtgaccccgcagatccactgcctgccaggaatgccagctggcaagtaggaaactggagccagtgttccaccacctgtggcctgggcgccatctgaggctagtgagctgcagctctggcaatgacgaggactgcaccctcgctagccgtccccagcctgcccgccattgtcatctgaggccctgtgctgcctggcgcacgggcaactggagtaagtgctctcgaaactgtggtggaggttcctctacaagggatgtacagtgtgtggatacacgggacctccggccactgcggccctttcactgccagcccgggcctaccaagccacccaaccgtcagctctgtgggacccagccctgcctcccctggtacacctcctcctggagagagtgttccgaggcttgtggtggtggtgaacagcagcgactggtgacatgtccagagccagggctctgtgaggagtcgctgagacccaacaacagcaggccctgcaacacccacccctgcacacagtgggtggtagggccctggggtcagtgcttagccccctgcggtggtggtgttcagcggcgtctggtcagatgtgtgaacactcagaccggcttggcagaggaagacagtgacctgtgtagccatgaggcgtggcctgagagctcacggccatgtgccactgaggactgtgaactggttgaacccccacgttgtgagcgggatcgcctgtccttcaatttctgtgagacgctgcgcctgctgggccgctgccagctgcccaccatccgcgctcagtgctgccgttcatgtcccccactcagtcgtggtgtcccttcccgaggccatcagcgggtagccagacggtaaaccgaggaaggcaccattagaatgcacagactgacccttgacacacagacctcagtgccccaccacaggctgcggtggagccccctgctcctcgtgccctaacggtgctaaccccacccctgcacggtggcaggctggggaccccctttcctttcagaaaaggtatttttttattctaacagtttgcacatttgttattattttacataaatgagtatctaccgggggggccc

SEQ ID NO: 2073 - DNA, 1579 bp, Mus musculus
aaaaaggtaaaaacatccatcgaagacacaggtgccacagtcaaggcaagacagtactcggtgttaaaaagcagtctaaggaaacgtgagcttggtgaggaatcacttaagacattggaagatgacaagcatggctgcaggcctgtaatcccagggcttgggaggcttagatggaaaggtgtcgcaacatccctggaagtgtccgagagcccaggcagtgtccaggtggcccggggccagacagcagtcctgccctgcgccttctccaccagtgctgccctcctgaacctcaatgtcatttggatggtcattcccctctccaatgcaaaccagcccgaacaggtcattctttatcagggtggacaaatgtttgacggcgccctccggttccacgggagggtaggatttaccggcaccatgcctgctaccaatgtctcgatcttcatcaataacacacagctgtcagatacgggcacgtaccagtgcttggtgaataaccttccagacagagggggcagaaacatcggggtcactggcctcacagtgttagtccccccttctgctccacaatgccaaatccaaggatcccaggacctcggcagtgacgtcatccttctgtgtagttcagaggaaggcatccctcggcccacgtacctttgggagaagttagataatacgctcaagctacctccaacagccactcaggaccaggtccagggaacagtcaccatccggaatatcagtgccctctcttccggtctgtaccagtgtgtggcttctaatgccatcgggaccagcacctgtctgctggacctccaggttatctcaccccagccccggagcgttggagtaatagccggagcggttggcaccggtgctgttcttatcgtcatctgccttgcactaatttcaggggcgttcttttactggagaagcaaaaacaaagaggaggaggaggaagaaattcctaatgaaatcagagaggatgatcttccccctaaatgctcttctgccaaagccttccacacggagatatcctcctcagaaaataacacgctgacctcttccaatacctacaacagtcgatactggaacaacaatccaaaaccccatagaaacacagagtctttcaaccacttcagtgacttacgccagtctttctctggcaatgcagttatcccatcaatctatgcaaatgggaaccatctggttttgggtccacataagactctggtagttacagccaacagagggtcatcacctcaggtcttgcccaggaacaatggttcagtcagcaggaagccttggcctcaacacactcattcctacacagtaagccaaatgaccctggagcgcatcggtgcagtgcctgtcatggtgcctgcccagagtcgagcagggtccctggtataggatgactgaggaaaccatgttcagaagagaataaatggaccgccttcaggcaaggggggagcactgccttcaggcaaggggggagcactgccttcaggcaagagggagagtgggatgggtgagtgctgaaaaataaacttttgttacgattccattagcaaaaagc

SEQ ID NO: 2074 - DNA, 2529 bp, Mus musculus
gtcggagctccatcagctgccgcaggcaccgcgccccaaggctgagccacgatgagcggcagagtcggtgacctgagccccaaacaggaggaggcactggccaagttccgagaaaatgttcaggacgtgctgcccaccctgcccaatccagatgactacttcctccttcgatggctccgagcccgaagctttgacctgcagaagtcagaggccatgctccgaaagcatgtggaattccggaagcaaaaggacattgacaaaatcatcagctggcagccaccagaggtgatccaacagtatctgtcaggcggcagatgtggctacgacttggacggctgccctgtctggtacgacatcattggccctctggatgccaaaggtctgctgttctccgcctccaagcaggacctgctcaggaccaagatgagagactgtgagctgcttctgcaggagtgtatccagcagaccacaaagctagggaagaagatagagaccatcaccatgatttatgactgtgaaggactcggcctcaagcacctctggaaacctgcagtggaggcctatggagagttcctcaccatgtttgaagaaaattatcctgaaacactgaagcgtctgtttgttgttaaagctcccaagctgtttcctgtggcctataacctcatcaagcccttcctaagtgaagacactcggaggaagatcatggttctgggggcaaactggaaggaggttttactcaaacatatcagccctgaccagctgcctgtggaatacggaggcaccatgacagatcctgacggaaatcccaagtgtaaatctaagatcaactatgggggcgacattcccaagcagtactacgtgcgagaccaggtgaagcagcagtatgaacacaccgtgcaggtctcccgaggctcctcccaccaagtggagtatgagattcttttcccgggctgtgtcctcaggtggcagtttatgtcggagggatcagacgtgggttttgggattttcctgaagaccaagatgggggaacggcagcgggcaggggagatgacggaggtgctgccaaaccagagatacaattcccacatggtgcctgaggatggaaccctcacctgcagtgagccaggcatctatgttctgcggttcgacaacacctacagcttcatccatgccaagaaagtcagtttcaccgtggaggtcctgcttccagacaaagcagccgaagagaagatgaaccagcagggggcagacacccccaaataacacctcgcccctgcagcaggcctggcccccccaatgtcttcctgtcagtttctttagtcattttcctgcaaccaattagcccaaagaaactgggctggagggaagacttcagactggacggagctcctgttcagaatcagaatgaggataaatagctagatgggtcctcgtcgtcagaatactaaggggtctccagggaccggctgtaatgatgtctaccctgtagactttgccaacttcacctgcccaggaacagctgagacagggagggaagggtacacaggatggtggcagggaagaacttagaaagaagtgaagcgattggatgtcatactcagggaagccagctgctggggagaaacttgctcctaaatgaacatggaccaaacctccatgattgtaatgatggttgcaaggtagcaggccactagatgtgatgggtatccaaagctctttgaaactttttgtcataagccttgagtctctcgtccccccccccccccaatctcaggagtaacccaagtcagcactggaaggaaggctaacagcccccccccccagaacctcattaactcctgggttccactggctgcctgtttaaaccctccacaagcacaagggtaattaatttcagggatcatagataggaaaggaccaaggaggcggtgggtgggccccaagcctctcactaagtaaccctccgcttgagcagccctacacaaagatgacaattggggctgagacagcactgagtgcacttcccagtccagtctcccacagtgcctgagaaccagtctcctgacaggagcaagggcttggtgggcccttctctgtggaggcgtgtaatagcagcagtggcttcctcttgcctggggatgcaggtagccagggtgggcggtttcccgggaaggtagccatagctgggcaaacatttgagccaggcacaggtgaccttgcaataaaaagctcttgaccccacacaacttgagagccaggttacaggctgcccagaattcaggaaggatgccccaggcccttgcggggtctgccttttcctctgaacgaggcgttggcccagcctcgtctcaggaagcggagggagctctgggcaggtgcagggatggcaagcagagagggccgaggctacccaggatctagtcacacatctcaggggcacagcctggccttggtttacaatgctgttaggtacattaaccaatgaataaagtgatcaattttcaaagcaaaaaaaaaaaaaaaaaaaaa

SEQ ID NO: 2075 - DNA, 731 bp, Mus musculus
ttggatgtaaaaacagagacaggggtgccagcacagagctgagctgcccagactggactggtggtgcaagcttcggacagatggctgacatcctcaagggctctcagcctaaaatgtctctgctatggggttggctcacgaggctcttagggaccagccccgttcggtaccctgtcgtggcaggagctggtgacaccctcatgatacaacattcactgtgtatggtcctgtggagctgggaggattcaggagagcagagttcacatctggactgagaattactgatgccacccagagcccaccaggaaactccacaaatatatcaagtcttcaaccattccctactttttgatctaagtctgtattataacaaagactattcctatgcatgtctcaacagtcaaaatttttattatgtttatgagggaggggccttcatatcccacaatgtatgtgtggaggtcagagggaaatttgtgggagtcatcttacttcttccgccatgtgggtcctggggatcaagctcaagttgtagatggagaaactgaggttccagagcaggcagtggcttatccaaacatccccgaagcatacaaatgcaggaagtcagagcctcagcccagctgccaggcgttttctgtgaaactgctcccacctgtgacaatccagaagcttaaaaggaaacttcttccccagagatcagctctaagcccaggggagtcataataaag

SEQ ID NO: 2076 - DNA, 1255 bp, Mus musculus
atagagttcacgaagccggagccccagtcgcgcacaggccgccgcagcagctccagtttccagcaggatgttccagtggctgatgcaagcgttgatgctgccactattgctgctccctttaggtcgagctgctcccaaggatggagttgcaaggttggaccctgaggtacaacagcagctcacacccaaccctttccagccaggccctgagcagctccgacatctgcagaattatctcaagggactagagaagatggaagaggatcctgagcacatggaccgggagcaagtcctgctttcgctctttgctcttcatgactatgaccagaatggacagctggacggcctggagctactgtccatgctgacagcagctctggcccctggagctgcacactttcccatcaacccggtgatcctagtagtagactcggtgctcgagactcaggacctggatggagacgggctcatgactcctgcagagctcatcaacttcccagaagtccccaaacacacagagtcccttcccccagctctccaggagccacaacctgctggaagtcagccacttttagccaacagtccactgcagtcagaaacccagcagtccctggggactaaagaaattaggagccaggtagaggccaagagggcgtccttggagcctgaacaggaggctggacatcagacagagggaaaagtagataccctaagccctgaagaggaggctaggggacaggcagagtctgaaggagatgttccaggtcccagagaaggtgctgaggaacaggtggagatcaaggacaatgaaggagaagccaaagaactgctggtggaaacactggagagcctaaacactccaaatgaggctgaggctcatagcatccaattggagaacgatgagatatgagcccgacggcataggctcaagcccctcagaatctcagtgcagagcagaagcatggtgttgaatatggtggggttagagccacctctgacatggggacggtggtgcaagctagtaaccccagaagcattgagagctccgggctagcctaggccacatagcaagtttgaagccaggctgggctactgcgtaagaccctgtcttgatgagggggaaaaaagcactcccatgtctcctttctggcttcagtggaaagtaggactttctgtgcagctcagggagaccataagctgagaagcagctctcaggccacaaacaaccaataaagaacagaacaaatctgtctcc

SEQ ID NO: 2077 - DNA, 2420 bp, Mus musculus
gcctggagcagagcggatctcaccctctggaacggagtgtgctgaacgtgcccaccacgaggccagatacctgactgtcagtgtgagagcagtgttctggggtggtctctgagccatggagataccccgacagacagagatggtggagctggtgcccaatggcaaacacttggaggggcttctaccagtgggcgtgcctacaacagacacccagaggactgaagacacccaacactgtggagagggcaagggcttccttcagaagagtcccagcaaggagccacacttcaccgatttcgaggggaagacatcatttgggatgtcagtgttcaatctcagcaacgccatcatgggcagtggaattctggggctcgcctacgccatggccaatacgggcatcatccttttcctgttcctgcttacagcggtcgccctgttgtctagctattccatccatctgctcctcaagtcttcggggattgtgggcatccgtgcctacgagcagttgggctaccgtgcctttgggaccccggggaagctggcagcagccctggccattacgcttcagaacattggagccatgtccagctacctatacatcatcaagtctgaattgcctcttgtcatacagaccttcctgaatctggagaagccggcctcggtgtggtacatggatggcaactaccttgtgatcctggtttctgtcaccatcattctgcccctagcactgatgcgacagctcggctacctgggttactccagtggtttctctctcagctgcatggtgttcttcttgatcgcagtcatctataagaagttccaagttccttgcccattggcacacaacctggccaatgccaccggcaacttcagccacatggtggtggcagaggagaaggcacagctgcagggcgagcctgacgctgctgctgaggccttctgtaccccaagctacttcaccctcaactcacagacagcatacaccatccccatcatggctttcgccttcgtctgccaccctgaggtgctgcccatatatacagagctcaaggacccctccaagaggaagatgcagcacatctccaacctgtccattgctgtcatgtatgtcatgtacttcctggccgccctcttcggctacctcaccttctacgacggggtggagtcggagctgctgcacacctacagcaaggtggacccgtttgacgtgctgatcttgtgtgtgcgagtggccgtgctgatagcggtcacacttacagttccgattgttctgttcccggtacgacgtgctatccagcagatgctgtttcagaaccaggagttcagctggttgcggcacgtgctcattgccactggcctgcttacgtgcatcaatctgctggttatcttcgcccccaacatcttgggcatatttgggatcattggtgccacatctgctccgtgcctcatcttcatcttccctgccatcttctacttccgaatcatgcccactgacaaggagcctgcaagatccacccctaaaatcctggccctttgtttcgctgcggttggcttcctgctgatgaccatgagcctgagtttcatcatcattgactgggtctctgggaccagccagcatggaggaaaccattaggatgacctccatcttgtcctgtctattcatcctagcacctcctgccctctctctctccagcccctgctcccagccaggggctaattaaggggagagagacggggagaaaagactctgttaaatactatggcctctggctccacccatatcctctccgttggaaggtttttgttgaagagccaggaccaaggcccatggaccacccctgctgggctccagagctgcaggggcttcctgcactaggaacagggtggggctgtcgtcgccttagatcccatgaaaccctccatcctcctccagcagctgtgcacactgaggcctagcggccacctcctgaggtcacacaggcagtaggggcacacagagccagaaaacccaggcctgaagacatcccctagtcctgctgagagaccacagtctaaacccaagggctcatccctgatctccagccccgtttccaacacttgggccccaaatcttgggtactcttgtcttcttccctctcctccataggggaccctatcccatcccatatttggggtcagcaggttctgctgaggatggggctggtatgcaccccaaaagatccctgctgtgggccttcacagttcaggggaggctgggactcccacacctcacgcctgggccatgacttacattccactgctgggagaagggaggccaggcccagagtagcctgcccttgggagtcaaagaccctagaagccaggctggcacaggaatggggaggcttgccttttataaatattatacacaagaaaaaaaa

SEQ ID NO: 2078 - DNA, 2066 bp, Mus musculus
tccggctcgcaattccaaacactcccggctgctggtgcatgtgatctcccagtagtcgctcggcagagatgttgctgttggccgctgccggcctcgtggccttcgctgctcctctacatggtgtcgccgctcatcagtcccaagcccctcgcgctgcccggcgcgcacgtaggtgtcacaggaggctccagtggcattgggaagtgcattgctattgagtgctacaaacaaggagcatttataactctggttgcacgaaatgaggacaagctactgcaggcgaagaaagacattgaaaagcactctattaatgacaaacaggtggtgctgtgtatctcagttgatgtgtctcaagactataaccaagtggagaatgtcataaagcaggcacaagagaagctgggtcctgtggacatgctggtcaactgtgcaggcacctctatgtcaggaaagtttgaagagcttgaagttagtagttttgagaaattaatgagcataaattacctgggcagcgtgtaccccagcagggcagtaatcactaccatgaaggagcgacgggtgggcaggatcgtgtttgtgtcctctcaggcaggacagctgggactgtttggtttcacggcctactcttcatccaagtttgccataagaggattggcagaagctctgcagatggaggtgaagccgtacaatgtgtacgtcactgtggcctacccaccagacaccgacacgccggggctggctgaggaaaacaaaacgaagcccctggagacccggcttatctcagagaccacagctatttgcaaaccagagcaggtggccaaacaaattgtcaaagatgccatacaaggaaattttaacagttctattggctcagatgggtacatgctgtcctccctgacctgtgggatggccccggtgacttccatcactgaaggactccagcaggtggtcaccatgggccttttccgaacaattgccttgttttaccttggaagtttcgataatatagttcgccgctgcatggtgcagaaagcaaaacctgaagttgtagacaaaactgcctaaaccttgccccttggatgaaagactgaatccagtgatttgaacagtgtgctgctaatggaacacaagttttggcctccagacttttgtatcttgtttttgaatgtgtgagattggaccccgtgctcttcagaaatctggctgtaagcagagggacatgaggccatctctacaactgttaaacactatgcaaatatgggccaggacacctttgattttctgggctgtaggggtgatagtgtgagaactaataacaggaaagcagggtaaagaatagcattccagaacagtaaattcagcttttcggtcattctcccatcctacccatagagatcaagaaatgtcctctgtggcgtttctgaggttttgttttgtttgttttttgtttttgttttgttttgcttttttttttttttttttgattttgggttttaactttttatgaaagatggtccggatttttattagtctttttttcttttttgtaatttttttagtgtatgttattcaaggtgtgtcttccgagtagcccatgagtctgactctcagcatgccttgctgcgcctgggactcgcttctgctagtgaagctggtttctctctctttgatcccataaaattcgagggggatgagagagcagcacagagggcaaggggtgagtcctttgtgacggcaagcggggctttcttgtcttcttagactgatgcttacaacgttttcatttttattcaaggggaaaggcagcctctttacgtgtttcgtgaagagaaataaaatctcctagcagcttaagttacagtttcttcaggagccatgatgacctgaagttcacattccatttcagctcagttcctagtgcttatcgctcttcctagttttgcttatgctactgtaatatttttgtagaagaaaggaaggaagaaaaaaaggatggagatcagtgcaaatgtttttgacttttttaattaatccatgaattaattaaaataaaaaaaatgaaaagc

SEQ ID NO: 2079 - DNA, 2971 bp, Mus musculus
gcacaagatggcggcgccgtccgcccgataggggttgcgggctgaggcgggttattgagttgtggcacgggggaagcgaccccagacaggcttcgctcaggtgacaggtgggcgggcagcgccgctggccccgtggcggtgcatggcctggttgctgtcttcagttttccccgcctcccaaaccctgaccgggggcggaaccagagaaaggtcaggccaggctgtcccgcctgtctccgtcctggggcggtccccttgagtggctcacttttagaattgactttagccacgtgtagcttccatggctgcggtacaggccccgggggagaagattaatatcctggcaggagagacagccaaggtcggggacccgcagaagaacgaatggcccgagcaggacaggcttcccgaacgatcctggaggcacaagtgcgcctcctacgtgttggccctgaggccctggagcttcagtgcctcactcacccctgtggccctgggcagtgccttggcctacaggtctcagggtgtcctggatcccaggctgttgttgggttgtgcagtggctgtcctggctgtacacggggccggcaatttggtcaacacatactatgacttttccaagggcattgaccacaaaaagagtgatgacagaactttggtggacagaattctggagccccaggatgttgttcgatttggagtcttcctctacaccttgggctgcgtctgtgctgcttgcctctactacctgtccgctctgaaattggaacacttggctctcatctacttcggaggcctgtctggctcctttctctacacaggaggaattggattcaagtatgtggccctgggagacctcgtcatcctcatcactttcggcccgctggctgtgatgtttgcctacgctgtccaggtgggatccctggccatcttccctctaatctacgccatccctctggccctcagcacggaggccattctccattccaacaacaccagggacatggaatctgaccgagaggctggcatcgtcacgctggccatcctcattgggcccaccttctcctatgtcctctataacacactgctctttgtgccctacctaatctttaccatcctggccacgcactgcagcatcagcctggcactgcccctgctcaccatccccatggccttctcccttgagaggcagttccgcagccaggccttcaacaagctgccccagaggacagccaagctcaacctcctgctggggcttttctatgtctttggcatcatcctggcaccagcaggcagcctgcccagactctgaggagaccagcaactcccaccacagcacagcccctcctcaggcagtgcagaagccagagactgagaaggggtgccactggccagggtgggtgcacagcataggctgcaaactcctgaacttgtgtgttgggattatcttcctaaagataacctgctcgtgatttgtgttccatgttacagggaaaccctgaagccactctagtgtcgttcctgtgttatttataatctccactagagggtgtcatcaggccactttaggatggaaagtccatctcccccttgtcctagacagaatgccctgacagtttgtgaaggagctgtgtcccaaaagagccatagtaactaggcatggtactgacccgttaccttggcacgtaggaaattgtactaattggtgccaggccccatttatacagagcgcttgtcccctgaatgtgctgcctgctagagaagggccctcattagcaaggagtgctcctggctttttgtgtagttggtggttcagatgtttctgtcctttatgtctcccttcgatcctcgccactgtggaggaaagtgtcagatcaccctgtagcaagacagttaagcctggggcggctgagaaaagcactctgctttcagtaaaacatggcatggtggctgagggagctgcttccctctgtagactccactaggaaggcagtgattctgggacctgaagtggcagtgggatgggcgtttaaagcccaaagggctttgtcccctcccagctgcctcccctggtattcctcttgcctacccaggatctctgtccctccgtctgtttccagtgccagactgtgggcaacagcaacacatgagtcaaggacacttacccctctccacagagccacaagatgggcaaatcagggaccttctgaatgtatgagtcagtggacagcagtcctggccacactcagctggaatgtgaggccctgccagagaaagaactatgagcacgggtccttcatctctctgtgctctgatgccttgttcagaatgtggcttcagtgaggtcacacccaaaggaccagaggtgtctcgctgtcttctgtaccctctctgagtataacatcttgcatggagatgatcataccatctccagtgtgctttactctgatcagctgccctgaagggggctgcaggctcttagcctgcagaaaaccaccttgagttagcactgggtcacttccttaggaaaacatatttaaatattgcccagagttcctctgtagtcagggtggtttgtctaccagagtcccagagcttgaatcagggtccagaatcctaggaacaggatgttctttcctgttctccccagcgtgctgggtttgtacgtctggtgcttttgagtgtcctgcctgtgaccctagcttggggctgatagttgtcacccagagcctggaggaccaatgactctcactgttcataaggcgggcctgacacgtggctaccctcatcagaactgtgtcagctgctacactgagctctggtgcagattttaaatgcctatttttatataccatccccagaggccatatttggtgccacattttgtatacagaccaccataatttgtattatgtctcctgattcaatgaaggtttcctgtagatttgctaattaaaataagagaaaacgc

SEQ ID NO: 2080 - DNA, 1152 bp, Mus musculus
tgcttcttttcgtttaccttatgccatgtggattcttatgccaaactgctacattttaaagcatcttattccactacctgtcattatatgaatcttcttttagacattgtctcttctttcttggacatggtaaggcaaggaaaacatgcttgtcatcttcaaggcaagcaggaatacctcactgtcaaaatacttaatgtgaagttagatttccactcattgtagacatgtttggtagaagctgatctcctatcaaatccacaggagtggccatttgcaagtctgagatccaccattacattctcaaagctgcaatacgaattggggatttgtgtgtttgggtgtatgtgtattgtagaatggtattgagaggggagctatggggatttttgtcaaacagacgccaaagtaggttatggccccagatatttgtaagatgtgcaagtgcttaatgctgtggttatctctgtatatttccatcctcagcttttcatgagttcttctccttcttttttcccatccaatctttcctgttcctaaaggtttaaaggacctggtagcagtcattgtttggtagtggtagtagttgaacagagtctatagaacatgtgccaagagtcattgcaggcattggtacttggtgccacataatggagactttatggttatttttatgctgacacagaaagtgaagcatttcttctcattaatagaaattgtcctcaggaaagcagaagtaattttctctattggatattgctatcactatctcaattatgatttctcccataccagtgtgccagagattgtatagacatggaaaatccttgcttgaatcatctccagccaaattatgcatcctggattgaatcacagttgacctttaactgtgtgtgtcacaagttttggtggagggcaggaagttcctattcatacttgttttactataggagatgtgctacgttcagcttaaatataataatataagcttaaatacctatacaactgcaaatgttaccactggcttcatggagtctccgagagggatgaaattcaagtccttttatgccataaaaacaagatgagtctttcttgtctacaccttctcctgtaataatggaagacactgaggctattgctttgagaaactgg

SEQ ID NO: 2081 - DNA, 1047 bp, Mus musculus
cggaaaggaatggagactatcatggatgatgaagtgacaaagagaacttcggcagaggagctggagtcctggaacttgctgagcagaaccaattacaacttccaatacataagcctgcggcttaccatcctctggggcttaggagtgctgattcggtattgcttcctcctgccactcaggattgcgctggcattcacggggattggcctcttggtagtgggaactactatggttggatacctgccaaatgggagatttaaggagtttttgagtaaacacgttcacttaatgtgctaccgtatctgtgtgcgagccctgacggccatcattacgtaccacaacaggaaaaacagaccaagaaatggtggcatctgtgtggctaaccatacatcgcgtattgatgtgatcatctttgccagcgacggctactacgccatggttggacaggttcacgggggccttatgggtgtgattcagagagcaatggtgaaagcctgcccccatgtctggtttgagcgttctgaggtgaaagatcgccacctggtggctaagaggctgactgagcatgtccaggataaaagcaagctgcccatcctcatcttcccagaaggaacctgcatcaataacacatcagtgatgatgttcaagaagggaagctttgaaattggagccactgtttaccctgtggctatcaagtatgaccctcagtttggtgacgccttctggaacagcagcaagtatggcatggtgacgtaccttctgaggatgatgaccagttgggccattgtctgcagcgtttggtacctgcctcctatgactcgagagaaagatgaagatgctgtgcagtttgctaacagagtgaagtctgccattgcccggcaggaggattggtagacctgctgtgggacggtggattgaagagagaaaaggtgaaggacacattcaaggaggagcagcagaagctatatagcaagatgatagtcggaaaccatgaggaccgcagccggtcctgagcctccgtcttgtgctggctgaagcgccacctct

SEQ ID NO: 2082 - DNA, 264 bp, Mus musculus
tttttttttttttttttgcaagtgatgtaaagagccccttttattgccagtaggagggagtcttacacctctgcctgggcctgggtgggcatgaaaggacccgtgagaggaagtggctgatgatggaaaccttgtgggaggcagggatacgcccacccatccaagccgccacacctgcccttaccaagatgattgttgccctttcggtagttgcctgtcacgtgggtgcagctgctcccgtccccctggcagacaccacacttg

SEQ ID NO: 2083 - DNA, 1239 bp, Mus musculus
  misc_feature 489: n = A,T,C or G
gcccgcacccctcaccgctgctcggtcccggccgcgggccctcgccgccgccgggaaagggctcctccgcggaaccctcgagcgtcgggggcgcggacggcacgccgtaggaagggctcttttcgccccagtgcaggttgcggctgcccgggatgtccgggggcgtcgtcacccagtggcccagttccgtccctgaaccgaaggagcgcgcatggaaagggccgccgaaagccggatcatcccgaacgcctccccggtagcccaggccatcgaagccctcagggcgccgcggatgcatctcggacaggcggacgaggacgagagaggccggcccacggagcccaggcctccaccgcgtccccgccgcagccgctgcgcgtccggagactgacaaccggaagtcacggctagaacccggaagtcctaggagcacgtgactccgccctggcgcgtcttccctgagttggttgctagggagatgcggcttangatggaaggggaaggatgcttgttgggcctggtcccaggagatgcaaggtgtgtcccctgctagcagggatgctctgagctgtgcagcagccacgagtgaccgcggactgttgcaacatgctgactcccctcaccaggtgctcacccttttcaagggaaacctgtgtagggcaagagtagccttcagcctagctttgtctccggctgtgtggaccaccacagcagacattaacaatgttcaaatcaaaaacatcctcgtgtgtgaatacatactgccctcaaccacataggaatcaactgtttaacttttctaaggcaactgtatacagttttcttttttctgatgtatcaacttgggtaactgagatcacagcgttgtccctgaacacccccaccccatgacgacttctgttgattccccccactacctgtttttattagtttcttgaggtcttgaggctgggtggctcttgttagatctgaccgagttttgcatggcttctccctgagccttcttcccaactgaacactagaatctaaagacgttcagaagagaatgctgacgtattcccttcaaaggccatgaaccttcgtttaaagggataacctacattttgggcatcttgagatttcttggattaggttatgatgtgccttggcaaaatgtggggagtctcttgatctagtattccttgtgtgcttatatcaaagcactactagacatggcaataaaagaatttcttttccagt

SEQ ID NO: 2084 - DNA, 2997 bp, Mus musculus
cccccggccccagcagcggaaagtggcagtgagctgtggcatcatccatagcagctccttactggtactgtgctccctcacctgcctcgctccgcttctcctcaggcccggccatggagcgccaggtcctacggcttcgccaggcgttccggtccggccgatctcggctgctgcgcttccgattgcagcagcttgaggccctgcggaggatggtgcaagagcgcgagaaggaaatcttagcagccatcgcggcagacctgagcaaaagtgaactcaatgcatacagtcatgaagtcattaccatccttggagagattgattttatgttggggaatcttcctgaattggcttctgcgagaccggctaagaagaacctgctaaccatgatggatgaggcctacgttcagcccgagcctctgggagtcgtactgattattggagcttggaattaccctttcgttcttaccatgcaaccgctggtgggagccattgctgcaggaaatgctgccattgttaagccctcagaactcagtgaaaacacggccaagatcttggctgaactcctccctcagtacttagaccaggacctgtatgcgattgttaatggcggtatcccggaaaccacggagcttctgaagcagcggtttgaccacattctctatacagggaacactgcagttggaaaaattgtcatggaagctgctgccaagcatctgacccctgtgaccctggaactcggcgggaaaagcccttgttacattgacagagactgtgatctggacgtggcttgcagacgcgtagcctggggaaagtacatgaattgtggtcaaacctgcattgctcctgactatatcctgtgcgaagcctccctccagaatcaaatcgtacagaagattaaggaaacggtgaaggacttttatggggaaaacataaaggcttctcctgactatgaaaggatcatcaatcttcgtcactttaagaggttacaaagtctgcttaaaggccagaaaatagctttcggtggagagatggatgaggccacacgctacttagccccaaccatacttacagatgttgatcctaactccaaggtgatgcaagaagaaatttttggaccaattcttccaatagtgtctgtgaaaaatgtagacgaagccataaatttcataaatgaccgtgaaaagcccctggctctctacgtattttctcgtaacaataagctcatcaaacgggtgatagatgagacctccagtggtggagtcaccggcaatgatgtcatcatgcacttcactgttaattctctgccctttggaggtgtgggtgccagtggaatgggggcgtatcatggaaaatacagttttgatgccttttctcatcagcgcccctgcttgttaaaagggttaaagggggaaagcgtcaacaagctcaggtacccgcccaacagcgagtccaaggtcagctgggccaagttcttcctgctgaagcagttcaacaaaggaaggctggggatgctgttgtttgtgtgcctggttgctgttgcagctgtgattgtcaaggatcagctgtaatgacttccttgttgcctctcctgaagtatcactctactaaatggttaacaaaccaatacttttaaaattgtacccaaaccaggaaattcacagatgtactgcaatcaaacctaagctgttgccacaaaccactaatgaaactcagtgtttgagccaaatctccgcaattgagagcagtgcaagtgctgagaggatgtagactgggctggggcgagaacatgtcacactagatcccagtccacgatgatgagtcagggagactcgataactgctccttggccattcattttcctccagcccatagctctgcccactccagtgtcaaacaccgcccaggctttccagctgacctctgagagctgaggctaggtcctcccagctactgttaggcattgaggtactaaaactgcaggtgggtatgtccatctcatccattgtggcttgagaccggccttcaggagtccgctctccatttaaacatcctttcttattcatagcgcaccacccaaagtctgtgtgtttgtgacagtctgaggggactgtccagtgcctttgtgatgacctaaactgcactgagtctcttgccaagaagcaatgctttttttgtgaaggccactcagagcatcttgcagtcacagctgttcctgagcctgaggccagaagattccctaacccaggactttgaagccagcctaggcaacatgatggggaccctccccattcttcataaaaatcccctcaagatcctcaagttgaatgttttgtagatcttcaaggataagccttctgcttattctcctagcacaatgcaaggaaattttactttttaaattttagagagattcctacagatctataagcatggagccattcctgtagtgaaaggggggttattatacccaggcttcagaactcacaggacaggattcgtgagaacactgcgagctgtggagcacacttaagggatgggatggtcagaggcgctcccgagcaagcgggcatcattctcccttagatcctagtgtggctaagcagggatgtggcagagagatcgtgtggatctggcttctgctgctggggcctggctgggcaaagctccaagcctcactgccttgccttcgggtagactaattaacctcggcctactcaatgagaggctacatgcgaatgtatagccgtgtttgctgagtaacctgtcccgccgttgaggctatctgaagtgtattgtatgaagtatcaagaacgaatcattggccggttatagcaatagttgcttaagtagcagttgtcatagactaatcataaaatattttgcacaaaatttcaatgttgaacttcgacttactgttgttatagtaaattataaatcacagcttctagctaggccaaaacacttactctactgatcttcaaaataaatgtatttcat

SEQ ID NO: 2085 - DNA, 8095 bp, Mus musculus
tggctttaaaaagcacagcattggagacactccatgagtctgcttggcttccgggcaaagtagcatttaagaccttgtgttaaaatggacaccggggacacagctctaggacaaaaagctacctcaaggtctggagaaactgacagcgtgtctggtagatggaggcaggaacaatcagctgttcttaagatgagcactttcagcagtcaggaagggccaagacaaccacagatagatcctgagcagatcggaaatgcagcttcggcgcagctgtttggttctgggaagctggcctcgcctggcgagggcctacatcaagtcacagagaagcaatacccacctcaccgtccgagtccctacccatgccaacactcgctctctttccctcagcattcactatcccagggcatgacgcacagccacaagccacaccagagcctagagggccctccctggcttttccctggccctttgccatctgtcgcctctgaggacctatttccttttccaatgcacggccacagcggtggttatcctagaaaaaagatctcaaatctcaaccctgcttacagccaatactcccagaaaagtatcgaacaggcagaagatgctcacaagaaagagcacaaacccaaaaagccaggcaagtatatctgcccgtactgcagcagggcatgtgcgaaacccagcgtcttaaagaaacacatcaggtcccatactggtgagcggccgtatccatgtataccttgtggcttctctttcaagacaaagagtaatttgtacaagcacaggaagtctcatgcccatgcaattaaggcaggcttggtacccttcactgagtcatctgtatccaaattggacctcgaggctggttttatcgatgtagaagcagagatccactcagacggtgagcagagcacagacacggatgaggagagctctttatttgctgaggcttctgacaaagtgagccctggccctcccgtccctttggacattgctagcagaggtggctaccatgggtccttggaagaatctttgggaggtcccatgaaagtgccaattttgattattcccaaaagtgggatcccactagccagtgagggctctcagtatctgagctctgaaatgctccccaatccgtctctgaatgctaaggcggatgactctcacacggtgaaacagaaacttgcgctgagactgtcagagaagaaaggacaagactctgagccatcccttaacctcctgagcccgcacagcaaggggagtacggactctggttacttttctcgctcagaaagtgcggagcagcagatcagcccacccaacacaaacgccaagtcttatgaagaaatcatttttggaaaatactgtcgacttagtccaaggaatacacttagtgttactcccaccggtcaggagcgcaccgccatggggcgcaggggcatcatggaaccattacctcatttaaacacccggttggaggtcaagatgtttgaagatcctatctctcaactgaatcccagcaaaggagaaatggaccccggtcaaatcaacatgttgaagaccacgaaattcaacagtgagtgtcggcaaccacaagccatcccgtcctctgttaggaatgaaggaaaaccttacccaggcaacttcctaggcagcaatccaatgctcttagaagctcctgtggactcttcaccccttattagaagcaactcgatgccaacgtcttcagcaacaaatttaagtgtccctccttctttgagaggaagccactcgtttgatgaaaggatgacagagtctgatgatgtgttctatcccggcactgtgggcatacctccccagcgcatgctcagacggcaagcagccttcgagctgccgtcggtccaggagggccacatggagtctgagcaccctgcacgggtatccaagggccttgccagtccatccctgaaggaaaagaaattacttcccggagacaggcccggctatgactacgatgtctgccgtaaaccatacaagaaatgggaagactctgaaacactgaaacagagctacctgggtcccttcaagcaaggaggggaatattttatggacccctcggtgccagtgcagggagtgccaaccatgttcgggactacctgtgagaacagaaaacgcaggaaagagaagagcgtgggagatgaagaggatgttcccatgatctgtggtggcatgggaaatgctcccgtgggcatgatgtcctcagagtacgaccccaagctgcaggacggaggaaggagtggctttgccatgactgcacacgagagccttgctcatggtcactccaaccgtctagacccagctcgaccccagctgccgtctagaggtccatctcttgggtctgaggatttgcccttggctgctgatccagacaagatgacagacctgggcaagaagcctccaggaaatgtgatttcagtgatccagcacacaaactcgctgagccggcccaactcctttgaaagatctgagtcaacagaaatggtggcctgcccacaggacaagaccccttcacctgctgagacatgtgacagtgaggttttggaagcccctgtaagcccagagtgggctcctccaggggatggtggagaaagcggaagcaagccaaccccttcacagcaggtaccacagcattcttaccatgcacagccaaggcttgttcgccagcacaatatccaggttcctgaaatcagagtcacagaggaacctgacaagcccgagaaggagaaggaagctcctaccaaggagcctgagaagccagtggaggaattccagtggcctcagagaagcgaaactctttcccaactccctgctgagaagttgcctcccaaaaagaaacgcttgaggcttgcagacttggaacactcctcaggggaatccagctttgagtccacaggcaccggcctctctaggagtcccagccaagaaagcaacttatcccacagttccagtttctccatgtcctttgatagagaagaaacggttaagctcacagcacctcctaagcaggatgagagcgggaagcattctgagtttctgactgtccctgcgggttcatactcattgtctgttccgggtcatcaccaccagaaagaaatgcggcgttgctcctccgagcagatgccctgtcctcacccgacggaagtcccagaaatacggagtaaatcgtttgattatgggaacctgtcccacgctccagtggctggaacatccccatcaacactatcaccgtcccgggagaggaagaaatgttttttggtgcgtcaggcttccttcagtggctccccagaaattgcccaaggtgaagccggcgtggaccccagcgtcaagcaggagcacatggagcacttgcacgctggcctcagggctgcgtggccctctgtgcttccacctctgccaggggatgacccaggaaagcaggtcggtacttgtggcccactgagctcagggccaccactccaccttacccagcagcagatcatgcacatggacagtcaggaatctctgagaaatccgttgattcaaccaacatcctacatgacgagcaagcacttacccgaacagccacatctgtttccacatcaagatgcggtcccattttctcctatccagaatgccttgtttcagtttcagtacccgactgtgtgtatggttcatctgccagctcagcagtctccctggtggcagacacatttcccccatcccttcggtccacaccctcagaacagctacagtaagcctcccttccaagctgaccttcattctagctaccccttagagcatgtagcagaacacactggaaagaaatctgctgactatccccatgcgaaagagcagacttacccgtgttattccggaacatcagggttacactccaagaacctccctctgaagtttccatcagacccgggcagtaagtccactgaaacgcccacggagcagctccttcgagaagatttcgcctcagaaaatgctgggcctttgcagtccctaccgggaacagtggttcctgttcggatccagacccacgttccatcctacggaagtgtcatgtacacaagcatttctcagatacttggacagaacagccccgccatcgtcatatgcaaggtcgatgagaatatgacccaaagaacactggtaaccaatgcagccatgcaagggataggattaaacatagctcaagtgcttgggcagcacacgggcttggaaaaataccctctttggaaagtacctcagaccttacccctgggcttagagtcctctatccccttgtgtttaccgtccacctcagacaacgcagcctctctcggaggaagcaagcggatgctctctccagccagcagtttggagctcttcatggaaaccaagcaacagaaacgggtgaaagaggagaagatgtacgggcagattgtggaagaactcagtgccgtggagctaaccaactcagacatcaagaagggcctttcccgaccccagaagccccagctcgtgaggcaggggtgtgcttcggagccaaaggatggctccttccagtcaaggtcttcttccttctcctccctgtcaccctcctcttctcaagaccatccgtctgccagcgggcccttccctcccaacagggagattcttccagggtccagggctccaccgcgacggaagttcagcgggccctcagaaagcagagagtcctccgatgagctggacatggatgagacgtcgtcagacatgagcatgagccctcagagctctgcactgcccaccggaggcggtcagcaggaagaggaagggaaagcccgcaagctgcccgtcagcatgctggtccacatggcctctggtcctggaggaaatgtggcaaattccactcttcttttcacagacgtggccgatttccagcagatacttcagttccccagtctgcggacaactactactgtgagttggtgcttcttaaattacacaaaacccagttttgtgcaacaggccaccttcaaatcctccgtttatgcttcatggtgcattagttcctgtaacccaaacccatcaggattgaacaccaagaccacgctggcccttctgagatccaaacaaaaaattactgcagaaatttatactctggctgctatgcacaggcccggagctggtaagctcacttcatccagcgtctggaagcagtttgcacagatgaagcctgatgcgcccttcttgtttggcaacaaactagaaaggaaattagcaggaaatgtcctaaaggaaagagggaaaggagagattcacggagataaagatcttggatccaaacaaactgagccaatacgaattaagatctttgaaggggggtacaaatccaatgaagattatgtgtatgtcagaggacgtggacggggaaagtatatttgtgaagagtgtggaattcgctgtaagaagccaagtatgctcaaaaaacacatacgcactcatactgatgtccggccttatgtatgcaagttatgtaattttgccttcaaaacgaaaggaaacctaacaaaacacatgaaatctaaggcccacatgaaaaagtgtctggagctgggcgtgtcgatgacatcagtagatgacacagaaacagaagaagcagaaaatatggaagagttgcacaaaacatctgagaagcacagcatgtccggcatctccactgatcaccagttctccgatgcagaggaatcggatggggaagatggagatgacaacgatgatgatgatgaagatgacgatgactttgatgaccaaggagatttgacacccaaaacaaggtcaagaagcaccagtcctcagcctcctaggttctcctccttgcctgtcaatgttggcgctgtagcccatggcgtcccttcagatagctctctgggacattcgtcattgatcagctatttggtcactctaccgagtattcaggttactcagctcatgacacccagtgactcttgtgatgacactcagatgacagaatatcagaggctgttccagagcaaaagcacagactctgaaccggacaaagacaggttagacatcccaagctccatggacgaagaggccatgttgtcttcagagccaagctcctccccaagggacttctccccctcaagctaccgttcctccccaggctatgattcttcaccctgtcgagataattcgccaaagaggtatctgatacccaaaggagatttgtcacccagaagacatttatcacctagacgagacctgtcgccgatgaggcatctgtcaccaagaaaagaagctgcattgaggagagagatgtcccaaggggatgcctcagcaagaaggcacttgtccccaaggagaccattgtctcctggaaaggacattacagcaagaagagacctctctcccagaagagagagaagatatctgaccaccatcagagcaccgtctcccagaagggctttatatcctaaccctccattatccatgggacagtatctacaaacagagccaattgtattggggcctcctaatctaagaagaggaatacctcaggttccttacttcagtctctatggagaccaagaaggtgcttatgaacatcacggctccagccttttccctgagggtcctactgactatgtcttcagtcatcttccactacactctcagcagcaagtacgagctcctatacccatggtgccagttggtgggatccaaatggttcactccttgccgcctgccctttccggtttacatcctccacccacattgcctctgcccacagagggctctgaggagaagaaaggagcaccaggggaggcctttgccaaggatccctacatcctttccaggcggcatgaaaaacaagcccctcaagttttgcagtcatctggtctacctagttctccctcctccccacggctattgatgaaacagagtacttcagaagacagcctaaattccacggagagagaacaggaggaaaacatacagacttgtgcaaaagccattgcctcactccggattgcaacagaagaggcagctctgcttggggctgaccctcccacatgggtacaagagtccccccagaaacccttggaaagtgcacacgtcagcattagacactttggcgggcctgagccaggtcagccctgtacctcagccgcccaccctgacttacatgatggtgaaaaggacacttttggtacatcacagactgcagtagctcaccccacgttttacagcaagagcagtgtggatgagaagcgggtggactttcagagcagcaaggaattatctttaagcacagaggaaggcaatgaaccttcaccagaaaagaatcaactccattgatctgcaatgcatagacacattcatttccacatttccccctcccctgttttgtttttgtttttctaggaatagaagtaaacaagttgatagcatgcctgtcctaagttacagtagttggctattataaatacttttgttattttgaaaacaattaggtaaattaacaagtcatcttgagcctgaccaaaacaaaatttgaaattaacctattgggtctggtactttgaaaattgtacagatgtttgtgccttttctttactttgcttatattcttataagcattttttagcagtaatttgtacatattttagaatttgtgtatctgccttgtaataaatgtaatctctttcctcttttggacacttggatctaaacgatgtaaagcaaagcagcatctatatatatgtgaggttgcactaagacatatttttatatgataaaaactgaacagcttttatgtacagctctgattctgtaatactaatatttattttgtttcataaactgtacatttttcttaatgttgtggattgcttttctatgtgacgcatggatttaactgttgcgaaactagaacggaaatgtccattgtaagcaagatatttaaactagaatatcttattctgcacttatgcattagttacaaaaaaaagataaagaacgtatcagtcggttcttaacttgtaaattctttttgtctcttgtttgcccggaattc

SEQ ID NO: 2086 - DNA, 1121 bp, Mus musculus
gcgatctgtgggtgacagtgtctgcgagagactttgccacaccattctgccggaatttggagaaaaagaaccagccgcttccagtcccctccccctccgccaccatttcggacaccctgcacactctcgttttggggtaccctgtgacttccaggcagcacgcgaggtccactggccccagctcgggcgaccagctgtctgggacgtgttgactcatctcccatgaccctgcggtgcctggagccctccgggaatggagcggacaggacgcggagccagtgggggaccgcggggttgccggaggaacagtcccccgaggcggcgcgtctggcgaaagccctgcgcgagctcagtcaaacaggatggtactggggaagtatgactgttaatgaagccaaagagaaattaaaagaggctccagaaggaactttcttgattagagatagttcgcattcagactacctactaactatatccgttaagacgtcagctggaccgactaacctgcggattgagtaccaagatgggaaattcagattggattctatcatatgtgtcaagtccaagcttaaacagtttgacagtgtggttcatctgattgactactatgtccagatgtgcaaggataaacggacaggcccagaagccccacggaatgggactgttcacctgtacctgaccaaacctctgtatacatcagcacccactctgcagcatttctgtcgactcgccattaacaaatgtaccggtacgatctggggactgcctttaccaacaagactaaaagattacttggaagaatataaattccaggtataagtatttctctctctttttcgtttttttttaaaaaaaaaaaaacacatgcctcatatagactatctccgaatgcagctatgtgaaagagaacccagaggccctcctctggataactgcgcagaattctctcttaaggacagttgggctcagtctaacttaaaggtgtgaagatgtagctaggtattttaaagttccccttaggtagttttagctgaatgatgctttctttcctatggctgctcaagatcaaatggcccttttaaatgaaacaaaacaaaacaaaacaaaaaaaaaaaaaaaaa

SEQ ID NO: 2087 - DNA, 1813 bp, Mus musculus
aagtccccgctctggcctccaaagtcgcggcccaaacacctcacactcactgtttcttctagtatgcttccactgactgaggagaacaagcacgtggcacagctgttgttcagttctggcacctgtccaagatgcatcttaagattctgtggtgtggatcttcccgcaccttacaaacacccatccaaggagttgctcaatgagctacaaaaatttctagaaccggaaaaacctgaattaattttagaagctccaaacccaccattgaagaaaattcgtctacatgaagatgggattgataatttgagtgaagatggaaaggagggagtctctgttactgaagatgaaagcatggctgagaagccttcaaagctgagagtgtgcaatgtttgcttaggaattcttcaggaattctgtgagaaggggtttattacgaaggtgtgccaaaaggttgaagcctctgggtttgaattcaccagcgtggttttatctgtctcctttccaccgcagctgtctgtaagagagcatgctgcatggttgctggtaaaacaggaaatgggaaagcagagtctgtccctgggaagaaatgatgtagtccagctgaaagaagcctacaagtggataactcaccccctgttttcagaggagctgggcgttcccactgatggaaagagcttgttcgaagtgagcgtggtctttgctcatccagaaacagctgaagattgccatttcctaggtgaagtttgccgagattgtttcaaaccagctaaaaataaacagtcggtatttaccagaatggcagttttgaaagctttgagtaagataaaagaagaagacttcctcgggcaatttccttgtcctccaaactcaccgaagactgtatgcactgtccttgaagttgagtgcactcatggtgctgtttttgtcgctggcagatataataaatactccaggaatctaccacaaactccttggataattgatggagaaaggaaaatggaatcttcggtggaagaattaatttcagatcatcttctggcagtattcagagcagagagttttaatttctcatcctcgggacgagaagacgtagacgtgagaacattaggaaatggaaggccctttgcagttgaacttctgaatcctcatcgagtgcatttcacctcacaagaaatgaaggagctccagcagacaattaataaatcatctgacaaaatccaagtccgtgacttgcagcttgtcaccagggaggcaatagggcatatgaaggaaggtgaggaagaaaagactaagacctacagtgccttgatatggacgaatagagctatccagaagaaggacattgggttcctggacgacttaaaggacttaaagattgaccagaaaacacctctccgagtccttcaccgaaggcctttggctgtgagaactcgggccattcactctatgaagacacactacctggatgagcatcattttcgtctgcatttaaagacccaagctggaacctacattaaagaatttgtacatggagactttgggagaaccaaaccaaaccttggctctttgatgaacgtgactgcagacattcttgagctggatgtggagtctgtagatgttgactggccgcctgctctggatgactagctcccacgtgtgaacacaaaaggctttcctggcatgatgtggacatacaggcagcatatcctggaaaatgactgtttacccaccataacggtgtcttcaaaaccacttggatcatgttgatctgttcctaaagttcactgtaacatctcaggatctatttgtacgc

SEQ ID NO: 2088 - DNA, 1119 bp, Mus musculus
aggcttccctgtccagcaactctaaggaagtaatccacccttactactagggggttatatttatttatttttgaaacagggtttcatggtcagccccaggtgacctgaaactcagagatctgcctgcctctgcctcccaacaaaggcacacaggcccatgccaccacatccggctttctcccccccccccccccctgtttggttttttgagtcctgatcttggctctcctggagctcacgatgaaaatcaaggtggcttcgaactcagagatctacctgtaagtgtgtggattaaaggcaaatatcaccatggccagcctatcctctgctttttgaggtacacctattctggcttttgaagctgattggtgatatcacgaggtgtgccaggtggaagagaggatacccggctagtgtggattccagcagtgatctattttccttttctgaaggtgtagaagccacaggcctgtctctgtggcaataatttaccatcccacccaccatatgtatatgacagatgacgatctggaagagaactgggtttccaggaaaaatcatttaagtcccagtgccagacctcctgacccaaacacagggtcagccactgaggttcctgacttatcagtgcccatcactatctggcgttctgaaagtcccatagaaaagtgtcaggaaagcaacgtcatcaaggatataaagagaaaggagaaagagcaagatgaggaggagatggtggatgaaaaggcaaacttgaagaaaaaagccaagggcaagttaactaagaagaaaaccccagtgaagtcggagtcttcccctgctgatctgagccaatccgtaagaggacccgtgaggacaccagagtctagcccagaaagcccgggagggctggagagcgagtacagttgtgaacggggtaaagaaaggccctctagtgaagatgttgtagagtcattgtcccccagaaagaaagagaagacatcatctggccaggccaaaaagaatgggacaaagaaagaaacccagaaaacgagcaagagaaaaaaatcttccccagtgcccaaccccaatctcagctgaggcaaacagagtgaataataaatcaagcctgtaactgac

SEQ ID NO: 2089 - DNA, 436 bp, Mus musculus
agcacaaactcttagggaaccgaatcaccaccaccactgtagtccagtaacttcccttcggtgtgtgtgtgtgggcatgtgtgtgccatgtatgtctgcgcagctcactaccaacagcctccatgtgcacttgaccttgtggtgcctccgggaactttccaggttggcacctgaatgccttactctcagcagtctgaggctcgcttgctctgcgcacacgtttcagtctccttttttggccctaggctggttaggaacctgtacaccttcactatttcctctctcccctctataagttgctgaaatcacaaagcacacttttggggatcatagaaggttggggttccagaaaggcatctctgtgatggttccattcactatggggatttccctacttgctgtcttcttgatttctctaataaaaagagccaaatgg

SEQ ID NO: 2090 - DNA, 2013 bp, Mus musculus
ttgagtggtcctgagtctgcagaggcttcccttgcctactctgtgtccagctctacccccccccccccaagagaaaggcccagggcagtgtggaagcagagccagacagggctcgatattcctttacccccagcaagagccagagggagggagctgccagccaggcacagccgagaacactggagccatgacaaccagtcaccagcctcaggacaggtataaggcagtatggcttatcttctttgtgctgggcctggggacactgctcccctggaatttttttatgaccgcaaccaagtatttcacaaaccgcctggacgtgtcccagaatgtgtcctcggacactgatcaatcatgcgaaagcaccaaggccttggctgaccccacagtggccttgccagcccggagttctctcagtgccatcttcaacaatgtcatgaccctgtgtgccatgctgcccttgctggtcttcacctgcctcaactcgtttctgcatcagcggatctctcaatctgttcggatcttgggcagcctgctggcaatcctgctggtattccttgtcactgccgccctggtgaaggtggagatggatgctctgatcttctttgtcatcaccatgatcaagattgtgctcatcaattcatttggtgccattttacaagccagcctttttggtctggcaggtgtcctgccagccaactacacagcccccatcatgagtggccagggcctggctggcttcttcacctctgtcgccatgatctgtgccattgccagtggttctgagctgtcagaaagcgcctttggctacttcatcacagcctgtgcagttgtcattttggccatcctgtgctacctggctctgcctcggacggaattctatcgccattacctgcagctcaaccttgcggggcctgcagagcaggagaccaagttggatctcataagagaggagccaaaaggaagaagagaggaatctggggtgccaggccccaactctccacccaccaacagaaaccagtctatcaaagccatacttaagagtatctgtgtcccggctctgtctgtctgcttcatcttcacggttaccattgggttgttccctgctgtgactgctgaggtggaatccagcatcgcaggcacaagtccctggaaaagctacttcattcccgtggcctgtttcttgaatttcaatgtctttgactggctaggccggagcctcactgctgtctgcatgtggcctggccaggatagccgctggctgccggttttggtcgcctcgaggattgtgtttattcccctgttgatgctctgcaacgtgaaggctcgccactgcggcgcgcagcggcaccacttcgtctttaagcatgacgcctggttcatcgccttcatggctgcctttgccttctccaatggctacctcgccagcctctgcatgtgcttcgggcccaagaaagtcaaaccagctgaggcggagacagcaggaaacatcatgtccttctttctgtgtctgggcctggctctgggagctgtgttgtccttcttgttaagggcacttgtgtgaccctgtggggacagaagaactacactgcctgcttcctgctcacttccttccctgccagggacgagcaggggtcgagaggggctgttcttctagctgacttctgctttcctctggactgtgcttcgcccagctgtccaggagccagcgatggcctgcgggtggacttgggattcagggtcagaatggcaagggctcaatggcctctgactgacagctccgactgatgcccgcttactccaagcacaagagactccagggccaagagagatctgtccgcctgcctatcacaggatagggcggaggcggatggctgattggtgtcgtgtgacctgatgtccctccccttgcccttcttccttctgtgcctgttccatgtccccagcccttgtcattttactgccttttttatactgacagaaaccaggtgccttcagaggccatctgattaa

SEQ ID NO: 2091 - DNA, 1940 bp, Mus musculus
tgggcgcgctctgttgcaggagctggaggcggcggctgcccggcgggcggcaacgacttccagtggtgcttctcgcaggtgaagggcgctgtcgacgaggacgtggcggaagccgacatcatctccaccgttgagtttaactactctggagaccttcttgcaacaggagacaaaggtggcagagttgttattttccagcgggaacaagagaataaaggccgcgctcactctaggggagagtacaatgtttacagtacctttcagagtcatgagccagagtttgactatttgaaaagtctagaaattgaagaaaaaattaataaaatcaggtggttaccgcaacagaatgctgctcattttctactctctacaaatgataaaactattaaattatggaaaataagtgaacgggataaaagagcagaaggttataacttgaaagatgaagatggacgacttcgagacccatttagaattacggcactacgggttccaatattgaagcccatggaccttatggtagaagcaagtccacgacgaatttttgcaaatgctcatacatatcacataaattccatttcagtaaatagtgatcatgaaacatatctctctgcagatgatctgagaattaacctatggcatttagaaatcacagatagaagcttcaacattgtggacatcaagccagctaatatggaggagctgacagaagtcatcactgccgcagagttccacccacatcagtgcaatgtatttgtttacagcagcagcaagggcaccatcaggctgtgtgacatgcgttcctctgccctatgtgacaggcatgccaagttttttgaagagccagaagatcccagcagtagatccttcttctcagaaataatctcatctatatctgatgtcaagttcagccacagtggtcgatacatgatgaccagagactatctgtcggtgaaggtctgggacctcaacatggagggcaggcctgtggagacccaccaggtacatgagtacctgcgaagcaagctctgctccttgtatgagaacgactgcatctttgacaagttcgagtgctgctggaacggttcagacagtgccattatgacggggtcctacaacaacttctttagaatgtttgatagaaacactcggagggatgttacactggaagcctcaagagagaacagcaaaccccgagccagcctgaagccccggaaagtatgtacagggggtaagagaaagaaagacgagattagcgtggacagtttggacttcaataagaagatcctccacacagcctggcaccccatggagagcattattgctgtagctgccaccaataacttgtatatattccaggacaaaattaattaagaaaactgactggaggaccaagtgttgtcttgcatatgtacgccggtcaattagttttcctgtcaaaaaaggcattgtcctctccattgagaatagtggcgcacttctacttccctaatagatacaggagaagaagggctctcagctggagtcggaagagatgagtgccgctgctgaagggaaaacctgctcgaagctgaattggtggactctgctcaataaaggccattactcaaatgtatttatttaagtctgagccttcctttccagtttatagaccaaaaaactaacatctgagaggaaaaaaaaaagctcatcaaatctctctccagctcttccctctgtctctgccatccatccctgggccttatcctggacatggtgtggccaccacccacgttcctctctggccctggagccccagtgggctgcatcaccctccgctggtgcatggtgcgtgggtgcccgagcaggctcaggcagctctactcacccactgcactgccgtcacatcttctgtggagctacttaataaacacaacacactgtgaagtgtttttaaaccc

SEQ ID NO: 2092 - DNA, 1456 bp, Mus musculus
cggggttattgaagtaaaaatgtccagaaaaatccaaggaggttctgtggtggagatgcaaggagatgaaatgacacgaatcatttgggaattgattaaggaaaaacttattcttccctatgtggaactggatctgcatagctatgatttaggcatagagaatcgtgatgccaccaatgaccaggtcaccaaagatgctgcagaggctataaagaaatacaacgtgggcgtcaagtgtgctaccatcacccccgatgagaagagggttgaagaattcaagttgaaacaaatgtggaaatccccaaatggcaccatccgaaacattctgggtggcactgtcttcagggaagctattatctgcaaaaatatcccccggctagtgacaggctgggtaaaacccatcatcattggccgacatgcatatggggaccaatacagagcaactgattttgttgttcctgggcctggaaaagtagagataacctacacaccaaaagatggaactcagaaggtgacatacatggtacatgactttgaagaaggtggtggtgttgccatgggcatgtacaaccaggataagtcaattgaagactttgcacacagttccttccaaatggctctgtccaagggctggcctttgtatctcagcaccaagaacactattctgaagaagtatgatgggcgtttcaaagacatcttccaggagatctatgacaagaaatacaagtcccagtttgaagctcagaatatctgctatgaacacaggctcatagatgacatggtggcccaagctatgaagtccgagggaggcttcatctgggcctgtaagaattacgatggggatgtgcagtcagactcagtcgcccaaggttatggctcccttggcatgatgaccagtgtgctgatttgtccagatggtaagacggtagaagcagaggctgcccatggcactgtcacacgtcactaccgcatgtaccagaaagggcaagagacgtccaccaaccccattgcttccatttttgcctggtcccgagggttagcccacagagcaaagcttgataacaatactgagctcagcttcttcgcaaaggctttggaagacgtctgcattgagaccattgaggctggctttatgactaaggacttggctgcttgcattaaaggcttacccaatgtacaacgttctgactacttgaatacatttgagtttatggacaaacttggagaaaacttgaaggccaaattagctcaggccaaactttaaggtcaaacctgggcttagaatgagtctttgcggtaactaggtccacaggtttacgtatttttttttttttttttagtaacactcaagattaaaaacaaaaatcattttgtaatttgtttagaagacaaagttgaacttttatatatgtttacagtcttttttctttttcatacagttattgccaccttaatg

SEQ ID NO: 2093 - DNA, 3364 bp, Mus musculus
gcggccgccgccccgcgatggccccgcagcaaggccggccggcgctgcccgcccgctgcgagccgccggcggcgccgccggtaccgcctcgccgagagcgcggggggcgcggggcgcgcgggcccggggtgtccgggggtcgggggcgcgcgggcggcgccgagggacgcggcgtcaagtgcgtgctggtcggcgacggcgcggtgggcaagaccagcctggtggtcagctacaccactaacggctaccccaccgagtacatccctacggccttcgacaacttctcggccgtggtgtctgtagatgggcggcctgtgagactccagctctgtgacactgcaggacaggatgagtttgacaagctgaggcccctctgctacaccaacacagacatcttcctgctgtgcttcagcgtggtgagccccacatccttccagaacgtgggcgagaagtgggttccagagattcgacgtcactgcccaaaggcccccatcatcctggtcgggacacagtcggacctcagggaggacgtcaaagtgctcatagaactggacaagtgcaaagagaagccggtgcctgaagaggcggcgaagctgtgcgcggaggaagtcaaagctgtctcctacatcgagtgctcagcgttgactcagaaaaacctcaaagaggttttcgacgccgccattgttgctggtatccagcactcagactcccagctacagccaaagaagtctaaaagcaggaccccggataaggtgcgggacctgtccaagtcttggtggaggaagtattgctgcctggcctgactctcgcaaatagcaggtgtttaagctgcaacagctctttatggacgaggctgtcataggatgagccccaaagcaccctcttctgcccttaacttcctgtgtgcgggagcttagggctgagattcatatgcaaaatacgtttttttaaaaattgaaagttacattttttttctgttaagtctggaagctttgagctgtagacctccggattaatttatattccatatgaaaagggctcttcaaagcggggtgtcagcatgaagttctgctgtgttgtacaggacaaaggagaatgaatgggaccttctcctgattaagggctactgagggctcagtgcagggcactgtgcaccaggcttggtgagagtgagcaagcgtgagctttgaaaccacacgagccacccccggttttgtaagggcaaagatctgaaaccagcaagggccttctgcttacgaaacctcgagcccatcccttctgtttactcagattctcttaggattttaaaacaaccaaacatcccacagcctactggcatagtgttggcgaacagtgcacttgcttgttacggttttgttttgtttttttaaatcacgtgaccagttatattgctatgaaaatggtggagatgcctcgtagaaggcgagtgctgggtgcacatgtgacattttcttcagggagcgactcatggtgagaccagagagggctcttagcttgcaggactggcttctgcagggcatctgtgtcctgctgttaaaagcaggaggaggtgcttgtctgggagctttaagtgtgctgggctcatatcgtcccgtttgcaaggaattgggccaccttgagaggccatagttgatggctatgggacacacacacactttttccttaagtccaccaaaatgcctgcctgtacacacacacacacacacacacacacacacacacacactggctggtttgctgatggaacccttagaccaccctcccacccccacccctccccaagcatggctgcaagtgtcagggcaccacaccttcctcttcttgacatttctttgaacagacatcattttgtaggatcttaatttatacatttttttcaggtcataaaatgtgggatgaacatactttgaaccccagtgccttcagggtccattgactagggaggcactgtcttaggggacaggtatgtgcaaggccttacccaccagtggcttctcgctgcaggtcatgtttgtggcacttgttctttaaggtgagggtcttatgaccgactgttctgagacagccctgtgtcaggcaagctctttcacagggttgtaggtatttccaagacgccataggaaccagacagtgaatcatagctatcagtttgctgtgggcaaggaacctctttttggccacctggtaacaaaattttatgtctgtaaattttttcttgctatttaaaaaaaaaaatcaatcttacgtttttctgtaggaaaaaaaaaaacaagtaaaagaacaggccatatttcaggtcaaaggcttcttcctgctggtaaatgggactgaagactttcttacatcattattaaaaggctaattgctgaaccactagagtatatgaactgtttgtgaatgatattagccatagtctcctgaggtgtttccttgtggcctgagtggtaacattgttttgcttatggagatgctgtaactgacctagtgactcagcttatcctattgtgcatggctgtctggaaagccagcgtacaagtggggctttgcatgccctgtgtacagagggtgggtgggaaagagtgaattatttaattttaaatgttataataaagccaatgtagttgagaccaaggaaatgagcattgagaacacaaacttgaagtctggtgccagggttgttggacctcacaccctgtctctgagccacccggaagtgacataaaggacgctgtgtgatcaagttctggacacttttctgggatgcgtaccactggactatttatgtcacaaatctagtgggttgacgctgccctgcaagttttcaatgtccctgcatcctatgaagtcataatgatctgactgtactggaggttttcctgcattttttacttttcgaaaatagaggtttaggctgagaattctaaacgcatgtgcctgggtgggacgtcaagtcagggttctcatcaaagctgagaagtggctggaatgttcagcttggtgtctggggaggatcctgtgagctatgtagagaggtggctcttcagcctgactcagtgtgggctgaacgaagtacctgcagaacacacggtagcaggctccaaaatcgtcacctcaagcatgcgtgcaagcaaacttccgagaactccgttttctgctcggcagacgtgtgagcagctacccagaagtctcaagccaaaaggggagcctcgctcgctggctcctctgcaggtgccttatcgacctgtgctcttctcttttcccgtgtcaaagatgttggacaggatcttgtacttgaaacatactgcaaatgagttactatgaaataaattctgacctgtggccg

SEQ ID NO: 2094 - DNA, 2823 bp, Mus musculus
aggactgagtcctgctgcagacatggcgctgctgggccgtgcgttctttgctggggtgtcccgcctcccctgcgatccgggtcctcagaggtttttcagctttggaacaaaaacactgtatcaaagcaaagatgctccacagtctaaattcttccagcccgttttaaagcctatgctaccacctgatgcttttcaaggaaaagtggctttcattactggaggagggactggccttggcaaggcaatgacaactttcttgtctaccctgggtgcccagtgtgtgatagccagcagaaatattgatgttttgaaagcgactgcagaagagatttcttctaaaactggaaacaaggttcatgcgattcggtgtgatgttcgagatcctgatatggtacataacacagtgctggaactgatcaaagttgcagggcatccggatgtggtgataaacaacgcggcagggaacttcatttcccccagtgagagactgactcccaatggctggaagaccataactgacatagttctcaatggcacagcctatgtgacactagaaattggaaagcagctaattaaagcacagaaaggagctgcgtttcttgccatcactaccatctatgctgagagtggatcaggctttgtaatgccaagttcttcagccaaatcaggcgtggaagccatgaataagtcacttgcagctgaatggggtagatatggaatgcgtttcaacataattcagccaggacctatcaaaaccaaaggagcctttagccgtttggacccgactggaagatttgagaaggagatgattgacagaatcccctgtggtcgtctgggaactatggaggaacttgcaaatctggccactttcctatgcagtgattatgcctcttggattaatggagcagtcattagatttgacggtggagaggaagtatttctgtcaggtgaattcaactctctaaagaaggtcaccaaggaggagtgggatataatcgaagggctcatcaggaagacaaaaggctcctaagatgaccacaacttcatctgtgaaacactaaagttagggactagagtgctacagatggaccgtggtcttccacttgtcttgggggttaataaattgtttgcttgatgatttctgtagttctgaggatcaaacccagagtgtctgctctgctcattttcgatctctgagttgcacctcagccctaaaaaatggtcgatgtttgccacgtgcaaacagtgtgccaggtcaggggtggccactctgtattgaagggtaaattggacaggatatcttttctttaaaacacgtgaaaaacaaaaaggggcaaagatttttttttttctttttcaaattattcttgtgttgtttcgcagtagataaaggtgaaagatgcttgttgctaagccagttgaactgagttcaatctcaaggccctgctctgtagggtagaaccaactcttcaaagtgcctgctacacatgcataccccaccccagcacatgtgtacgtgtgtgtgtgtgtgtgtgtgtgtgtacataatgtacacacaacctcgaccatgtatataaatggctcgattgttttacactctctcattgttctcctttataccctttcctctcccatggaaccctttcttctccctatcagtcttcttgtactttcagggttgcttccattggcttgggtgtgaggtcttttccttcaggacgggggctgaggcctatgacgcccttcccacagcagccattctccacctgtagtgcctctggttggtgtgttggaaaagctttgatagtactgaaatatgtgtggaaaggtgggaaatggaaacaggagtaggcttctgtgatctggtgagatagaagaagcttaggagtggaggtaacctgtgagggacacatcacaccgtgcctatggcatggggcctagaaatgagaggcgctatattgagtctcagtatattctgttttcatttagacttgtgaattgtcttctttgtagctctgtattaattcagcctagtgtgttaggagattgtatatcatagcagatgctttattgaatacagaataactgatagtacttggctcttgatactagctaatggaaatttcagagttctaaaataattgtattaaagacattgggataagtattacatgggatttagatgttgggaaaggggtaatttacattgctttcaaagttaacaaatatagtaatatgagatagcagtcaaggatttctgtaagtagagactcatgaaggctataaaatatttttgtatcttactaatatatattttttatttggactataatcttgcacttttgagaaccaaataagaaagccacagtcttaagcctccagagttagaattgagcctgtgcttttagaaagtccatttggctttcagagcaacctcttacagcatgttcactacactgaccgccaccattgtcctctgtgctataacaggaagcagtttttattacctcatgaatagatctatgcaagaatgtagagtttctgtttgttatgtgtaagacctgtatggtaactgtacattgacagttaattgtgtcataaatgatgtttgttgttcagtaaacacaaccacagtgccatcgtttgggtttggaacaaggcctttgagagtcactcttgtccactggactgttctaagatgcttttcccgcacatccttagtgccaacaactaccccacggctttgcttccttcccctcatccccatctgctgctttaaacgtgtcaatacatcttcgacattaaaaacttttcggcagttgt

SEQ ID NO: 2095 - DNA, 1053 bp, Mus musculus
  misc_feature 2, 24: n = A,T,C or G
gngacgtctgggcggccccacgcnacgggagcacctccctcctcttcttcccgcactgtgcgctcctcctgggctgaggcgtctggatcgagtcccggaggctaccgcctcctcaaacagagaacagtcacctggacgcgagcctgtgtccgggtctcgtcgttgccggcgcagtcactgggcacaacgtgggactccgtctgtctcgggtttaacccggagagccagagccaacctctcccggtcagagatgcgaccctcagggaccgcgagaaccacactgctggtgttgctgacccggctctgcgccgcaggtggggcgttggaggaaaagaaaggtaagggcgtgtcccaccggcccgcgccccctgcgagctagctcgcccagtcccaacctccgctcgggactctaagtccccagccgcccgctcctcctcttctggctcccaaaggcggccgggaccataggaggaactggacggagtctggaatgggcgagactggggccgccgaaggaagggagactgggctaggagcagaggggctgccagggcagcgtgggagccgcggctgtgcgctccggggctcttgactgctgccaacttagttgcctcactttcctgcgctcagtaggcgttcggagcagaaacgtggtgcgggacagcgcgggacgccgggcattggcgcacgtgcgcccagtactgtcagggagagcggagggaccccggatcctcaagcgggtcgggtgtgtcccacccgctcagtgtgagagttgagggactggagtgcgaaccaacgcgcccctggtcaaggtcggaacctctgagacgcgcggtttcctgagcgcggtttccctcaactcctctcttctccagcagggtactctcaggacctggtagcctgagtcccaatgtagcttgcagatttctggcttgccctttcgcgggtgtgtagttgcagcaatgacctggaagtgtggagatctctctgtcactaaccacctaggacttctgggaagagatggtgttagtggtcatttgcttcttcactagg

SEQ ID NO: 2096 - DNA, 1965 bp, Mus musculus
accgcacagagctgctcccggctcgttctcgaggtctcggcacattctgtcgcgatggcgcctccatcagtctttgcccaggttccgcaagctcctccggttctggtctttaagctcactgcggacttccgggatgatccagatccccgcaaggttaacctcggcgtgggagcgtaccgcacagatgaatctcagccctgggttttgccagtagtgagaaaggtcgaacagaagattgctaatgacaacagcctcaaccacgagtacctgcccatcttgggcctggcagagttccggagctgtgcttctcgcctagttcttggggacaacagcccggctatcagggagaatcgggttggaggggtgcagtctttgggagggacaggcgctcttcggattggagctgacttcttagggcgatggtacaatggtacagataacaagaacacaccaatttacgtatcatcgccaacctgggagaaccataatgctgtgttttctgccgccggttttaaggacattcggccctattgctactgggatgcggagaagagaggactggacctccagggtttcctgaatgatctggagaatgcccccgagttctccatctttgtcctccatgcctgtgcgcacaacccaacagggaccgacccgactccagagcagtggaagcagatcgctgctgtcatgcagcgccgttttctgttccccttctttgactcagcctatcagggctttgcatctggagacctagagaaagatgcgtgggctattcgctattttgtgtctgaaggcttcgagctcttctgtgcccagtccttctccaagaacttcgggctctacaatgagagagtggggaatctgaccgtggtcggaaaagagtctgacagcgtcctgcgggtcctttcccagatggagaagattgtacgaatcacctggtccaatcccccagcccaaggagctcggattgtggccgccaccctctctgacccggagctctttaaggagtggaaaggtaacgtgaagacaatggctgaccggattctgaccatgagatccgaactcagggcaagactagaagctctcaagacccccgggacttggtctcacatcactgagcagattggaatgttcagtttcaccggcttgaaccccaagcaggtcgagtatttggtcaacgagaagcatatctatctcctgccgagtggtcggatcaacatgtgcggcttgaccaccaagaacctagattacgtcgctacctccatccatgaagccgtcaccaaaatccagtgaagaaacacctcgtagttcacgccaccaaagcagttcttgtcacacctttcctgcctgcgcaaacctagctgtacctagctgtacacgtcctttattagagatgaccgaggggaagcagctgctgtttagctgaccccccacatgagaagacgtttcttgaaatgagccccgggggtccgggctctggggttagagcctgttggaaaccagagtagattaaagttatttaagaataaaaagaactttggctatgagatgtaatcaccttgccttcctctctagcattctgcaggagtgatgcccacggagccttgggcttctgcgtgttgcctgactctgtacaaaagtctagtctcaaagatcagttggtctgaggagccggatgtgactgtgggtgttggctggggcattaaaactcatcatcgccacccatctctgtctctcgtcaccctgatctccccgcacggttgtgtccctggtctggaacattagtttttttaaggcaactgtggccaatatttatatcatgacatacaaatggatttacgtatttgactgaaatgaaagttccactaaacggtatttgctcttgtgatatgtggcacattgtgatattttcttagtctgttctgtttcatttaaaaaataaactgctgatcaagacaagtg

SEQ ID NO: 2097 - DNA, 5816 bp, Mus musculus
cgggagggcgacgcggcggcagcggcgctactgggactagcggctccgggcggctgcggcgcaggccgagcgcaccaagtgacgggccgagcaagggacagacgcgcgggttgacgcggcgaagcgcttattccagagcccgacatgaatggatacgtggacttctccccaagtcccaccagtcccaccaaggagccaggggcacctcagcccacccaggctgtgctccaggaagacgtggacatgagcagtggctccagcggaaacgagaactgctccacgggacgggactctcagggcagtgactgcgacgacaatgggaaggagctgcggatgctcgtggaatcttccaacactcaccccagccctgatgatgccttcagactcatgatgacagaggcagagcacaacccctccacgagcggctgcagtagtgagcagtctgccaaagctgacgcacacaaagaactgataaggaccctgaaggagctgaaggtccacctccctgcagacaagaaggccaaggggaaggccagcacgctggcaaccctgaagtatgccctgcggagcgtgaagcaggtgaaggctaatgaggagtactaccagctgctaatgtccagtgagagccagccctgcagtgtggatgtgccttcctacagcatggagcaggttgagggcattacctccgagtatatcgtgaagaacgcggatatgtttgctgtggctgtgtccctggtttctgggaagatcctgtacatctctaaccaagtggcctccatctttcactgtaagaaggacgccttcagtgatgccaagtttgtggagttcctggctcctcatgacgtcagtgtgttccacagctacaccaccccttacaagcttccgccctggagtgtgtgcagcggcttagattctttcactcaggagtgcatggaggagaaatcttttttctgccgtgtcagtgttgggaaacaccacgagaatgagattcgctaccagcccttccgcatgacaccctacctggtcaaggtgcaagagcagcagggtgctgagagccagctctgctgcctgctgctggcagagagggtacactcgggctatgaagcgcctagaatccctcctgagaagaggatcttcacaacaacccacacaccaaactgcttgttccaggctgtggatgaaagggcggtccccctcctgggctatctacctcaggatctgatcgagacgcctgtgctcgtgcagctccaccccagcgaccggcccttgatgctcgccatccacaagaagatcctacaggccggtggacagcctttcgattattctcccattcgattccgcacccgcaacggggagtacatcacactggacactagctggtccagcttcatcaacccgtggagcaggaagatatctttcatcattgggaggcacaaagtcagggtaggccctttgaatgaggatgtgttcgcagctcccccgtgcccagaggagaagactccgcaccccagcgttcaggagctcacagaacaaatccaccggctactgatgcagcctgtcccccacagcggctccagtggctatgggagcctgggcagtaacggatcccacgaacacctcatgagccagacatcatccagcgacagcaatggccaagaggagtctcaccggaggagatccggaatttttaaaaccagtggcaagattcaaaccaaaagtcacgtttctcatgagtctggaggacagaaggaagcatctgttgcagaaatgcaaagcagccccccagctcaggtgaaagctgtcaccaccatagaaagggacagctcaggggccagcctacccaaggccagcttcccagaggaactagcctataagaaccagcctccttgctcctaccagcagatcagctgcctggacagtgtcatcaggtacctggagagctgcagcgaggcagccaccctgaaaaggaagtgcgagttcccagccaacatcccatcccggaaggccacagtcagccccgggctgcactctggagaggcagcgcggccctccaaggtgaccagccacacagaggtcagtgctcacctgagctccctgacgctgccaggcaaggccgagagtgtggtgtccctcaccagccagtgcagctacagcagcaccatcgtgcatgtgggcgacaaaaagccacagcccgagctagagacggtagaagatatggccagtgggcccgagtccctggatggtgcggccggcggcctcagccaagaaaaggggcctcttcagaagttgggcctcaccaaggaagttctggctgcacatacacagaaagaggagcagggcttcctgcagaggttcagggaggtgagcaggctcagtgccctgcaggctcactgccagaactatctccaggagcggtcccgagcccaggcgagtgatcgaggactaagaaatacttctggactagagtcatcttggaaaaaaactggaaagaacaggaaactgaagtcaaaacgcgtcaagactcgggactcttctgagagcacagggtctggaggaccagtgtcccaccgacctcccctcatgggcctgaatgccacagcctggtcaccctccgacacatcccagtccagctgcccctctgcacccttccccaccgcagtgccagcttaccccctacctgtgttccaggcacccggaatagtatccacaccagggacggtggtggcgccacctgcagccacccacactggcttcaccatgcctgttgtgcctatgggcacccagcctgaattcgcagtgcagcccctgccattcgctgcccctttggctcctgtcatggccttcatgctgcccagctacccgttcccaccagcaaccccaaacctgcctcaggccttcctccccagccagcctcactttccagcccaccccacacttgcctccgaaataactcctgcctcccaggctgagttccctagtcggacctcgacgctcagacagccgtgcgcttgcccagtcacccctccagccggcacagtggccctgggcagagcctccccaccgctcttccagtccagaggcagtagtcccctacaacttaacctgcttcagctagaggaggcgcctgaaggcagcactggagccgcagggaccctggggaccacagggacagcagcttctggtctggactgcacatctggcacatctcgggatcggcagccaaaggcacctccaacatgcaacgagccctcagacactcagaacagtgatgccatctccacgtcaagtgacctgctcaacctccttctgggcgaggacctctgctcggccactggctcagccctgtctagaagcggggcatccgccacctcagactctctgggctccagctcgctgggcttcggcacatcccaaagtggggcaggcagtagtgacacaagtcacaccagcaaatactttggaagcattgactcttcagagaataatcacaaagcaaaaatgatcccagacacggaggaaagcgagcagttcattaagtacgtcttgcaggaccccatctggctgctgatggccaacacagacgacagcatcatgatgacataccagctgccctcccgggatctccaggcggtgttgaaggaggaccaggagaagctgaagctgctgcagaggtcccagccccggttcacagagggccagaggcgagagctccgagaggttcatccgtgggtccacactgggggcctgcctacggccatcgatgtgacaggctgtgtttactgcgagagtgaggagaaaggcaacatttgcctgccatatgaggaagacagtccttccccgggactctgtgatacctcagaagccaaagaggaggaaggtgaacagctgacaggccccaggatagaggcccagacgtaaccctgtcccccagccagaggtcgacattagacggtgctcggaagaagggggaagatcttgtggtttctaatcacatggacccatacctacactgctttttttgttttaggaaaaacaaaaaacaaaaacaccatagttttctggcggtggaacaaaactgaggggaggtttaggaggaaatccatttttgtattaaaatagaaatacggaatttgggggatggggtgagattcgtcattgaacttgagactgaggtggtctgtgttgtcatggaggctgcctcatggtcctcaggagtgtcttgacctccatgaaacctctttccagtgtgccaatgtcctctggcccctgtggattgttctgaaacataacaccaggatgtggcaggtaacagggaagccacaagaggctatccaccaagggcccagctttctggaactttctcacagtgtgattgtatctcccaagcagagagaccatctctcctgacatcctctcagtgtgttcccttacgtggtttggagcatggtgtagcagctttggcttcaggtcctgcctgtggtggtcaacattccagtctgacatggcttctgttcgtcaacaaagttgaaatgcctgctctggactagtggagctcagtggcttctgcaaacgatgcccaccatcagactagcacccccacactgtacatttctctgctgttcttgtatcctttttagaccattgtggccagtgtgcagagagagctgtggcatcatcagccatgttgccgtgtctgcatggtggcctctgcaagccaggctttgttgctgtagaggacaccgtcacgtgtttgttctttggttggactctctcagacattagctcccagcagaaagcagccactgagcacggaggagagaggcacccacactgctgccctgagttctccagtttgcagggagctcagcctcccactctatatgtatatactcctagctactgtggcttcgggtctctgtcacatctatctgtgctgctggtcctcagatcactggaacctgtggagagaaggggacctctctgcccagctctacaaaactttatgctgcatcagacatccaaagattgttccgacatgcttgcgggtgacccctggtggaacgagacatcaccagtgaggaatcattggacttaaaagtagacaaagcctggagcagaggaagctgtttcctgagtctgaagtggctactggggacatgtcctgctgtagttggttttcatggtaaagccatctgaggcctgaatattacccctatttttcataaacacaagaactctattttttttattaaagcaacaccacctttcacagtgatcaggtagtagccatgttttaaaggaaattcaatgttacagacagctgcctctctgaccagtctgatcctaagggtagatagaagatggtctaagcctacgcttgttacttaaacacaaaactgccaaaaccttctctcttctctcttgaatgtttaccatcagcgttattttatgattatttaatatatagtccttgattgttaactgctaagaagttgacttcctaggataattttgtgaatctgtttacaagatgccaagcatccagccctgttttctttagaatgtgtgcttacacgggtgtcctaagacattctctattttaaactgagccttctttttaatgtaaataagctctcagagtttgtgcgatgatgattcgtgagccttgccggacaagaggtttgttcatgcgcaaaccaaacgtaccttcacccagtgcaatatatttgtgtgactgcttgtgtctttttatgacttttttgccttttagaaaattgttaaataaagcaagtatatttttattttcaaaaaaaaaa

SEQ ID NO: 2098 - DNA, 1775 bp, Mus musculus
gaaaggcgtggtgagcgacagaacgatggcggacgcggagaaaaacgctgttgcggagaaaaacaacgctgttgcgacgaaagaggttctggctgaggcagcagccattctagaacctgtaggcttgcaggaagaagcagagctgcctgccaagatcatggaggagtttatgaggaactcgcggaagaaagacaaactgctctgtagccagcttcaagtagtgaacttcttacagacttttctggctcaggaggacactgagcagagccctgatgctctggcttctgaagatgccagtcggcaaaaggcaactgaaactaaggagcagtggaaggacatgaaggccacatacatggatcacgtggatgtcataaaatgtgccctgtctgaggccttaccccaggttaaagaggctcacaggaagtacacagagcttcagaaggcttttgagcaactcgaggctaagaagcgagttcttgaggagaaacttcagctggctcagaagcagtgggtactgcaacagaagcgtttgcagaacctgacaaagatttctgcagaggtcaagaggcgccggaagagggctctggagaagcttgacggatcccatcaggaactggaaaccttgaagcagcaagcggggcaggaacaggagaagctgcagaggaaccagagctacctccagctgctgtgttcgctgcagaataagctggtcatctctgagggcaaggctgaggacaaagatgtgaaagggcgagcccttacagccaaatcctaatctccttatagatgaaaggatgagaagagagccgtattcataccctgcttgggctgagaccagattggtttcttcactgttgtatctctaggcctaagcctggagtttgttgctctgtacatctaatctccagctgatcacatctggcatctcttgctttcagtgactgttgtgttttgtctcatgctaactttgacagtatattctggcttgttctgtcttcacctgtgtctaacttgctgtccttgcaacctgtctctgtaaaagtgtaccagtgatactcacacgcatgcatgcacgcacacaggcacgcatgccacaaccacccttttctctcgctgatcttcagtagtctctcctcttgtcctctctttttctttgtcttctctccctaccagatgtgaaagcaactttatgcgcctgctgtaattgttgtctgaggattactgcgagtaagctcaccctttgtagttactaaactggccggctggctgggtcagtccgctgtactggttcataacccggcttcaagttgactgattcaaaggggcctctcttggcttctgactgaactgctctgcttggaaagtctgatggacttcaggaacagaactgtactgactgccctgactcagctgaactcaactacaccaaattcattggttctctctgctgtactgctcttaggtagcctctctcctgtgctgtcctcctgagtcgtgctgtcaaatctctctctgattcatcactttgcccctcaattagactggcagtttcaaacacggcacttaacatttcagttgtagtcacttgatactgcattccgaacttgagtctattgaatccagaatgtgaatccatgcctttgtgactgtgacctcactctcttcagtattgtgtaaaagttttaggaactctccaagtaaatacttggtaattgctcattgatagaacagaaaaatgctgtgtagataataaataaacatataactataagatt

SEQ ID NO: 2099 - DNA, 558 bp, Mus musculus
ggtcagcgactagacaacttacgggaacacattcggctctgggggattttaactcgtgcctgaaagcaaagcacgggccattcaaggaccgagatgagtgacagcccttccctgagtcctccagcaccaagccagggccctactaccccacgcaaagggccccccaagttcaagcagaggcagactcgacagttcaagagcaagcctcccaagaaaggggtgaaagggtttggagatgacatcccaggcatggaggggctaggaacagatatcacggtcatctgtccctgggaagcgttcagccatctggagctgcatgagcttgctcagttcgggatcatatgaggagcccagaggctcggctgctctcgagagcgactgctgctcttgagagtgtcattgctttacctaattggtctttctgagtcttgaaacacagtatttggaagaaccgtatatggccctgacccatgagttatggtacgtgttctttcctgaatggtagttcagtttcattgttgaataaaacggcagtttttggggggtttccccaacttt

SEQ ID NO: 2100 - DNA, 453 bp, Mus musculus
atgcaagtgctaacgaaacgctatcccaagaactgcctgctgacagtcatggatcggtactccgcggtggtgcggaacatggagcaggtggtgatgatccccagccttctgagggatgtgcagctgagtgggcctgggggctcggtccaggacggagcccctgatctctatacctacttcaccatgctcaagagcatctgtgtagaagtggaccacgggctgctgccaagggaggaatggcaggccaaggtggctggcaacgaaaccagcgaggctgagaacgacgctgctgaaacggaggaggccgaagaagacaggatctcggaggagctggacctagaagcccagttccacctgcacttctgcagcctccatcacatccttacccacctgacccggaaagcacaggaggtgacgcggaaataccaggaaatgacagggcaggtcctgtag

SEQ ID NO: 2101 - DNA, 1546 bp, Mus musculus
gcgccgcttgcccgggccgctgtagtcagttacctgctccgcggggcgaacacgtgcgggggcagacagacactccagcttcgcaggaggccggcgcccctgcaccgcaggtgcagctcacagctggacccacagaccaaatgacacataagcaactacttgaaaacagctgggagcactctagcaagaagctcaaaggacagagaagtgtgtgcagaggtcagaaacctgcctggaatcccctggagcagcagtcacagaaggttgtgagctgctcgatttcagaggctgcagttcaagacaccaacttttttctttcttcacctttcctgacactattgccaatagtccctgagggcgcagctgttgccacagtcacatctgtcagaagaaaccatggccaaggcagcagtgaccaagcgccatcattttatgattcagaagctgttaattctactgagctatggatacaccaacgggctggatgatgcacactctcttaggtgcaacttgaccatcaaggatcctaccccagcagatcctctctggtatgaagcgaagtgcttagtggatgaaatacttatcctccatttaagtaacataaacaagaccatgacttcaggtgacccaggggagacagcaaatgccactgaagtgggggaatgtttgacacaacctctgaaagatttgtgccagaagttgaggaacaaggtgtctaacaccaaagtggacactcacaagaccaatggttacccacatttacaagtcaccatgatttatctgcaaagccagggccaaattcctagtgccacctgggaattcaacatcagtgacagttacttcttcaccttctacacagagaatatgagctggagatcagctaatgatgaatcaggggttatcatgaataaatggaaagatgatggggaatttgtgaaacgattgaaattcttgatacccgaatgcagacaggaagttgatgaattcttaaagcagcccaaggaaaagccaagatcaacctcaaggtcccccagtatcacccagcttacatcaacttccccgcttccacctcccagccactctacttctaagaaaggatttatctctgtgggactcatcttcatatctttattatttgcatttgcatttgcaatgtgaagaggaaatattatacccaaggagaggccagaggagggcatcggatcctgtggaactggagttacagttggtttccaatactgggaactgaatccaggacctctccaagaacagcaagtgctctttgctactgagccttatctccctcctctaatacatttcttaataagagaatatagtttgaatattattaaacccagggcaagtcccacagtaagcttcacaataaagttgattgtttcagaatcaaaaaggaaaacacattttaaaatgactgtcatggccagttatcacatcgtttgtagcaatgtatgatggaggacgtccaggtccgtctaaaaaaatgccaggcaatacagcaacatctaagaaaactggtaaatttaaa

SEQ ID NO: 2102 - DNA, 1534 bp, Mus musculus
gatccccacccggctcctgtacctagttggctgccagatcagcatgaaaagatttagagataagagtggacaaagtccatgcagcggggctgttcagcctgacaggaaagtgtttctgccagaaacgccttccaagagtaactcgaggtgcactagcagtgtccccagcgggccttaagaatgccggaagcagtagctaagatgcgagtgtgctggttggtgagacaggacagcaggcaccagcgaatcaaacttccccatttggaagctgttgtgattggtcgaagcccagagaccaagatcacagataagaaatgttcccgacagcaagtacagttgaaagcagagtgtaacaagggatatgtcaaagtacagcagatgggggtcaaccccaccagcattgactcgggcgtcatcgggaaggaccaagagaagaagctgctgcctggtcaggttctccacatggtgaatggactttatccatacatcgtagagtttgaggaagtggcagagagccctaacctaacacagaggaagagaaagaggtcagactgtgatagtgaggagatggaagctgagtctgggacagggctggcacctgggagcagccccagccagtgctctgtgtcccctaagaaggacaagaatggagccaccaaaaaggaatcactgggccactggagtcaaggcttgaagatgtctatgaaagaccccaaaatgcaggtttacaaagacgaccaggtggtggtgattaaggataaataccccaaggcccgtcaccactggctggtcttaccgtgggcctccatttccagtctgaaggttgtgaccagtgaacaccttgaacttctcaaacatatgcacgctgtgggggagaaggtgatagcagattttgctggatccagcaaactgcgcttccgattgggctaccatgccattcccagcatgagccacgtacatcttcatgtgatcagccaggattttgattctccttgccttaaaaacaaaaagcattggaattcttttaatacagaatactttctggaatcacaagctgtgatcaagatggttcaggaagccggcagagtgactgttaaagatggcacttgtgagctcttgaagctgcctctccgttgccatgagtgtcagcagctgctgccttccatcccgcagctgaaagagcacctcaggaagcactggggcgggtgacactcgtctcggcgaccaagggcagtgctagcatctgtccgcattgcctatgctccgttcaatcctgaactaaagcgtacacttcttcgaaacaaagcttatttattcttgagcagccacacattgggtgcactctggtgcaggaactgggaattcgggttttgtgggtgtattctctggtaatggaggctgagacatgcctggtcacccttcccaggaccatgacaggcctgactaatgagagggcaaagccggcttgagactcaaatgcacgatgtagaagcagaggattggtaatatattttgttcctaccctcgttcctgc

SEQ ID NO: 2103 - DNA, 2125 bp, Mus musculus
gcgatctactctcagtcttcctgagtcctaggctattgaggacaagtagcttggtctgctctttgtcaagggtagctgtgacactggtttgctgttgctgctgctgctgctgctgctgctgctgctgctgctgcttctgtatcctctttgggaaatcagactcataaaactgccacccattcgaggttctcaaagcagagccatctacctggagcatgaagcttccaaaagcccagctctggctaatactgctgtgggcattggtgtgggtgcagagtagaagatctgcgtgcccgtcctgtgggggcccaacactggcaccccaaggagaacgcgctctggtcctggagctagccaagcagcaaatcctggagggactgcacctaaccagccgtcccagaataactcggcctctgccccaggcagcactgaccagagccctccggagactgcagcccaagagcatggtccctggcaaccgagagaaagtcatcagctttgctaccatcatagacaaatccacttcaacctaccgctccatgctcaccttccagctgtcccctctttggtcccaccacctgtaccatgcccgcctctggttgcatgtgcctccctcttttccgggcactctgtacctgaggatcttccgttgcggcaccactaggtgccgaggattccgcaccttcctagctgagcaccaaaccacttcctctggctggcacgccctgactctgccctctagcggcttgcggagtgaggactctggcgtcgtgaaactccaactggaatttagacccctggaccttaacagcaccgctgcgggactgccacggctgctcttggacacagcgggacagcaacgtcccttcttggaacttaagatccgagctaatgaacctggagcaggtcgggccaggaggaggactcccacctgtgagcctgagacccccttatgttgtaggcgagaccactatgtagacttccaggagctggggtggcgggattggatcctgcagccggagggataccagctgaattactgcagtgggcagtgcccgccccacctggctggcagtcctggcattgctgcctccttccattctgccgtctttagcctcctcaaagccaacaacccttggcctgcgggttcttcctgctgtgtccccactgcacgaaggcctctctctctcctctaccttgaccataatggcaatgtggtcaagaccgatgtgccagacatggtagtagaggcctgtggctgcagctagcaacagggcctgaaggttctgggtgaagttcaaggttcaagttgggggttcccacgtgtctggaagctcgagttccggatccatactgacacccaacaagctgtgtagcagtatgcctgggtttgacccctatggaacttaaatgggcgttttcttgtcccagattctggcctatttcaggctgtttcaaatgtggacagatgggtaaagccgttgcctttcaagggactgcctggccagcaccattttctacatcaagccctgttccaggacagcagggatgccgtgggagggaaggaagaacacagggagaaactatttagtctctcccgagaaagaagttcctcaagtaatgaaggcggaagtagaagggtgggcagattaggaaaagacaaacatacaggctaagaacagggtgcattgcctgctttgacaaggtcaagaggaagaggagcaggcggccgaggaaggaggggtgtcgggggtccctggaatcgagaatcagtaaaaaggggtgctgaactcgtaagttcttaggcttccccctcgaggacaggacccacgcgggtgacatacattttatattttcttaataaaaaggagaaagaaaagcaccagagaattgtgtaaggggccgccaaaatgggccagaagcgaagtgtggtttgggaacctctgtgcccagcgggtttctgagactttctcaggggttttcaagactattttcataatcacactgagatgttatttatcatttgctaccattgtctttacattgtacagtgggaacagggtgtggtggcttacacttataactacagcaccgtgagttcaagaccggccttcatagtgaattc

SEQ ID NO: 2104 - DNA, 1574 bp, Mus musculus
aaacacatctgctcggtctgtgatgctggaccgagctgagaatctgcttcatgaccactatggaggccgggagtactgggatacccggcgcagcatggtgtttgcaaagcacttgcgctgtgggagacgagtttaggagccagcacctcaactcgacggatgccgctgataagatggccccggaggaagactggacgaagatgaaggtcaaactgggctcagcactaggcggcccctacctcggagtccacctgagaaggaaggacttcatctggggccacagggaggatgtgcccagcctggagggcgccgtgaagaagatccgcagcctcatgaagactcatcagctggacaaggtgttcgtggccacagacgccatcaggaaggagcaggaagaattgaggaagctgctgccggaaatggtgaggtttgagcccacgtgggaggagctggagctgtacaaggacggaggcgtcgccatcatcgatcagtggatctgcgctcatgccaggttttttattggcacctctgtttccacattttcctttcggattcatgaagagagagagatcctggggttggaccccaagacaacatacaaccggttttgtggagaccaggagaaagcatgtgagcagcccacacactggaagattgcgtactgagggccacctatccaccgcctgccaatcactcggtcacagggtcccagaggaggcccccacatgggaggcaacacatctagagcccatgctcccacgtgtccgtgggccgacatctacctgtgtctaggctctgccaccttcaggattcacaactgtgtcttctctcaggacctgagaacccacgtccccatcacagatgtcacatgtgtgctagtccagaaatagaagaacatttgtcagctccgacacaggcctctcagccaccttcctgaacaagttgagcatggccagcctgtggcaatgccctcaggtgtggatgcgggctcctgaggtgttggggtgactgacgactgaggtcacttcacacatggccagcgtgagccgacaccaagccttgcctcagcctccacctgtggggctcccactaatttcctcctggatggaacgactcgggcactgttgtcatcagagtgacagccctggagccttgccagtgacttcctcgcctcacatggacccccaggttcactgcacacgctgagaaatagaattgagaagtaaaggaaatggccttcaaaaggccacacctgagacccgcccctgctttatgacacccttccctgggcctcatgctgtaccacaggaggcagagtcagcacagccgtggccagggcacccccaggtccctgacctggtacttagcagtgcacccctccccccagtgctgtgcactgagcagcccccactcagctactgccaggtctccgtcccaagcaccaaggtagactctgagcacagacagggccccgtggcccagtcagctgaccagctagaatcacatatttattttccatttgtacatccaagcgtattaataaaatactttttcaagaaaaaaaaaaaaaaaaa

SEQ ID NO: 2105 - DNA, 324 bp, Mus musculus
cacctgcagtatcggagccccgagattttcccctactttctagcatccgtagacaattacaggcttctgcatactctagtaggtggaggggtagagacagttaccaatctgagagcccagtgggacaaattcgagctgatgttggaaaatcaccaacttatgattaaagatcagattgaagtgatgaagggaaatgtgaagtccccccttcagatctattaccaagagctggacaagttcaaggctcgctgggaccagctgaaacctggggatgatattattgaaactggtcaacaaaataccatggatcaaagtgcaaagtct

SEQ ID NO: 2106 - DNA, 1254 bp, Mus musculus
ggtttgaatttgggctctggaagctggcgtctggatttagcgtttcggtcgtggaccggtgcgcgcttggtccccagccgtagcgcaggctcttcgctccagactcccgcaaggtcgctggctccgaagccgcccgaagaggcatcgcttagcagacgcttaaaggatggactcagagctagaagacttatgctcttatgttaatgagaagattggaaatattaagaaaattctgtcgataagaaatcttggccaggaccctgccttgaagaccaccttaagtaaaataggagatgagatcattgcagtaaatgagcttctaaataaatttgaattggaaattcagtatcaagaacaaactaacagttcactcaagagttcacaagccagagccggatcctaaagagtcagacaaagctgaggagcctggactgccgaagaagccccccagagagcagaggattatcaaggaaatgcaatttataactatggatgaattcagtgacgttcctgcgtacatgaaatcccgtttaacatattgtcaaattaatgatattattaaggaaattaacaaggcagtagttagcaaatataagattatgcatcaaccaaaagcatctatgagctctgtgaagagaaatctctaccagagatttattaatgaagaacgaaggcacgaaaggtcatcacttcatcgtggaagctgacataaaggattcacggctttgaaagttgacaagaggttttatgtgattatgcacattttgcggcattgccacagactgtcagaggtccgagggggaggacttacccgatacgtcatcacctgaggcttttgaagactcgggactgattggcagcagggtatcgaggggggtcttgaaatttcatgtatgtttttagcttctccatttcctggccttgtttgttacagaagtaaaactttggataaagcatatatattttcaaaacgtactgcctttaggaacgtgggtgaagctggagctcacaagcacagtaagccagttaggaagactgactcgtgtggaacctgtgtgtgtataggagtcgggggatcatgaggccaggaggaggatctggagaagtgcggagaaaagaggaacagagaaggcagtggaccgctgtgatagagtaggaggaaagaccgtctgggaacagccaggggaagggtggcaagcacttgggcaggaggtggatcaggataaagtgcgatgccacaagatataaaaatgc

SEQ ID NO: 2107 - DNA, 247 bp, Mus musculus
tttttattttttcgatttggttggtgtattgttggcctggattccgactgtatttttatatttgtttcgttaaaatattggcagtatttttataataaatgtatgattttattggttaggaatttaaatttttaaaaaatgaaggaaaagctttttttttcccccaatggctgtaattttttttagctttttgagatgcttatttttgcctggtggagggtgtattaattaaaatttatgtagtgcc

SEQ ID NO: 2108 - DNA, 1631 bp, Mus musculus
ttttaaaggtcacaaagctgccatcacctccgctgacttcagccccaactgcaaacaaattgctactgcttcgtgggacacctttctcatgctatggagtttgaagccacacgctagagcttacagatacgtgggccacaaggatgttgtaaccagcctgcagttctcgccacaaggaaacctattagcctctgcctcgagggacagaactgttagactgtgggttcttgataggaaagggaagtcttcagaatttaaagcacacacagccccagttcggagtgtggacttttccgctgatggccagcttttggttacagcatctgaagataaatccattaaagtgtggagtatgttccgtcagcgcttcctctactccctgtatcgacacacacactgggtacgctgcgccaaattttcacctgacggaaggttgatcgtgtcatgtagtgaggataaaactattaaaatttgggacactaccaataagcagtgcgttaataacttctcagactctgtaggatttgcaaattttgtggattttaaccccaacggcacatgcatcgcttcagcaggttctgaccatgctgtgaaaatctgggatataagaatgaacaaattactccagcactaccaagttcacagctgcggtgtgaactgtctgtccttccatcctttgggtaacagccttgtcaccgcctcttctgatggaacagttaagatgctggatctcatagagggaagactcatatacacacttcaaggacatacggggcccgtctttaccgtttcattttcgaaggacggagagctgcttacatcaggcggggcagatgcgcaggtcttgatttggaggaccaacttcattcacctgcactgtaaagatcctaaaagaaacctcaaaagactgcactttgaggcctccccacaccttcttgacatctacccacggtcaccgcattcccatgaagacagaaaggagactattgaaattaatcccaagcgtgaggtgatggatttgcagagctcgtctccccccgtggtggatgtcctttctttcgattcaaccacaatgacggattccacctatcgagctgtgccaggcaagggtgaagacatctgtaggtatttcttgaaccctttgttaatgccagaatgttcatccacaactgtgaaaaagagaccagaagatgtaagtgatgtgccctccgaaagcctgaggagcgtcccgctggcggtggctgacgcactggagcacattatggaacaactcaacatcctaacccagactgtttcaattctggagcagcgactgtctttgacagaagataagctgagagactgccttgagaatcagcaaaagcttttcagcgctgtccaacagaagagctgagcagggagggccgtgagcgaggtcaggtcagtcgccagaagacgggctcacacactctcgaggtagccgaggccttccacacccctgccacgcactaaccgattcttcagagggtgagcaacgaaaccgaaaaggttccaggcattctcagggactgacttaaacacacaaatcaatgtcaaggatcaagttatgctcctcccaggtctaattgcagtaataaagttatgaacatttt

SEQ ID NO: 2109 - DNA, 2767 bp, Mus musculus
gcgcccgccagtggggacccgccagcgggacggtctccgcagcccgagccttaagcgggatgtcggtggtgggcattgacctcggcttcctcaactgctacatcgctgtagcgaggagcggcggcatcgagaccatcgccaacgagtacagcgacaggtgcacgccggcctgtatatctttgggatccagaactcgagccattggaaatgcagctaagagccagatagtcacaaatgtaagaaatacaattcatggcttcaaaaagcttcatgggcgatcatttgatgaccccattgtgcaaacggagaggatcaggcttccgtacgagctgcagaagatgcctaatggaagtacaggtgttaaggtgcggtacctggaagaagagcggccctttgcaattgagcaagtcactgggatgttgctggctaagcttaaagagacctcagaaaatgctctgaagaagccagtggctgactgtgtgatctcgatcccgagctttttcaccgacgcagagagaagatccgtgatggccgcagcccaggttgcaggcctaaactgtctgaggctgatgaatgaaacccactcagttgcactggcatatggaatttataagcaggatcttccctcattagatgagaaaccaaggaatgttgtgtttatcgacatgggacattctgcctaccaggtctctgtttgtgcttttaacaaaggaaaactggaagtgttggctactacctttgacccatatttgggtggcaggaactttgatgaggctttagtagactacttctgcgatgaattcaagaccaaatataagataaatgtcaaagagaactcgcgggccttgttgcgactgtatcaggagtgtgaaaaactaaagaagctgatgagtccaaacgcgtcagaccttcccctgaacatcgagtgtttcatgaatgaccttgatgtttctagtaagatgaacagggctcaatttgagcgattgtgtgcttccctcttagccagggttgaaccacctttaaaatcagtaatggatcaagctaacttacaacgtgaagacataaacagcatagagattgtgggaggggccacacggattcctgcagtcaaggagcaggtgactaggttctttctgaaagacatcagtaccaccctgaatgctgatgaagctgtcgcccgaggatgtgcgttgcagtgtgcgattctctcaccagcatttaaagtacgtgaattttccataactgaccttgttccttactcagtcacattaaggtggaagacttcttttgaagaagggactggggaatgtgaagtcttctctaagaaccacccggccccattctcaaaggtcataactttccacaagaaggaaccatttgaactagaagcattttatactaatttgcatgaagtgccttatcctgatccaagaattggaaacttcactattcagaatgttttcccacagtctgatggtgacagttctaaagtaaaagttaaagttcgtattaatatccatggaatcttcagtgtggccagtgcgtcagtaattgagaagcagaatctggaaggtgatcataacgatgccgctatggagacggaagctcctaagagtgaaggcaaagaggatgtggacaaaatgcaggttgaccaagaagaaggaggtcatcagaaatgtcatgctgagcacaccccagaagaggagattgaccacaccggggccaaagcaaaggcacctccttcagataagcaagatcgcataaatcaaactattaaaaaagggaaaatcaagagtattgatctacctatccagagtagcctctacagacagctgactcaagaccttctcaatagttacattgaaaatgaggggaagatgataatgcaggataaattagagaaagaaagaaatgatgctaaaaatgctgttgaagaatacgtctatgatttcagagacaaattgggcactgtctacgaaaagttcatcactccagaagacatgaataagctgtctgcaatgttagaagacacagaaaattggctgtatgaagaaggagaagaccagcctaaacaagtttatgtggataggctgcaggaattaaagaaatatggccagcccattcaaatgaagtacgtggagcatgaagagagaccaaaagctttaaatgacttggggaaaaagattcagcttgtcctgaaagtgatagaagcacacagaaacaaggatgaaagatatgatcatctggatcctgctgaaatggaaagagttgaaaagtacatcagtgactccatgaactggctaaacagtaagatgaatgcacagaataaattaagtctcactcaagatcccgtggtaaaagtgtcagaaatagttacaaagtcaaaggaactggataatttctgtaaccccatcgtttataagcccaaaccaaaagtagaagctcctgaagacaaagcaaaaactggtagtgagcacaatggaccaatggacggacagagtggttcagagaccagcccagatccacccaaaggaagctcacagcacaccgactccggagagatggaagtggactaagtgtcatgttatccaagcagtgggttaactaaagggcccattcatcctttatgcccggtacacacaacatatgttcagttgttcttaactacttttgtcatttgttttttggagtagttttgaaaagtgtctatattgagtacactattgctgtccattgctgctgtgaagccctaactgaatatagatgt

SEQ ID NO: 2110 - DNA, 2063 bp, Mus musculus
gcacatggggcgacaggcctggatctctagcctctgtcccttacccaggccatgtcccttcctgctgctcctgctgctgctggtggtgcctcggggggcccagccccaggctggcaggaaccacacagagcccccaggacctaacgttacagccacccccgtgacccccacgatccctgtgatctctgggaatgtcagcacctcaacagaaagtgctccagcagcagagactgagggaccccaaagtgagaggtaccctcctccctccagcagcagcccccctgggggccaagtgctcaccgagtctgggcagccgtgcaggttccctttccgctacggtggccgcatgctgcactcctgtacctctgagggaagtgcctacaggaagtggtgcgctacaacacacaactatgaccgagaccgggcctggggctactgtgcagaggtgaccctgcctgtggaaggtccagctatccttgacccttgtgcctcttggccctgcctcaatgggggcacatgttccagtacacatgaccatgggtcctaccactgctcttgcccgctggccttcacaggcaaggactgtggcacagagaaatgctttgatgaaacacgctatgagtattttgaggtgggcgaccactgggcccgtgtgagcgagggacatgtggagcaatgtggctgtatggagggccaggcccggtgtgaagacacccaccacacagcttgtctgagcagcccatgtctgaacggaggcacctgccacctgattgtgggcacagggaccagcgtctgcacctgcccgttgggctatgctgggcggttctgtaacattgttcccacagagcactgcttcctgggaaatggtacagagtaccgaggcgtggccagcaccgctgcctcgggcctgagctgcctggcctggaattctgacctgctctaccaggagctgcacgtggactcagtggctgctgctgtcctgcttggcctgggccctcacgcttactgccggaacccagacaaggatgagaggccttggtgctatgtggtgaaggacaacgcactgtcgtgggagtattgccgcctgacagcctgtgaatccctggccagagtccactcccaaaccccggagatcctagcagccctgcccgagtcagccccggctgtgcgtcctacctgtggcaagaggcacaagaagaggacgttcttgagaccacgcatcatcgggggctcatcatctttgcctggctcacacccctggctggctgccatctacattgggaatagcttctgtgccgggagccttgtccatacctgctgggtagtgtctgcagcccactgcttcgccaacagcccccccagggacagcatcacagtggtactgggtcagcacttcttcaaccgcaccacggatgtgacacagacatttggcattgagaagtatgtgccctacaccctgtactcggtgttcaaccccaacaaccatgaccttgtcttgatccggctaaagaagaagggagagcgctgtgctgtccgctcccagtttgttcaacccatctgcctgcctgaggcaggcagctccttccctactggacacaagtgtcagattgcaggctggggccacatggatgaaaatgtgagcagctactccaactccctgctggaggcactggtccctcttgttgctgaccacaagtgtagcagcccagaggtatatggtgctgacatcagccctaacatgctctgtgccggctacttcgactgcaagtccgatgcctgccagggggactcaggtgggcccttggtctgtgagaagaatggtgtggcttacctgtatggcatcatcagctggggtgatggctgtgggcgcctcaacaagccaggagtctacacccgtgtggccaattatgtggactggatcaacgaccgtattcgaccgcccaagcgacccgtggctacgtcctgaaccccggtccccaaggaagggatgctcatagtaccccttctactaccaacaataaaactgtctccaaggaaaaaaaaaaaaaaaaaaaaaaaaaaaa

SEQ ID NO: 2111 - DNA, 1185 bp, Mus musculus
gacaaggagcgtgacggccagaacagctcacagtccagtcctaggagcttctcccaggaagtgcaaagaggagattatttcaaaaggcattcagatcatgacagtgggaagccttccagtagagggaaaagatcttcaaaactctacttcgccattgcagaagaggaagcgaatgcacctgggtacaggaagtcacagccaacaaatgcctcaaggagaagctggggcccggcccaggagtatcaagaacagaagcaacggtcctcgggcaaagatggtcaccaagggagcaaatgcagtgactctggagaagaggcagaaaaagagtttatttttgtgtaatggtgcccaccccaagcctctccatgcagggcgctctcctcagctctcagagaggagccagggccagtacctcttctctcttctcttggtgctttcttctttctctcctttcttctttctcatttatatatattttcaaatttttggtcttcccccattcttggcatttgatttctaaacactgtttcttatgccttcaacaaaaagccagcaattattccatgggccctacttgaatttctctgaggcagctacacattgccctgcatggtgagttgtttttggaaattaatgaagtaactggactcacacccaagtaacaatccgggaggtcctggggtgctacagggtgtgtttgtgtcagatccacacataactcgatagagcaatttattcttgatgtatgcaattgcacattgtaattatattaacagagcacactaataaataatttgtataaattataaatattagatcttgggcacagttcttacattcttttgtgggacatttccttccccatgtagaattgtacatttaaaccttggttggtaatatttgcagaccatcggcaagcacagctaaaaacagtgtgagaagctcagattcatgtatatacttgattggaatgaggtcttataaatattcatgtttctgaaggcctttaatttctgtctgcttattagtttttaatgtgtggtttttaaaagaaaattttggcacctgtaaaaaaaatctaaatactactctttataaaacatctcacaaatattcacttacattacaagctgaaagtattttattcatatgtatatttataccaataaaataattttacaagtg

SEQ ID NO: 2112 - DNA, 2892 bp, Mus musculus
gagtccctcctggtcactccgccgacgcgatggccgtccccggctcactggccgagtgtggctacatccggactgtgctgggccagcagatcctgggtcacctggacagctccagcctggccttgccctccgaggccagactgaggctggccggcagcagcggccgcggcgacccggcggcccggagccagcggatccaggagcaggtgcagcagaccctggcccgccggggccggagctctgcggtcagcgggaaccttcaccgaaccagcagtgtccctgagtatgtctacaagctacacgtggttgagaatgactttgttggacggcagtcacctgtcactagggactatgacatgcttaaggctggaatgactgccacttatggaagtcgctgggggagagcagcagcacagtacagttcccagaagtcagtggaggagagatcctggaggcagcctctgaggagacttgagatttccccagatagcagcccggagagagcccactatgggcacagcgaataccagtatgcctggcggagccacgtggtgcctggtgggcgcctcaccctgccacgctatgctcgctcagagatcctgggcctacgccaggctggcacagcccgcaggccacctgggtgcgggtcattcagcgatgctgtcttcgacaatggcccactcaagcccacaatgcccacccaccctcctggcaccagccacagtgcgggcagcttgttggaagagaccactgtgcgcgtgagccaggctcggcttcaaagcacgcagagcagaaccgcccgctcctcctggcccaggagctcagtccgcagtagcctgcgggagccaggaagaatgctgaccaccgcaggccaggctgccgtgggcagcggggatgcacatggggacaggagtgtcttcgctgacgcccagctggggaatgcagacatcgaaatgaccttggagagagctgtgaatatgctggatgcagaccatgtaccagtatccaagatctctgccgcagctaccttcatacagcatgagagcttccaaaaatctgaagcacggaaaagggtcaatcaacttcgaggcatccctaagcttctacaactgctcaaacttcagaacgaagatgttcaacgggctgcttgtggggccttgagaaacttggtatttgaagacaatgataacaagttggaggtagctgaactgaatggagtgcctcggctactgcaggtgctgaagcaaaccagagacttggagacaaaaaagcaaataacaggtttgctctggaacctgtcctctagtgataaactcaagcatctcatgataacagaagccttgctcaccttgacagagagtgtcatcatccccttctccgggtggcctgaaggcgactaccccaaagccaatggcttgcttgattttgatatattctacaatgtcactggatgcctaaggaacatgagctctgctggccccgatgggaggaagatgatgagaaggtgtgatggtctcattgactcattggtccactatgtcagaggaactattgcagactaccagccagatgataaggccacagagaactgtgtgtgcattcttcataacctctcctaccagctggaggcagagctcccagagaaatattcccagagtatctacatgcaaaaccggaatatccagactaacagtaacaaaagtattgggtgttttggcagccgaagtaggaaactaaaagagcaataccaagacttgcagatgccagaggaaaggagcaatccacatggcattgagtggctgtggcattccattgtgataaggatgtatttgtccttaattgccaagagtacccgaaactatacccaagaggcatcacttggggctctccagaacctcacagcaggaggcggcccgatacccacattggtggctcgaatggttgtccaaaaggaaaatggtcttcagcatacacggaagatgctgcacgtgggtgatcccagtgtgaaaaagactgcggtctccctgctgaggaatttgtcacggaatctttccctgcagaatgaaattgctaaagaaactctaccagatttggtttctataattcctgacacagtcccaagtactgaccttctcattgaaaccacagcctctgcttgctatacgttgaacaatttaatgcaaaatagttaccagaatgcacgagaccttctgaacaccggaggtctgcagaaaattatgaccatcagcataggggaaggctatgcccccaacaaggccagcaaagcagcctctgtcctcctttactctctgtgggcacatacagagctgcatcacgcctataagaaggctcagtttaagaaaacagactttgtcaacagccggactgccaaagcctaccactctcttaaagactgatgaagtggggaaaaaaaaacctcaggaattccagtttcacagttctccacttaaaaataaaataagataaacaattaaaaaaacctcctcaaagaaaacacctatttttctactaactgacccaagaaacctcaaaaagcatgctttgtttatattcttttctattttcatccccaaatctagaaaatgaataatcagaatataattttgttaagtgtcctgaagacttccaccaggttgcaccagtatggaatcagttttaccctgtgcagataatgggcatcattattcaggcttatagtatgtgcaaactcgtgtgagtgtgcaccggaggaacacctgagaaagagtgtgtgaatgatgtttctatcctagttgctcatctgcatgtcacttccttaatgagccagaggtgtgtgttcactagtgttggacaggacagagatgaaggaataaagcattgatggcaaatcgc

SEQ ID NO: 2113 - DNA, 2101 bp, Mus musculus
caaggcaggtttctgaggagttctgctctgctgaaaacccagagaacagctaccacctttacagcaaccatgggagagaatgctgatggtgaccaggtcatggagaatctgcttcagctgagatgtcacttcacatggaagctgctatttgaaaataatgacatacctgatttggaagtgagaatctcagagcaggtccagttccttgacatcaagaacccattggggatgcacaacctcctggcctacgtgaggcacctgaaaggccagcaggacgaagccctgcagagcttgaaagaagctgaagccttgatccagagcgagcagctgagcaagagaagcctggcgacctggggcaactgtgcctggctgcattaccacaggggcagcttggcagaagcccaggtctacctggacaaggtggagaaggtgtgcaaggaattttcaagtcccttccgctacaggctggagtgtgctgagatggactgtgaggaaggctgggccttgctgaagtgtggaggaggaaattataaacaagccatggcctgctttgcgaaggctctgaaagtggagccagaaaaccctgagtacaacactggctatgcagtcgtagcctatcgccaagatttagatgacaactttatttctctagaacctttgaggaaggctgtccggttaaatccagaagatccataccttaaagttctccttgccctaaagcttcaggatttaggagaacatgttgaagcagaagcacacattgaagaagccctcagcagcacatcttgccaaagctatgtcattcgctatgcagccaaatatttccgtaggaaacatcgcgtagacaaagctcttcatcttctaaacagggccttgcaggcatcaccttcctctggctacttacattatcaaaaagggctctgctacaagcaacaaatctcccaactgaggacatcccgaaacaggcagcccagaaggcaggacaatgtgcaagaattggcacaacaggccattcatgaatttcaagagactttgaaactgaggcccacatttgagatggcctatgtttgcatggctgaagtgcaggcagaaattcaccagtatgaagaagcagagagaaatttccagaaggcactgaacaacaagaccctcgtggctcacatagagcaggatattcacctccgctatggccgtttcctacagtttcataagcagtcagaagacaaggcaatcaccctctacttaaaaggtctaaaagtggaagagaagtcctttgcttggaggaaactactgactgctttggagaaagtggctgaaagacgtgtttgtcagaatgttcatcttgtagagagtaccagccttcttgggctagtctacaaactgaaagggcaagagaaaaatgctctgttttactatgagaaggcactgaggctcactggggaaatgaaccctgcattctgaatgcagctcacctctgtgacgttaatatactcacaaccaagtgttccaatgctccttccagatttcttttcccaggtctgttttgttgttgttgttgttgttgttgttgttcgttttctttctgaaatgccaagtagcaaggtacattttctcctgtgacttctttctggtctttctgatcctgtctagcaggcaattccatcccaaggatacatactcacttaaagatcacaactgattcctgctgttctggactcctgtgagctgtagaatcacacaacctttttccttatgtctgtgcctttggaacagatatcttccaccttttgctaatgtcctggacaaaaaagtctttgccaaagaaggtatctttttttctttttaatgtcaccagaaatgcttattaccatacaatttcagagcaaaacaaatgagcaaagaagaaagtttgaaagcaaaagaggtcacacattactggaaagatactaagaaccaagaagacttttggcttcctagagaattaaaatgaaaaccctccttaggtagtaaagtctgaaaattacataaataacttctttcaatatttatatgctaaaagtattcattgaaagtgaccaaaagagctaaagccaaaaccaac

SEQ ID NO: 2114 - DNA, 380 bp, Mus musculus
cagaagaagttgaaaaagactgacaggcaaggagactggaagcccatcagaaggtgggtggaggtgaacaaggtgagaagaaagaatgagatgtgagcagaaggattggggaaaagagtaagtgacagaaagacagaatggcaggcagcatgccatttgagctgtcttgtcctgctaagattattggagctttttgagatgcaagtggatcccattcttggacttcaacacaattcttgctatggggattgcgactctggtgggatctggcgcacctcaaaccgtatcaacgtcagggccaccaccaccttcacctcatcttacaaactgtttcccaagcatgtccctgctcctactgacaatggcatgaatgaatggct

SEQ ID NO: 2115 - DNA, 1494 bp, Mus musculus
agagccccgcggaatagctgagcttcgccatggccctgctacgaggtgtgttcatcgtcgctgcgaagagacaccctttggagcttacgggggccttctcaaggacttctctgccaccgatttaactgaatttgctgccagggctgctctgtctgctggcaaagttccacctgaaaccatcgatagtgtcatcgtgggcaatgtcatgcagagctcttcagatgcggcatacctggcgaggcatgtgggtttgcgagtgggagtcccaacagagactggggcccttaccctcaacaggctctgtggctctggtttccagtccatcgtgagcggatgtcaggaaatctgttctaaagatgctgaggtcgtcttgtgtggaggaacagagagcatgagccagtccccctactgtgtcagaaatgtgcgcttcggaaccaaatttggattagatctcaagctggaagatactttgtgggcaggattaacggatcaacatgttaagctgcccatgggaatgactgcagagaaccttgctgcaaaatacaacataagcagagaagactgtgacagatacgccttgcagtctcagcagaggtggaaagctgctaacgaggctggctacttcaatgaggagatggcacccattgaggtgaagacgaagaaaggcaaacagaccatgcaagtggacgagcacgctcgaccccaaaccaccctggagcaactgcagaagctcccgtccgtgttcaagaaagacgggacagtcacagcagggaacgcctcgggggtgtctgacggtgctggggccgtcatcatagccagcgaagatgctgtcaaaaaacataacttcacgcccctggccagagtcgtgggctacttcgtgtccggatgcgatcctactatcatgggtattggtccagtccctgctatcaatggagcattgaagaaagctgggctgagtcttaaggacatggatttgatagacgtgaacgaagcttttgcccctcagttcttgtctgttcagaaggccctggatcttgaccccagcaaaaccaatgtgagtggaggcgccattgccctgggtcacccgctgggaggatctggctccagaatcaccgcacacctggttcatgagttaaggcgtcgaggtggaaagtacgcagtgggatcagcttgcattggaggtggccaaggcatcgccttgatcatccagaacacagcctgaaggcatcacaagcacactgcccacacttactgggccaggccacggaacacaggagaccttcgagtcagccctgctgagacagtgattgtatgtgaccaagccttgatgaggcaagatgcattgggttctgtctacttcatacctgtctgacgtgttagaataaaaacaccaaccatcggaggccttaagagaaatggtatctgtcagtagtcaccactgtatgccttccatggagtaatacaaactgaataaatgttgccttaactccagct

SEQ ID NO: 2116 - DNA, 1389 bp, Mus musculus
  misc_feature 80: n = A,T,C or G
gagatccagcggccaatgcctctggccccacagaggcacctacagaaaactgaaggcttgacacatcccgaggagcagancccatggacaccttcagcacgaagagcctggccctgcaggcccagaagaaagtcctcagcaagatggcttccaaggccatggtggctgtgtttgtggacaataccagcagtgaggtcttggatgaactgtaccaggccacgaaggagttcacgcgcacgcggaaggaggcacagagggtagtgaagaacctggtgaaggtggctgtgaagctggctgtgttgctgagggcggaccagctggacagcaatgagctggcccagctgcagcggttccggggccgcgtccgcaacctggccatgacagccctcagcttccaccaggtagacttcacctttgaccggcgtgtgctggccactgggctgctggagtgcagggacctgttgcaccaggctattggcccgcacctcactgccaagtcccacggccgcatcaatcacatcttcagtcactttgccaatggtgacttcctggccgcgctgtacagcccagcagagccctaccggagccatctgtgccgcatctgtgatggcctcgggaggatgttggacgagggtggcatctgacctggagtcagccacctggagactatcctccactggtgacggtccccaagaactcagaactgcctgtgcttgggggagtctctcctctgtgtctcctgctgtaacttatctgcttttgtctagcttctgcttcgtctcctgacctcctcttcttacttctgagacaggtctcatgtagcccaggctgaccccatacaccctatgtagcaaaggctgaccttgacctcctgagcctcctgcccccaccaccgagagtgctggatgataggtgtgtgccaacgccccactgtctggacattctcagtctttcaaataaggttgtggagaattgggagacaagaattgtactcccctgacccttacccctgccaaatgactatgtttgtttcctaagcctcaggtcgtcccaaggtgacttgctttagaaaatggagttcaaactcttgttgtaccagactagagttgaacaagtactggactgctacaacaggtccttatgtatagattggcccaggaaggctcactctgccaatgctgcaggacactggacactgaggagtgatgctactgcaaaccaagaacaccagcagacagatgctgtgcggcagatcgtggcttctctcaatggttttgaaaggagagactccaagcacacttcggtgttgggatctgaggtcctgttaggggactggaccctcgcattgaagagaagaaataaatagagccggtgagatggctcagcatg

SEQ ID NO: 2117 - DNA, 1890 bp, Mus musculus
gagccggagccgcagtcgcagccccggagcagcgccgggagcgcggccagagcgtcgtaggctcgcgatcgctatggcggagttcccgtcgaaagtgagcacgaggaccagcagccccgcgcagggcgtgggagcctctgtgtctgcgctgcgaccggatctgggcttcgtgcgctccgctcttggggtgctcgcgcttctgcagctggcactggggctgctggtgtgggccctgattgctgacaccccataccatctgtatcctgcctatggctgggtcatgtttgtcgctgtcttcctctggctggtgacaatcgtcttcttcatcatctacctgtttcaactgcacatgaagttgtacatggtgccctggccgttggtgttactgatcttttttgtcgctgccacggttctctacattactgcctttatcgcctgtgcagcggcggtcgatctgacatccctgaggggctcccggccatataaccagcgctcagctgcctctttctttgcttgtctggtgatgattgcctacggagtgagcgctttcttcagcttccaggcctggcgaggagtgggtagcaacgcggccacgagtcagatggctgggggctactcctaagccagctatgctgtggcctgagccatggctgggtcttagcacagggtcaccccctaagcttactggactcaaactctccagcactcctgaggaactggcctacactggcacagatggaactggccaagagccaggggtggggacatcctccccacctcccttattcagcagaaggtgatggggtttggggagctctgccttgtcatcagagaacttcagtagcccaggctgggccaccctgttcaccagcactaaatgcactaacagaccctcagcctctgacctgcctcagtataaccctaacaaaagacagattatctttgtccccaagccaagtaagccccgggctcttctggtcccaccgtcccctcccctgccccatgccaacctgtcacctgtagagagacttttataggaagagttgggatttctgggactggacgatttctgataactgttggttacaacagtttccgatggcagcaagctcgctaggtcccctccctcatgtggaactctcccctttgggagagctagcacccgtgcaagggttctccccgccccccccgccccaggctgctgattaggcacaggggacttccaaggagggacagaaggaagcagggccttgcctggtgagctgtcatggggttaatggtgactcttgtttggaattattattttttacaatttaaataaaaatggaagcatctgtttggaaaggggttatcattcctggtcttagatgtttgctaaggtttttactttttggtccttttagaagatggcaacaattaagatgaaattagaatcagatacttgtgttttgatactgttagagggaggagatcaagttttggctcttggtccccgctcacacttgtcttggtgattgtcaatatacatagtgtccactttggaggttaggtaatgaagtctccctgttccaggaggactagcccattttgaggcatagaggaaagcgaatcctaggaagccagagctctcagagacccatcaggtatctcacggcctgacgtaatgcctcgtacaatctcagaatgccggtttaggggaggcattctgggttctgctgctcaggcagggaatagaaggcagcatctcagtgatgggtcacacgggccagactcttaactttcttgcccttgtcttgtccattggaggacgcacatagcatctgtccaagtttgtggaccaacacacaaaattagcaagcttacatagaatattaaactgttcttgcagtc

SEQ ID NO: 2118 - DNA, 639 bp, Mus musculus
tgatggtaaaattttattcatgtaatgcattatcaatgagttctactcattcttcattttcttttctttctttacaaagaatcggtaaacaaacaagaagcactttacaatgagggctacaatgaatgtcacaaaagcaagcaggaatccaatcacatccagagagtggtactggtaccaggtgaggttgtatgcaagtggtctcagatgcttggcccctttgtggcgcatgacaaactcaatccagaagactgctctgtccaggggcttcataggctggtcatggtgaatggttgacaaccacatagcattctctttatagaaaggattgtctatgacttcctccagtgcattgagcaaatctgaccttgacatcgttctgatattcaatgtaacagctgctcctttggccaccatgtgagcaatgttatcatgttgttctccaaacaaaggaatgccaatcatagggattccatgatggatcgcctcgtagagtccattcgcgccaccatgagttataaaggctttggtttttggatgaccaagaagatcattttggggaagccacttgtagattctggtattgggtcctaaggtggctggagttttgccgtcaaatcttcaaagaacctttgtggg

SEQ ID NO: 2119 - DNA, 303 bp, Mus musculus
cgttccccttcatggcccttttccttactggccctgagacatttctcactgctttgatagaccgacctaggacaactatttctaaggacactccctccataacttcgttcctcagacattattttcagtgagactaaacacctactagacacggactgactcagatttcatacacgtgagatcctttccttgctcaggacttagaaagaatgttttgtttgcatgcctatttaactggaaaattggtatcaagaccatcactccagatttgttattgtgtgtaataaaagtcccattttacct

SEQ ID NO: 2120 - DNA, 1807 bp, Mus musculus
  misc_feature 16: n = A,T,C or G
agtaccctcaggggcntgatcctcttgctctggacttctgattgctaggattgcattatcttaccttataagcatgcactacacttggcataatctattaccttctatcatttcatgttattgactattaaaagagatggctctgaaaatataagatatttagagaaatatgcaatttgctgttaaggtagcttgcttttagatcaattggagcaattaaacttaggactgaaaaagataccaggaggcatatattaagtacactcgaatccatagtgaacagccagagtgactcactgatgctgatcacctacaactcagtttacaatgaacaaggagcagggcttgtcttgtagctcgagctacgggtctcagtaaaaagttaagattcggagagacaatggcaagatagagctgtcgtcaccattcgatatcaaaacaggaggttcgtactaattccataatgtacaaatgtctcatgaaatatttactttgtttaggttacttgttaattttttgtgttttgtataagttttgctaaatggttcatctgggaagataacaagagactttcactaaaaatggcaagagttggttatttggctcttaggctggaatcgacatttctcgggattcacctactctctggctgtttcctgggaacaagaaactaccagtccacccatgcccaccccaacacacaacttgcatgtagccccctgacatctgtcctagtgaagccttttcacgtctgccatgttccaatatacactcttctgctttcctcagagaaaggagccgcttaggtgcccgagctcagggctaaggagtttcaagagcgaatgccaggcaatctgtcaatgctgctacacagacacctttcagacagacaccgccttcagatgtaactcctaaaggaatcctgaggcagaccgaactgtagtacgatatcaccgatcccttgtgttcagcgtgcaaaattatgtttgctgagatgtggctttttttttttttcatcatgaaagccctagaccattgcacacacagaaggccttttgccttggcaacgttgccgttggccggtgttgggagcctgggtgcctgttgatcattgatttcttaatacccacagagctctggattcaacattttctctataaagcaagactttgtaagccttaatcagcttacaagttgtctgtgaggaacaaacggaaagtacttttgtagggagggggataatataatgaggcaacattttggggatatggcaaggattaatacagcctcaaggccttcctgggaagttgttttcaacatttccatggaaacgcacatgaaagcagtggttttcacacttatttttaacctgtgaatattccaagtcctaactccgcaatatctcttcctagtaccaaagaaaaaccttttacaattgtgcatttttaaaggatttgatttacactttaaattacgtgtatgtgttgtgtgggggtaggtatgggcagacacggacaggtgcccgaggatgccagagtgtcagatcgcccaagcttgagttacaggctgttatgagtcctgtgacataatagatcctggttctccacaaaaatcaacacatgctcttaacttctgagctgtctgtccagctccctatagtcatccatcttgaaaatgccatgaatggcttggtaggtggtgggcagtgtttacaaagggtcaaggcttcccaagccatccagactttgagcttacttcctttgacctcttgatatttccttagaattccccaagtctcactttggag

SEQ ID NO: 2121 - DNA, 1174 bp, Mus musculus
ggtctctggaccagagggtactgtgcctcctgggagccctgagggaataggtgactatttgcctaccactcagggttaaatgttaccctgtacatggtctctacatgtcttctgctggtagatgggtgagtctgctatgcacagtccatgtgtgtctttctgttccttactagaatcgagcgaagttaagtgcacacacccagtcctatatacctgcatgtatgtgtacctgctagtagttaagtacatgtgctcttacatacctgtttacatgatgatgagtgcagcctgtggatgtgcagtggtgctgtgtgtgtatactggggatcaagtctaggatgccgcatgctgggcatgtacttcagttcagcatgctctacctgttctccgtctaggcacgggtgtgtgtgtgtgctcattttgcagggctttgtgtgaattcacagtgcccttgcctaagcatttagatgcacacctgtgtgcctgtgtgtgcatacatgcttgcttgtgccagcccatgcacactgtctaagcgtacatgtgcatttagatgcaacaaagatcaccatagaggtggctacattcagtgtatctttggcaagcctattgtcagatgtgaagatcttggtgctccccagagtacagaagagtgagtggggtctcacttgctctgcttttgcttggtctactcataatgtgggacctgcatagggtaccactctaacctgacagcctctattccagggtttggagacctgctcaggtgtagcagttggtgacatatggagcctgctgtgcggagcatctaggtgctagagatggcttctgcccatataaccggaaaccccatctcgggctctctctatgcgtctagagcctcttttcctaaaccagactcaactctgtgacagactacaagggggtgctagggtcccaagctccaagcatagaattgtccctaaagatagtaggaagtagattccctgtcctggcaattttgtcattcgtcctgagtgaggagggctctgttcaggagcaaatgtcatctgtcacttcagcccttgggctccacccaccctcaactgcacagggttaagtggagtctgagccgcaggggtctctggagcttaggaaatgcaggagccctgattattaaaccaaacctgtcttctac

SEQ ID NO: 2122 - DNA, 3588 bp, Mus musculus
cccacacagctccgagcctcctgtccaccaggctctgctgcacttagcagccagggaattggggtggatgaggtcggagcgccccatggtgtggtgctgtttttttctccgtgcacagcggaaacgaaaacagagttcccaggatgaagatgctgtcagcctgtgcagtcttgacataagtgaacctagtaacaaaagggtcaaacccctttccagagtcacatcgctagcaaacctcattccacctgtgaagaccacaccattaaagcgcttcagccagaccttgcagcggtccatcagcttccgcagcgagagccgccccgacatccttgccccccgagcttggtccagaaatgccacctcctcaagcacaaagcggagagacagcaaactgtggagtgagaccttcgatgtgtgtgtcaatcaggtgctcacggccaaggagatcaagagacaggaggcgatctttgaactttctcaaggtgaagaagacttgatagaggacttgaaattagcaaaaaaggcctaccacgaccccatgctgaaactctccataatgacggaacaggaactgaatcagatttttgggaccctggactctctaattcctctccatgaagagctcctcagtcagcttcgagatgttcggaaacccgatggctcgactgagcacgttggtcccatcctcgtgggctggctgccctgtctcagctcctacgacagctactgcagcaatcaagtcgccgccaaagccctgctggaccacaaaaagcaggaccacagagtgcaggacttcctccagcgctgtttagaatcacccttcagtcgcaaactcgatctctggaatttccttgatattccccggagccggctagtgaagtatcctctgctccttcgagaaatcctgaggcatacaccaaatgataacccagaccagcagcacctggaagaagctataaacatcatccagggaattgtggcagaaatcaacaccaagactggggaatcggaatgccgctattacaaagagcggctcctttacctggaagaaggccagaaagattctctgattgacagctcaagggtcctgtgttgtcatggagagctgaaaaataaccggggtgtgaaactccatgttttcctgttccaagaagtgctggtgatcacccgagctgtcactcacaacgagcagctctgctatcagttgtaccgacagcccatccctgtgaaggacctcacgctggaagacctgcaggatggagaagtgcggctgggtggctccctgcgcggggccttcagcaacaacgagagagttaaaaacttcttcagagtcagtttcaaaaatggatcccaaagtcagacccactcactacaagccaacgacaccttcaacaaacagcagtggctcaactgtatccgtcaggcaaaagaaactgttctgtctgctgccggccaggctggcttgcttgactctgagggactggtccagggtcccggcactgagaacagggagccacagggagaaacaaaacttgagcagatggaccaatcggacagcgagtcggactgcagtatggacaccagtgaggtcagccttgagtgtgagcggatggaacagacagacgcttcctgtgcaaacagcaggcccgaggagagtgtctgacagaagactgtgaccctgctagcagcaggctgtttcttacctgtacagtgtttgcattccacacgtgaactgtttggagaggcactttgtaatactcctgtgcctgtgttggcctagttccctctgttccttgtccctagtactgtaactgccgctcagtctgtgtcagctcacagcagtccttaccctgttgctgtatctcacaagcatctggatgagtggggaggaactgaccgtgttactttaacttgtcctactttcaaaacagaaagggtctctaaactactgctctgcatggactgggttgacaaagccttcgtcccatgcttctctaatgttcctctagctctgacctagtagctgtagtcctggcattgagagagttttgcagagaacggagatggcattggaagagaaggcagaaagtctaattaattaacccttagcgtgagctcaggttctgtgttattcaaccagaaaacatgaaaacatccctgagggtttctgaggtttaattttgcaaaggaggaagccttgttttgaagcctgtggtttcatccagtgcaagttgaatgtaacaatctatgaagacctgaaacagaagtggctttagagagggccaagacaaaagcagttgccagacaggcctggtggcacaggcctacaaacctggcacttgggagcagaggcaggaagatgtggagttcaagaacagccttggctacataccaagttctagttcaaactgagttccacagtataaacaaaacagagctaaaagcacctgccagctctgactattcagctgaagtgggggacagctgtgggaagtgtttgtcatcgccagtggcttgccattagaaaagccatttctagcctacgacaacagagattgccaggggcccgagaagatctgccaaggttataggaccccatcaaccttatgtttcatccacctcggccactcctcttttctagtggaagactgtgactgcacctgggactctgtttacaaacaagagagaaggacttgggggtgagaagcgggtcactgtcactgaagcctcctgtgcaaaccacggaaactgaagttactccgggcggtctcaggatttcctgctctgctttcaggctctggttcttgagctacagtcagactggtggttaattcctcttgaggccagtttcattagctctcattatctaggatcagctagccaaactggaaacttctttgttccagccttgatttacagagcaaggatgggttcaaacaaacaaacaaacaaacaaacacacaccatgaggaaaataaaatgttcacaaactaaacagcttcttgcaagtgtaaatacttaggggatttgtacaaaattatacccacaccagcactagtagtaatgattctaaattattgccaaaaaagttttttgttgttgttaatttctgcatcaagtttacagaaaaggaagcagcaaaatacaaagttgtccctttactgtacacatgggtcatgtgcattcaaagaagctgtgagacaagagcaaccaatagaaaaacaggtatatgacatggttatttttcaagacatattatgatcagttctaccctgtaaagcatatttctgtatttatagattttaacagtggtgaatttttttctattacaagtttatttaaaaccattttgtttcccaagttgctgaataaacaaacctgctccaggcagacacagtggaaagctgagacaggacactggatgatggagaaagcttcaactgttctctgtagagccgctggccacggtggccagtgagtcaaggtctgtcagcctgtgggaagagagtggacggatgttttggtgaaatgaatacttttgtataatggccttaaacttttctggaagcatttcaaataaattgcatt

SEQ ID NO: 2123 - DNA, 1115 bp, Mus musculus
atgctcaacaaagccaagaattcaaagagtgcccagggtctggctggtcttcgaaaccttgggaacacgtgcttcatgaactcaattcttcagtgcctgagcaacacccgagagctgagagattactgcctccagaggctgtacatgcgggacctcggccacaccagcagcgctcacacggccctcatggaagagtttgcaaaactaatccagaccatatggacgtcgtcccccaatgatgtggtgagcccatctgagttcaagacccagatccagagatatgcgccacgcttcatgggctataatcagcaggatgctcaggaattccttcgtttccttctggatggtctccacaatgaggtgaaccgggtggcagcaaggcctaaggccagccctgagacccttgatcatctccctgatgaagaaaaggggcgacagatgtggaggaagtatctggaaagggaagacagtcggattggggatctcttcgttgggcagctgaagagctccctcacatgcaccgattgtggctactgctctacagtcttcgatcccttctgggatctctcgttgcccatcgcaaagagaggttaccctgaggtgacgttaatggattgtatgaggctcttcaccaaagaggacatattggatggtgatgagaagccaacttgctgccgctgccgagccagaaaacgatgcataaaaaagttctctgtccagaggttcccaaagatcttggtgctccacctgaagcgattctcagaatccaggatacgaaccagcaagctcacaacatttgtgaatttcccactaagagacctggacttgagagaatttgcttcagaaaacaccaaccatgctgtttacaacctgtatgctgtgtccaatcactccggaaccaccatgggaggccactatacagcctactgccgaagtccggttacaggcgaatggcacactttcaatgattccagtgtcacacccatgtcctccagccaagtgcgcaccagcgacgcctatttgctcttctatgaactggccagtccaccctcccgtatgtagcattgaggagctgcggcccttccctcttccctgtggtggccccacgtcctaag

SEQ ID NO: 2124 - DNA, 3732 bp, Mus musculus
gcgggtgcgggcgcgcgcggctgcggggcgctgtggcgggggccgggctgtacgctagccgagccgggatcggggcggggagcagccacggcgccgccgaggcccggggcccgcgacgctgcgcacagcctgggcgccgagtagccgggccgggccggacgcgggcggcggtggcggcggcggtggcggagcagctgcgccccccgccctcccaaggcccggcgcccgggccgctggcgatggtgacacatgcggcggcggcgcgccggcggcaggaccatggttgagcgcgccagcaagttcgtgctggtggtggcgggctcggcgtgcttcatgctcatcctttaccagtacgcgggcccggggctgagtctgggcgcgcccggtggccgcgtgccccccgacgacctggatctcttccccacgccggacccacattacgagaaaaagtactacttcccggtgcgcgagctggagcgctcgctgcgcttcgacatgaagggcgacgacgtgatcgtcttcctgcacatccagaagaccggcggcaccaccttcggccgccacctagtgcagaacgtgcgcctcgaggtgccctgcgactgtcgcccgggccagaagaagtgcacctgctatcggcccaatcgccgcgagacctggctcttctctcgcttctccacgggctggagctgcgggctgcacgctgactggaccgaactcaccaactgtgtgcccggtgtgctagaccgccgcgacccagcaggtctgcgttcgcccagaaagttctactacatcaccctgctgcgagaccccgtatcccgctacctgagtgaatggcgacatgtacagcgtggggccacgtggaagacctccttgcacatgtgtgacgggcgcacaccgaccccagaggagctgccgccctgctacgagggcacagactggtcgggctgcacgttgcaggagttcatggattgcccctataacctggctaacaaccggcaggtgcgcatgctggccgacctcagcctggtgggctgctacaacctatctttcatccccgagagcaagcgggcccagttgctgctggagagcgccaagaagaacctgcgaggcatggccttcttcggcctcactgagttccagcgcaagacgcagtacctatttgagcggacgttcaacctcaagttcatccggccattcatgcaatacaacagcacgcgggcgggcggtgtggaggtggatgaggacactatccgccacatcgaggagctcaacgacctggacatgcagctgtatgactatgccaaggacctctttcagcagcgttaccagtacaagagacagctggagcgcagggaacagcgcctgcgcaatcgcgaagagcgcctcctgcaccgctccaaggaagcgctgccacgggaggacccagaagagccgggccgtgtgcccaccgaggactacatgagccatatcattgagaagtggtagtagtgtcaggggcagagagtgatgggcacgatttaacagggaaagaaatggggccaacagttcttcctgttcggtgcagcgggtgctagtaggatgccctagtccttgatggggcagggtaggacctctggggcagatggcctccctgctcttctggcccccatgtcatagttaaaactgacaagatttgaaaaagactggcgagggaacgtgtctgcttagccgagactcccatacctactatgcacgcactggcccccaacgaccagccccctaggaacgtgttactagctcctaatagcttggttgaagctccttggcctctgaggacccctaataacccagaatgcttggggagccctttcctttgagaatacaagcatgtctctgaggcatcctcagacctggagtgctccccaacccccacctatcaaagctgctttcaaggtcagggtcagccccagctgtggcagagaagactcaagtctggtgcctggcctctgcactgtctggagcatgatcagaatccacggtgtatcctggctttaggggaaccaggttcaagcaggaaagggatggacaccaagaggtcttccccccacccccagctccccaccaatccctatgctttctgatgcactgcccctcccccatcactgaaacatttatacaagggcttgtgtgccaatgttcctaccataccagcaactctttctatcccgtgaataaaagcatcccttggctgggatatagggccacatcaacctgagttggtactgggtggccaggatggggactttcccattctcagctgaggttggaagaaaccactctgggtgtcctttctgggacctgtctgcataaccctccccatcctggctctcctgcatcttcttaccctttacaaagtctgacccggccatttccagcagacctgtgagccagccagggaccggactagaagccatgttgcatattggggtttttgtttgtttgttttttaagcacttaccaagtgccctatccctggcaggcccctagtgggggtgtcgtggcttttttcagagtctataagcatgcagccatgggttgtgagctgaccttgagacaggacgggtcccacactccctgcctctgtctcactcaacactcaggctaagaaggagcgggtcaccacagacaagagtggggccatatgtagcacagcaatattccagatgctggtgggtattgctgctgccctagagcaatggcttaatcttcacacatgtgtggtgtggcaccaggcacttgaccttggggggtctacaagcaagatgagttctgataggcacagtccagcccagtctagcaccaccttttatggtagttgatcactctgaggaggtgggtagcaagatgaattaggaggtcaaggtcactgagaggaatttgtttagatgcccagtttagagtgaatagatatctgcggggaacctggggcattttggggaaccctggggtcttttacaggtcatgttggttgctgctgcttctgtcaggaagtaccctagctccacgtactccccgccccccgccgcccccttcacaaccttatgtgtacatgacctgaacataggatctgttctatacatactggaatatgttttaacatatgccccaccatcctgactcacacggaagcacgggtctcttctcaatctttgctgcatttggaaaatgttccctcccatctcaggccagcgccatgtcgaggcatcttcagtccacccctgcctaaggctcaggctacctgctttggggcacagcttcctggtactcacagcatctcagaatagggtgcttccctctgcctccagctccaaggactctgcctacaggagtgtgccttggggctgaaaggccatgcaaacacaacaaactaataactcagtcccaaagcaccctgcagccctgcagacaccccccccctccaagagtgggaggcagggaccacagaactgtccagccaacacgtctgaactggaactgttccacttgaacccgggagctttaaagctttatttatttatagcttcttattaaaaatttaaaaaaagcgttgaggaggaatcctttggttattcatacggaattgatgatggaaaagcaactggttgtcttctaattgtctttgtctagatggaaactgaaccttagcagatgaataaaccctgaaaaggtcaaaaaaaaaaaaaaaaaaaaaaa

SEQ ID NO: 2125 - DNA, 1945 bp, Mus musculus
ggaagatggcgtcgtcggagcaggcagagcagccgaaccagccaagctctcctccaggaagtgaaaatgtggtgccccgagagccactgattgccacagcagtgaagttcctacagaattctcgggtccggcagagcccacttgcgaccaggagagcatttcttaagaagaaaggactgacagacgaagagattgacctggctttccagcagtcgggcacagctgccgacgagccttcacccctgggcccagctaccccagtggttcctgtccagccccctcacctcactccgcagccatacagccccagaggctcccgatggcgagattatggtgccttggctatcatcatggcaggaattgcatttggctttcaccaactctacaagaggtacctgctgcccctcatcctgggaggccgagaggacagaaagcagctggagaggatggcagcgagtctctcggaactgagtggcaccgtggcccagacagtgactcaggtgcagacaacactggcctctgtccaagagctactgagacagcagcagcagaaggtccaggagctagctcacgagctggccactgccaaggccaccacatcaaccaactggatcctggagtcccagaatattaatgagctcaagtcggaaatcaactccttgaaaggacttcttttgaatcggagacagttccctccttccccgtcggccccgaagatcccctcctggcagatcccagtgaagtcttcatcaccctccagccccgcggctgtcaaccaccacagcagcagtgacatctcccctgtcagcaacgagtctacgtcatcctctcctgggaaggacagccacagcccggagggctccacggccacataccacctgctgggtccccaggaagagggtgaaggggtgctagatgtcaagggccaggtgaggatggaggtgcagggtgaggaggagaagagggaggacaaggaggatgaggatgatgaggacgatgacgtcagccatgtggatgaggaggacgtccttggggtgcagagggaggaccgacggggcggcgatgggcagatcaatgagcaggtagagaagctgcggcggccggaaggtgccagcaatgagactgagcgagactagggctggcacttggctgcccgccttcccagtgcccccggacatcagaagcaggtgggcaagggctgcggctctgcctccacgactgggcggaagcccaggtaggggtggggctgcccttcagcgcagcagtgtgggctgcatttctgttcaccagcctcccaaacacggcccagccccagccccagccagccccagcggctctggctgtccacaagccaggcagagaactcaggagctctgcactcaacgcccctgctgcctcgccccctccctgacaggtgtcttgtcaaggtgtatcctccgagtatcttgaccacctggcaccatgcatggccagagctcatgtcatctcctgcctctgtcacctcagtgcagggaaactatggcccctgtggtcttgctgtctctcccactgtgccctggcctggcttgtggcttcttctttgcctgttccaaaagccagggccctgggcctgctcttcatcttgcgggcctcctaggacccagccttccaaagtcctggctgacagatgctgctcttgggcacctgtccccaccccacctgccctgctgtcctctgtatcacacaagacgtctcgcttgctgtgtcgtggtttagctcctcggtggtgaggcgtgcttctccctcctggtggagccaggcagcagggccttcctgaccaacagccatgtctgaccttcccactgagaaacacatgttcatttatgtgatcatgtatagatttcagaatataagatatgactgtacataattgtaataaatacgagttgccatatttaaaaaaaaa

SEQ ID NO: 2126 - DNA, 5645 bp, Mus musculus
ctggcccccagaatccagcctctagccttgcctcttaactttttcttggattcagcctaggtgggccctcattctctcctgctcctcgactgcggcagggcagtgggccgtaacccccaccccagaaaccggtcttctcgtcccctggagggcccaggatgtctctgcccttttatcagcggtcccatcagcactatgatctcagttaccggaacaaggaccttcgcacgaccatgagccactaccaacaggagaagaagcgctctgctgtctacacccatggctccactgcctacagcagccgctccttggcagcacgccgccaggagtcagaggccttcagtcaagcatcagccacctcttaccagcagcaggcctcacagacctacagtcttggagcatcatcatcatcccggcattctcaagggtctgaagtcagccggaagacagcctctgcatatgattacggctattcccacggactcacagattccagtctgctattagaagattattcatccaagttgagcccccaaacaaagagagccaagcgagttctgtctggagaggagactggaagcttgccaggcaactacctggtgcctatctactctggacggcaagtgcacatcagtgggatcagagactcggaagaagaaagaattaaagaggctgctgcttatatcgctcagaagactctccttgcgagtgaggaagctattgcagcttccaaacagagcacagcctccaaacagtccgcaacctccaaacggaccacgtccacccttcaacgagaggaaacgtttgaaaagaagtcgaggaacattgcaattcgagaaaaggcggaagagctgtcactgaagaaaacattagaagagacccaaacatatcacggcaagctaaatgaagaccatctccttcatgctcctgagtttatcattaagcctcgttctcacacagtttgggagaaggagaatgtgaagttgcactgctctgtagcagggtggccagagcctcggctcacgtggtataagaaccaggtgcctataaatgtccatgcaaacccgggaaagtacatcattgaaagccgatacggaatgcatactcttgagatcagcaaatgtgactttgaagacacagctcagtaccgggcctcggcgatgaatgttcaaggagagctgtcagcatatgcctcagtcgtagtaaagagatataagggagaactggatgagtctctcctccgtggtggggtttccatgcctctcagctttgctgtgaccccttacggttatgcatccaaggttgagatccacttcgatgacaagtttgatgtgtcttttgggagagaaggagagaccatgagtctgggctgtcgcgtagtcatcactcctgagataaagcactttcagcccgaggtccagtggtatagaaatggagcacctgtttctccatcaaaatgggtgcagccacactggagtggagaccgggcgacacttacgttctctcacctcaacaaagaagatgaaggtctctacacgatccgagtgcgaatgggagagtattacgaacagtacagtgcttacgtctttgttcgagatgctgatgcagagatcgaaggagccccagctgcacccttggatgtggtgtctttggatgctaacaaggattacatcatcatctcttggaagcagccagctgtggatggagggagccctatcctgggatactttatcgataagtgtgaggtgggcacagatacctggtctcagtgcaatgacacacctgtgaagtttgctcggtttccagtcactggcttgatagaaggccgttcctacatattcagagtccgagctgtgaataaaactggaataggcctgccatcccgagtttctgagcctgtggcggctttggatccagctgagaaagctagactaaaaagtcatccttcagcaccctggactggacagatcattgtcacggaagaagagcctacagagggtgtcattcctggcccccccacagacctctctgtcaccgaggccacccggagctacgtagtgctgagctggaaaccccctgggcagcgaggccatgagggcattatgtattttgtagaaaagtgtgatgtgggagcagaaaactggcagcgggtcaacacagaactcccggtgaagtctcctcgctttgctctgtttgacctggtggaggggaagtcttaccgcttccgtgtccgctgctcaaattcagcaggagttggtgagccctcagaaacgactgaagtgaccgtcgtaggggacaaacttgatatcccaaaggcccctggcaaaatcatcccaagtagaaatacagatacctcagtggtggtatcttgggaggagtccagagacgccaaggaactggttgggtactacatcgaggccagtgtcgttggctctggcaagtgggaaccctgcaataacaacccggtgaagggctcacgatttacttgtcatggactgacgactgctcagagctatattttccgggtcagagcagtgaatgcagctggacttagcgaatattcacaggattcggaagctattgaagtcaaagctgctatcgggggaggagtgtctccagatgtgtggcctcaactgagtgatacgcctggtggactaacagactccagggggggcatgaatggagcctccccaccaacctctcagaaagatgctttgctcggtagcaaccctaataagccctcaccacccagtagcccttccagccggggccagaaagaagtaagtacagtgagtgagtcagttcaggagccgctcagctcgccgccccaggaagcagctcccgaggaggagcaaagtcaatccgagcccccgaaaaagaagaaagatccagtagccgtgccatctgcgccctatgacatcacttgtcttgaaagttttcgggactccatggttcttggatggaagcagccagatacgaccggaggggcagagattacaggctattatgtgaactatcgtgaggtggttggtgaggtaccaggaaaatggagggaagctaacatcaaggccgtcagcgatgcagcgtacaagattagcaacttgaaggaaaacacactgtaccagttccaagtgtcagcaatgaacattgcagggctgggagcgccctccacggtgagcgagtgcttcaagtgtgaagagtggaccattgctgttccaggaccaccacacagcgtgaagctcagtgaagtcaggaagaactccctggttctccagtggaagcctccagtctactcaggccggactccagtcacgggttactttgtggacctgaaggaagccagtgccaaagatgaccaatggcgaggacttaatgaggcagccattgtgaacaagtacctgagggtgcaaggcctcaaagagggtacctgctacgtgttccgtgtacgtgctgtcaaccaggcaggcgttggaaagccttcagaccttgctggacctgttgtggctgaaacacgtccaggcaccaaagaggttgtggtgagtgtggatgatgacggagtcatttccttgaactttgaatgtgatcagatgactcccaagtcagaattcgtctggtccaaagattatgtacctactgaagactctccacgattagaagtcgaaaacaaaggcgataagacaaaaatgacctttaaagacctcgggacagatgatttgggcacctattcttgtgatgtgacagacacggatgggatagcgtcaagctacctgatagacgaggaggaaatgaaacgtctgcttgccctcagccaggagcacaagttcccgactgtcccaactaagtctgagttggcagttgaaattttggagaaaggtcaggtccggttttggatgcaggctgagaagctgtctagcaatgccaaagtcagctacatatttaacgagaaggaaattttcgaggggccgaaatacaagatgcacatagaccgaaacacgggcatcattgaaatgttcatggagaagctacaggacgaggatgaagggacgtacacattccaaattcaagatggaaaagcaactggccattcgactcttgttctcattggagacgtttataagaagctacagaaagaagctgaattccagcgacaagaatggatcaggaagcaaggcccacatttcgctgagtatttgagctgggaagtgactggtgaatgtaacgtgctgttgaaatgcaaggtggcaaatattaaaaaagagactcacattgtatggtacaaagatgaacgggagatctccgtggacgagaaacatgactttaaggatggcatttgtaccctgctcatcacagagttttccaagaaagacgctggattttatgaagttatcctgaaagatgaccgaggaaaagataagagcagattgaagctcgtggatgaagccttccaagacttgatgactgaagtatgcaagaagatagcgttgtctgccacagacctgaaaatccagagcacagcggagggcatccggctatactcctttgtctgttattacctggatgacttgaaagttaactggtcccacaatgggacggggattaagtacacagacagagtcaagagtggcgtgactggggagcagatctggctgcagatcaacgagcccactccgaatgataaagggaaatacgtgatggagctctttgacggcaagactggacaccagaagacggtggatctctctggacaagcatttgatgaggcctttgctgaattccagaggttaaaacaagctgccattgctgaaaaaaatcgggcccgggtgttaggtggtctccctgatgttgtcaccattcaagagggcaaggcactcaatctcacttgcaatgtgtggggtgacccgccccctgaggtgtcctggctgaaaaacgagaagccactgacctctgacgaccactgcagcctcaagtttgaggccgggaaaaccgccttcttcaccatctcaggcgtgagcacggcagactccggcaagtacgggctggtggtgaagaacaaatatggctcggagaccagcgacttcaccgttagtgtgttcatcccagaggaggagttgaggaagggagcaatggagcctcccaagggcaaccagaagtccaagtgagcagagactgggggagttttgaggagagccaggaccagctggccacccatcatgctgctgtcgtgaaaaggattgggtacagacgatgaaatcctccaggaggctccattttgtgctggcttaggaggaagtcatcagatctcttattcctatagatgaggaggcaccattgaagaacacattaagggttttaatctacaatttatgtagtaagaaaagcattaggaaatgatttcaaggaagaagggcagaggatgttggagaagtgctgagcgagagcagaagtgaggccagcatggaagccggtgacgctttacctgtaagctcttaggaattgtgtccatacctcatgttctatcaaaatagaggcatgtgcctgtaggcttgagtatggtgggtccctgttagtagaggtggtgcatttctgatagcagccttgtgaactggcctcccccagtgtgaataaagtctcctgcctttcctctt

SEQ ID NO: 2127 - DNA, 2652 bp, Mus musculus
ctgcagcccggagaccgttctgtgctccctccgcccgcaaccatggcaaagcccctgaccgaccaggagaagcgacggcagatcagcatccgaggcatcgtgggcgtagagaatgtggccgagctgaaaaagggtttcaaccgtcacctgcacttcactctggtcaaggaccgcaatgtggccaccccccgcgactactacttcgcccttgcgcacacagtgcgcgaccacctggtggggcgctggatccgtacacagcagcactactacgacaagtgtcccaagagggtgtattacctctctctggaattttacatgggccgaacattacagaacaccatgatcaaccttggcttacaaaatgcctgcgatgaggccatttaccagcttggattggacatggaagagttagaagaaattgaagaagatgccggccttggcaatggcggtcttgggaggcttgctgcctgcttcctggactccatggcaaccctgggacttgcagcctatggctacggcattcgttatgaatacggaatcttcaatcagaagatccgagagggatggcaggtagaagaggcagatgactggctcaggcatggaaacccttgggagaaggctcgccctgaattcgtgctgcccgtgcatttctacggaagagtagagcacacccagacggggacaaagtgggtcgacacccaggtggtcctggctctgccttacgacacccccgtgcctggatatatgaacaacactgtgaacactatgcgcctctggtcggctcgagcaccaaatgactttaaccttcaagattttaatgttggagactacattcaggctgtgctggaccggaacctggctgagaatatctccagagtgctctaccccaatgataacttctttgaagggaaggagttgcggctgaaacaggagtactttgtggtggctgccaccctgcaggatgtcatccggcgcttcaaggcctccaagttcggctccaaggatggcatgggaaccgtgtttgatgcctttccagatcaggtagccatccagctgaatgacacacatcctgcactcgccattccagagctgatgaggatttttgtggacattgaaaaactgccctgggccaaggcatgggagatcacgaagaagaccttcgcctacaccaaccacacggtgctcccggaggccctggagcgctggccggtggaactggtggagaagctgctgcctcgacacttggagatcatttatgagatcaatcagaaacatttagacagaattgtggccttgtttcctaaagacatcagccgcatgcggagaatgtctctcattgaggaggaaggaggcaaacggatcaacatggcccacctctgcatcgtgggctgccacgcggtgaacggtgtagcaaagatccactcggacatcgtgaagacccaagtattcaaggacttcagcgagctagaaccagacaagttccagaataaaaccaacgggattaccccgaggcgctggctcctactctgcaacccagggctggctgacttgatagcggagaaaattggagaggattatgtgaaagacctgagccagctgacgaagctccacagttttgtgagtgatgacatcttcctccgggaaatagccaaagtgaaacaggaaaataagctgaaattctcccagttcctggagaaggaatacaaggtgaagatcaacccatcctccatgtttgatgtccatgtgaagcggatccacgagtataaaaggcagcttctgaactgcctgcatgtgatcaccatgtacaatcgcatcaagaaagaccctaagaaattcttcgtgccaaggacagtcataattggtggcaaagctgccccaggatatcacatggccaaaatgatcataaagctgatcacctctgtggcagaagtggtgaacaatgaccccatggtcggcagcaagttgaaagtcatcttcttggagaactacagagtgtctcttgccgaaaaagtcattccagccacagacctatcggagcagatctccacggcaggcacggaagcctccgggacaggcaacatgaagttcatgctgaacggggccctgaccatcgggactatggatggggccaatgtggagatggcagaggaagctggggaggagaacctgttcatctttggcatgagagtagatgatgtggctgctttggataagaaggggtatgaggccaaagaatattacgaggcccttccagaactgaagttggtcatcgaccaaatcgacaatggcttcttttctcccaatcagccagacctcttcaaagacatcatcaacatgttattttatcatgacagatttaaagtctttgcagactacgaagcctatgtcaagtgtcaagaaaaagtcagtcagctgtatatgaatcaaaaagcctggaacacaatggtactcaaaaacatagctgcctcagggaagttctccagtgaccgaacaattaaggagtatgccaaggacatctggaacatggagccttcggatctgaagatttccctatccaacgagtccagcaatggggtcagtgccaatgggaagtgaatgctaaaatgtactcttattcaatgacttcttatggaacttgagtgttttagagct

SEQ ID NO: 2128 - DNA, 211 bp, Mus musculus
tctcccccacctccttttgcttcctcttacaaggtggtcaggtggtttggtttttagtgtgcaggatcaaaaatagatttgggtaaaaaatagatcagtggttcacaatcatctcaaggtggaaatacattaagttgggtattaagctgagtccaaatattcatttttaaaaagccccaatgatgattcctgcctctgtctgttctcatcc

SEQ ID NO: 2129 - DNA, 2067 bp, Mus musculus
gcgggactcccgggctgtgtgcctcaggtcggaactcggggctagtgcctgtagagagaccgaagcactcggttcccccagggggcctcagcctgggtgtgtgggggcgcaggccggggatgctgggctcagtgaagatggaggctcatgacctggccgagtggagctactacccggaggcgggcgaggtgtattctccagtgaatcctgtgcccaccatggcccctctcaactcctacatgaccttgaacccactcagctctccctaccctcccggagggcttcaggcctccccactgcctacaggacccctggcacccccagcccccactgcgcccttggggcccaccttcccaagcttgggcactggtggcagcaccggaggcagtgcttccgggtatgtagccccagggcccgggcttgtacatggaaaagagatggcaaaggggtaccggcggccactggcccacgccaaaccaccatattcctacatctctctcataaccatggctattcagcaggctccaggcaagatgctgaccctgagtgaaatctaccaatggatcatggacctcttcccgtactaccgggagaaccagcaacgttggcagaactccatccggcattcgctgtccttcaatgactgcttcgtcaaggtggcacgctccccagacaagccaggcaaaggctcctactgggccttgcatcccagctctgggaacatgtttgagaacggatgctatctccgccggcagaagcgcttcaagctggaggagaaggcaaagaaaggaaacagcgccacatcggccagcaggaatggtactgcggggtcagccacctctgccaccactacagctgccactgcagtcacctccccggctcagccccagcctacgccatctgagcccgaggcccagagtggggatgatgtggggggtctggactgcgcctcacctccttcgtccacaccttatttcagcggcctggagctcccgggggaactaaagttggatgcgccctataacttcaaccaccctttctctatcaacaacctgatgtcagaacagacatcgacaccttccaaactggatgtggggtttgggggctacggggctgagagtggggagcctggagtctactaccagagcctctattcccgctctctgcttaatgcatcctagcagcgcaattgggaacgccatgatgggcgtgggctgcaacgttcttgggctctgatctttctggttacactttgcttgtcccattaattaacatcttatttggtctattactgtgatatgacccattagctactgtggtaactgccatggactctttggtaggcctagggttggggtattaggaaggcagatgcgtttggaagtgctgcgaaggtggtcatgttggacatattgtgaaggcagttagactggtgtactatgaaagctagccatattaagtgaagccattgggtgattgatccactgggtgcctgatggtcgtgatgttggatgacacatgtctggtcctttggatgatgtgttggcaatcttgattgacctgtgttggacatcttgattgaccttttgagtatgtgacagaacacatcttctttggctcattttatcctgggatcgcctcttttttttcctcttctttttctttttctttttttcttttccttttttctttcttttttcttttttggcagacttcttggttcagcagatgccaaattggccaccatatcacatggtgtcttttttgacattctggatgcatggaaggtcactgtattggcaaggtgacatctcagcatgctgctatgcaccaagatagatggttaccacaggcctgccatctccttggtggaggttgggtgagaggaagaggtgagcagacctatcgagtttttctctgaagcccatccccaccctgtctgtgagaaagggctagtgtgggtgtcgggagttcctactgaggtcaagttcttgtctggggcttgggaatactgcctgtgtttggccattaaaaaggcaccatctccataaaaaaaaaaaaaaaaaa

SEQ ID NO: 2130 - DNA, 958 bp, Mus musculus
acttcccacacatctcttctctctaggcaagctatcagcccagactctcaagatggcctatgttccagcaccgggctaccagcccacctacaatccgactctgccctacaagagacccatcccaggtggcctcagtgtcgggatgtccttttacatccaaggaacggccaaagagaacatgagacggttccacgtgaacttcgctgtggggcaggatgatggggcggatgttgctttccacttcaatccccgctttgatggctgggacaaggtggtcttcaacacgaagcaaagcggacgatggggcaaggaagaggagaagagcatgcctttccagaagggcaagcacttcgagctggtgttcatggtcatgcctgagcactacaaggtcgtggtgaatggaagtcccttctatgaatacgggcaccggttacccgtacagatggtcacccatctgcaagtggatggggacctggaacttcagtccatcaacttctttggagtccaacctgctgaaaccaaatatccggccatgacaggacccccagtcttcaatccgtgtctgccatatgtgggggctctgcaggggggctttacagtccgaagaaccatcataatcaagggatatgtacttcctacagccaagacctttgccatcaacttcagggtgggatcttccgaagacatagctttacacataaacccccgcataggtgactgtttggttcgcaacagctatatgaatggctcttggggcactgaagagaggatggtggcctacaacccatttggccctgggcagttctttgatctgtcaatccgctgcggcatggatcgattcaaggtgtttgccaatggcattcaccttttcaacttctcccatcggttccaagctttacgaaagataaacacgctggagatcaatggtgacctcaccttgtcctacgtccacatctga

SEQ ID NO: 2131 - DNA, 390 bp, Mus musculus
cggccgcgcggccacccgcgccgcttccccctggcgtcccggccgaggcagcatcccagcctttaccctgtgggcccaacgtgaggagtgtgaggagcggcatgcggcgccccctggctggttcggtgtcttttgacctgctgttgactgctcccagggggccctgacgccctggggcacttttgctctgcacaggaccacgctggggtttgccatggtgacataaaggggtgtagaggaaggaaggagcaagaccagcctgtagactgtgcccctggctgggcaaaagggccaggggcccggagccttccctccactgccctcgaacgcctcacttcctaagtctctgcatttctcagtcagtggacagcttttgggactcttgtgtga

SEQ ID NO: 2132 - DNA, 953 bp, Mus musculus
gctgctttcaatcgtgtggcctttgggaaccccgcgtagccactgccgcctccttctgtcctcgccatgttcctcactcggtccgagtacgacaggggtgtgaatactttttctcctgaaggaagattatttcaagtggaatatgccattgaggctatcaagcttggttctacagccattggcatccagacctcagagggtgtatgtctagctgtggagaagagaattacctccccactaatggagcctagcagcattgagaagattgtagagatcgatgctcatataggttgtgccatgagtgggctaattgctgatgctaaaactttaattgataaagccagagtggagacacagaaccactggttcacctataatgagacaatgacagttgagagtgtgacccaggctgtgtccaatctggctctgcagtttggagaagaagatgcagatccaggtgctatgtctcgtccctttggagtagcattgttgtttggaggagttgatgagaaaggaccccaactgtttcacatggacccatctgggacctttgtacagtgtgatgctcgagcaattggctctgcttctgagggtgcccagagctccttgcaagaagtttaccataagtctatgactctgaaggaggccatcaagtcctcgctcatcatcctcaagcaagtcatggaggagaagctgaatgcaaccaacatcgagctagccacggtgcagcctggtcagaatttccacatgttcacaaaggaagaactggaggaggtgatcaaggacatttaagaaggagccgtcctcgaacttctgtgggacactttcagttctaattgcccttagactttatttccagctcttatgtcatggaaaatatccagtatatgtgtgtgtgtttttttatgaagtctgtacataacagcaattctgaaataaaaaaatttaaaaat

SEQ ID NO: 2133 - DNA, 1401 bp, Mus musculus
tgggaggactcaacggcaagaagaagatctaaagctcagaacagccttggcacagaggaggaacgagctgctctcttgcccaatgacacctagccttgagagctctggattgatccagatccagagacaggtgccttgactgtgactgcagtggctggaggagcttcctgtgatccgtgcttcctgcacccacaccctggaagtgtcaagctgcatttacatgaccgggagccattctctgcttcctgtagttccagaaagctggctcaccaaggcaacatctatgagaaagggcaaaccagccaaccggagcagtgtttctaaaagaccgaccttgcccgtcaggtttttattgaccgtctttgctttcttattcttgtgttcacttttcaccccaagttcactccaaagtgttgtggatgtacgtcttaaaatgaagctatttaattcacattgaacatataaaatagaacgaataatttcatgaaaccggttttgaaagatggccttcctctacactgaagtttgtactcgtcaaaaaggcaaaattcctgcctaccatataaaaactccagagcatttcttttttttttcttcaacatttttttttaattaggtattttcctcatttacattcccaatgctatcccaaaagtcccccatacctttccccccacgcccctacccacccactcccacttttggccctggcgttcccctgtactggggcatataaagtttgtatgtccaatgggcctctctttccagtgatggccgactaggccatcttctgctacatatgcagctagagtcaagagctccagggtactggttagttcataattttgttccacctatagggttgcagatcccttcagctccttgggtattttctctagctcctccattgggggccctgtgatccatccaatagttgactgtgagcatccacttatatgtttgctaggccccagtccagagcatttcttggctttcagtttttctaaaaatgttcgcatggcaggtccaagaaaaaacaatgcatgcacttgagtcctgtgacatttcctttcatgatcttggcttctacacattatttgcataacattgtttgtttctattcttagcatgtctttgttttagtctcattatttgtttgcttattgtgtttactacttttcgtactcttgggaaatgtgttccatcacgaggcagggccacacctgcctccgcccaggtaagcgagtcgtgtgctccacgttggagaaacactccaacttcacagaaaatccttgctgctacttgaagttagaatgtcaattttgtacctcctgattcatttccatattgtagtagctacatttccttttgaagagaataataaatgatttttgtctagct

SEQ ID NO: 2134 - DNA, 4279 bp, Mus musculus
gcttcgcggccgcccgccccactccggggccggagcccggtcggcgccccgccttctccggggagcgcccggcgggagcggcccggaccccgggctcgcgcgggagacgacgcgccacaaactttgccttttattgttcctagccctttaagggcaaggggctctgctgggcttggaaaaatgtccttcttcaatttccgtaagatcttcaagttggggagcgagaagaagaagaaacagtacgaacacgtgaagagagacctgaaccccgaagagttttgggagattattggagaactgggcgacggagccttcgggaaagtctataaggcccagaataaagagaccaatgttttagctgctgcaaaggtgattgacaccaaatctgaagaagagcttgaagattatatggttgagattgacatattagcatcttgtgatcacccaaacatcgtcaagcttctagatgccttctattacgagaacaacctttggatcctcattgaattctgtgcagggggagcagtggatgctgtgatgcttgaacttgagagaccattaactgaatcccaaatccaagtagtctgcaagcagacattagaggcattgaattacttacatgacaataaaatcatccaccgagatctaaaagctggcaatattctttttaccttagatggagacattaaattagcggattttggagtatcagctaaaaataccaggacaattcaaaggagggattcatttattggcacaccatattggatggctcctgaagtagtcatgtgtgagacatcaaaggacagaccttatgactacaaagctgatgtttggtccctgggtattactttaatagaaatggctgagatagagccacctcatcatgagttaaatccaatgcgcgtgctgctgaaaattgcaaaatctgagcccccaacattagcacagccatcaaaatggtcttcaaattttaaggactttctaaggaaatgcttggaaaagaatgtggatgcgcggtggaccacgtctcagctgttgcagcatccctttgttaccgttgattccaacaaaccagtccgagagttgattgctgaggcaaaggctgaagtaacagaagaagttgaagatggcaaggaagaagatgaggaggaggaagcagagaatgctctgccaatacctgcaaataaacgtgcctcctctgacctcagcattgccagctctgaagaagataaactttcacaaaatgcttgtattttggaatctgtgtcagaaagaacagaacaaagtacttctgaggataaatttagcaacaaaattcttaatgagaaacctacgactgacggtcctgagaaggctgtggatgagcatgcaagtgatgtgaacttagaaactggggctgaactaaatgaccaaacagtaggaatccatgagaatgggagagagaagaaaagacccaagctggaaaatctgccagatacacaagaccagcaaactgtggatgttaattcagtcagtgaagaaaatgagaataatagagtaactttagaaacgaacactgattgtctgaaaccagaggaagacagaaataaagaaaaccaagagacacttgagagtaaacttatacaatctgaagaaattaatgacacacatattcaaacaatggacttagtttctcaagagactggagaaaaagaagcagattttcaggcagttgacaatgaagttgggcttacaaaggaagaaacccaagagaaattaggaaaagatggtacagctcaaaaagttataaccagtgatagaagcagtgaggtggggacagacgaggctctagatgacactcagaaggctgctgagctcagtaaggcagcacagagtggggaaggggacgaagccctggtgcctacccagacactagcagagaagcccacagagggccctgaggccggtggggctgaggaagagcctcctggtggagagagagttgaggataaacagccagagcagcagcctgcagtgtgtgaagctgagggacagttaaccagcacgtcagagaccacacgggcaaccctggagcaaccagagacggatgaagttgagcaggtcagcgagtccaatagcattgaggagctagagagacttgtagttactggtgctgaggcacgggctctcgggagtgaaggtgaggcagctgctactgaggtagatttggagagaaaagaaaacgcacagaaagtgcccgttaaagcagagtcccaagctcctgcagcatcgcagcccagcgagcctcaccctgtcttaatacccagtattaatattaattctgaaaccacagaaaataaagaagaaatgggtgctttgccaaaacctgaaaccatactgccaccagagcctgaacatgaaaagggaaatgacaccgactcagggactgggtccactgtggagaatagcagtggtgacctgaacttgtccatctctagcttcctaagcaaagctaaggacagcggctcagtgtctctgcaggagacaagaagacagaagaaaacattgaagaaaacacgcaagtttattgtcgatggtgtagaagtgagtgtgacgacatcgaagatagttacagacagcgactccaaaacggaggaactgcgctttctcaggcgtcaggaacttcgggagctgaggcttcttcagaaggaggagcagcgagcccagcagcagctcaatgggaaactgcagcagcagcgggagcagatcttcaggcgctttgagcaggagatgctgagtaagaagcgacaatatgaccaagaaattgagaatttagagaagcagcagaaacagacaattgaacggctagaacaagagcacactaaccgcctgagagacgaagccaagcgcatcaaaggagagcaggagaaggagctgtccaagttccagaatgtgctgaaaaaccgcaagaaggaggttatgaatgaagtggagaaagcccccagagagctgaggagggagctcacgaagcgcaggaaagaggagcttgcgcagagccagcacgctcaggaacaagaatttgttcagaagcaacaacaagagttagatggttctctgaaaaagattatccagcagcagaaggcagagttggccaatattgagagagaatgcctgaataacaagcagcagctcatgagagctcgagaagccgcaatttgggagcttgaagagcgacatttacaagagaagcaccagctgcttaaacagcagcttaaagatcagtatttcatgcagagacatcagctgctaaaacgccatgagaaggaaacagaacaaatgcagcgctacaatcaacgacttattgaagaactgaaaaacagacagactcaggaacgagcgagactgcccaagattcaaagaagtgaagccaagacacgaatggccatgtttaaaaaaagtttgagaatcaactcaacagccacaccagaccaggaccgtgaaaaaattaaacagtttgctgcacaagaagaaaagagacagaaaaatgagagaatggctcagcatcaaaaacatgagagccaaatgcgggatcttcagttgcagtgtgaagccaatgttcgggaactgcaccagctgcagaatgaaaaatgccacctgttggttgaacatgagactcagaagctgaaggagttggatgaggagcacagccaagagctgaaggagtggagagagaagctgagacccaggaagaagacactggaagaagagtttgccaggaaactgcaggaacaggaagtgttctttaaaatgactggggagtccgaatgtcttaatccatcagcacagagccggatctctaaattctaccctattcccaccttacattccactgggtcatagcaacagcaagtgtcctcatctggatttggcttctaagtacatcattgtattctcttcatcttccacagtatgtatgactacaaagacaatcacctgcttcatcttcttggtggttttaaaaatttctttcttgaattttattgttaaacaaagatgaagggcagacgaactaagacagatgctcggccatgttggtgacgtagcatctcgtggtaattccctaaggtgattttgtatattgaccttaaatattgtattctttagacactgttattgaaaactgccagagacataatgtttaaagttatttggaaaatatatctgttacatcactaagtattaataaatattgttttacctgaaaaaaaaaaaaaaaaaaaaaaaaaaaaaaaaaaaa

SEQ ID NO: 2135 - DNA, 1809 bp, Mus musculus
gcacctccctggcggcctcagacactggcctcgttaagtgctcttgtcaaatgttggagcagatggcaccagggagagttatgtcctcagatctgcagagccttgcccagctgggtgtgggcagttactaagaaatccatctgagttcgaggtcagcctggtctacagagttagttccaggacagccaggactacacagagaaaccctgtcttgaagaaaaaagaaaaaaagaaaaggggtggctattttccagattggagagttgagtgtccttgcctcatttcagtattgcagttgaatgcagagaccttggtaacaatgtttaattaaagaaaaagaccatttgaaacatagttgtccgtggcaagccctggaggcacgtagtcccagagaagcaacgcaggctcccggcactgtgctgatgtttcccacaagtgttccctctgctccgtgagttacttgtgttaggtagtagggaaacttggctatgttcatgtgacgttctcgccagttaagtgaaataagactctactaaagcagccacgggagatttgaagcctaagccatcaccaccacagtaagaattgtgcacttaacctgagcttggtagaatagccacggtacagaaaatcctatgttttctcttagaccttctgtttttcctttagggagtctttgcctcactagtctgtttccttttcctaacagacattttctttggacacacgggccttttcagaaggtccagcgtaggctctgggtctcctggcctgtgcagagtgatggctggtctttctgtccacgtgtctgttagcgcgacactcgtccctgcacattgatgagtgggtatttaggataatgaatgtactcttatttaaaggagtctccttgctgagagtagatgagtactattactgtagtgtatgaagtattaggtgtgtgctgaaaatccattgccatttgttacaaatgacatttgtctttctgtgaaagagagatgccctaaagtgtgttgcacacaaacccctggatggcttgttgcagtgtcaccttgtctcgatgacaggtgatgctgaagagacactatggcagaccagccacccagtccttccgtcagttgttgcgtcagttcagtctaattttagtgtttggtgttgagtgttgaagcttgcactgctgtagaattgatggctgctctccgtcaggctgtgtggggtgtacacgtggacctggagcatgcatgtgtaaccatatgatcagtactgcagttcctgtagtctaacccatctgcatagtcagttggaaaaagaaatgtgctgttgtagtaacgtagaacaaaagctgctaaaacaatgtagagtggaccaggacccgagctgagcagcaggagcctctgttccctgcagcctgtggggcgggtccagccttctgaggtgcccttcaaagccatcatctgagagaagaaacggttcaggcgacatgagcaagtttctgggaaactttgtttgagagcatgctaaggtttatttaaaaccccaggaattgctctttccaggtgaaaaattctttttttgacctgaaggcagaggaaagagttccctgctaatgattccattcagctgatgaagtacttgattattagagagcagtgccactaagcagctttaagttgtccgtaatcattgtaaacatcagtgcagtaccttcaatatggtaaagatgttgtcttcagatgaatggctcatattttggtgcagtgtttgatgttcacaaaaaaatgttacaataataaactaacataaactggt

SEQ ID NO: 2136 - DNA, 1905 bp, Mus musculus
tggagggtccgcctggctatcattgagtacatgccgctgctcggctggccagctcgggtgtggagttctttgatgaaaaactcaattctttgtgtatggcctggcttgtggatcatgtctatgccattcgggaggcagccaccaacaacctcatgaagttagtccagaagttcggtacagagtgggcccagaataccattgtccctaaagtgttggtaatggcaaatgaccctaactacttacacagaatgaccacgctcttctgcattaatgcactgtctgaagcctgtggtaaggaaataaccactaagcaaatgttgcccatcgtgttgaaaatggcaggagaccaggtagcaaatgtccgcttcaatgtggccaaatcactgcagaaaattggaccgattctagacaccaacgccttgcagggggaagtgaagccggtgctgcagaaattgggtcaggacgaagacatggatgtcaaatattttgcacaggaagctataagtgttcttgccttggcataaagatgaacaggagggaaaagcctttactaaattcttatcacagatctctagtcaatgtgttcttgccctgggtggagaaaaatgggaaccttcaagatctcatccaagcaaatggcaacaacatagaagaaatcagatttcagtgacttgattctctctacacatgacctcagactgacttgacttctctctgttgggataactgtacgctcttcttctgcccagttgctgatgctcctcatacagtcatctcttgagtgtctcccagggtttctctccagcaacattgaggctgctgcctcctcccttttgaatcaggccccagccactcacgattccagacagacactggatggatttggatcccgacacggagtgaagtgatcccttattgtttacacatctctgtgttgcgctccatctctccaatgttagaagtaaatggttagaatactctatttatatctgcttgagctaatattgagatatgactgtagcgaagcccacatgctcctggtatcgatggtccgcatcagcatctcacatgaaggagatgtggaaggctaacgaatggctggtctgttcttcatttgctcagtttgactgtaatcatgtcatgcaggagctggaagtgggtgtatcttgctgctaatgtgtgatgttgaaagaaaacaatttcaacggctcagcactgtgactgccttcaaaaactcagaagaaactttagtgcctcctactaagttgtggttctactgtttcattgtgaagtgttgtgtttcaagtaagtgtaggaaccagtggccccaggctctgctcccagcactgttagtgagcattgtgctgttgcgataccgtgcagtaccaaactgaagcttccttgctcagtgttttcttgtggtgtgggtgatgctagaacttttttctacttttgcagtaaaatttcattaatatgtccagaaatttaaggtgacaggtcaagctgaagggtttgctgaagcaaattaattgtgtctatggaaggctgctggacactaattttaggaagtacccccttctcagtgggtgtgcctgtgaccagtgtccctgctctgtcataacccagcccttccaggagcagcgcacacatcacacttttcctgaatatccctgtgggtaatttaaatattttcatctgactccttgtctcgggtggactcaagttaatgaggctttactgcggcctgttttactcaatgcatcataccatgtagtttgatgtttccattttggtttctgaattgttgattttacttacaaatccttttagatataacaagccctgttctgttttgtgaaggcccaaagatacctacaaatctttgtacattaaacatgttacatg

SEQ ID NO: 2137 - DNA, 1598 bp, Mus musculus
actgttggcctactggagaagctgtctccagctcctggcagagttttctgtcgagacagaagccgacagcagaatggcacagaatttatcttgtgagaattggttggcaacagaggctatcttgaataagtactacctctctgcattttatgcaatcgagttcatttttggactgcttgggaatgtcactgtggtgtttggctacctcttctgcatgaagaactggaacagcagcaatgtctatctttttaacctttccatctctgactttgctttcctgtgcacccttcccatcctgataaagagttatgccaatgataaggggacctatggagatgttctctgtataagcaaccgatatgtgcttcacaccaacctctacaccagcatgctcttgctcactgtcattagcatggaccgatatctgctcatgaagtaccctttccgagaacactttctacaaaagaaggaatttgccattttaatctcgctggctgtctgggccttagtgaccttagaagttctacccatgctcactttcatcaattctgtcccaaaagaagagggcagtaactgcatcgactatgcaagttctggaaaccctgaacacaatctcatttacagcctctgcctgactttgttgggcttcctaattcctctctctgtgatgtgcttcttctactacaagatggtagtcttcttaaagaggaggagccagcagcaagcaactgccctgccactggacaaaccccaacgcctggtggtcctggcagttgtgatcttctctatactcttcacaccctatcatatcatgcgcaatttgaggatcgcctcacgcctggatagttggccacaaggatgtacacagaaggccatcaaatctatatacacactgacacggcctctggcctttctgaacagtgccatcaatcccatcttctacttcctcatgggagaccattacagagagatgctgattagtaagttcagacaatacttcaagtcccttacatccttcaggacatgagctgctggatgcaggtcttcactcagccaaaatgagacacttgataaacagtgctgtgcagttgagttttaactaagtaaaccaccatttctacgctttagctttccaccatcctccaacccccagggctggagtacaagctgggtccacatgaatcagaaggcagctctctgttctgattttaggttatacccagagtatggaaaaaataaggcatgagaaagcattgacatcttcacttaagaactgaacaaaagagaacaaatattgtcaatgtttggacacttaggatctgaaatcttggaaattttaagacctctttttctatcagtgtaaaaggaatacaagatagctagttgcaaatgctgaatgcatttcatcattggtcaggtcgataagcgtgtttctgaaatagtcttatttttattcttgtaatattaaaatttatgtgaaaaatgaatataattcaatgtacaacattagattttctatttgaaaattatatttcttgaaaaaataactgctgtgcctaaataaatcaatataattagttaaaaaaaaaaaaaaaaaa

SEQ ID NO: 2138 - DNA, 927 bp, Mus musculus
ggtgggactatccgaaacgctccggaccacaagcccgactccacccagcagggagggaaaggagacagattgggcagaatcccaggcctcaccaccagcagcggagttcgaagaaatgggcaacgtgcaggagcgcccatcagagaccattgaccgggaacggaaacggctggtagagacattgcaggctgactctgggctgctgctggatgcgctggtggcccggggcgtcctcactgggcccgagtacgaagccttggatgcgctgcccgatgcagagcgcagggtgcgccgcctactgctgttggtgcagagcaagggcgaggcagcctgccaggagctactgcgctgtgcccagcaaacagtgcgcatgccagacccggcctgggattggcagcacgtggggcccggctaccggaaccgcagctatgacccttcatgcccaggccactggacgccagaagcacccagttcagggaccacatgtcctgagctgccaagagcgtcagagcaagaggaggtcggaggtcctgagggctctgaggcactgcagcctcgaactccagaggagccagaactagaagctgaagctactgaaggggatgagccagacctggaacaagaaatgaatccagaacaagagccggagccggagcccgagccagaacccgaacccgagcccgagccggaacccgagcccgagccagaacccgagcccgagccggaacccgaacccgagcccgacttccaagaagaggatgaatctgaagattcctgaaggccagaatccttagctgtccaatcctatttgtgctggataagacctggaaacctgccagagcttgaccccatcgatgcaccgagacacctactgccaaatgaataaactcaggagggtcagtctgttcctgactctccacaagtccg

SEQ ID NO: 2139 - DNA, 335 bp, Mus musculus
taactcttttctattctgcgacacacacctgctcccctgcaactcaaccctacatattagacaccgctgagcaccccggagccatgattcaggaaactgcagcatgaatacaaatgcaccggtattttacatggagttcagccaagctccccagatacacagtaccctcagctccagggactagacgcttgttttgctagcaacagtggtgattttcacacgtaatttgtattcaccaggtatccctgattctctgtattctgccctaaactgggcacttaaaaatttgggggtactttggtaactgattaaaaatggcagttttctgaacttcc

SEQ ID NO: 2140 - DNA, 1633 bp, Mus musculus
ggcccccagaggttcatccattgatgttcagacctccaggtccggataggaggctgctacatgaagtcccaggcccctgttactcaagttcacagccagtgtggttgtatctgaatccctgccagcctctgggaccatgcttacctggagagggacattccaagtggacttttgacagcccagaggacaggagatgtccttactcacattgccaggtgctgccagcccaacctggctcggaagaggagctggaggagctgtgcgagcaggctgtgtgacgtgagctggtcagatgaagcttcgatggcgagtgtgctccagatggctcagggttccacctggccccggggtcccgctcctgggaggagcaggaccacagcaagcatctcctttcgccatgcttcctgggaccactggaaggagagtgctgatggcgagtgcaggcgggaggtgctatttcctgccccagctcccaagcttgtctgcagaacacacctacagtgcagaaagtcttgtgtccagccagccagccagccagccagtatccagtatgcatttgtggggtagactcctcaaggctgagtttttgacaggaagctataagtgaatatctagatgtaaaggtgctgctctttcctcaagccccgctgggtctccccctgctgggtctcctctgccccagcttcaagctcacacaagccagtgggttcactgaaggcgagatcacgtctcacctcctttcaaggcttcactgggggcaacttcagctatatcatttcctgtcttctacaaaagaagaaggagtttaggtgagccccagtcccaagagaggtctctctgtaccttctccctggctggtgctcagggaggagcggttcttccttcctgttcttacaccaatcttagcctgcaggcttggggagccaaggaatagaggtctgtcccagaggtggggactgttacagacctgcctgggatgaatcttttgattatcaaactccttgtcactcgggtaactcgagttcctctgaggtagagaccaggaatggaggggaatcaatactccaagctttcctccctccaagtccaaggcaggcagaaaggaagtctactaaactgcacctgggaagagggggaatgggatgaaggcagaggaggcacaactacaggagtcctctctgagaggttcttggagcagagatggagaatggcgacatgtaacctcgtgggtctgcagggcccggaggcccaccttcccagtgtaagccatacaaaccagcaacccaactgaaggtgtgcaagtgggaatggagcagaaagttggcccagggcagcttgtaccacgtgggtaagggctgatgggcctcctgtggctttgttccagcatcctgaccactgtcagcccctcaggcagtatccttgcctgcaatgtgaaggtgggggcaaaatggacatgggatcctccttgggaaccttctctcctcagagtcaatggggagactggcatccaggcacccacatgggtatttatatctgaaccagacagaaagatgcttgaatcaggcactatgttgaaaaaaatgtatttatttgctaatatatttatccataaatatgaaaaaaaaaaaaaaaa

SEQ ID NO: 2141 - DNA, 3019 bp, Mus musculus
ccgagtctgcgtcctgcagaagtcctgcatactttaccgcagtggacagaagatttcctctgagacttccagaatggcttctaaacacattgggtaagagctggcacctgcctgcgaggacttcatactctcagctccaccatcttcccatggcattttgactgcgctgagcccaaaggaccagctcttcacaatgagtgacgagaagaatctcggtgtgtctcaaaagttggtttcaccttcaagaagcacaagtagttgctcctccaagcaaggaagccggcaggacagctgggaagtcgtggaaggattgagaggggaaatgacttacacccaggagccgccagtgcagaaaggatttttgctgaaaaagaggaagtggcccttaaaaggctggcacaagagattcttctgcctggaaaagggaatcttgaaatatgccaagagccaagctgatattgagcgggagaagttgcatggctgcattgacgtggggctctctgtgatgtctgtgaagaagtcgtctaagtgtatcgacctagacacggaggagcacatctaccacctgaaggtgaagtcagaagaactctttgacgagtgggtgtccaagctccgtcaccacagaatgtaccggcagaatgagatcgccatgtttccccgggatgtcaatcactttttctcagggtcctctgtcacagattctgccccaggagtgttcgagtcagtttccagtaggaagcgtagcagtctatcaaagcagaattcatttccacccggaagcaatttgtcattttcttgtggtggcgacactcgagttcctttctggctacagtcttcagaggacatggaaaaatgttcaaaagacatggcacactgccatgcctacctgctggaaatgagccagctcttagaaagcatggacgtcctgcatcggacatactcggcgccagccatcaacgccatccaggtccctaagcctttttctggccctgtgagactgcactcctccaatcctaacttgtcgacgctggactttggagaagagaagtcttactcggatggttctgaagcctcgtcggagttctccaagatgcaggaggatctgtgccatgtcgcccacaaagtttacttcgctttaaggtcggctttcaatagcatatcggtggagagagagaaactgaagcagctgatggagctggacacctccccctccccctccgctcaggtcgtcgggctgaagcacgctctgtcatccgccctagcacaaaacacagatcttaaagaacgcttacgcagaatccatgcggaatctctgctcctcgacccgcccgctgttcccaagccgggggacaacctggcagaggaaaactccagggatgagggccgagccctggtgcaccagctctccaatgagagcaggctgtctatcaccgactccctttctgagttcttcgatgcccaggaagttctgctgtctcctagctcttcagaaaacgagatttctgatgatgattcatacgtcagtgacataagtgataatctgtccttagacaacctcagtaatgatttagacaatgaaagacagaccttggggcctgttctcgagagtagtggggaagccagatccaaaaggaggaccagcttgccggcaccgggtcccaacaccagtagcgttagcttgtggagcatcctgcgcaacaacattgggaaggacctgtccaaggtggccatgccggtggagctgaacgagcccctgaacacgctgcagcggctctgcgaggagctggaatacagcgagcttctggacaaggcctcgagaatccccagtcccctggagaggatggtgtacgtagcagccttcgccatctccgcatatgcatccagctacttccgagcaggcagcaagccgtttaacccggtccttggagaaacgtacgaatgcatccgacaggacaagggtttccagttttttgccgagcaggtcagccaccacccacctatctccgcctgccacgctgagtccggaaactttgttttctggcaagatgtgagatggaaaaataaattctggggtaaatccatggaaattgtcccgattggcacaacccacgtgactctgcctgcttttggagatcactttgagtggaacaaagtaacctcctgcatccacaacatcttgagcggacagcgatggatcgagcactatggcgaaattgacatcaagaacctgaatgacgactcctgccactgcaaagtgaacttcataaaggctaagtactggagcactaatgcccacgagatcgaaggcacggtgttcgaccgcagtgggaaggctgtgcaccggctgtttgggaaatggcacgagagcatctactgtggcggcgcctcctcttccacatgcgtctggagagcaaatcccatgccgaaaggctatgagcagtattatggcttcacacagtttgcactagagttaaatgaaatggatcctttgtcaaggtctttattaccacccaccgacactcggtttagaccagatcaaaggcttctagaggaaggggacatagaggaggctgaggttcagaagcagaggatcgagaagctgcagagagagcggcggagggtcttggaggagaacggtgtggagcaccagccccggtttttcaggaaatccagtgacgatgcttgggtaagcaatgggacctacctggaactgaggaaagaccttggcttttccaagttggaccatcccgtcttatggtgaaatgtaaaagagaaggagatttcctgtaactttgcccacatttgcttccggaagcagcgcacagctgtctgtatgtttaaaagatagcatctagaatgatcacttgtgcttagcgtagcattgtaagcgctgaagtatatattttcttcagtaagtctctttaaaatttcaagtgttatcatgattgtttatatgaatgtagaacacctcggtatttctttttatatatataaactatttaataaaaatgaaagattg

SEQ ID NO: 2142 - DNA, 1564 bp, Mus musculus
gagggtcgccatggcggaggtgcagcaactccgagtgcaggaggctgtggacgccatggtgaaaagtgtggagagagagaacatccggaagatgcagggcctcatgttccggtgcagcgccaactgctgtgaagacacccaagcatctatgcagcaggtgcaccaatgcatcgagcgctgccatgcgcctctggctcaagcccaggctctggtcaccagcgagctggaaaggttccaggaccgcctggcccgctgcaccatgcattgcaatgacaaagccaaagactcaatggatgcaggaactaaggagcttcaggtgaagcgacagctagacagctgtgtgaccaagtgtgtggatgaccacatgcacctcatcccaacaatgaccaagaagatgaaggagtctctgtcatccatagggaaataaaattgtttgccagtgaccatcgggactgcgggcaggctatttaaaaggaagaatggaagtttaatatgttaagcaacgtttacgaatgaggaaaacttagacacagcaagttccaggcaaatgctgctcactgctggacactagtccctttacattcggatcttagaaggtgaagtaggaagaagctggtgctaagatttggatcacagatagctcagaggagaagtctagatcctaaatattcatatgcaagtgtctgtactgtagtagagatcaaccttgtaccaagagctgagcttcttactacaaacatccaggctggcagctctcttcaacctgctggtaaaatctgaggatcggtgcatctcctcagagaagcttgacaaatcctgttgaccagaagtatcatcacaccaccttgcatatgctgggaaacaaaacccagtaggctaggaattcagaggaaaggatttccttttcaaatctatattttgcttagttttgtcttatatgcagggcacactggatttatgatacaggagggaaagtggtttgagtcacttctaaaggttcctagtattatgtaccgtcaagatgggaatgtccatttcttcaaattctgttactctagaagcccctgaagaatccggacagtgtcacacagtgaacatgggaaacagccttctttactgacttgtgcagcaaagtgacacatccttatgaaaagcaagggggtaggctgtcactcacatgccagtcgctaagaataagcagtaactaggaattattgagaagtgcaaacccagtattaatcagctctgaatctacagagccttatagcaacaagaaagccagaaactgagcaacttgggccacagatgggtaggaccactgtagaacaagagaggcacacactttcttgccaaatgccatttttgcctgggtggtttttattttttattttctttgcagtgcagtgttgctggcccaacatagcaccttatcttttggataagtactatgttgtatttataccaattaattacttgaaacagtgatacatctgtctttttgctgtgtcaagcctgcaatatattttccaagtggtttgtttttaaataaagtttcattgtctcc

SEQ ID NO: 2143 - DNA, 453 bp, Mus musculus
gcactaagcaatggattcccatcagccaaggaaaaaaaatgatgctgatgaattttaaagttcatgtagtcggagatgtcctgatgcctgccacaatgaacttgactgatacaacccaacaagcagatgcttggtgtctggcctgaagcattgtttagcgggatgagagattatagggctctttacaagtgatcacctaccatgtatgtgggtaaaggttgactacacaaccaccgttctgtaaaaatgtgttaatcacaagaaacataccacaaaccatcagaaagatttggcctagatgtcctggagatattggcacaacaaacaagcaaacaaaactccaaaacaaaagaaattcacaaacaaacaacaagaccaatggcatgtttcagtccgttgactttttaccagacaagaaataaaaactcttcctggcaaaaaaaaaaaaaaaag

SEQ ID NO: 2144 - DNA, 533 bp, Mus musculus
tttcctacagaattcttcttaataggagagtagcagagggctggctgggtcttaggacaatccatctttactagatgtcccttgcccttcaggtagagctaggcttcgccttcaaggccacagtatacgctgtggcttgaggttgctgctatcagaaaggcaggaaaaacagggtagggtgtgaggtctcaggagggctgttgggggtacccagtgaggctcaagcaggagtgtagagggaagaggaggctgagggcatgagggaaatgtgagggcaggtgggagggggggcgtcggctatagcaggaggggacccacgctatgtcattctgaggtctaactggactaaccaaccaatatgtaaactggaggaaaaggctgggcctgcacagggcaagccctctaggactccatgagccaagagagaccagttggtattgttccacagaggcagagaacccataggagatggcagtcatttgtatcatcttgttccccgcctctacttttttgggaaataaaaaaaaaaaagt

SEQ ID NO: 2145 - DNA, 2416 bp, Mus musculus
gctgtttatgcaaatgcttcattccctgaaacattctccgggaatggtcaccccctccactgccacaatccttccctcccctgtatgcctactccctccttcaacttacagtgcctgaagactctgtcaggagagctgaggacccaaaacaaactggccttgagacatgtggctctttgccctcctggtgaccctgttctatggggtggaaggctccatttacctccctcagaagctctatggagaggtgacctcccctctgtatcccaagccttaccccagtgacttggagacaaccactgtgatcactgtccccatggggtacagggtgaagctggtcttctggcagtttgacgtggagccttctgaaggctgcttctatgactatgttaagatttctgctgataagcaaacactggggaggttctgtgggcagctggattctcccctgggcaaccccccaggaaggaaggaattcatgtcccaaggaaacaagatgctgctgaccttccacacagacttctccaatgaggagaatgggaccatcatgttctacaagggcttcctggcctactaccaggctgtagaccttgatgaatgtgcatcgcagcccaactcagtggaagagggtttgcagccccgatgccaacatctgtgtcacaactatgttggaggctacttctgttcctgccatcctggctatgagcttcagaaagatgggcaatcctgccaggctgagtgcagcagtgagctctacacagagccctcaggctatgtctccagccttgaataccctcagccctatccaccggatctacgctgcaactacagcatccgggtggagaggggcctcactgtgcacctcaagttcctggatccttttgaaattgatgaccaccagcaagtgcactgcccctatgaccagctccagatctacgctaatgggaagaacttgggtgaattctgtggaaagcaaaggcctccagaccttgacaccagcagcaatgcagtggatctgctgttcttcacagatgagtcaggggacagccgaggctggaagctgcactacaccactgaaaccatcaagtgcccccagcccaaggctctggatgagttcaccatcatccaggatccgcagcctcagtaccagttccgggattacttcattgtcacctgcaagcaaggctaccagctcatggagggaaatcaggcgctactctccttcacagctgtttgccagaatgatggcacatggcatcgtgccatgcccaggtgcaagatcaagaactgtgggcagccccaaagcctgtctaatggggacttccgctacatcaccacaaaaggcgtgaccacctatgaagccagtatccagtatcactgccatgaaccatattacaagatgctgaccagagctggcagcagcgagtccatgcgagggatatatacctgcacagcccaaggcatttggaagaatgaagaggaaggagagaaaatgccccggtgtctgccagtgtgtgggaaacctgtcaaccctgtgacacagaaggagcgcatcatcagagggcagccagccaggcccggcaacttcccctggcaggccttcaccactacccacgggcgagggggtggggccctgcttggagaccgctggatcctcacagcagcccacaccatctaccccaagcatcacaacaaggaaaacgacaatgccaaccccaaaatgcttgttttcctgggccacacaaatgtggaacagatcaaaaaactgggacatcacccagtccgtagggtcatcatacacccagactaccgccaagatgaacctaacaattttgaaggagacattgctctactggagctggaaaacagtgtcacactgggccccgaactcctccccatctgtctcccagacaatgagaccttctatggccaaggcctcatgggttatgtcagcggattcgggataacagaagataagttagctttcgatctcaggttcgtcagactgcctgtagctgacagtgaggcatgccagagatggctccagacaaaaaaggatacttctccattttctcaaaatatgttctgttctggggacccagctgtacagcaagacgcctgccaaggggacagtgggggtgtttttgcagtcagggacagaaatcgtgatatttgggtggctacgggcatcgtatcctggggcattgggtgtggtgagggatatggcttctacaccaaggtactgaattatgttgactggatcaagaaagagatgggagacgaaaactgaacccagtgttcactgggtcagaatccagggtatagtgtattaaaaaaaatgtatctgaccaattgttgataagcactatgattctcatataaaaatcaaagatgcagaacgcgtatagaataaact

SEQ ID NO: 2146 - DNA, 2289 bp, Mus musculus
ggcgggtgccatcatggcggacgcggccagtcaggtgctcctgggctccggtctcaccatcctgtcccagccgctcatgtacgtgaaagtgctcatccaggtgggatatgagcctcttcctccaacaataggacgaaatatttttgggcgacaagtatgtcagcttcctggcctcttttgctatgctcagcacattgcaagcatcgatgggaggcgtgggttgttcacaggcttgactccaagactgtgttcaggagtccttggaactgtggtccatgggaaagtcttacagtattaccaggagtctgagaaacctgaggagttaggatctgtaactgtacaaaaagaatattcatcctcctttgaccgagttatcaaagagacaactcgagagatgattgctcgttctgctgctaccctcattacacatcccttccacgtgatcactctgaggtccatggtacagtttattggcagagagtctaagtactgtggactgtgtgactccatagtaaccatctaccgggaagaaggcatcgtaggattttttgcgggtctcattcctcgcctcctaggtgacatcatttctttgtggctgtgtaactcactggcctatctcatcaatacctatgcactggacagtggggtttctaccatgaatgaaatgaaaagttactcccaagctgtcacaggattctttgccagtatgttgacatatccctttgtgcttgtatctaatcttatggccgtcaacaactgtgggcttgctggtggatctcctccttattccccaatatacacttcttggatagattgctggtgcatgctacaaaaagcgggaaatatgagccgaggaaacagcttgtttttccggaaggttccttgtgggaagacttactgttatgacctaagaatgttaatctgaagatgtggggcagggacagtgacatttctatagtcccaatgcacagaattatgggagagaatgttgatttctatacagtgtggcacgcttttttaataatcatttaatcttgggaaaatggaggtgattggtgtctgccttttttgttctttgtcctagcacaacatcttttaccactggggttccccattagttatttgaagtgagacatttatttctccaaattcttgttttaaacagaaaacagacacatttccctaaaggaacaagcaggttttcatgtagatttgagtctcaggttagggctttgtcaaatgaagaatagaaccccaataagaagcagctaattctataagttgataaaattaagaaagcataccatgtgggagtttatgaatgacctgagtagacagatgctagaaagtcagcagcaaccactagtctacctcccaccatgcttccaagcagccgacccatcttacctttcagtgctgctgagttactgtagatttctgccttctgttcctacagaagggaaaggcatcaccaccaccaagaagaaggtcaggtacagaggcttaaggaagctttgggaaggaagggagtatgatggcctttcactccaaagaagctcctagcctcgtgtagcacgagaagcaagcactgcagcacacacagcagcaccccgagtgctcagtgcccacagcctccaaggtctggcctcaccgcggctcccattgcctataagcttctgctcctaagcgtttgtttccttcttgttactgcagaaggtgagtagtttgggtcttatttctgatgacacccttgaaagtgtaactccttatctgatgacgtggaccaaagtccacatggttcttaggatattgtccagctcaaatgtcagaccctcagttaggcatgtaaaaaacacttaatgaaggcaaaatcactttagaaggaaaattttcaactcaagcattgagctccttcctattcactcaggcctttcaatggcagttaaaatgctcataagatgagaaagccctgtggtgtcgattcctgatactttgccaaatgagtaagcactgactttgctgcttttagacttctgtcaatgcagcagaggccatgatgttaggtagtgtgagcgcgcagggtcttctcccactcagggttagggatgcgaccagaagctcatgagtagcttagtttgaaatgtctttgatgtcaaaagtactttgtctcaaaagtaatgtaaattttatattctattcattattatctgcatctgttttaatataaaatgtgttttgcattacctactcttttctcccagaaaaaaagtcaagtaaagatgatgtagg

SEQ ID NO: 2147 - DNA, 560 bp, Mus musculus
cggccgcaggctccgcccgtccgccccgcccggcttgggagagcgaaatgtcatcgggggaatcacaccaggagcagctgtctcagtcagatccgtccccatccccgaactcttgtagttccttcgaactcatagacatggacgccagtagttcctatgaacccgtttctccacattggttttattgtaaggtactagattccaaggagctctggattcctttcaactctgaggattcacagcagctggaagacgcatatggctctggaaaagattgtaatgagaggattgttcccaccgatgggggcagatatgatgttcatttaggggagcggatgcggtatgctgtgtactgggacgagctgccatcggaagtgagacggtgtacgtggttttacaagggagacaaagacaataagtatgtcccctactcggagagcttcagccaagtcttggaggatacgtacatgcttgcagtaactctggatgaatggaaaaaaaaaatagaatctccaaacagagaaattattgtattacacaacccaaagctcatggtgcat

SEQ ID NO: 2148 - DNA, 1244 bp, Mus musculus
gatcggcctccttcccgccctggccttgctgctgcttctcctttagccactcgggggagggaggaggggagcgcgctggcttcaggcgccctgcgatcgacttctaacttttgcatcgcccgttttgtctttctctctctctctccagaccatggtgaatccgggcagcagctcgcagccgcccccggtgacggccggctccctctcctggaagcgctgcgcaggctgcgggggcaagatcgcggaccgctttctgctctatgccatggacagctactggcatagccgctgcctcaagtgctcctgctgccaggcgcagctgggcgacattggcacgtcctgttacaccaagagcggcatgatcctttgcagaaatgactacattaggttatttgggaatagcggtgcttgcagtgcctgtggacagtcgattcctgcaagtgagctcgtcatgagggcccaaggcaacgtgtatcatctcaagtgtttcacatgttctacctgccggaatcgcctggtcccgggagatcggtttcactacatcaatggcagtttattttgtgaacatgatagacccacagccctcatcaatggccatttgaattcacttcagagcaatccactactgccagaccagaaggtctgctgagaggtcagagtaatgcagaatgcgtgccttcatctcagaattgctcatcccaggtggatcccatgtgtctgcagtagaccagtcacctttgtagccagcaccatgccatcgcgccccctttagtcttgagtacccttcctgcatttattggtgtattaaaatgactgaatatgaacattaaggactccatgaacctgggctaatgggagatggtagcgaggatgaaaaaagatccaccgaaggacatctaggggggagggtgcttgggggggggagggaaatgactaatgaagctaattaaacgaagcatcaccaatctgctttctaccctcattaacaattagcagggccccggccagagtgtgagccctgttttactttaacaacattctgtttgctctttgtatatttaagtgttgtaatgaaatgtgtttcaatcaacctgaacatgagttaaaaggaaagagatgtggcttttgtgataattctatcacaaacacttttattgtatctctgtaaaatacaatgtatgtatgcatgtgagtgttcttgtcctgatgttgctccgcccatgacaaaggttaaaaaaaaaaaa

SEQ ID NO: 2149 - DNA, 1147 bp, Mus musculus
ggacccgaagctggcactgccaccttctttcagcttcctaggccaccactcagcacttagagtaataaggggccctggacctgcgttagaagcccgtgctctaaagcctgcactcctttacttgtgggctctcacgtgcttctgtggagttgtgtactgggcaccacgcagctgcacatctaaaaaggaagaaaccagaaactgaaaaagaatagaccagcacattgctacacaaaagtaaagagttcaaatctccactggtcagttgggatcgtttctctctctaaccagggctttctccagaggtccagttagtgctgccagctctgcgtgcacaccctcctcgggatgcctccactctcactcactgaactaggacagctgcttcatgtgccagcaccgtgagcccatctgccccagcatgggctgtaaagttggggggaaagcaccctagcagcagcgtctcctcacctgtccccgccgcagtgagaaagaagcgctttaagctgctgttatgacctagcagaagaacaaatgcacagttcatgtctggagtgatggtgagaccttggtttgaatcacaaagaaggcagtggcttctcaaaagtgtaaaggggcagttgcctggggtcctgggagtcctgttctctgacactgtcacctgacttaagtggcccttggggcagattatttcagaacaggatttttgaaagtctgggcttcatatttgctgaggagaaagcctttggctagtggcattgaccagtcatctggattccaaccatgtaatgcagtcatggaggcctgggagagagaggctcctgagtgcctgttgagagccacacctcagcagcagcagcagcccatcactctgactcaccctcatgcagttgatagtgcagatgaggcctcgtggggatgtggggtacccccgcacctccctggcggcctcagacactggcctcgttaagtgctcttgtcaaatgttggagcagatggcaccagggagagttatgtcctcagatctgcagagccttgcccagctgggtgtgggcagttactaagaaatccatctgagttcgaggtcagcctggtctacagagttagttccaggacagccaggactacacagagaaaccctgtcttg

SEQ ID NO: 2150 - DNA, 323 bp, Mus musculus
cctccttccagcttctatgcctggccacagaggaatccttgggaggctacttgctcatctcacaccatgcctgggccatcccttcctcacctctggagcagcagctggcaggcacatctgccatttgtcctggaattgtcacggtcccttggtgtcagcagcagtaacttggtgccaaggccaagagagaacagcccctggtttgcgtctgtgtccccaagagagaggctgaaggactttctccacctggtcctggcacttccctccctgctttcccgaaggctcctatggcccctgtgggcacaatgaaaatgtttacaccg

SEQ ID NO: 2151 - DNA, 730 bp, Mus musculus
gaagttcgcagcgcccgggaggagagaagacgggcggcgtgccatggcggtcgcgctcccggaggtggtggaagagctcctgagcgagatggccgccgctgtgcgagacagcgcgagaattcccgacgagcttctcttatcgctggagtttgtgtttgggtcatcggccatccaggccttggacctagtcgatcgagagtccgtcactttaatctcatcacccagtggaaggcgtgtttaccaggtgctagggagttctggcaaaacatatacatgtctggcttcctgtcattactgctcgtgcccagcattctccttctcagtgttacggaagagtgacagcctgctgtgtaagcatcttctggcaatttaccttagtcagcttctgaggaactgccagcagctccatgtgtctgacaagcaactgacagacctattgatggaggacacaagaaggataaaaggtgcggctggaacatggacttcaaagacagaagcctagcaggaaacgcattcacatctcacggtgcccgaggtggaggaatgggatgcacttccagacttgtgactgtcacttcaccctcacaggctaggctgcagagggtctgtgtggttaagagccctctatggtcttaatattagccagcctctgagccctgcaggtagaaatgtcccttgggagaattaagtattgttgactcaaataaagcctgagccatgttgtattctc

SEQ ID NO: 2152 - DNA, 2690 bp, Mus musculus
ggccactagtgacctccgatacccagggcaggaggcacaggaggggagaaaaaaaatcctttgcagcgtcccaggttacagagggaggaacattcattgacttgaagggtgcagcggtcatgtgcgagctctatagcaagcaggacaccctggcgctgagggagaggcacatcgggccctcgtgcaaaattttctttgccgcggatcccatcaaaataatgcgagcccaggggcagtacatgtttgatgagaaaggcgaacggtacttagactgcatcaacaacgtggcgcatgtgggacactgtcacccagaagtggtcaaagctgccgcgaaacagatggaattactaaatacaaattctcgcttcctccacgacaacatcattgagtttgccaagcgccttactgccaccctgcctcaggagctctccgtttgctacttcacaaactccggatccgaagccaatgacttagccttacgtctggcacggcagttccgaggccaccaggatgtgatcacccttgaccatgcttaccacggccacctgtcgtcattaattgagatcagtccttataagtttcagaagggcaaagatgtcaagagggaaactgtacatgtggcaccagctccagacacttacagagggaaatacagagaggaccacgaagacccatccactgcatatgccgacgaggtgaagaagatcattgaagaggctcacagcagcggaaggaagattgctgcctttattgctgaatccatgcagagttgtggtggacaaattattcctccagcaggctacttccagaaagtggctgaacacattcacaaagcaggaggtgtgttcattgctgacgaagttcaagtaggctttggcagagttgggaggtacttctggagcttccagatgtatggtgaagacttcgttccagacatcgtcaccatggggaaacctatgggcgacggtcacccgatatcctgtgtggtgacaaccaaagaaattgcagaagccttcagcagctcgggcatggaatatttcaatacgtatggaggaaatccagtgtcttgtgcagttggcttggctgtgctggatgtaattgaaaaggagaaccttcaagggaatgctgtcagagtggggacctatctcatggagctgctgagtgaacagaaggctaagcatcccttgataggggacatcagaggtgtcggcctttttatcggcatcgatttggtgaaggaccgtgagaaaagaacacctgcgacagctgaagcacagcacatcatctacgagatgaaaggaaagggggtacttctcagtgccgatggccctcacaggaacgtgctgaaaataaaaccacccatgtgcttcacggaagacgatgcaaagttcctggtggaccaccttgacggcattttaacagttttagaagaagccatggactccaagagtggaactgtgttctctgagaacacagcttacagaacaaagatgcctaaggaaatacaagtggaattgcccaaccttagtgccaccgaggccagagaaatccccaggggaaagagaaatggtgtatgctcagaccagcaagccctgctcagcaaaagactcaagacatgagagctgagtgctaaacagtggataaatatccaggaacacagtgtgcaagtggatgcatctcatctcttagtgatcctttaaattgcaattttcaatctgtctaacttgtacattaaaagatagattaataatatcaatgatcaaagtgataaactatgtcaacattattgattgagcctcttgtctgataattcattgcctgtaattctaaagttatttattctactaaaactgagttttcctttgcaagactaagctgggtgccttgcttctcacattgccatgtttgaaattagagaaaaagtgaagtctatttcttcacgtcagagagttagtatactgaagtatttttaatcacaagaaatgctctaaaacggttgatataaaaactttatttctagattttaataaaataaaagacgatctaacaaaaatgaagactataaaatgtagagagctctgtaggttatggtggtgaaatctaaatcgttctgaaaggaaatcacagagctgagaggaaaatggcaaagaagagcggttggtaagaaacctggttatttgccatgttgtgggaactggaagggaacacatacacagagacccttgcgtgaggaagttcctagagtgacagaagcagccaaagcccagcattcagggttggggactttgattctggctactcacaggctatgccaccttgaccaagttgctcacctatcaggtaaaaatggcccctcctccgaacaccttattttccccaacttcattatcacctgcatcccactgtcctaaattaccttcgtctgacctgtatctctctattgccttcctactagttattaaacttgctggtttgtttttattccgtaaagaagagacagcaacttttctatgcctgtttactgttaactgagtgagatgtctcctttggagtatgagcctgttctttggataatggtaattcagggaacttcttgtctgtggttaacacatgtggaaagccttggattgtggtcctgaaagtctgttcaaaagacaaaaaaaataaaaaaataaaaacaaggcaaactg

SEQ ID NO: 2153 - DNA, 1275 bp, Mus musculus
ggaggaggaagccggagagcgcgctttgctctgagcggcccgagagcggctgagcagggtgtgtggggcgtcacgccgatggctccggctgtggaccgcaaaggctattggggccccacgacctccacattggactggtgtgaggagaactatgtggtgaccttgttcgtcgctgagttctggaatacagtgagtaacctgattatgatcatacctccaatttttggtgcaattcaaggcattagagacagactggagaagcggtacattgctgcttacttagcactcacagtggtaggaatgggatcctggtgtttccacatgactctgaaatatgaaatgcagctgttggatgagctccccatgatttacagctgctgcatatttgtatactgcatgtttgagtttttcaagacaaagagctcaataaactaccatcttctttttaccctatttctatacagtttaacagtaactacgatttacctaaaagtcaaagaacctatattccatcaggtcatgtatggaatgttggtctttacattagtacttcgttctatttatattgttacatgggtttatccatggcttagaggactaggttatacatccttaactgtctttttattggggtttttattgtggaatatagataacatcttttgtgattcactgaggaactttcgaaagagagtgccccccgtcctaggtgttacaacacagtttcatgcatggtggcatattctaactggcctgggttcttatcttcacatccttttcagtttatatacaagaacactttacctgaggtacaggccaaaagtgaagtttctctttggaatctggccagcagtcatgtttgaacctcagaggaagcactgatgaattattctaccaagaaaataaaaaacacctactgtatgtagttctgccaagatggtcaagaaccccccaaagacttgtacatttgaagacaccatgcccatcacaagagatgaatgactcagcctgaatgacccagccatagagaatgggcaattggcctgttgggtatttagctcctggctttatctcgtttgccctggacctaagatgcttagagaaaaacagaaagtgtatatttatattctagaatggtggagaatttgggcttttcttaacaggttaacagtttgtgctggtcattcatggaaaattaatatttttttctttttttacaagagttgcatgttaattgtatctttattaatttttaattaaatattgaacaaagtc

SEQ ID NO: 2154 - DNA, 1700 bp, Mus musculus
tcggagtcatgtagccggctactgtcgcggtgccggcgcgtctgcagcggagctagatgcaggcggtacctgggacatgtcctcgctcggggaccagcgtcccgcggcaggggagcagccgggagctagactgcacgtgcgggcgacaggaggcgcgctgctactttgcctgctggcggtgctgctaggctgggtttggctgcggcggcaacgcgcctgcggcatccctccggggcccaagcctcggccactcgtgggtaacttcgggcacttgctggtgccgcgctttctacgaccgcagttctggctgggctcgggcagccagacggacacggtgggccagcatgtgtacctggccaggatggcccgtgtctatggcaacatcttcagcttcttcatcggccaccgtctggtggtggtcctcagcgacttccacagcgtgcgcgaggcgctagtgcagcaggctgaagtgttcagtgaccgcccgcggatgccgctcatctccatcatgaccaaggagaagggaatcgtgtttgcacactatggtccaatttggaaacagcagaggagattctcccactcgacgcttcgtcatttcggtctgggcaagctcagcctggagcccaggatcatcgaggagtttgcatacgtgaaagaagccatgcagaagcacggggaggcccccttcagccccttcccaatcatcagcaatgccgtctccaacatcatctgctccctgtgcttcggccagcgcttcgattacaccaacaaggagtttaaaaaggtgttggatttcatgtcccgggggttggaaatctgcctgcacagccagctcttcctgatcaacatatgcccctggttttactacctcccctttggtccatttaaggagctaaggcaaatcgaaagggacatatcctgcttcctgaaaaacatcatccgagagcatcaagagtctctggatgccagcaaccctcaggacttcatagacatgtaccttctgcacatggaggaagagcagggagccagcaggcgcagcagcttcgacgaggactacctgttctacatcattggggacctcttcatcgccggcactgacaccacgaccaactctctgctctggtgcctgctgtacatgtcactgaaccccgacgtgcaaaaaaaggttcatgaagaaattgaaagggtcattggctgtgaccgtgcaccttccctcacggacaaggcccagatgccatacacagaggccaccatcatggaggtgcagcggctgtccatggtggtgccgctcgccattcctcacatgacctcggagaaaacagtcctccaagggttcaccattcccaaaggcacagtggtcctaatcaacctgtggtcagtacacagagacccagccatttgggagaagccagacgacttctgtcctcatcgatttttggatgaccaaggacaacttttgaaaagagaaacttttattccttttgggataggtcagttaaagcttggttttaatttgtttttcactttatcattggtgtgtgtgtgtgtgtgtgtgtgtgtgtgtgtatacaggcatgtttgaaatgtgtatgtgtgagtgtaggtaccgggttcagaggacaatgtcaaggaatcagttcttgctactgagttgccttgctgacccaacctttttgtttgtttgtttgtttcaaataaat

SEQ ID NO: 2155 - DNA, 785 bp, Mus musculus
ccaagagggaaatgggaggtgaaacaaaaggaagagggcctccgggaagaaaattagggactgtctatgatatcgagggatttttgcaaagacagtgaggattgtgattacagatagagccccaagcagttggcttttctaacagtcttctgtgtcccttagtgaaggcaggtttgcagtgaagaggataaacacaaacccctggctgcttctgaggtctagcaatgcttggatttgtcgaaagaatggagctttctctgttgggaaatgggcacaaagacacaaacccggggcttaacccgctagacaatgcatggaatgtgaacacaagttaattatttcaaaatgtgtatcagatgttatttaaatgataatatattcaatgattttttttcataatttatcgaagcctgtgagatgcactggatttcctttgtcacatagttttgatttttgcagccttctgcattgcacacgtgaactggaccttagggcaagctgcttgagagagttctcgactacatttttaaacagtgttctgtgaaggcctgtgagtgtcatgataaaactgtgaatgactacatagggactctgattagactattggttaggctcctgtggtttgtataggtctccaattcctacttactttgatgtattccacaaaacccaccctgggtttttgtctcccccccctctctctttctctctttttttatctgattctttcctctctacttacttaagttgccactaaaataaatgtgccttttgaagcaatgccc

SEQ ID NO: 2156 - DNA, 2113 bp, Mus musculus
cggctcactgcctgcctgcggccagctctgtacaaggaacaatggctctgagaacaggaagcccagccctggtggtgcttctggctttctgggtggcactgggcccctgttacctgcaggggacagatcctggagcatcagcagatgccgagggcccccagtgccctgtcacctgtacctgcagctatgatgactacacagatgagctcagcgtcttttgcagttcaaggaacctcactcagctgcccgatagcatcccagtcagcaccagggctctgtggcttgacggaaacaacctgtcctccatcccctcagcggccttccagaacctgtccagcctagacttcctcaacctgcagggcagctggctgaggagcctggagccacaggcactgctgggcctgcagaatctctaccatctgcacctggaacggaacctgctccggagcctagctgcaggcttgttcagacacacaccaagtctggcttcactcagtttgggcaacaacctcctgggccggctggaagaagggctgttccggggcctcagtcacctttgggacctcaacctgggttggaacagcctagtggtcctgcctgacacggtgttccagggcctgggcaacctccatgagctggtgcttgctggcaacaaactgacttacctgcagcctgcgctcttgtgtggcttgggcgagctgcgggagctggacctgagcaggaacgctctccgcagcgtcaaagctaatgtctttatacatctgccccggctgcagaagctctacctggaccgcaacctcatcacagctgtggccccccgtgccttcctgggcatgaaggcactgcgttggctggacctgtcacacaaccgtgtggctggcctcctggaggacaccttccctggcctgctgggtctgcatgtcctgcgcctggcacacaacgccatcactagcttgcggccgcgtactttcaaagatctacacttcctggaggaactgcagctcggccacaatcgtatcaggcagttaggtgagaagacgtttgagggcctggggcagctggaggtactgacgctcaatgacaatcagatccatgaggtcaaggtgggcgccttctttggcctcttcaacgtggctgttatgaatctctccggcaactgtctgaggagcctccccgagcatgtgttccaagggctgggcaggctgcacagcttgcacctggagcacagctgcctgggccgcatccgcctgcacactttcgccggcctctcagggctgcgcaggctcttcctccgggacaacagcatctccagcatcgaagaacagagcctggcagggctctcagagctcctggaactcgatcttaccgccaaccagctcacgcatctgccccgccagcttttccagggccttggccagctggaatatctgcttctgtccaacaaccaactgacaatgctctctgaggatgtcctgggccctctgcagcgggccttctggctggacctctcacacaaccgcctcgagaccccggctgaaggccttttctcatctctggggcggcttcgctacctcaacctcaggaataactccttgcagacttttgtgccgcagcctggcctggagcgcctgtggctcgatgccaacccctgggactgcagttgtcccctcaaggcgcttcgtgactttgccctacagaaccctggtgttgtcccccgctttgttcagactgtctgtgagggagatgactgccagccggtgtacacttacaacaacatcacttgtgctggccccgccaacgtctcaggcctcgaccttcgagacatcagtgaaacactctttgtgcactgctgaccctgctacttactggcctggtctggctgaacactgccttatggccaggatagtgtttcactgttacagaataagctggctctggaatacttacccatctcaaggggataggtcatggctgctcacttcctggatgcagggcagtaccggaagcgatgtggcctaaatagggtgggcacaggccaagtgcccgagggcccaaaggaggggaggtgctcagcagcacaccctgctggcaacaattaaagcaaatctgaagc

SEQ ID NO: 2157 - DNA, 1547 bp, Mus musculus
  misc_feature 12: n = A,T,C or G
tgggcgccgggnccccagttggctggtggagtgttctccaattttaccgtcaaaacgtgagggaaaacgaactggctctctccacagaaaatatagtaagcttgccaaaagcatatacttgcctggaacaaaggatgtaatggagctgcttgaagaagacctcacatgcccaatttgctgcagtttgtttgatgacccccgagtgttgccctgctcacacaacttctgcaaaaaatgcttagaagggctcttagaggggaatgtgcggaattccctgaggagaccatctcccttcaagtgtcctacctgccgtaaggaaacctcagctactggagtcaacagtctgcaggtcaattactccctaaagggtatcgtggagaaatacaacaaaatcaagatttctcccaagatgccagtgtgcaaaggacatttggggcagcctctcaacatcttctgcgtaactgatatgcagctgatttgtgggatctgtgctactcgaggcgagcacaccaagcatgtcttctcttctattgaagatgcctacgctcgagaaaagaatgcctttgagtccctctttcagagtttcgagacttggcgccggggagatgctctttcccgcttggatactttggaaacaaacaagaggaaagccctccagttactcacgaaggattcagataaagtaaaggagttttttgagaagttacagcacaccttggatcaaaagaagaatgaaatcctgtctgactttgaaactatgaagcttgcagttatgcaaacctatgacccggagatcaacaaaatcaacactattttacaggagcagcggatggcttcaacattgctgaggctttcaaagatgtctcagaacctattatatttttgcaacagatgcaagagttcagggagaaaatcaaagtaatcaaggaaactcctttgccacactctaatttgcccacaagccctttaatgaagaactttgataccagtcagtggggagacattaaactagttgatgtggataaactgtctttgccgcaagacacaggtgtgttcactagcaagattccctggtacccctatctgctgctcatgatggtagttctgctgggtctcctcatattctttggccccactgtattcctggaatggtctccacttgatgaattggcaacttggaaagactatctttcaagcttcaattcttacctgactaagtctgctgattttatagaacaatctgttttttactgggaacagatgacagatgggtttttcatttttggtgaaagagtaaaaaatgttagtttggtggcactgaacaatgtggcagagtttatatgcaaatacaaactattataaagtctttcaattacacagttctgcttcttgatgggattgttggagaacacaggaataattcagatctgatcaagatttcagtctgtttctttttaaagtatttcttcaatgtcatttgaagtttagtagtcctaaaccttcccttccttcttaaagacagttttaaaataaatactgtttctctc

SEQ ID NO: 2158 - DNA, 1065 bp, Mus musculus
gaattcggcacgagtttaggacccgggaacgagagcaccgggcctccaaaaggatgaagtatcttcttgacttgatcctgctgctgcctttgctcatcgtcttcagcattgagtctcttgtcaagctttttattcccaagaagaaaaaatctgtcgccggagagatcgtcctgatcaccggagctggtcatgggattggaagactgactgcctacgaatttgccaaacttaacaccaaactggttctctgggatatcaataagaacggcatcgaggaaacagctgctaagtgcaggaagctgggtgcccaggcccatccctttgtggtggactgcagccagcgggaagagatttacagcgctgcgaaaaaggtaaaggaagaagttggagatgttagcattctggtaaataacgccggcgttgtctacactgcagacttatttgctacgcaggaccctcagattgaaaagactttcgaagtcaatgtgcttgcacacttttggaccaccaaggcatttctcccagtgatgatgaagaataatcatggccacattgtcactgtggcatcagcagcaggccacaccgtggtccccttcttgctggcttactgctccagcaagtttgctgccgttggcttccacagagccttgactgatgagctggctgccttgggacgaacaggagtgcgaacatcgtgcctctgccccaacttcataaacaccggcttcatcaagaacccaagcaccaatttaggacccaccctggaacccgaggaggtggtggaacatctcatgcacgggatcctcactgagaagcaaatgattttcgttccgagttccatagcacttctgacagtattggaaaggatcgtccctgagaggttcctgcaagtcctaaaacacaggatcaacgtcaagttcgatgcagttgttgggtacaaagacaagtgacgcagcctgctccggttccctgaaagccgattgactggatcaaagttgatttcttctaatattaatcaaaagtttgatgtttttaatgttttctctgtatcttgtttcttcactg

SEQ ID NO: 2159 - DNA, 2887 bp, Mus musculus
aagggctcggatgtcactgagggatcgccggcgccctgaagtgcgtctcgggctggagccacaggtctgccaactccaatttccaactgtataagcatggaggccctgggtactgggagagaccgcacctcccaggcctcagccactgaaagcctggacttgcgacggttgtccacgcgcgccgactctgcctacagctctttctccacggcgtctggtgatcctgagacgcgcactccgtcccctggcaccgagcgcctcccttacctagactgggactacgtgcgagtggtttggggcagccaatctcctacctcgaaggacgctgtcctttcaacgactcagcgacctgtgcaggcagtcgctgggcacagtgacccacggtccccagaggtccagggaagcccgggaccactaaacagacaagacaccccactgctgtacgcgctggccgcggaggctgaagctacagctcacaccgcagagccgcccagcccgccagcctcgcgggacgcctaccgccagcggttgcagggtgcacagcgacgagtgctgcgggagacgtccttccagcgaaaggagtttcgcatgagcctgccgggccgcctgcgtcccgcagtccccacgcgacttcccacggcgcacgtgcgctccgcctccagcagccaggagctgggagaagaggagccggcgcgcaccgctgtcccagcgctagctgctgctggccgggggcgtctctccagccagcagcggcagtgctgcttctctgagccaggcaaattacatcgcgtaggttggagcggtgggcccactggtgaggacttgagaaaagattattccacgcaggagttgcagcgtgggatgcacgcaaagtccaaagggctgctggagactcagtccctaagctcaacggagctgaattccgggccagcggatcttggcaatgcccatagacctgcgggtcggagtcagagtgtttcaggcgaggtcatgggtccctgcaagggttcagaaaggactgtggccactgtccaggctgttcctcaaagagcagacatccgcagaccactgcttcacaccaagctttccaggtctttgactcagaaggaggtcacaggagtgtgtcctggagaggccctccagaccaaaccggctggctgtggtcggagaatctctgagacctcggtgtctactccgggcccctccctccctgaagatgacgtgttcctgagagaagccaaaacaccgtcacctcaagattcccaagggctccccaccagcacctcctaccggcagtatgaaaacgacttaagcaaaaaagctggtcagattgcagtttcagcagagagacccctccatgagactccagggatcacgggtacagaggactgtgggcaagcggtgaacggctctgtggatctctccagacccacaagcattccagagactacaaatgacgacatcccaacctttgacactaatgggaccactgacccctctgcagctacagagaaaaaacccctcaagcctcccccagtcgatgtcttgagaccttcagactctgagactccagggtcccctcaccacacttccctgacttggggccagtttgattccaagactacttggcctagtcggcattttgaggcgctggttcaagagctggccagactggatccctctttgagccgtactcttgccgcccagcccggtccagagccaccgcagggcctgctggatgggctttttcctgtcgaagagatccgaagtgcgatgaggccagcccttgaggagatgggagagaaggctgctggcgcatcggaggaagggtcttgtggacaccacctcacgcaggacctgcagacttcccaagaggcatcaaggtctgaaaactctacccccgaccctgaccaatcaagtggccaggaattcccagaaggaaacagcacccaggccaagaaagtggaactagcccgcctcctccaaaagatgctgcaggatcttcacgctgagcaggagcgactgcgggggaccgccgcagactggacccaacgcaacggagctctagaggctgctgtgagccaggcctgtacaccccgggagctggaacggttccgccggttcatgactgatctagagcgtgtgcttggtctgctgctgctgctaggcagtcgcctggtccgtgtaaacctcgccttggctagggcgggctcaaacagcgaccctgatgagagggtaaaataggttgaggtagggggaagagcagggtttggaggggccttccttctaccgcccggatcatccgggaagcaacggtgttcactgcgccctctcccggtggttccaggcctctctgctgcagcgactccaacttctgcagcgacagcaagaagaagctaaggagctgaaggagcacgtggctcggcgggagcaaaccctgcgtcaggtgttggagcgggagctgcccgcagagcatctgcgctcctattgtgtgctgctggcctccaaggccaggatcctgtcacagcagcgcagcctggacgatcgaatccggttccttaaggaccaactggacactatctggagcgacctcagccatcatcccctttctcccagactgacctgggccccagcaatccgtcctctaaacaaacaaccttttcttgctacccttatctagttacatgtagcggaggtgggaacattgtcccaggctcacccacaactggggcgatgctttatagagagctttcccttgagggagtagggaggagtcagaccaggccttcctaggacacatcttcccacggtgttctcctgtgaccttattcaagtttgtaattctttgggaatttgtgggtcgtaaaaactgcagtattcaaagcct

SEQ ID NO: 2160 - DNA, 1776 bp, Mus musculus
ggtgtcctgccgcctgagttccgctcttggtcgtggctcccgttgctcccgggttgagcagacaatagacccctccccggcatcccagcaggtcctcgcttcgcttggtggacccagatacctcggcaggggtgaaaaatcgaggaccatgccatcggcctttgagaaagtggtcaagaatgtgatcaaggaggtaagcggcagcagaggcgatctcattccggtggacagcctgcggaactccaccagcttcaggccctactgccttctgaacaggaaattttcaagctcaaggttctggaaaccccgttattcatgtgtcaacctgtcaatcaaggacatcctggagcccagtgctccagaaccagaaccggagtgttttggctccttcaaagtctctgatgtcgtcgatgggaacattcagggcagagtgatgttgtcaggcatgggagaagggaaaatttctggtggggctgcagtgtctgacagttccagtgcctccatgaatgtgtgtatactgcgtgtgactcagaagacctgggagaccatgcagcatgaaaggcaccttcagcagcctgagaacaaaatcctgcaacagcttcggagtcgtggggatgacctgtttgtggtgaccgaggtgctgcagacaaaggaggaagtgcagatcactgaggtccacagccaagagggctcaggccagtttacgctgcctggagctttatgcttgaagggtgaaggcaagggccaccaaagccggaagaagatggtgaccattcctgcaggcagcatcctggcattccgagtggcccaactgcttattggctctaaatgggatatccttctcgtctcagatgagaaacagaggacctttgagccctcctcaggtgacagaaaagcagtgggccagaggcaccatggcctcaatgtgcttgctgcgctttgttccatcggaaagcagctcagtctcctgtcagatgggattgatgaggaggaattaattgaggcggcagacttccagggcctgtatgctgaggtgaaggcttgctcctcagaactggagagcttggaaatggagttgagacaacagatactggtgaacatcggaaagattttacaggaccagcccagcatggaagccttagaggcctcactagggcagggcctgtgcagtggcggccaggtggagcctctggacggcccagctggctgcatccttgagtgtctggtgcttgactctggagaactggtgccggaactcgcagcccctatcttctacctgctgggagcactggctgtgctgagtgaaacccagcagcagctgctagctaaggctctggagacaacggtgctgtcaaagcagctggagttggtgaagcacgtcttggaacagagcaccccgtggcaggagcagagttctgtgtccctgcccaccgtgctccttggggactgctgggatgaaaagaatcccacctgggtcttgctagaagaatgtggcctaaggctgcaggtagaatccccccaggtgcactgggaaccaacgtctctgatccccacaagtgcgctctatgcctccctgttcctattgtcaagtctaggccagaaaccttgttagcctgtgggcctcccttcccacaacatctccatgtcctaccctccagccaaggtagaatcttgccaagcctagcctttgggaagccaagaaccatactcagtcacagggttataatgcactgagatccagaagttggaaaactcaataaatgtacaaacgaaagc

SEQ ID NO: 2161 - DNA, 1484 bp, Mus musculus
agcttgggctacatccttgccttcctctggacctggctgaacctgtggtccaacccacctgggggagcaaggcaaactgcagcaagatcctcgaacttctggttctgggattgaacagccactaggctacaggaccatctcatggagaactcagttttcctgcctttcgagtgggcagatgacactggaaacctgtttgggaaagggcttacttaccccggtgccctctaggacggtggggcatctcagggttgctgggggccgcttcccacctgcatcttccccacaggccgagtttgctgtgagtcgggtccagatgaatttcttgcacctgctgagctctgaggggacacagcatatcacaatccactgtctgaacatgacggtgtggcaggagggaccgggacgctcctctgccagacaggctgtgcgcttccgtgcctggaacggacaggtcttcgaagctgggggtcagttcaggccagaggtgtctatggatggctgcaaggtccatgatggccgctggcatcagacactgttcaccttccggacccaggacccccagcagctgcccatcgtcagtgtggacaatctcccgcctgtctcatcagggagacagtaccgcctgggaagttgggctgcgtgcttcctctgacctctgacctctaggctcatctaagccttgtgggggaagggaagagatgggacagttggtcccaggagatgcaggcgcttgccttacgatactggtgcagttcctagttgttatctgctcagccggagttgagaaggagtaacaggtctgaggctgtcccggagaaccacccatcccagctcagccccaagaaccaaccaaagagccagtcaaaagcaagctgggtttgcagcccactccagcccatggcctgttgcccagctctgtagacatccctgctccccagctgcccaaagaccccctccccattgatgccacctcaaggaaagggggcatgttgccagctggttcccgctagggagctttcgatgtgcaatattagaaaggagacatggaaaaaaaaagaggaggaaaaggaaagaaatctatatatattatttaaacaaagagaaggtgtgttactatttttttcacttgggagaggtgaggaagagcaagagaagctgggggtgtggagaggcaggtcccccaggctgggatgctggcccctagactagggtgctgacccctgggctggggtgctgtgtgctacctcccactgtgaaaccgctggtgctcacaattgtctcttgtaatgtatgtgatttttttaaggagaaaaagaaacttatttaagattctgaaggtgctactattttctgttgccacaggctttaaagaaactttctgaatggggcctggcccacttctctttctctcctccaaatgaggagttaaaaatgttactagcatagcccacccgtgtaatccgttgaaaaggaacaaaagg

SEQ ID NO: 2162 - DNA, 1635 bp, Mus musculus
gagaaattatgccccttctctcaccatgaactggctatcgagttcctcgggagttgtgctaactgcttaccaccccagcggcaaggaccaggtcgctggggacagccatgtaaagggaggcgacgaagccacctccagtcgcagatatggccaatacaccataaaccaagaaggctccaccaaagttcccgagaggcctccatttgatcgatcgagttctcaggattccttggatgaatcaatggaagcctattggacagaactagaaaacatcaagaggtcgaatgaaaatcgccaagaaggtcaagaggccatagttgtcaaagaacctgatgagggagaactggaagaagaatggctcaaagaagcaggtctatccaatctttttggagagtctattgatgacccgcaggaaagcattctgtttttatctacactgacccggactcaggcagcagctgttcagaaacgggtggaaacggtctcccagaccttgaggaagaaaaacaaacagcaccacattcgtggcgtcagagacatatttgctcaacagagagaggcacaagaaaaacctccagatgactcagacttgcggtcagtcagaacaaacgaaaacaaaggccaaggataagatgatcagccatctagtggggctgtcgatagcaaggagcagatctcacgggtgcctgaggacacacctgcctctgaaacagacatcaatctggaggtgtcatttgcggagcagctgtcaatcagagagagttcagtaaggagaggacgcagaagatcagcagcaacgactctttgcccagtttcagactgccaaagataaaacagtacgacaggattggagacttgcaccccaagacataaagaaagtttgctctctatccctgattgaactcactgccctgtatgatgtgttgggcttggaattcaaacaacagaaagctgtgaaaatcaaaaccagagactctggtctttttggtattcctttaacgatattgttagaacaagatcaaagaaaagtgcctggaacacgaatacccttgatctttcaaaaactgatttctcgaattgaagaaggcagtctggaaaccgagggcctcctacggataccaggagcagccatgagaatcaagaatctttgccaagaactagaagcgaaattttacgaggggactttcaattgggaaagtgtcaaacagcacgatgcggccagcctgctgaagctctttctgagagaattgccccagccactgctgagcatggagtatctcaaagccttccaagctgtccagaatcttccaaccagaaaggaacagttgcaggctttgaacctccttgtcattcttctacctgacgcaaacagagacacactgaaggccttgcttgaatttctccaaagagtcatagataacaaagagaagaacaagatgacagctgggaatgtagcaatggtcatggccccaaatctcttcatgtgccacacgctgggcttgaagtccagtgaacagcgagaatttgaaatggcagctgggacagcaaatgtcatgcacttattgattaggtaccagaaaattctatggacaatccctaaatttattgtaatccaagtgaggaaacagaatattg

SEQ ID NO: 2163 - DNA, 1014 bp, Mus musculus
ttggcatgatggttgctacagtgctctttctcccatgaagtctttgcttttatatcagtgccttatctgttaagctcctggaggaaagccccctattctagatctttatgtgaatggataaatgtgacacccgagacaccctttagtagtttgacagcttgcgtgtgtgccgcctaattagagcacagggagcagggcagctgttattcctgttttaccaagtcaaggcttagggaagttcagccacctgcttagatgatatatcaaggtggcagtggaagggggtgagctaaggacccagcaaggtttcctggaggcaaagtttatgaaatcctttctgtaactccataaagatgtctgcagctatttcctacccagatgttcctgatgtgataagcaggggactttttttttttttccttcagatgctatccataaaatccaagccctttcttaagatacaagcagaagaacggttgcgtttttgtgggtgtgctgtcagcctggggggtggggggtggggggtgggagagcgattactctgtgtttaggtttgtcacgcacattctttgcatctgtattgtaccagctttatagcactgtttcatgccaaagttctgatgacgtaaccagttgacccttcacacagagtgccctttccccccctcccccctccccatgcttctgtgattgctctgtagccatgtgaagcttgctagccgcggctgtacatcctgtgacttccaccttgggtttagtaatgggagcttgagattggagagctgagtcctctgtgggttctgtatttatccatttggcttgaagctttgtttatatatcggctgcttttttttttttaaatgctcagaccattatttatttcttgagtgtatataagtataaagacaaatctatggttatttttactttaagattaaccgatttcaagattacaaaaaaaaacaacaaaaaacaaaaaacaaatttaatagtaaaataaaaaagtatacagcc

SEQ ID NO: 2164 - DNA, 204 bp, Mus musculus
atcccctaccccagcggacccctagcccggctccagacttttttccattgacatttgtgtggggtcgtgaggccaaccccacccaaactgtgtttttctttgacttccgacattgctggtgacattgctggtgctgttcccctgagaattaggatatatttgcattgttttcttcttttaataaaatcttgaagttttcctccc

SEQ ID NO: 2165 - DNA, 462 bp, Mus musculus
aggctactgggttaagggacttagatattctaacgttcttcttagtttagaagtcttcaacacctaggctgttgttagtggaggagttaaagcaagattttgagtagggaactgattaaattagtggatgctccctctagtaacagatttgcaaaagcaattcattctacagttatcatggctattagctgcctaaggcttatgagagtgagtcttacatggaaacagtttggattagtgtttgtttgagcgcgtgctgacttctaaaattcagtagacttatacatgacagtgacttcagttaccagagtcaaaggttgcttcagccgtgtttatttggacatcttggaactactgtttaataaagatggattttgaatttcatagcatttgtaatatttctgaatttagatttttgaaaactaaagctaaccatgcttttaacttgtgaaatcttagtct

SEQ ID NO: 2166 - DNA, 1178 bp, Mus musculus
atggattctaagcagcagacagtgcgtctaagtgatggtcacttcatccctatactggggtttggtacctatgcacctcaagaggtacctaagagtaaggctacagaagctactaaaatagccatagatgctggtttccgccatattgattctgcttctatgtatcaaaatgaaaaggaagtaggactagccatccgaagcaagatagcagatggcactgtgaagagggaagatatattttacacatcaaaggtttggtgtacttttcatcgtccagaactcgtacgggtctgcttggaacagtcattgaagcaactccagttggactatgtggacctgtacctcattcatttcccaatggccatgaagccgggagaaaattatctcccaaaagatgaaaatggaaaattaatatatgatgctgtggatatctgtgacacctgggaagccatggagaaatgcaaggatgcaggattggccaagtccattggggtgtccaactttaaccgcaggcagctggagaagatcctgaaaaagccggggctcaagtacaagcctgtgtgcaaccaggtagaatgtcatccttatctcaatcagggaaaacttctggatttctgcaggtcaaaagacattgttctggttgcttacagtgctctgggaagccatcgtgaaaaacaatgggttgatcagagctctcctgttcttttggataatccagttcttggctcaatggcaaaaaagtacaatcgaactcctgcgctgattgcccttcgctaccagctacaacgtggggttgtggtcctcgccaagagtttctctgagaagaggataaaagagaatatgcaggtttttgaatttcagttgacttcagaggacatgaaagtcctcgatgacctgaataaaaatatccgatacataagtggttctagctttaaggaccatcctgattttccattttgggatgaatactaactggaggtccattttgtgccttgtgccagatgtcactgcattggaagagtgtataggaagagtattctcaaaatgtgatgattacatatcaccctaatccaagcttctgagcaattctggctctgctgaatctacccattttaaccaagaaagccaaaactatgtatatttctcctttctaagaaataaaagaatcgttattcttt

SEQ ID NO: 2167 - DNA, 2265 bp, Mus musculus
cagagggcggaagcgcagactgcaggatgcggttccaggttgcgttgctcctgctgagtgtcgcggtggcgagagctctgccgcccgtttataagagagacgccgactcaggtgactctcagaatcctccgaatcagccttccaaacagtcctccactcccctgcctcctgagtcttctaaccaggtaaagactacaaggccgaccgacggtcaggggcagaagtcagataaaaaagaccaggacaagacgactttggcagcagtttccagtaaggcggaatctgggccgccgaccgccgcgaccgatcacagtttgggtgattccagaaggcagcccgagaaaacggatgccgagttgaaggaaactgcgcggcccctctcaccagtcaaccccaaactggaaaagtctgatcagagctccacagaagattcaggcaagcccacaggaggtaattctggcaagcccacgggaggtgattctggcaagcccacaggaggtgattctgacaagcccacagaagctggttcgaataaggccacagaagatgattctggcaagtccacgaaagttgatttggacaagcccacctccaaaatcttcccagatacggagacttcgaagactgacaaagtccagccaactgaaaaaggacaaaaagcaacacttacttccaaaactgaatctggggaaacactggcaggggactctgacttctctttaaagccagagaaaggagataagtcttcagagcctactgaagacgtggaaaccaaggagattgaagagggtgacacagagccggaagaaggctcaccacttgaagaagagaatgaaaaggtgtcgggcccttcctccagtgagaaccaagaggggacacttacagattctatgaagaatgagaaggatgatctttataaggacagttctggaaacaccagtgcagagagcagccacttctttgcatatctagtgaccgctgctgttctcgttgctgtcctctatattgcttaccacaacaaacggaagattattgcttttgctctggaagggaaaagatccaaagtcactcggaggccgaaggccagtgactaccaacgtttgaacctaaagctttgatctttactttgtctgcaagaaccgtgtcctccctgctgatttgttcccaatcaagagaaatgaaaagactgtgacctctggggtttggtggcaagtctgggctggcagagatgagatagcttcaggttttgcaccggcactttgatgacactctcctctggtgatgttttatttacttttgtgttccttgtatgctgacgtgttccatcatcctttcttccttggagtgcaaacagaaggagcacatggaaaaatggatgtgaccaaaggaagaccccaccttaggcaggccacacaatggaccaccctcccacagcctctttatctttgcaactctaggcgcaaactgtagagaggtgctttctagacaagatgtaggagatggttatgtgggatactgatgggcagagatggggttgaatacttattctctacagaaggctcagctgcaaaccaaactagcaggttaaagtgtgttaaagtctggtctgtctgatagtctgtatatttctctgaaagtttgcatgctagttgtactagcataaaagggactcgaggcttctgaaagtaaaatcactgtttgatgggatttttacaaaaatgatcattgaacaagtgtgttcttgcatacaatcaccccaataggaacttcctggaaagggacaggttcatgctttgtggaagaaaacacataggagggatttagtatgcaggaaagaggttttctacaaattgagttttgcttttattgcctgcagtagatagatatttagaaactaactgcattcttcacactcctccttgctgtttaagatgtgcagggaataaggaaaatctttcctatcgtgtcatatctggtcatgaaactgtaggaaactaaataggttccctgagataactgaagatgtcttggattatgctgtgtctagcgttttattccagtctgtatggttacgcctaaagagagaaaagtctcagctaatctcagggatgcagagagaacgagaagaagaaaagtatgagtcctgtgctgttgtggaaatcagtctaaggaagcaatggtcttggagttcttttccagtgctgactgcagcatgggcttgaaattgaagtatgtattcttggcaggtggcattctagaaataag

SEQ ID NO: 2168 - DNA, 618 bp, Mus musculus
  misc_feature 529, 578: n = A,T,C or G
ttgacatttgggaaaggaagaatatgtatttcaacttttagaacctattcctatgtgcatcgagagggccagatactccactataaaggggctgtgacctcagtgtcccggaaaaccactgcccaagtcacactgctctccctccaatgccagccattactccagaggcagctttttctttgtctggagtttgtaaatgatctgattgccttcattccaggcataaagctgcttatctctggggttgtaatggatcatggagtgacttcttggccgcctagggaagaacaaattgggcagatgctcctccctgacagtgcccagtggatcatagacacaggtgattcgatgagggccctggccaccggaactgtagacaacatagaggaccccacacagtaggaatgaagcttccgcatcctggcttctacacggtgtatcccatgaatgttctactcccaaagtgtcaggctcaatttttgtgagaaccaaatggccttggatacctggtcctgagtgaatggcccanagtccgtgttcatccacagcaaggtcaatgtacgtagagagagagtgtngatagatggggtgctcgccttgccctcctgggagagcatt

SEQ ID NO: 2169 - DNA, 2346 bp, Mus musculus
gaattcgggatccttttgcacattcctagttagcagtgcatactcatcagactggagatgtttaatgacatcagggaaccaaacggacaacccatagtacccgaagacagggtgaaccagacaatcgtaagcttgatggtgttttccctgactgggtagttgaagcatctcatgaatgtcagccaaattccgtacagttcggtgcggatccgaacgaaacacctcctgtaccaggttcccgtgtcgctctcaatttcaatcagctcatctatttgtttgggagtcttgattttatttaccgtgaagaccttctctggctggccccgggctctcatgttggtgtcatgaattaacttcagaatcatccaggcttcatcatgttttcccacctccagcaagaaccgagggctttctggcatgaaggtgagagccaccacagaggagacgcatgggagcgcacagacgatgacgaagacgcgccacgtgtggaactggtaggctgaacccatgctgaagctccacccgtagtggggaatgatggcccaggcatggcggaggctagatgccgccaatcatccagaacatgcagaagccgctgctggggagcttggggctgcggtggtggcgggtgacgggcttcgggacgcggagcgacgcggcctagcgcggcggacggccgtgggaactcgggcagccgacccgtcccgccatggagatggagaaggagttcgaggagatcgacaaggctgggaactgggcggctatttaccaggacattcgacatgaagccagcgacttcccatgcaaagtcgcgaagcttcctaagaacaaaaaccggaacaggtaccgagatgtcagcccttttgaccacagtcggattaaattgcaccaggaagataatgactatatcaatgccagcttgataaaaatggaagaagcccagaggagctatattctcacccagggccctttaccaaacacatgtgggcacttctgggagatggtgtgggagcagaagagcaggggcgtggtcatgctcaaccgcatcatggagaaaggctcgttaaaatgtgcccagtattggccacagcaagaagaaaaggagatggtctttgatgacacaggtttgaagttgacactaatctctgaagatgtcaagtcatattacacagtacgacagttggagttggaaaacctgactaccaaggagactcgagagatcctgcatttccactacaccacatggcctgactttggagtccccgagtcaccggcttctttcctcaatttccttttcaaagtccgagagtcaggctcactcagcctggagcatggccccattgtggtccactgcagcgccggcatcgggaggtcagggaccttctgtctggctgacacctgcctcttactgatggacaagaggaaagacccatcttccgtggacatcaagaaagtactgctggagatgcgcaggttccgcatggggctcatccagactgccgaccagctgcgcttctcctacctggctgtcatcgagggcgccaagttcatcatgggcgactcgtcagtgcaggatcagtggaaggagctctcccgggaggatctagaccttccacccgagcacgtgcccccacctccccggccacccaaacgcacactggagcctcacaacgggaagtgcaaggagctcttctccagccaccagtgggtgagcgaggagacctgtggggatgaagacagcctggccagagaggaaggcagagcccagtcaagtgccatgcacagcgtgagcagcatgagtccagacactgaagttaggagacggatggtgggtggaggtcttcaaagtgctcaggcgtctgtccccaccgaggaagagctgtcctccactgaggaggaacacaaggcacattggccaagtcactggaagcccttcctggtcaatgtgtgcatggccacgctcctggccaccggcgcgtacttgtgctaccgggtgtgttttcactgacagactgggaggcactgccactgcccagcttaggatgcggtctgcggcgtctgacctggtgtagagggaacaacaactcgcaagcctgctctggaactggaagggcctgccccaggagggtattagtgcactgggctttgaaggagcccctggtcccacgaacagagtctaatctcagggccttaacctgttcaggagaagtagaggaaatgccaaatactcttcttgctctcacctcactcctcccctttctctgattcatttgtttttggaaaaaaaaaaaaaaagaattacaacacattgttgtttttaacatttataaaggcaggcccgaattc

SEQ ID NO: 2170 - DNA, 2185 bp, Mus musculus
ggaactacctttttggcgccatgggcaaagtcgtgttaccgatttctatgcgtgccgtcgccctggctttacgactccgcgggccaagtcgatctgtctcaccccgagccctggtggcctcgtggctcctgcgttcacccggagcagcagccgcaagcgcgcccggcccccagccgaacccgggagtgaccagcccgcgccgctcgcgcgccggaggttacggctgcctggattggactcctgccccagttctctgcctgagcccagttccccagctgaggcgagccctccagctgaccctagccctccagctgaccctggctcccccgtttgccatcccccgtcaagcgaacaaagagtacaactgtttatgttggtcaacagccgggcaagatcccctcagaggactccgtctctgagctccagtcctgcctgaggcgggcacggaagttgggagcccaggcacgggccctgagagcccgagtccaagagaatgctgtggagcctagtaccccagatgccaaggtgcccacagagcaaccatgtgtcgagaaagctcctgcctaccagcgcttccatgctctggctcagcctggtctcccaggccttgtcctaccctacaagtatcaggtgctagttgagatgttccgcagcatggacaccattgtgagcatgctccacaatcgctctgagactgtgacctttgccaaagtcaagcaaggtgttcaggagatgatgcgcaagcgctttgaagagcgcaatgtgggccagatcaaaaccgtgtatcccacgtcgtatcgcttccgccaggagtgcaatgtccccaccttcaaggacagcatcaagagatctgattaccagctcaccatcgagcccttgctgggccaggaggctggcggtgccacccagctcacagccacgtgcctcctgcagcgccggcaagtcttccggcagaacctggtggaacgtgtcaaggaacagcacaaggtcttcctggcttcactgaacccccccatggcggtgccggacgaccagctgacccgctggcatccgcgcttcaatgtggacgaggtgcctgacattgagccagctgaactgccccagcctcctgtcacagagaagctcaccactgcccaggaagtgctggcccgtgcccggagcttgatgacacccaagatggagaaggccctgagcaacctggccctgcgctcggctgagcccggtagccctgggacctctactccaccactcccggccactccgccagccaccccacctgctgcctctccgagcgccctgaagggtgtgtcccaagcactgctagagcggataagggccaaggaggtccagaagcagctggcaaggatgacacggtgccccgagcaggagcttcgcctgcagcggttagagcgtctgccagagctggcccgcgtgctgcgcaatgtcttcgtgtctgagcggaagccggcactcactatggaggtggtctgtgcaaggatggtggacagttgccaaactgctctgagtccaggggagatggagaaacatctggtgctcctggcagagttgctgccggactggctcagcctgcatcgcatccgcacggatacctacgtcaagctggacaaggctgttgacctggctggcctcactgcgaggctggcccaccacgtccacgccgaggggctgtgactttgagctccttgcctgtttctttcatcagtacacgacgcacttacgcctttaagcctcgccagtgtgggcagctatcgttgcccatggatctcataaagtgctggcattaagttgcttcctgaggctttggggcatcccagactcagctctaggggaagtagactctgaagagtagggtatgttggatggccattgcacaaactactcaagcattaggtatggtcaagacccaagatcaaggtccaggtggaagcctaggctggcatagccttgcttccccatgagacttaagaatcacacagaccttggactttcctgatttcacgggacgctgctctgagagtgaaattgggccttctgtaaatatgtgaagtgtggtttcttttcaaaccttatatggccctgcatgtgactgctagttttggcttttaataaagtcatgtaagatttaaataaaatactactgagatgaagctgaacctgtcaccgt

SEQ ID NO: 2171 - DNA, 2039 bp, Mus musculus
gttttcgcttggcacagggactcctccgagaagatgccgaaggccaagtccgcagcgagtagccgccggcgggatcgtcaggagcagcgccgggagctgaagcgagctggaggactcatgttcaacacagggatcggacaacacattttgaaaaatcctctaattgttaacagcatcatcgataaggctgctttaagacctaccgatgtggtgctggaagttgggcctgggactggcaatatgactgtcaagctgttagaaaaggccaaaaaggtagttgcctgtgaacttgatccaaggctagtagctgaacttcacaaaagagttcagggcacgcctctggccagcaaactccaggtcctggtgggagatgtactgaaatcagatttgccattctttgatgcttgtgtggcaaacttgccttatcagatctcctctccctttgtcttcaagttgctgctccaccggccatttttcagatgtgctatacttatgtttcagagagagtttgctcttcgattggttgccaagcctggagataaattatactgtagactctccatcaacacacagcttttagcacgcgtggaccatctaatgaaggtggggaagaataacttcagaccgccccccaaggtggagtccagcgtggtcaggatagaacctaagaatccgccaccaccaatcaattttcaggaatgggacggcttagtaaggatcacttttgttcggaaaaacaagacactgtccgctgcattcaaatcaagtgcagtacaacaactgttggaaaaaaattacagaattcactgttcagtacagaatactgtaataccagaagatttcagtatagcagataaaatacagcaaatcctaaccagcacaggtttcagtgacaaacgggcccgttccatggacatagatgacttcatcaggttgctacatggattcaatgcagaaggcatccacttctcctagccatttgaaaactattttttcaagaccaagaaaaaatgaaattatacaatcctactatttgagaatacaaccaattttgttctacaggacatcatttaaattatttaataatacttttttaccatttattatcctgtatgtgaaaggtggttgggtatatatatatatgtatgtatgtatgtgtattatattatatataaataataccctgccctttgtagtagacctagtgttttatatataaatataaaaataatggtctttaagtttgaaagccacagacacacacaacatacacttaagctttctaacaatttattgtatgaagacgttacttttattcactattttagactgtgaggttcacgtaggcctacagctcactcaactagtcagaaagcccccaatgtgacttttcttcacacaccttcaccctacgtgttattatttgcctcttgcaacacaaacaacatcataattctgggagctgagtctgctgcaatgacagtacaggcaagttctgcataagactacctgtaaaatgcagaagcttagaaagtaaaaactcatgttaaatcacatatttccttaagggagacaagatctacaattttcagatttagaaaaactctggagggttttgtcaatcaaataggtggtctcattaatttatgattcatttcctttcttgaatgagagggtcttttggaggttgactttaatctcagactcttgcctcagcctcctaaataaattctggggttatacttgtgcaaagtaagttttccagttttagttttcagctttttaaaagaacagactaaaactacaggttcctggttattcctgacttctagataattaaaattctactacctggtgtttctttttaagctatttaaaaattgtcagataaaagataaatgctgtttatatattttaataaattagctgttttatttatataaggaaactaaactagcttctctatttatacttaaaacttaaaaggaatatctccaattacttgagaaaaagaatgctaagtaaacttaatataaatc

SEQ ID NO: 2172 - DNA, 311 bp, Mus musculus
accagctgtacattagaaaaactgaggcagtttacagcaacaacaacaaaatgcataaacaaatatgtttatggatattattacatagtccaatatcactaaaatgtgattttgtcacaaaaacaatatacagtatcatccctttccatccatggactccatgtttaatgtaagtaaaattgtctgttcttttctcttttttcaggtttttttttctgcacagaacacttctaagtttattaattctgaattatagaaagcttaaaattcttttaatcacatgtgagaataaacttatcaggagtagttcc

SEQ ID NO: 2173 - DNA, 2758 bp, Mus musculus
gaaagggagagagagaacggggaaccctggtcagaaggacttccagggtcagagaactacaaggttacattaaaagtgggctcagctacccatatccctgtctcctgcacctagttcagcatccagaaaggccaaaggaacaccagagaccgcaatcaatatttgtttaaagtgtgaatggctaaaggcaagggaaggggtgtgttctgaaagtccactctcagtctcactgccaaccacaccccagcagacactcccctccctggtaaaggataaaggctctccccagtcgaggactgtaggaaaggagccagcccttggttacagtggcctgctgctcagaagggctatagcatctgagccatgcctaggtacacagtgcacgtgcgtggggaatggctggcggtgccctgtcaggatgggaagctcactgttggctggctgggccgtgaggctgtgcgacgctacatgaagaacaaaccggacaatggtggcttcacttcggtggatgaagtgcaattccttgtgcatcggtgcaagggcctgggcctgctggacaatgaggacgagctggaggtggccttagaggacaatgagttcgtagaagtggtgattgaaggtgatgtgatgtctcctgatttcattccgtcgcagccagaaggagttttcctatacagcaaataccgggagcctgaaaaatacattgccctagatggggacagtctgagcacagaggatctggtcaacctgggcaagggacgttacaagataaagctcacttcaattgctgagaagaaagtgcagcagtcccgggaggtcatcgacagcatcatcaaagaaagaacagttgtttatggcatcaccacaggttttggaaaatttgctagaactgtaatccctgccaataagctacaggagcttcaagtcaacttagtccgttcccattcttcaggtgttgggaaaccactcagtcctgagaggtgtcggatgctcttggctttgaggatcaacgtcttagccaaaggttacagtgggatttccttggagacgctgaaacaagttattgaagcatttaatgcctcctgcctgtcctatgttccagagaaaggaactgtgggtgccagcggagaccttgccccactctctcatcttgctctggggctcatcggagaaggaaagatgtggtccccgaagagtggctgggcagatgctaaatatgttctagaagcccatggactgaaaccaattgtcttgaaaccaaaagaaggcctggcactcatcaatgggacacagatgatcacttccctgggctgtgaagccctggagcgagccagcgccattgcccggcaagctgatattgtggctgccttgaccctggaggtgctgaagggcaccaccaaagccttcgataccgacatccatgctgtccgacctcaccgtgggcaaattgaagttgctttccgattccggtccctcctggactcggatcaccacccatcagaaatcgcagaaagccacaggttctgcgatcgtgttcaggacgcgtacaccttacgctgctgtccacaggtccacggtgtggtgaacgacacaatagcctttgtgaaggacatcatcactacagaactgaacagcgccacagacaatcctatggtctttgccagtcgaggggagacaatttcaggaggaaacttccatggtgaatacccagccaaagccctggactatttggccattggtgtccatgaacttgcggcaattagtgaaagaagaatcgaaaggctgtgtaatccttccctcagcgagctgcctgccttcctggtggctgaaggaggtctcaattctgggttcatgatagcccactgcaccgcagcagccctggtgtctgagagcaaggctctgtgccacccttcatctgtggactcactctcgaccagtgctgctacagaagaccacgtctccatgggaggatgggcagccaggaaagccctcagggtcgtcgagcacgtggaacaagtgctagccattgagcttctcgcggcctgccagggtatagagtttctgcgccccctgaaaacaaccactccgctggagaaggtgtacgacctggtgcgctccgtagtaaggccctggataaaagatcgcttcatggccccggacattgaggcagcacacaggttgcttcttgaccaaaaggtttgggaggttgccgcaccgtacatcgagaaatacagaatggagcacattccggaatccagaccgctttctccaacagcgttttcactagaatctctccgaaagaactcagccacaatcccagagtctgacgatctttaacgggcttcctcgaggacaggcacatcagatgggcctgagcttagcacagcactggtgtgttgatggagagagagtctcaggaactgcctgtaatgtgtaaaactcatctcttttcaaacatactctggataggccatggcagcaatgcagtggctgaacccagagccctgatcttgttttcttgttactatggtttgaggagtactgggtgccttgtggttgtggagttgtctttcttgataatataaacaggctacttaaaaaaaaaaacagccacaattccataggtttatttttactcttggaattaggaaaatcaattcagagcactcttttaaaaacattagattttgtgaacttttaaaacaattgtcttgggaaactctctacttgactaattgtactaataccataatctgac

SEQ ID NO: 2174 - DNA, 1178 bp, Mus musculus
  misc_feature 595: n = A,T,C or G
tgtactggaatgccactgttacaaaggggccgctttggtagatttttgtcatcatttaatataccaacattcctttaagaatgttcatattttactggcttgagcttttaataatggttaaggatcttaacatttcaatgatttatttggggggatgttcctatgttctatgactttttttctttcttttttttctttttttcattggatattttctttatatttcaaatggtatcccctttcccagtttctccctccccaggaacctcctatcacacccccctacccctgcctctatttattttcgtgtttatgtgtgtgtattggggacctagctccaccactgagctatgctattacccttctaccacctttctaaaagctcagatgaagctaagggaagtgcacatgcttagttaagtcattagcatacagaaacgtctgatgtgtggctctgaacgctgctgcgaagagggcgatcccaatgaagaaggagccagtatggctacaggattccgagtaaggagtagcagacaatggggctccagggccagctgctagtaactgttactgacgaatcctcggccaccttccntgatggaagcaagggcaatgtttggcagacagggaatagtacaggaatcagattcatgactgcagtctgtaccttgagtgctctggaaagagccatattgtttaacactgacaacggtttgttcctccaagatcctctggtctggtagtggcatggcccctttgggcgggttgattgcattcgtaaggcggtctttctgttatgcaggagaaggaaggtttctttcagttagcaccccccaaactaggaaaacctacaaacagtagaaaaataagtctgccttagaaatcctaacttcattctctctgtgaccaaaacagtagcttgcttttcctcagcctctccctgggctgtgagtgggcagtggggaagaccatttcctagatggtgtctataggagttttatactacgtctacggagtgaggaaagaaaaagaaattactttcagtagtagaatattaaaatagcatcatacataaaatattacaaatcaaagatagcagaaacaaacatacatacaacttacatttatttatgtcccatcaagacatgctgatggctactcatttatgatccatgatc

SEQ ID NO: 2175 - DNA, 1211 bp, Mus musculus
taacagagatgtaattttagttccattgaagtttttgagggctactatgtcaagaaaacatagaatctaatgtgtgcggccttgtagttgagagcgacagcagcagagcatgccgggccacgtgtgctcggacgcacgatgtccgagtttctaggtcagcacagaaggaccagcagaatcacggagctctggaacatgcatgtccctggtgtctgggattcatcctcatttacgctgttgtttctagggtaaggtttcttccaaagtctgtgaagccacttgccagatgaggtctgtccggccttctccctatatggttctctgtacatggttctcttgagtgtaggttttgcaactcaagtccctcatgagcgggctcgggtggctcctcctggctacttcatgggatgaatgagtgttgctaatcacttttcactcttgtccccaggatggctgcagcaactcctctgcggatgaggtgaacacctccctgaccacaaccacgaccaccactagtgccttcaccatccaggaatattttgccaagagaatggcccaattaaagaacaagccacaagcctcagctccagggtctgacctttcagagacccctgttgaaaggaaaaagggaaagaaaaaaaacaaagaggcagcagacacagatgtagagaactctccccaacacaaggccaagaggcataaaaagaaaaagcgtgtggaagcagagaggggccctgtggccaagaagagagaccgagcagagctgcagcctggaggccccagtgaggacgagtgttccgatgcctctgtcgaagctgcagaagattgtgtacaaacaccagacatccaggatgatgtcccaaagcccaagaagaggaaagcaaagaaaaagctgcaaaggccagaaggagtagaaatagacgccacactagacagagcaccggtgaaaaagaagaagaagaaagtttccagataacttgtggcctccaaccactcaactgtcagcacactgcagggcctgaagtgagagcacggcgaagcccaggtggctcagcatcttttaacatgcccacaggttgctgcttttacgcaccacatttccacatttcccccaggtcaccttcctaggagaactgatttgaatgttccagatcatgtctttcaataaataaaataacttttaataaacaaatagattcttttttaagtgc

SEQ ID NO: 2176 - DNA, 1469 bp, Mus musculus
gggcctttgcgcgagaaaatggcggccccgtacctcggggcttgtcctccttatacaggactttgggatggtggtctcggcagcccattctggtgactcagtccacaactgtagttcaagttaaaaccaaaagccgttttagacccccaactcctgaacccaagtacaaaacagagaaggagtttttggagtatgccaggaaagcgggattggtcattccacaggaacggttggagcgccctatacatttggcctgtacagctggtatatttgatccctatgttccaccagagggtgatgctcgaatgtcatctctttcaaaggaaggattgacgcagagaactgagcgattgagaaagaatgcggcatcacagctggcaatccgaaagataagagaatttgaagcaaattttaaaacaaaagacttccctgaaaaagctaaggatattttcattgaagctcacctttgtctaaacaactcagaccatgaccggcttcataccttggtaaccgaacactgttttccggacatggtctgggacctcaagtacaagactgtacgctggggctttgtggaatctctagagccagcccaagtggttcatgtccgttgctcaggcctggtgaaccagagcaacatgtatggccaggtcactgtgcgcctacacactcggcagactttggccatttatgatcggtttggcagattgatgtatggacaggaagatgtgcccaaggatgtcctggaatatgtggtgtttgaaagacacttgatgaacccgtatgggagctggagaatgcatgccaagattgtgcccgcgtggcaccccctaagcagcccatcctcaagaccttgatgattcctggtcctcagctgaaaccctgggaggagtacgaagagactcaaggggaggcccagaagcctcagctagcctgatggcgttaatgactcctgaggagcctagcagttgtggtgaacatctttaatcccagcactcagaaggcagaggcaggtggatttctgtgagttcaaggccagtctggtctacagagcaagttgcaggacaaccagagctacacagagaaaccctgtctcaggaaaaaaaaacaaaaagaaaaaagacaaaaagactcctgaggtgttccgatggggctgcaaagtcacctgtacccacctgtaccccgaaggcttcccgtgctgtctcctgtcctgcctgggtcagcagtcccccaagcccctcacagtcatggctgattgtgtggccaggtggtggctggggtgccccgccttggagcatcttctgtttacagccatgttcagcttctgaggtgaaatgagaagcagcagcagagagaacaaacgcgacactgggcttttcccagcagcagcaagctgtggcatcagacccacagctttcttttttctaattataggccgagtcagcatttggaataaaatactgtcaaag

SEQ ID NO: 2177 - DNA, 970 bp, Mus musculus
atgatggcgaaaaagcccccgaaacctgcccctcgcaggatcttccaggaaagactgaagatcactgctctgcccctgtactttgaaggatttttactggtcaaacggtctgatcaccaggagtacaaacactattggacggagctgagagggaccacgctgttcttttacactgacaaaaaaagcacaatctatgttggcaagttagatataatagacctcgtgtgccttactggccaacattcaactgaaaagaattgtgcaaaattcactcttgttttgcccaaagaagaagtgcatgtgaagacagaaaacacagaaagtggagaagaatggcggggcttcattcttacagtaacagagttgacagttcctcagcatgtgtcacttctacctgggcaagtgattagactgcacgaagtcttagagagagaaaagaaaagaaggattgagacagatcagctgcctcttatgcctccggagaaagagaaggagccagtacaagactatgcggatgtactgaacccactgcctgaatgtttttatgcagtttcccggaaagaagcaactgcaatgctggaaaagaacccttcttggggaaatatgatcctgaggcctggtagtgacagcaaaaactactccatcactatccggcaggagatagaaatgccgagaatcaagcacttcaaagtgacgcgcactggaaacaactacaccatcgagctggaaaaacctgtaacactcccaaaccttttcagtgtcattgattattttgtgaaggagactcgagggaatttgagaccatttatacattcagctgatgacaactttggtcaagatcccaacatagaagacaggagtgagaagtttaagaaaaatccacacaatgcatgaagtaacatgacacctttcttcatttatctcagtatttattattttcgaaaaaaaaaaaaaaaaaaaaaaaaaaaaa

SEQ ID NO: 2178 - DNA, 1522 bp, Mus musculus
ttttgaccccttcaagacttcacaacagcctctatcacacatctgttttcctcaaagaaaaaaatatatataataaaatgtgttttgctcttttacactgtataattttaagaaatgtgttatttgtgaatgcatggtctgacatttctgtacagtttgaagacatagaacaaagacagcaacagtaaagccaagatcgttagtatttttataaagacattttaagaatggacagatggattcttacactaggttatatcacgacttttcgcttgagttttgaatgcttttaatggtgtttatcttatttttcttctgaaataagatgcatgtttgaagcatatctctagcatcaaaattttccacaattgtgttgtaaatgtgtggactccctctgcctggcccagtgtcaggccctgttattagtaacgcggtgtagaaatgagcttctgcagtactagctctgtaatcctggctcccagggatctctctgcaagacaatcagtgcccccaagagcatttgccattgtagtatattcaccactgggcaaagactacttaggtaatgtctctgaaacccatggccactccagctgagactataccaactgtgcccagggacatagtgacattctatacttagcatttatgatagcaccctcagagtgtgtaacctaatatatatcacccaccttccataaactgtctccatttccccagtggaaccttatatttaaggggagggaccttagtttggaggtaaccattgcctcaagaggagcaggccctgcccactcagcctgcagtggacatcacatctctctcaagtgattcagcaaagcattggcctacctgagtagctagctggtctggcagccatgtcagatagaccgcccatcatgttctctggacgtgctcatcttgagactacctactacattgcacagggcagggaatgaaacagtggccctctgcaatgaatacccttgcttcaagacttcaaggcccaaagttagtcttgtgttatgtgcaacacatttccagaggctgtgacagcacagcctctcctgctcctcaaaaaagagctatgtattattatgttgacctcagaattcccagctgctgttactagacataatcacaatctttgtatctttgtttttgatctgcttgtgttgtgttgaaaagggtcatattttaatgatttttgtcagtggtttgggagggttatttcattatttttcatgagaagtaatgtcaagtttttaaaggtttaaaaaaagaaacaccaaggcctggaatatgggccttttcactgtaaactagaggacgggggcaggcagcactgggaacttagacatccaagctggtgttcagggactgctcatggccccagcccccgtgccacttgactgtgagactcctacttgctttatcatcaattatgcttttataaattgtgtaaaggtacttttgtattgtcattttttaaaaaaaataataaaagtttattccagccatt

SEQ ID NO: 2179 - DNA, 329 bp, Mus musculus
attatcccccaatcttttgtatctcggggtaattttttctaaggtttttttcatcagattccaacctatttctgaggtttgttagagattaacataggttttctttctgtattattagatgcacccagcaattatggtggacctattaccccatgggtaagaaataaatggaaatatgacatcggatgttttagcaaattttctgtaaataaaatgtttgatcacaccacccagtgtgataatcatgtctacagctaaaatggaaatagttttatctgtacagttgtccaagatatggatggtttcacactcaaataaaaagtattgaa

SEQ ID NO: 2180 - DNA, 1569 bp, Mus musculus
gagttcggtcttacgttggtggtgccaggctgcccgctagaatgccgtgggccgcgggacggcggtgggcatggatcaccctgattctgactattatcgcagtgctgatccaggccgcctggttgtggctgggcactcaaaacttcgtcttctctagagaagaaatagcgcacttgctcgacagtatgcggggctggaccatgagcttgccttctctcggctgatcgtggagctgcggaggctgcacccaggccacgtgctgccggatgaggagctgcagtgggtatttgtgaacgcgggcggctggatgggcgccatgtgtattctgcacgcctcgctgtctgagtacgtgctgctcttcggcaccgccctgggctcccatggccattcgggacgatactgggctgagatttctgacaccatcatctctggcaccttccaccaatggaaagagggcaccacgaaaagtgaggtcttctacccaggagagacagttgtacacgggcctggagaagcaacggctctggagtggggaccaaacacgtggatggtggagtacggccggggtgttattccgtctaccctgttctttgcactagccgacactttcttcagcacccaggactacctcacactcttctatacccttcgggcctatgcccggggcctccggcttgagcttaccacctacctctttggccaagactcctgaccagccaggcctgaaggaagatctgtggatggacaggagcgcggcaggaccacatccatctctctactcgctggaactcatattcagacagcagcgtataccatgcagatattaagtacctgctgtatgaggaaggacatacatacttgtacatccagacacagctcttgggaagcaaatgagacacagagatgctaagacttgtatgtactgtaagatcatgcactcacatccacccagaaagggtcctctacatatactccagggggccagtcatgtttgaacacacatcacaagctttacttactgactcaggctttcctagagcctcctgctggcattcagggctctgggatcaagggttgaggtagatgttacacactacctcactctgatgcctcattcctgtagtaatctctggtgaagggaaagaggagctgcccttcggaggtccccttcacctgcagctatgatgcccttcccttcatccctttcctcaccatatgccttttctccattccactcccctgttatgcaaatgcccccctggcttgtcctccctgccccccccccccggcaaccagttcagctgggaaagcagaggcatgtagaggatgctaaagggaagggaggtcctccactacggagacccttgttggggttagaatgggaaagctggctagtgccccagggccagttcccaaggagaggacctggagaagtaagccggggtccaaggagccaccccattccaaaagaagcctttagtgtgtgtgtgcacaccctatcagtttccagacatatctgttgcaatctctgtcttcttgtctctctctgttaataaaaacatattaaac

SEQ ID NO: 2181 - DNA, 1545 bp, Mus musculus
ggaagccaaggccatctgggtcctgttaggtaagttgagcctcttcgctcctctgcctcctcatcctcacaatgttacctcgggaaagagagatagctgcctcattctagggatcaactcaagaaagagagcagacacaccatccagggagccactgggtatctcagaacatggcaagcagtggatacctgtatagcctggtggctgaagatggagcctggcaggcgtttgtatccaaggccaagttgtccagggagagagcagtggccctccacaaagctctgagggaactgacagcgctcttggccatagcagacagaggcagacttcaaaaaggtctgaaaggcagggagaagtttttgaaagtctttcctcgcttgaaagcagagctggtggagcatatcagtcagctccatgccctggctgaccacgctgagaaactacacaggggctgcaccatctccaacgtggtggctgactccttcagtgctgcctctgacatcctgagcctccttggtctctttctggcacctgtgacagcagagggaagtctggtgctctcagcaactggcttggggctgggggtagcagctactgtgactgatgttgctacctcaatcgtggaggaaacaagcagggttttggatgaagttgaagctgctctgactggcactcatgtgctgggggaggctggcacaagtgtagctaggattgtcaacaagatccctcaggctaccagagacatcaccagagacctggaagcccttgagcagcacatgaatgccctcaggctggttagagctaaccctcgtttagaagaagatgccaggatcctggccaccacaggaagcatctctgcccaacgggctatgcaggtgcgggccaggctggaaggaaccccctctggcaatgagcaatgaagcccggatccaacgtgccgccaccgcaggtgccgccctctggagtgacgtggacagccttgtcaaagagtcaaagcatctgtacgaagggtctgcgtcagagtcggctgaagcactgaggaagctggctcgagagctggaggagaagctagaggggctcatggaattctacaagacgatctgatcaggccccagtcagtcaccccatccccaagacaggcagaggtcaggggggaggacctggacagaggagagcaagactgcagtcaggtccgagagacccagtgtgtaggcctgctgctgaacacagcacaatcaggtgagaccccctggtgcctgagacgagagaccaaaggatgtgctgctgtgagagggactggaaagattgaactctggactaaacacggaagaagccagttaagagaaggactagaaagccctccccagctgagctactgcaaacaagaccccacaaaaggcaaaccagagagaaaggtgtgtgctctttaaacacatcatgagccccatccctgtgctttagagcctgtgcttctccccagctccccagccgacacccatcctcaggcatgtcatggtcccctaaataaaccgtttctgttgttcc

SEQ ID NO: 2182 - DNA, 2942 bp, Mus musculus
aattcggcacgaggcgccagaacacaaccggagtccctgaggctccagaacagagtcagggtgagccagccccagcccagccccaggttctggcttcctctcttgcttctccctcctttggttgcagccagcagagcccacttaaactccgaggtgactcccagctgtgttggcgacatggctgacaaccctagagatgccatgctcaagcaggcccccgcgtcacggaacgaaaaggcccccatggagttcggctatgtggggatcgactccatcctggagcagatgcgcaggaaggctatgaaacagggcttcgagtttaacatcatggtggttgggcagagcggcctcgggaagtccactttaatcaataccctcttcaagtccaaaatcagccggaagtcggtgcagcccacctcggaggaacgcatccccaagacgatcgaaatcaagtcgatcacccacgatattgaagagaagggggttcgaatgaagctgacagtgattgacacgccgggcttcggagaccacatcaacaatgagaactgctggcagcccattatgaagttcatcaatgaccaatatgagaagtacctgcaggaggaagtcaacatcaaccggaagaagcgcattcccgacacccgtgtccactgctgcctctacttcatcccagccaccggccactcgctcaggcccctggacattgaattcatgaagcgcctaagcaaagtggtgaacattgtcccagtcatcgccaaggctgacacgctgaccctggaggagagggtctacttcaaacagcggatcactgcagacctgctgtccaacggcattgacgtgtacccgcagaaggagtttgatgaggacgcagaagaccggctggtgaacgaaaagttccgggagatgatcccatttgctgtggtgggcagcgaccatgagtatcaagtcaatggcaagaggattctgggaaggaagaccaagtggggcactatcgaagttgagaataccactcactgtgaatttgcttacctgcgggatctccttatcaggacgcacatgcaaaacatcaaagacatcaccagcaacatccacttcgaagcctaccgagtgaaacgcctcaacgagggcaacagcgccatggccaacgggatcgagaaggagccggaagcccaggagatgtagatgcgtcccgcccctggaccccacccccagatcttttcatcatccctggcccacccacctaccctgtcttattttatataattatctccttgtcacctgcctccatccatctcttcccacactttgccaggtaacaagagagggtttacctcccaagtgtgctcttattggctgcagcagcagggtgggcggggctaagcctgggcttgcctctgtgctctatttccacccgggctcagcccctgaggggttagaagagctatgtgtccgtcccccgctctgagttctaagctgaagcctgtgggggccaagtcctagggggtgcagaggagcccgttagaccacaagaccccatggccgcagcctcaagcaggttagagactgccccaaaggaggatggagctggccgggtattcctgaaacctcacctgcccctccgggggcgtttcttacagcgccctcagctgcctgcccctcaagggaactagaggcgtcacagccaaagttgccaatcacttagacaaagtgacaaccgtgcccctcgagcttgtcccagagcagaaagtgccttgatctacaagagccagtcacctcttcccagatgtccctttgggtgaaaagcagggacgtgctggagagagggaggtatcttttctccctcgcccttgggttctctctcccctgtgctgtagatatcgctactacactgggctttaattataaaagacgaagcgtgaaagatgctccccgatgttaggaagccccgcccccaatgtaaggaaggtcaaagcaagaagatgagtcgaagccatgagggaggaagccgtggaagggaggcataagagtgtgtgggagctctcctgcccaggtgccgcggaaggcatatccgcgtggtcctcagtttgggccaagatattctggttacattgatgctccgctgcctcaccctgtcccaccccacacaccccaggctcaagccttgatgattcagtgactgtactgggtgggagccagaaacctgaccattttgttgtctacatgagcctagactagccctgtgccccagaacccatcaaaaatacccctaaagagggaaagatgagggggtcagagatggatagccaggctcactcatcttctctcagagggaacattagggaccatccatgcacagctgaccaaagccgtgtccttcctgcctgcctcccattctcatttgcccctgaggagaaagtttggtgaggtgcgttaggttggacccgcttggggaaggtgcctctacagacccagggctagctttctgcagcccagaagtgcagtgggaggggtggggtgcagacagatggagacgaacattgtttcctgctttgggcgtctactccctcatccaagcatggaagggcccctcgtcatgccctgtggccgaacagttcgcttgccagcttgccaagttctttgccaaaatcaggactttgaaggaaatctccagcacgctggacccagggcactccggccttcaccagcccaagtgaccctggggatttagcagcaacccggtcatcaggatgactttgtgcctctgtaaccaggtattgaaactgttcgtctcaccaggccggtccacgtggccctctgctgggggcttcctggtgggggggcagaaaagtctctctctctctctctctctctttttttttttgtataaataacaaagtgtctgaaatgtatttcctgaaataaatgtttcaaatctcgtgccg

SEQ ID NO: 2183 - DNA, 2119 bp, Mus musculus
acgttgacacaggaatgaagagtgtattggctgaatcttcaagcagaggcgatattgaccatgtgctttttaaattggcctgcgtgacccgcccacttggtgtaaaagaagaaccggccaaagggagggcctgaaggacctccacaggagtgtgagcagcactgcttcagcaacaaagcctcaggtccacatcttgggaagaatatggccacttcctggggggctgtcttcatgctgatcatagcctgcgttggcagcactgtcttctacagagaacagcagacctggtttgaaggtgtcttcttgtcttccatgtgccccattaatgtcagtgccggcaccttttatggaattatgtttgatgcgggcagcactggaactcggattcatgtttacacttttgtgcagaaaacagcaggacagctcccctttctggaaggtgaaatttttgattctgtgaagccgggactttctgcttttgtggatcagcccaaacagggtgctgagactgtccaggagctcttggaggtggccaaagactcgatccccagaagccactgggaaaggaccccggtggttctgaaagcaacggccggactccgtttgctgcctgagcagaaagcccaggctctgctcttggaggtagaggagatcttcaagaattcacctttcctggtcccagatggcagcgttagcatcatggatgggtcctatgaaggcatactagcctgggttaccgtgaactttctaacaggtcagctgcatggtcgtggccaggagactgtggggacccttgacctggggggtgcctccacccaaatcacgtttctaccccagtttgagaaaaccctggaacaaacacctaggggctacctcacttcctttgagatgtttaacagcacttttaagctctatacacatagttacttgggatttggactgaaagctgcaagactggcaactctgggagccctggaagcaaaagggactgatggacatacgtttcgaagtgcctgtttaccaagatggttggaagcagagtggatctttgggggtgtgaaataccagtatggtggtaaccaagaaggggagatgggctttgaaccctgctatgcggaagtgctgagggtagtacaggggaaacttcaccagccagaagaagtccgaggaagcgccttctacgctttctcttactactacgatcgagccgctgacacacacttgatcgattatgaaaagggcggggttttaaaagttgaagattttgaaagaaaagccagagaagtgtgtgacaacttggggagcttctcctcgggcagtcctttcctctgcatggacctcacttacatcacagccctgttgaaagatggtttgggctttgccgaacggcaccctcttacagctcacaaagaaagtgaacaacatagagactggttgggccttgggggccacctttcacctgctccagtctctgggcatcaccagctgaggccaagctccacctctgaagcctgcatttctgaaccagttttctcacaggaaggcgtggactcagagacattttctgacctctctggaaaagcctggcccgaaacccgttaactggttttataaggagggaggggtttttagatgagtcttgctcttgagcctagtgatttgggcttcaatgatttgcacatctaatgtgaatagctcctaaccacttggtgggtgcatggctggcaccagactgtaaatcttttgggattctttgtacagagtcctgcaaaggaaaaaagagaaaaggtttggaactccatgctagattgcgagttcagagacaggtccctggggaccaaagaacaatctcgtttcaacccttggatgcctcattgctttgaatggattcatttttgcttataagctgatttactgaaatcccataacccatcaatgctgttaatttttttcttcctacccttattacattccctaccctaaaagcctgggggaaatacctggttttgcttcccatctataattgagaaagaggggggaaaagatactgtattagaatttgtgtgatcctgtggcacaatagatcaaccaacccatttaaagcttaaaaaaaaaaaaa

SEQ ID NO: 2184 - DNA, 1224 bp, Mus musculus
gccagcatcttctctgaagctgaatcacaacctaaataagagaaaatggcaagtgcagactggggatatggaagcgaaaatggtcctgaccaatggagcaagctgtatcccattgccaatggtaacaaccagtctcctattgatattaaaaccagtgaagccaatcatgactcctctctgaaaccactcagcatctcctataatcctgcaactgccaaagaaattgttaacgtgggacattctttccatgtaatttttgatgacagtagcaaccaatctgttctgaaaggtggccctcttgctgatagctatcggctcactcagttccattttcactggggcaactcaaacgaccatggctctgagcacaccgtggatggaactagatattctggagagcttcacttagttcactggaattctgcaaagtactccagtgcttctgaagccatctccaaggctgatggcctggcaatccttggcgttttgatgaaggttggtccagccaacccaagcctgcagaaagtacttgatgctctaaactcagttaaaactaagggaaaacgagccccattcacaaattttgacccatccagtctgcttccttcatctctggattactggacctactttggctctctgactcaccctcctcttcatgaaagtgtgacctgggtgatctgcaaggatagcatcagtctaagcccagagcagctggcccagctccgtggtcttctgtcaagtgcagagggagagtctgcagttccagttctgagcaaccaccgtccaccccaacccctgaagggcagaacagtcagagcctcattttgagtcccagcaaggaatgagtcctcaattatgacctggccccctctacagcagcatccaataaagggatcacgattaagaaacagacttatgtcagtgctagacagtatacctgcaaatttaatccacagaactaaaatgctttcattttaattcctgatacttaatgcaaatactctataagtttgcctactgtaatttttatgcattcgtttttgcttaaatacacctttttgtggaagtcgttcataattacaactaagtgattcattctctttctgctctcttcactttaaataaaccaataaataaatcttttaaaaaaaaaaaaaaaaaaagctgagaaataagcgctgatagcagccttccagttctgttcaagtatatggctgcctg

SEQ ID NO: 2185 - DNA, 1638 bp, Mus musculus
gggtgcagattgcaaagctcctttctttgcgagaagtgcaaaattggctagagccagagactcgcccacctggtacagaaggagcgcgcgcctgtgtcccttggggacccacagttgcaaagagacagctgcttgatttggtcacccactcgcccagactataggagcctcccgggacactcttgagttgcacctttctgcagagcagactggttgacccccgcagcgctcttaggatttgaagcgtcctgatcctggaggtttgcacgccgcgctctcccgactctgggacacattcgcccgaaccactggagtgtgcgggtgactgacatatcatctcatctcttcgactctccatgagctcatgaacctgggagcaggtccacggcaatggcgcggcctctgagcgacaggaccccgggccccctgctgctgggtggcccggctggggccccccctggcgggggagcgctgcttgggctgaggagccttctgcagggaaacagcaagcccaaagaaccggccagctgtctcctgaaggaaaaggagcgcaaggcaactctgcccacagcccccgtcccgggacccggcctggaaacggcgggcccagccgatgccccgagtggggccgttagtgggggtgggtcccctcgggggcgctcagggcctgtggctggcccgagtctttttgcgccgctgctgtgggaacgcacttttcctttcggggacgtggaatacgtggacctggacgccttcttgctggagcacgggctaccgccgagcccgccgccccccgggggcctgtcgccggcaccctctccagcgcgcactcccgcgccctcccccgggcccggctcttgcagctcctcttccccccgctcctcgcccgggcacgcccccgcgcgggccactctgggagccgccggcggccaccgcgcaggcttgacatctagggacacacccagtcctgtggacccagacaccgtggaggtgctaatgacctttgaacctgatcccgctgatctcgccctgtcaagcattccaggccatgagacttttgaccctcggagacaccgcttctcagaggaggaactgaagcctcaaccaatcatgaagaaggcaaggaaagtccaggtgcctgaggaacagaaggatgagaagtactggagccggaggtacaagaacaatgaagcagccaagaggtcgagagatgcaagaagactcaaggagaaccagatatctgtgagggctgccttcctggagaaggaaaacgccctgttgcggcaggaggtggtggctgtgcggcaggagctgtcccactaccgtgctgtgctttcacgctaccaggcccagcatgggacactgtgaggcacctccaccctgccagggcagagtcctgttccttgctcagacttacacctgacttcctccttgtcccatggccagtggtctggccagctaggtgcccgaagaacgtcatgatgcagacaaatacatttatatttttaagaaaaagctagccttcccccacctcccttgtgggggtggggagggtcctgtgtgtgctcttagcatgttggggaacccatccatccaaccgcctccatcaacacaatcctgaataaatcttgagaaccc

SEQ ID NO: 2186 - DNA, 4259 bp, Mus musculus
aagtctccgcgtccgtccgagatggaagtgtggattcctggtgtctgagtgcctgacgtggcgtctggacggtgctgctctagtagaagcgctggaggcaaagcgtagcttgaagtcaatggcccaaaatgactctgctagaggagactcacttccgtaaggaggaagaccaggtcggaggctgggatgagcatgccattgcaccagatctctgccatcccttctcaggatgccatttctgctagagtctacagaagcaagaccaaagataaggagcagaatgagaagactttgggacattccatgagtcatccaagcaacatttctaaggctgggagtagtcctccatccacgacggctccagtgtctgccttctctcgcacttctgtcacaccatccaaccaggacatctgcaggatctgccactgtgaaggggatgacgagagccctctgatcaccccctgtcactgcacagggagcctccatttcgtgcatcaggcttgcctgcagcagtggatcaagagttctgacacacgctgctgtgaactctgcaagtacgagttcatcatggagaccaagctgaaacctttgaggaaatgggagaagttgcagatgactgccagtgagcgcaggaagatcatgtgctcagtgaccttccatgtcattgctatcacctgtgtggtctggtccttgtatgtgctcattgaccgcacagcagaggaaatcaagcagggtcaggtaacaggaatcctagagtggcctttctggacgaagctggtagttgtggccatcggcttcactggaggacttctctttatgtatgttcagtgcaaggtgtacctacagttatggaaaagactcaaggcttacaatagagtgatctatgttcagaactgtccagaaacaagtaaaaagaatatttttgaaaagtctgcacttacagagcccacccttgaaaataaagaaggacatggaatgtgtcattccaccacaaattcttcttgcacagagcctgaagacactggagcagaaattattaacgtctgaccatgtgagggtgtcatttccttgatgtccaccaacagctgaaggaatttgtctgctgccagttgtgttccttctttctgtcgtttaatagcatagactgggcaggtgactatttatagtggcctctctttttctcaaccctccttggtgtgaatgtcctagaattcttgtggggcaggtaccactgggttccattctgccaggcttctctgtggtctgggaaggtgggagaccccatgtatccatgacaaggagctggctaagttccagcccctggtcttgaatagattatggaagtaaaaagctaaagcagaagacagagcagcatggggagaggaggcgggtgatggagggtccccagaggacagagcagcatggtgcgggagggctgctgctgctgggaggggtccctcacactaacgagagctaggagtggcaagggagcagtgcctccagacagcagccctgcagcccctgccttgctcagctgatgccaccaccttgctgggggggcagacaaggccttgggctgtgtctgctggtgtgtgactcactgagaaaacagcactttatgagagtttttattttggaattcctgtgtttaatgggagtgacatgtttaaacacgtgtcacatttagaaatgttctctttattgcctgttatctctttgcatcaaaatcgaactgaaaccatttctgccttatatattctgagtagtagatgtccttccatgtccagaaaagacttcagactttaagcaagacagacaggtctgagactccatgggaattaatggatgctaagagtgtaattcctctggttttgagcctgtttcctgaaaagtcctatctcacaagctcacccatacatttctttgttgtgagcgttgaaatgaaagggttttgagatgtaatgaatctgaatcagggtgagcatttaaaaaacgctcctttgactgacagatgtctccagatggagtgggtacacattggggacactcctgtgatccacctctgctgtcccctgtgctgacaaagttctgtggagtcattgctgagggctgggaggtcaacagaccagctctgggatgaggtcttgggtgagcagtcagctaattgcatcgccattgtgtcactgacctggcctcatacccacttattgccttaagcagacttgacaggatcactagggtccttagctccaatgtgacctattctgtcttggggttacctcctgcgcgatattttcacaagacagacaaaatcaaatcactactgctaagtggccattgcccctttaaaaagtttgttgaacattttttttcttgaaggccattgtcaaagtgccaggcaatagtcaacttacaatgtgacaagaggaaccgcagaagtgtactactctccaagtggctgctgtcggctccagggtcttcagattctcttgaggtggccagggcaatgcctagggtccatctccctgagctttggctgcttcacctgtcttctccagagactgaggcaaaccgaagatgaatcttttgtagttcctagtagaagccccgtgcttagttttcagaagcatgtggaggctagctagaaggcttgtggaagcaagttctgtcctgttatccccttgtctactccctggagtcatggagttcagttgtggagctgttctgccagggctttcagccattatctaatgggcccaccccttaggtcagcctgccctctctctcccagaccacataagcctccctgtgctcactgtgccccaaagtgcaattactcacactcagtgaggacaccaggcagctacagactgcccactaagctctgactattccttttagcagctgctgcggcgagtctctgaccctgtccatctgtctgtgacaagatgttccaacattgggtgggcagtcaaatgaagatggaggcatttgtagagaagaaagtgtccctcaatgggggttgtctctgcacagctgccctaggggacttgtactcccacatagataggtggctttggaagcatggcttcatgttgttccctttatttcaggaaggcctgatgctatctcttctctggcttctctgatgaactctgtccttcatccttcccccgctcgttttccctgaaggttctctgatctagtaaacaactacacatgtgactcagtgcaggagactggcaaggcacggctgcgaagcatctggcagagctctgggtctgcccagactctcctagtccttgcctctttggcctctgagtaattttgcagggctatctgtctaccccattgttcctcactttgagcttagatatagtgggaagatggcatgtagctagaccaagcagatctaggatgagggagacctcaggccaggagggcttgtgcttgtgggtcaaatgaagaaggaagtcgtctcagggtgtcactggcagccctctaacttggcctttaccccgtatgtcatagacccattcgcacagctttgactctagctgccacaagtgagtagttgagggttatgctcaagtgtatcacaagattttcctggaaatgtaaacattctcttagtctaggtctctctgtctctcctttctggcttcaggacactcttcgttaagtaggcttagttttcaaacctgtgggtatgtccaagtggacacagatgtgcaggctcaggcggtgggggataggacagttcaaggcctggggtagtatctaagtgacagaggggaaaggctgtgtgggcagggtgaagagctgtaatcttgtgggtgtggttagatgcacatgtatatatttcattctacctgttcaaatctggtttggaataatgcagcttatagctgcagctcaaggaaagcccaaagcatagggagagaaaaggcacttgtctctgtgtcgggagtgagtgacgaaggcatgtaactggtgcacatttagatgcaacgtttcaagttgattgttaataaaaaccaaatttacactggtgtgtgtagtgtagtttctaaaaagcacttcacattttaaatttttcttggaaaatttctagtaatctaaatgtctaattttttaatctttttgtgtatgttcattgtttctcagtattactgcttgaataattctctgtacaggggatttgtttgtgctatatacggggtgtctaaagttagcaataaagcctttctttacaaagg

SEQ ID NO: 2187 - DNA, 931 bp, Mus musculus
acggtctcatgcatgtcagtctgtccttagacttactgcgatactcccgttcttatctccctagttctgggaaaataatgatggcattgcaggcacacactaccatgctgagttcattatttttgacttaggcaattaagttcattttctacaaataatgaaagatttagcatccctaaaataaatgttattataattcagcaggaccagccacccttatgtgagaagggtgaccttattcaaatgaaagttggtttggaagaggctatatgaaaattgtttgtagattgtggtgacctcaggttatgaaggaacacttgtgtcaacattaagtgtggaaacattttctttgaatcagggttccagcaaccgaatcaggagttacagaaaactaggctggtttttttcccctttcctcctctgccaggaacactcatgctagttagatgctatctctgtaagtccattagctagcacagtgtacatatatagtagggacccagtaaaatagctttaatgtccctcttttctgttcctctctctctttgccatggtctgccaaatgtgtaagttattaattgaagttaggtaataattatttgagtacctatgacataagaaacattgcaataaatgtcatgggcttttgaagtaagtccagaaaaatcaccctagacttgattcccccagtataaaaaaaaaaaaaaaaccatgatgttttctagaatgagcagtgctggagagtgcaacagacacttaataaggatacaactaggaagatttagtatagagaatgaagggaacattaggataggaaaatggttgaaaataagacaacatgagaccaggggctctggcttgtattccaggcacttggcagatagtttgtgctaagtggtgagttctatatcagcctgaggtactcagcatt

SEQ ID NO: 2188 - DNA, 1462 bp, Mus musculus
gagtaatttggcttctctagctcacgctattcggctgctcctagaatacacaggctcaagctatgaagagaagagatacaccatgggagacgctcctgactatgaccgaagccagtggctgagtgagaagttcaaattgggcctggactttcccaatttgccttacttgattgatgggtcacacaagatcacgcagagcaatgccatcctgcgctacattgcccgcaagcacaacctgtgtggggagacagaggcgcagaagattcgcgtggacattttggagaaccaggctatggatgtctccaatcagctggctcgagtctgttacagcccagactttgagaaactgaaggtggaatacttggagcagctccctggaatggtgaagctcttctcacagttcctgggccagcggacatggtttgttggtgaaaagattacttttgtagatttcctggcttacgatatcctggacctgcaccttatattcgaacccacgtgcctggacgccttcccaaacctgaaggactttgtggcccgctttgaggtactgaagaggatctctgcttacatgaagaccagccgcttcctccgaacacccctatatacaaaggtggccacttggggcaataagtagagccttgactgggcaggaagtgggaaccgggggttctgggaacagttgaacttcctgtagccctagtgctgctttctgtccatccccttcctgaccccagagtgtcaaaggtcctcttttctttcatccagtccctgccctttcaaaccctctaaagcctaggctcctagttttcctttagcaaaatgcccttctagcatgactgtgtcccgcgcccacttgatggtcttgcctgccagcagctgtgctgttgtgaagagttgggactctccatcagcactcagcctggggctccccatgcttgtctggagaccagagacggctggtgtgtgaatttggtctctgcacagctcttttgggtccctcctgtaaagcctgaaccacactggctctggtgccgcactaccagcttttactactatctccagtggctgcctagtgacccgggcagaggctgagttcacagggattttagttggataggcaggggtttggcccttcctagccccacctgtttgtttctcaggaggcagctgcagagggctctgtggagctcaaagggagcttagatctcctttatgctagcagcactgagatttgtcatgcaggtctcagtggtgaggatccaggctgataggagtccccagcagaaagccaggatcctctctgcccactgtgctatggctgccttatatctatatgtctccaggatcctgtctctgatgtcttcagagtatcccgtcttggtcaccagggatgggggccatcttggttaatccctcctctttgtgagcccccgtgaaataaatttcttcatgctttcgc

SEQ ID NO: 2189 - DNA, 339 bp, Mus musculus
atgtctgcggaagtccccgaggcagcgtctgcggaggagcaaaaggaaatggaagataaagtaactagtccagagaaagctgaagaagcaaagttaaaggcaaggtatcctcacttgggacaaaagcctggagggtctgattttttaaggaaaagattgcagaaagggcaaaagtattttgattctggggactacaacatggcaaaagcaaagatgaagaacaagcagcttcctgctgcagccccggataagacagaggtcactggtgaccacattcccactccacaggaccttcctcagcggaaaccatcccttgttgctagcaaactggctggctga

SEQ ID NO: 2190 - DNA, 897 bp, Mus musculus
gagacgggacaacgaccagggacagcgagcaggagtatcagtcagctggttgctgccgctgctacaaccgacccagccacagctggaataccctcaacctgggcagtgactactgtgctctacacagtcagcggctgaagggcagtctcgtgccagccattgaaaatgctcaaggcacacatccctgctgaccttccccaagaccatggagaggcagctgagtccttagtttgaggaagacaggataacagcctgttcccgctgctagaggccagtgagatggagaggcttgcagaggtcactgatcaatggggcggaacgcacaacagtaaacgcccccgccgcgaccaatcagcgattgccgcacacctctgccttggccaatccacagcgattttgcagttccaccccttacctagggtgtgcggaagctggggcgccccgtgcccaacctggggagtgtccagagcctgttcctcccccagcacacccccgcggtgtccttcagctccaaactaaggaaaacaaatgccagcctcctccctctgacccacatgtctcaactctatgccgccttacagcggcagccactgtcactattgcactggcaaagagagcaaaactcttctcccctaagggccaagaataaagcaggctcttttgcgcctccttcattatcttccagttgaccctttaattcttcccagtgagcattttaattagcacagaggtgaagcggaagtgtgctccctggagacaggagttggtgcctgctgcgaggcctctgggagatagagttctttggagtcaagaatgcacgtggactatctggggaggaagcaatgctagtgtggatagactcgtgtgaagaacaggaaataaatgtcttctttctgg

SEQ ID NO: 2191 - DNA, 3745 bp, Mus musculus
gtgctgtctccagctccttccacatctgcaggcgcggctgggacgcgctccgccctctgtgcgctccactgggctccgctcgctccgcacaccctcgctgcttcccaggcctcctgcagaaccaggctgcggctgcccccgacgatacggcgcacagcccgctgtggatcctgtcattcacagagaggagagggacagggagacacacaagggaaccgaggaggaggcttccatctcgtcattgcaggatgttctggaagctctcgctgaccttgctcctggtggctgtgctggtaaaggtagctgaaacacggaagaaccggcctgcgggcgccatcccctcgccttacaaggatggtagcagcaacaactcagagaggtggcatcaccagatcaaggaggtgctggcctccagccaggaggccctggtagtcaccgagcgcaagtacctcaagagtgactggtgcaagacgcagcctctgcggcagacagtgagcgaggagggttgccgcagccgcaccatcctcaaccgcttctgctacggccagtgcaactccttctacatcccgcgacacgtgaagaaggaggaggactccttccaatcctgcgctttctgcaagccccagcgtgtcacctctgtcatcgtagagctcgaatgcccgggtctcgacccacctttccgaatcaagaaaatccagaaggtgaagcattgccggtgcatgtcagtgaacctgagtgactccgacaagcagtgaactcatggggcaggatgcagctcagccttgagcactcctacccctgggttgcgccaccgccacttctgttgagctcactcacactctgcccggtgtcccagtcagcagcaaatgtgtctcttagggccaacagtgtccctgtcacaaatgaggaccacaagtgaagctttgtcaactgtcccagatccaccccaggctacacttgtgtctctaaatccactttgtggatgggacacagaagatgttggaaaactccactcccagaaactcgacaagatttttcaggagatgcactgtcatctgggattgacgactccaccatgtggaaaagccagtctttccctggccacatcctacactccagcttgagccttcctctggtgaaggatgcacgactcttctgtcgcaaacttttgttggtcaccggacctctgtggtgtgaacattctttcttctgacctgggagttgcccagctctgccgctgctgtgatgctgatgtgggcagcatctataaaggagatgctcacccgcaaggggttccagaacaaatctggtacccacgaggacaagccaaaccaagtggatcaggaaatggacttccctaggaactgtactgagcaggcaagactctccacacctctggacaccaccacctctttatttccttctcatagcccctatctgtagctcaagataaactctggtgtgcatgctattcctgctgctgtgttaacactcacaaggtctctgtattagtgtcagtcttataattgacctatcatgttaaaaacagttaaaagtattatcaacatattcatatatcaagtcacgtgtttggactctagcttagcatcactgttctgaatagggagtagagcatcgagtgatctgtggaaaagtattttacagaggaaaaactgccaggtcagcaattcactccccaacccaccccccacccccccacccccgcttgctcacacacactctctctttccagattgagcagggagatgggacacatcatgattttacttttaatatgacatcacaggagagactaaagcattgtggcatagtgtacaaaccggattgggacagaggtgtgtacagaggagtcactaggaagctgtaaagattaaaaggcacgtgtgagaggagacctggtactgttttcactgccattacactaagtaaaaaaatattttctattaaaagatatgtaagaatatatggtattgagacattttgtgacacaggcagaaatatagagccaatatagagggtagtaatgtaggtaaactgtcactcagaggatagcttcctgtacaaagaatagactcctaaaataccaagaaacatttcagtcatcttcagttctgctgatgagttgttggagtctctgttgtgtggtcttttgatgcgaggactttgaaataatttatttttccttcaaaattacactcaagttcaatctctttgtgcaattgttctagggaggcctccctgagaatggcacgtatgcaatctgacaaatgtgaatgagaaaccttggtgggaatccgaatgtgctgaaatcctttggttgataatttcccagtccatgctcttgccaagatgggtgtcctagtatgtgagggagactatccataagctgctctgagactcaggcttgtggatgcccagcagtgatgctggctctccagtctgccacctggaggagggttgggatgagctggggagggtatgccttggactcttttgcctgtattgcaatgtaagttttctagtttcatcacttctgctacacagcaaccatgagtagagactatgtggttttgaaggggatattagcttcagaaatgagagtgcacagcctggaatcagcagagagaaacaagggggaaatggaaaaatcacagagggctggaaaccccagggataaaggcaaaaagggaagagggtgccaaaggtcagagatacaattttcacttttagcagaaaatctcgaggtagagccaaagcagaacatgcagtagaaaagctgtgaaagagatatgagtgtccttaatggaggatggtgacatgtaaccggagggtgaggagaagagtctcacacccagctgcgaagccagcccatgtcattctattaatgggacccacacatcaccaggaaaggttaagctagggacccacaatgtatgtatgtgagcattctttttgatcctaatggtgggtgtacccatgaaggctatatgatatgctgtagtctgaggctacttcttggcttattgtatgtataaagtttaccttcgaatggctcaaattgtatttaaattgtgtcttgtttataaatgaagaaaagctataagtataatgtaattattttataggtatactattaagttatagaacaaataaagatactctaggattctatgtgatcctggcatcatgtgccataaaagctgaattctgcacttgtgtccttgtgtactcagagtgcatttatccagcctctgagacttcacccacggtccgtatcataaacgttccttcggggggcttgggatcttctaggagaattagaaacaggcatcaaacaagaagaattggtgggatggctctcacctccagtctatgggaacttcaagcctttattgaaacacccaccagctgaatacagaatgtactcagagtgttcttggaataagaaatattgaatgaggaagctttgagagacagatgcaaagagaagtccactgtaagtctcttcttctctcctgtagccagtgcaccacacttgtgtcttacagaagccagagattgtattgttttgttctattttatgtttactttccacgggtttcaacatttcttaatttaaacacatctcagcctcacagtgttgtcatcttcctgcaaactgagttatctgccatttaagacatgcaatgatcaataaaagaaataaaaaccttgacaaaactgc

SEQ ID NO: 2192 - DNA, 493 bp, Mus musculus
agctaaggcaattcttctcagaaaggaatctgcttaccccaactcttccctcttcatgtttttcaagggacggatccagcggttagaggtatggcaccttcctcagcttttatagtgaactttggactaccatgcctctgttttctgctcagggacattttgtatgtgccagaataccattggccaggtacatcgtgtaccctggtgataccttcaggtcacagaaaaggataatgggatccaagagggcttctgatcacttcctgagatttccgcacatgagcccaggctgtccctctccaaacccagaccatgccctggctgggcagggccccacttctccgtgtctttcatcttgttcagggtgaggaggatttgcgggacaatgaagaggttgcagagacatctgaatgaaggtggctgctctcactgcaagaaccacccattgtgttactaggagttttcaaataaaccagttgggtgttttacagtc

SEQ ID NO: 2193 - DNA, 1695 bp, Mus musculus
gatggttgcgggagctgatcgtagtcggcccctaggcccaggttatttccggaagcgaacgcttgtcctctacttccgcggggtcctggcaggtggcggtgacagagtgggtaccaggactagtggcgagcacatgccaacgagacctctaactgctcctgtggcagcctgcgtaccagcatcctggaacctggaaccatcaatttacactgaagttcacatctcctagagtctagcctatctagtgtgcaagtgaattttgaggctagtatctcagtggccatcaaagaactgctaggattgtcttggtgaacttgtggcgagcccaaccttccatgcttcatatcccggtcatccttggtcaccgtccaggatcagtgtacagaagagacaagatgtggcctaacagatcatatgatgaagtacctcagaatgtctccagtgatgaatctaccctgaggaaaacaagaggtgatctttctgcaagccaacagcatgagtgcggggatgagaaagatgactttagaagaaactgttcctcttcttcccattactcagaacagcagtctccccataaaggggcttcttgtttttccagaaaatcaggtatagatcagaagaactcccacacagcagatctggatccagtggaagccattctccaaaacagagcaaactgcattcttcccatgggtcagagcttatgaagtccgagcatgctcattcctcctacacacggcacagtgaagaaagcacagaggaggtaaagagagggctggcactctttgagacatcaagagacacacacccagaaagttcttcagcagttcttcgtcagaaatttaaacacactcaaaggcttgatgaaaagcgacgtcctaaagctgcaagcaggcaagctgtagaaaagccaatgatggcagatgaaagtgacttacctaaaatttctgagtttgaagttggattctcagaacttatggatcagccacaagaacctgggtcaaacaaaaaagatcatacagaattcattgatgaccaagtaaccaatcgacgtaaagcaatagtgtcaaagaccaaggaaattgaacaagcctactaccaagactgtgagacttcggaatggtggtgaaaatgctggttgaaaaagacgcttcattagaaaggcccattcagtttgcgctccggcagaatttacatgaactaagtgagcgctgtgtggaggagctcaggcagttcattgcagattatgatgctgctgcttcctaaggactggtgctctagcagaaagtctatcttgattgtcattccagaattgtataaatgcttcatatgtggcgtttttgtgatgaaataacctcagttaaacatctaggaaacatctgaaatggtcagcttaaaatcatcttcagaaatgtttccactatggaacctcatgattcatacactcaccagtgtgtgtcttagcctgctggggaggcttacttactcatgctctgtagtcttccaagtagatgaatgtatggctcagtgtactttacagttagattgaacttcatagtaaatggtagcatgtaaaaatgttaggattcgagttgtggtttttattggcttttgttttcttaggctttgttgcttttattaaaatcatcctacattaaagtatgttttcttaataaactggtactttggtatctc

SEQ ID NO: 2194 - DNA, 1200 bp, Mus musculus
gatagaattcctcagctcgccactgttggatcccatttccttaacccagtgcctttcttactctttcccccttagtaaagtacactgtatctctactgacttactgaggaagaatatgagaagagaatattttctgagatctgcctacccaaaagtctcccacctctttgcttcatctgtattctaatttcagattttgaaaagaaagcaaatggccattcttctactgagaagcagacagcgaggagagcagacagagagaaggaggacaaaggccaagagagtgttggaagcgaagtggaaacactgagcattcaagtgacctctctgtttaaggagcttcaagaggcacacacaaaactcagtgaggctgagctgatgaagaagagacttcaagaaaagtgtcaggctctggagaggaagaactctgcaacaccatcagagctgaatgaaaagcaagagctcgtttacagtaacaagaagttagagctgcaggtggagagcatgcgctccgaaatcaagatggagcaggccaagacagaggaggagaagtccaggttagccactctgcaggcaactcacaacaagctccttcaaaaacataataaggcactgaaaacaattgaagaactacccaagcaacaggcaaaaaaaggtggacaaaatgttgcttgcggagctcagcgaaaagctggagctggcaaagcaggctctggcatccaaacagctccagatggatgagatgaagcagacgctcgctaagcaggaggaagacctggagaccatgcccgtcctcagggctcagatggaggtgtactgctcagattttcacgctgagagagcagcaagagagaagattcatgaagaaaaggagcagctggccttgcagctcgcgattttgctgaaagagaacaatgacattgaagagggaggcagtagacagtccctgatggaaatgcagtgccgacacggggcaagaaccagtgactctgaccagcagacttacctgtttcaaagaggagccgaggacaggagctggcagcacgggcagcagcctcgcagtattccgattcactcctgccccaagtgcggggaggtcctgccggacatcgacacgcttcagatccatgtgatggactgcatcatttgagtgttctctccagtccccaaagctcttggtaaatgccagatttctcctcc

SEQ ID NO: 2195 - DNA, 800 bp, Mus musculus
gactgtactttggaagtgaacaagccgcccgcctcctgggcagcccttgcttacggcgcctctaccatgcttggttggcagcagtggtcatctttgggccccttctgcagtttcacgttaactctcggacgatcttcgctagccacggcaacttcttcaacataaagtttgtgaattcagcatggggctggacatgcaccttcctggggggctttgtgctgctggtggtgttcctggctacacgacgtgtagcagtgactgccaggcacctgagccgactggtggtgggggcagctgtatggcggggggccggacgtgccttcctactcatcgaggacctgacgggttcctgcttcgagcctctgccccagggcctattgctgcatgagctgcccgaccgcaagagttgcctggcagccggccaccagtggaggggctacactgtctcctcccacaccttcctcctcaccttctgctgcctcctcatggctgaggaagccgctgtgtttgccaagtacctggcccatgggctaccagctggcgccccactgcgtcttgttttcctactcaatgtgctgctgctgggcctctggaacttcctgctgctctgcacggtcatctatttccatcaatatacccacaaggtggtgggtgcggcagtaggcacgtttgcctggtaccttacctatggcagctggtaccatcaaccctggtcccctgggatcccaggccacgggctcttccctcgatcccgctcaatgcgcaaacataactgaaagaaataaaagcataccaggcct

SEQ ID NO: 2196 - DNA, 3130 bp, Mus musculus
cgggtttcggcgcggttggcctgcagcgggcgagcctgggctccgagcggcgcggtggtgtggttgccagggtggccgctcgccatgccgtcccgggtggaggactacgaggtgctgcacagcatcggcaccggctcctacggccgctgtcagaagattcggaggaagagcgacggcaagatcctggtgtggaaagagcttgactatggctccatgacggaggtggagaagcagatgcttgtgtctgaagtgaacttgcttcgggagctgaaacatccaaacatcgtccgttactatgatcgcattattgaccgaaccaacacaaccctgtacatcgtaatggaatactgtgagggaggggacctggctagtgtcatttcaaaggggaccaaggatagacagtacttggaagaagagtttgtccttcgagtgatgactcagttgacgctggccctgaaagagtgtcacagaaggagcgatggtggccacactgtgcttcaccgggacctgaagccagccaatgtcttcctggacagcaaacacaatgtcaagctgggggactttggactagctagaatattaaatcacgacacgagttttgcaaaaacgtttgttggcacaccctattacatgtctcctgaacagatgagctgcttatcctacaacgagaagtcggacatctggtccttggcctgcctcctgtatgagctgtgtgcactaatgcctccctttacagctttcaaccaaaaagagctagctgggaaaatcagggaagggaggttcaggcgcatcccctaccgctactctgatggcttgaatgacctcatcactcggatgctgtttctcaaggactaccatcgaccttcagtggaagaaattctggagagccctttgatagcagacatggttgcagaagagcaaaggagaaatctggagaggagaggacggcgctcaggcgagccttcgaagctgccggactccagccctgtgctgagcgagctcaagttgaaggaaagccaactgcaggatcgagagcaagcactcagagctcgggaggacattctggagcagaaggaacgtgaactttgtattcgagagagacttgcagaggacaaactggccagagccgagagcctgatgaagaactacagcctgctgaaggagcacaggctcctatgtctggctggtggcccagaacttgatcttccatcctcagccatgaagaagaaggttcatttccacggggaaagcaaagagaacaccgcaaggagtgagaattctgagagctaccttgccaagtccaagtgcagggacctgaagaagaggcttcatgctgcccagctgcgggctcaagccctggctgatattgaaaaaaactaccagctaaagagcaggcagatcctgggcatgcgctaggccggcaaggcatggagctgggtcagtgttgatactgacaacccactagagattggtattcagctgctgtcgttttgtgtgtctggttctgtgggcaggaacctttgtgtgtggtgagctcgtggcattgcttgtggtctgcaaatggatgtgtgtgtctgcttcctaatgtccctgtgtgaaaagcaagctgtctttgctggttggttgggcttttgatcctgtgtgtgattactacttggaatatgagatggggcactatagatactatagatcttaggagaaaataatgttagggaaagaatatttaacctggagggctcagagaggctcacacgctgagtgataccgccttcactgtggcttccaagtgaggcctcagcgggtccatgacctcactgctaacgggatgcgtatggcagggcccacagggttgcatgtcagaggtgttgtaatgttacagggaggagacccagcctctggcctgacctccctgatgagaaggcactcaccaggattcccattccaggaaggtcctctgtgccagttaacatcagattagaagtggaggggaggggaggccgaggcctgaagcttttaggatttgccttagggaagcgcgtgccatggccctcagcacgctgctgtcctgcatcctaggcaggcactggggacaggaggctctgggagccctgagagccccctcctgctgtgtgcagggcctgtccccgtctgtctgtatctgacctctaggtcagttgatgacattagttaagtgtttctgtacctacaagtataagccaaaaggtcggaaatgcctcagagtcacacatgtggtccccaaacatttaatttctgaagagaactgtcttcagaaagttggtctatttaggtgactggggaaaaggcaggtttcctttgctctctgtccacagtcccttgagatggcttcagaagagaacagtgttcagtgtgcgttattgagggccctgtatgccctccacctgtgtgagggccagattgctgtttgtctacggtttcttgaagacctcagctcagcagaaaggagttcatttgccctaacaagtactgttggctgagaggggaggtcagaagcatgtaatgccattcgtttcatggctaaacacacagactccttgcattttaaaattctgtgcctttacttcctggagctataataacgtgcttgggtgtgtgacttgccgaggttggctttcgcaatgctttatgtaaactctgctgttggcacttgcagctgtagaagctgtcggagggattacttacttacggttatagcatctggggtctcttgcagctgcaatgcctgggatcttttgcaactctgactttttcagtagcagcttggaatgttaaaatatggtgagcctcttctctgtgaaggaagggcctgacaatctgccagcagggaaaagactgggaactcagtgcagtggttttcctgcctttcccttctcctttggtctatagtgatactgacagcaaacccaagtaaaatctgtgtaaaaaaaaatcctaagtatggggtcctaaatgttctgggaatttagaaaaaacttaattggattccattgtttataattaaccaatcatcttatttaaaattttcccaaataaaaaaaatctattttgtgggaaaaaaaaaaaaaaaaaaaaaaaaaaaaaaaaaaaaaaa

SEQ ID NO: 2197 - DNA, 780 bp, Mus musculus
ggcaggggggcgtcagtgtgagtccggcccagcgccgcaccgtgctgcggaggagccagacggacttggggtgcgggccgccaggcgcaggctccgggacaccacacctccgggccctaaggtctctcagtgcggtgagggttctgcgggagctacagccacgctcgcggacgcgcccggggcggggtctcgctcccgcgagggccgggctaggcttcttctggtctgtatttggctttatctctaggtgtcctggaccgctgcctggctacagttatctgtttcacatcagttgcctatccatccttggaacgttcggccccttagcgatgcggcctgttgagagcactggcatcagtgtgctcacagtatcccaggagacgcctgcctttgcagttcagagtctggatagaattgtttccagctgtgggtcggtgggccagaaaaaatctcagagcccaagttccttcctgcataaagtggagagttgcttactatatacaaggtctactttagcatcacatatcgaccttgtcaagatgtcctacgtgtcctaaattcatcttttcatggtaaattataacaccacaagactagtttccctgctacaatgatcagcctttgaattatttataaatagtactggctgaaaaaaatccttcttccactcataaagattttaacaatccccaaggtatctcttgcaggtttgaaaaagagaaggaactaaaatgcttatttttatacttaaaggaaaataaaattttgccttcagaccct

SEQ ID NO: 2198 - DNA, 244 bp, Mus musculus
cctttttttttccctacctgctggctcggagtgcgtggggaccaacatccctgatctatcgggtcagtcattttgttaggcccttccctgtctccccatcttccccctcatccacctgagcctttccctcctgccaggacctcccccacccctgaaaggctggctccccttttcctgactcggtgtatggatctgtggtcatttcctctgcagaaagaataaagactgctcagccctgcctgcc

SEQ ID NO: 2199 - DNA, 2157 bp, Mus musculus
gtggcccgcagctgtgccggccccagcgaccctccgcggcccccaggtcctacgccgccagcctccatggactcgttcgacccccagcagctggggctgtccccagcgcgcttcgctggcacctttggcagtggggcggcctccgtcagctgcagccgactccgccaggttcaaagtgtcctgacccagagcagcaagtctcaaccagatgggatcctctgcatcctcggaattgacagcaggtacaatgaaggctgtagagagctggcaaattacctgctttttggtttgtacagtcagaatgccactgattttgagaaaacgggattttctgaagaaattctagatgacgtgattttattgattaaatcagatagtgtccatctgtactgtaatcccgtcaactaccgctatcttttgccttacgtggcacactggagaaacctgcatttccattgcatgacggaaaatgagtatgaagatgaggaagcagcagaagaatttaagatttccagctttgtggacatggttcgagactgtagtaggattggtattccttatagctcccaaggtcacttacagatatttgatatgtttgtggtagagaagtggccaattgtccaggcctttgcacttgaaggcattggaggagatggattttttaccatgaaatatgagttgcaggacgtgagtctgagtctgtggaatgtctacagcaggatggaccctgcgtctctggagaacatgctttcagaagacctggcggtgtttgagcatcagtggacgagcttctttgctaactttgatacagaaatccctttcctgctggaactttctgaatctcaggcgggtgagccattcagaagctacttcggtcatggaatgctctccagccatattactgaaaacagccctcatcggcagccttttgttctctttggcaaccactccacacgggacaacctgagcgctggcagctttaacttcccttctgaagggcacctggtgcgcaacactggtcctgcagggagctttgccaaacacatggtcgctcagtgtgtctcaccaaagggacctctggcctgttcaagaacatacttttttggagctactcatgttccttatttgggtgacaacgagaagctgcccaggaccacggagcaaatgtaagtccttaagccagataggtttcctcttctcagagttgagtttctctctgaggccctcctgcttccccttggggtccacactgctggggacagacggacactgctgtctgtctatggctcagccagtcccagaacggctcagtctggagccttgtccagagggcttggccgctttgccatctgctcctccctctggaatgcttcctgatctccctgtgtgtatgctcatacatttgtatgacataacttcccttcctgcatattatacacagtaaaaaatacttaattgaggatttttcgaaaaccaaaaccttctgcgattccttgggggaagtctgatatctcatgtggtctgcagagttctttctggacttgacattcagacttgtgcacagagctgtgctcagtctcagctgtgtgctgtagagaggtcctgcttagtattgactgacttccctcctttcacataaaggaggaacgcacgggtcggaaatagatgttgaagctctaaaacatcagctcttgacccgaggccctagcatagctgagttctagacatttctttcaatgaccagcagggattggccacaaataattgtctatatagatcacatcaaactcctggccatgaggtaatgtggctgcagcattcctgttgaacatcagggctgctttggttaggtgttagtgtcatccccttctgacacaggctgcgtactctgcaaaatgacagcttccttctcccattggagaggagtgagaatcaatcaaggctgcacaaatagtgcatgcttctattagaatctccaaacaagtgttcagagaccatggattgaccacagttaagcttctgtgacatgaggccacatggaacatctgcttactgcacatgacatctgcttactacatgtgaaagtctgcttttttttctcttgagacagttatatcaattactttccttgttaccatggtaaaatactaaaatacc

SEQ ID NO: 2200 - DNA, 1996 bp, Mus musculus
tcctcttctgggaagttgtgggaaataatttttctctatttaatattatcatctggttccatccctgtgatgaaaatctgagataatctaacagctcatgccttcaggggtcgctgtgggttgtcacttggcctcactgcattaggtctgtgctgaggcagagcatcactgcttgatggagtactggtcacctcatgctagcgaggtagcagagagacgggtctgtggggaggatgtagagctcaggatcccaaggtctcttcaggtgtatgctttctgttacctaacttcctccaactcggtctcacctcctaaaactaccaccacttgccagtagcgtcaataggctgaagaccaagctttaatattggagactttggggaccttcaggatctaacagcctgatctatcctggtgatggccccactggtcactgttgtctccagtccacgtgcccggctctttgcctgttttcttaggctgggcactcagcaggccggacccctccaattgcatacaggagcctgctgcacagccaagaaccactatgaggtgctggtacttggtgggggagctggggggatcaccatggccactcgaatgaagaggagagttggagcagagaatgtggccattgttgaacccagtgagaggcacttctaccagccaatctggacactagtgggcgcgggtgccaaagagttgtccttgtcagtccgttccacactgagtgtgattccatctggagtgcaatggattcaagatagagtggcggaactgaacccagacgagaactgtatccgcacagacagtggcaaggagatctcctacagataccttatcatcgctcttggaatccagctggactatgagaagattaaaggactacctgaaggctttgcttatcccaaaatagggtccaattactcagtgaagacagtggagaagacatggaaggccctgcaggatctcaaggaaggcaatgcccttttcaccttcccaaacactccggtgaagtgtgctggtgccccccagaagatcatgtacctatcagaagcctacttcaggaagactggaaagcgacccaaggcaaacatcatcttcaacacagctttaggaacaatttttggagttaagaagtatgcagatgccttgcaggagatcattcgggagagggacgtctctgtcaactataagcacaaccttattgaggtccgacctgacaaacaggaggccgtttttgagatcctggacaagcctggggagacgcatgtgattccttatgaaatgcttcatgtcacaccacctatgagtgcaccagatgtcctcaagaggagtcctgtggctgattctgctggctgggtggacgtggacaaagagactctgcagcataagaaatacccgaatgtgtttggcattggggactgcaccaatcttccaacttcaaagactgctgctgcagtagctgcccagtctggaatccttgatagaacaatgtgtctgattatgaagaaccaaagacccataaaaaagtatgatggttatacctcgtgcccactggtaactggctacaaccgagtgattcttgctgagtttgactacacagctcagcccctggaaaccttcccttttgatcagagtaaagagcgaattactatgtacctaatgaaggctgacatgatgccattcctgtactggaatatgatgctcagaggctactggggaggtccagccttcttgcgaaagctgtttcatctgggcatgaattaaagatggctcacagcttgcttttcttggatggcttctggatcaaaatcgcagttactgattgacatgacagatacaaaggactcagaacctcaccctttaaggaggttggacatggtgacctttctaggcctctgaatagctatcatgtggacaacctagaacgagtctttggaaacatccaagtgaaataataaaactctattttctaaataaaaaaaaaaaaaaa

SEQ ID NO: 2201 - DNA, 4190 bp, Mus musculus
  misc_feature 416, 2396: n = A,T,C or G
catcaggcaacatcaggccactctcggcctctgagagaagcagaggatgccccacaaagagaccacgcttggatggaggccagaacccacctaccaggcagctggggactagaactgtgggggcagcgccctgccctaggagctgttctggggaggtcacgatgctgtgcagtgctggagcgggtgacaaaccagaggaagatcctgtgtcctcagaagaatccacagggttcaagtccacacactccctgctggaggaggaggaggaggaagaggaggaaccacctcggatccttcagtatcacgaaccacggtcatttgaagtaggaatgctggtctggcttaaataccaaaaatacccattctggccagctgtggtcaagagtgtccggcgaagagacaagaaggccagtgtntcttcattgagggcaacatgaaccccaagggccgaggaatcactgtgtcgctgcgacggctcaagcactttgactgcaaggaaaagcacgcactgctggacagagccaaggaggactttgcccaggccattggctggtgtgtttcactcatcactgactaccgtgtgcggctgggatgcggctcctttgctgggtctttcttggatactacgctgctgatatcaagctaccctgtgcgcaagtctatccaacaggacgtcctggggaccaggtttcctcagctgggcaagggggaccctgaggagcctgtaggggacagccagctgggacagtggcggccatgcaggaaggtgctgcctgaccgctccagggctgcacgggatagagccaaccagaagctggtggagtacatcgtgaaggccaagggtgcagagagccacctgcgggctatcttgcacagccgcaagccctcacgctggctgaagacgttcctgagctccagtcagtgcgtgacttgcatggagacatacctggaggatgaggcgcagctggatgaggtggtggagtacctgcagggcgtctgcagagacatggacggccaagtgcctgaacgcggcagtggagaccgcattcgcttcatcttggatgtgctgctgcccgaggcaatcatctgtgccatttccgcggtggaggcggtggattacaagacagccgagcagaagtacattcgtggccccacacttagctaccgggaaaaggaaatctttgacaatgaactcctggaggagaggaaccgacgccgtcgctgatgccgcagtctgcacctggccggccagcactgggtgtgacctgccagaggcctccaccaggcctaggagtgtgagaactttgacctgtgcgtgggttctacgtcttcagcctaagtctgggagatcagatgccatcagatgcctgctgccatctatgaacagctgctttctggaagtttctgtgtgtttttgtgtatacatgtgtatgtctggttttattttttttaattattttgtttataaatgcgtttgaatctcgtgccgaattcggcacgagtgcacatctaatgttcagcttcccgggaaggtagccatagtcactggtgctaacacaggcattgggaaggagacagctaaagatctggcccaaagaggagcccgtgtgtatttagcttgccgggatgtggacaagggggaactggcggctcgtgagatccaagccgtcacagggaacagtcaggtcttcgtacggaaactggacctagctgataccaagtctattcgagcctttgccaaagacttcttagctgaggaaaagcatctgcaccttctcatcaacaatgcgggcgtgatgatgtgcccctactcgaagactgcagacggctttgagatgcacattggcgtcaaccacctgggtcacttcctcctgacccatttgctgctagaaaagctgaaggagtcggccccgtcaaggatagtcaacttgtcttctttgggacaccatctgggcaggatccacttccataacctgcagggggagaagttctacagtgcgggtctcgcgtactgccacagcaaactagccaacattctcttcactaaggagctggccaagaggctgaaaggttctggagtgacaacatactctgtacaccctggcacagtccattctgaattgacgcggtactcctctattatgagatggctttggcaacttttctttgttttcatcaagacccctcaagagggagctcagacgagcctgtactgtgccctgacagaaggtctcgagagcctaagtggcagtcatttcagtgattgccagttggcatgggtctcttaccaaggtcgcaatgagataatagccaggcggctgtgggatgtcagctgtgacctgctgggcctcccagtggattggtaagtggtggtttggactcaaaagaagattggnggagatgatgattatccttcaaagtggccaaaaccttgaacctgaagagcgaagaacttcaagcctttcctgcttggcatccagttaaatcctagtacactgccaggttcctcgaaaccccttgagtttgtattgacttattttgttcctgctcctgccagcgtttctagtggtatcactaagacagaggaccttcatgtgacctacacagctcctattttcctttggaaactccccctaaccaggagcatgaaagccctatgaagattggtacatgacaatgtggattagatggagctcctccgagccgaccatcctctccttgaagaactccattgtaacctcagctgaacctcaggagtcccggagcctggctcaagggcaggcagggctttgtggtcccaacatctggatacttaagaaaagtttttactaaatctggcagtctgaagctttggcttctgagacacttttctatgtccagaccactgaagagcttccttctctaagaaatttgtgggatttgaagggcagagataaaaataaagccaaactgtcattttctcccgctgtttctcagcctagtaaggaggtaatgaaaggaacggtatgagacgataggtcactggggtcagttactgaccccagacccacagagcctcttttttgtcccttagtttctcttaggaaactagaaaaggaaggccttctcattgtcattgtgtcgattttgtgtgtcttcttgtgcattcatgcagttgaatgtgtttccacaaaattcacaatagccacaaaggaaaagttcttaatcagactgtagtgtagacaaattaccagagatgggacaaatcactgtggagtctttgagtacagttgcaaagcaagggagacactatctgtgttgtaatcggtcactgagaagcacagatgccgcagggaagaagtttaaaagaaaaatcctaggaggggacacatgataatgaaggggtcagctgaggatctaaaaccataacggaaaggcagtaatagacagctacagaaaggcacactgtcttaatcaccagtcagtcagagtgataggaaaatgtccaaagcacaagagtgaaatatttctctattcagaaatgttatcctaaggattggtaattatagtcagttcataatcttttagagcattttcttacattagcttaacaagatgtccatttcaggaatgtgtatggagagatgggatggcttagtaatgcctgctgttccagaggaccctggttcaattattaggacccacttggcaaccacaaccatctataacctcagttatagatgatctagaggatcagacagcctcatctacctccacaggccctgcaggaatgtggtgcatagatatatatgcaggcacacatacaaataattttgtaaaaaaaaaagaaatcaattttgactttgggggtatgctctcctgaaatgttgaggcccctgggtttgatcccagcactgcaaaagaaagtagagatagcctcaatttactacgattctgctttatttggagagcttttatcaaaagcaatgcagaccaagggtgtcaggaatccctcatgttcccatcactggtttggaggatgctattctaagggagtttgccatttcctcgggctgacaattatattttaagcttgaatatgtaagactgacaggaccacaatctttaacttctaatatttgtaaattaataaatttatgggtttgttctgaccaataaacgtattttaaaattaaaaaaaaaaaaaaaaa

SEQ ID NO: 2202 - DNA, 1027 bp, Mus musculus
attcggcacgacggctaaaatggaagtggagcggactcctagtaccgctagaagctgctggcggaggacaaggagaactaactctaatttgtcccggcttcggaggtggaaaagcccccactggtcgggcctagaagctgagggttcaaggaaggtgtgcaaggcaggtatagctgtctctcctggatgccaagatttgagacccagaagtctcccatggttccttatcacatccgacagtaccaggacagcgaccataaaagagtcgtggatgtgttcaccaagggcatggaggagtacattccctctacctttcggcacatgcttatgctgccccgaaccctcctgctcttacttggggtgccccttgccctggtcctggtgtctggctcctggatcctggctgttatttgcatcttctttctgctcctacttctgcggctccttgccagacagccctggaaggaatatgtggccaaatgtttgcagacagacatggttgacatcaccaagtcttacctgaatgtacatggcgcctgcttctgggtggctgagtctggggggcaggtggtgggcatagtggctgctcagccagtcaaggatcctccactagggaggaagcagctgcagctctttcgcctgtctgtgtcctcacagcatcgaggacaggggatagcgaaagcgctgaccagaactgtcctccagtttgcaagggaccagagttacagtgatgttgtccttgagaccagcgccttgcagcaaggtgctgtgactctctacctgggcatgggcttcaagaaggcaggccagtacttcatgagtatattctggaggttagcaggtatttgtacaattcaattaaagtactccttcccttctgcctaggaggggtggctgtgaccttatgctcctgtgcagcaagcacacttctctgcactctgctacaggaaccagtgaaccctgtcatgtcagtgtgattaacaataaaagttgttggtgcacaccaaaaaaaaaaaaaaaaaaaaaa

SEQ ID NO: 2203 - DNA, 2391 bp, Mus musculus
  misc_feature 38, 39: n = A,T,C or G
gggctggctggggactcggccgctggggacaggcaggnnccactctggtccctgtcccgtcctttgggcctcgatccctcggctgcaggctctatggtgctggccacgacatgtggcgcctgacagggatcctggggcgagctcttccccgcctgctgggacctggcttccgtgggataacgcccaaacccaccagttcagatgggtctcagacaacctcccctaccctgccgctcactaggctcagctttgacagatcaggttcccacggttcaaagaggagcagggacccaaagtgctgtggatggaaagatgcctttcactggatgtctgctcatgtctccccaaacacactgcgggacgccatctcatggggcactctggcggtgctggccttgcacctggcgaggcagatccacttccacgcccctctggtagcaggacctcagccagctgaacgctcttggcacagtcccctgtaccgcttcctctcctcttcctggtggcacccacactcctcacttcggaggcatgttcttcccaggtctgactgcccagctcccaggaacactggcctcagggaaccaaggcagggccaggaagaccatccctcagctccatcccagtgccttccctcagatagctccctgagatctggacttctgaatctgcctgaagaagagcccagtgactttgacttcctgcatgctagccgagacttcgcatcccaggcaaaggcagccgaggcccacccccctggaggaaaaaatgaacaagacaaggccaaggctcttcctctggaggaggctgtgacttccattcagcaactctttcagctcagtgtagccatcactttcaacttcctggggacagagaacataaagacgggggactacacggcagccttttcctacttccagaaagccgcagaccgtggctacagcaaagcacagtacaatgtgggcttgtgtctcgagcatggcagaggcacccccagggacctcagcaaggctatcctcttttaccatctggctgccgtccagggccacagcctggctcagtaccgctatgccaggtgtctgttgcaaagtccaggctctttgtcagaccctgagcgagagagggcagtctctctgctgaagcaggctgcagactctggcttgacagaggcccaagctttccttggggtgctctttactaaggaaccacacctggatgaacagagagcagtaaaatacctctggctggcggccagcaatggggattctcagagcagattccacttgggaatttgctatgagaagggccttggtgcacagaggaatctaggagaggccgtgaagtgctaccagcaggcagcagctatggggaatgaacccgcccgggagaggcttcggaccctctttaacgtggaagcagcagggcccagccacctggccacgacaggactgaagtctttctccagcccctccctctgcagcctgaacaccctgttggctggtgcctcaggcctccctcatgcctcaagcactgggaacctcggcctcctctgcagaagtggccatctcggagccagccatggtgcccccagcaggactataccatccttggaaaggagcctcgtaagactaggtttcggctaagacctcctccttaaagatggagcctgagagttctcagagataccacaatttgagtcccaaagaagaggccagttagttacttaccttcccaggaaccatcagtacctccccggcaccataaggaagaggaacgtgtgtaaagacccgggctttggctgcgccgcctggaagcagtgactggatgtcaaccacatctcctcagttgtcgactgaggactcctgccttaatggattgagatgcagccatttcaccatagaaagaaccttactccttgcttaggttcctgaagacagactggtgcccacagttccatggccttaagaaccaccaggctgctgggcatggtgagacacacccaatcccagcattcaggatgcagagaggcaggcagatatctatgagtttgaggccagcctggtctaccaggtgagttccaggacagccaaggcttgttatacagagaaaccctgtctcaaatcaccaccaccacccccaccaccccccaaaaaagaagaagaagagtcactaggtcaagatgaggatcaaagctgacattatgactccagccaagacttcagtctaccagttcacactgcattgttatctgaaaacattatcatcaccctacagatcagtggagattaggcacctggagtcttggagccagtgagtggagaccatgagttctttttgggaaaggtcaggtagggatatacaagtgtttaataaaacagatggtggattatc

SEQ ID NO: 2204 - DNA, 3620 bp, Mus musculus
acggcattcagcctccagtggagctcagctgtaaagaaaggaatatcctagcagccactttcatccgttccttgcacaagaacattggaggctctgagacctttcaagacaaggtgaactttttccagagagagcttcggcaggtacatatgaagagacctcattccaaagtcactctgaaggtcagcagacacgccttgttggagtcgtctttgaaggccactcggaacttttccatctcagactggagcaagaactttgaagtagttttccaggatgaggaagctttggattggggagggcctcgccgggaatggtttgagctaatctgcaaagcactgtttgacaccaccagtcagctcttcgcccggttcactgacagcaaccaagcactagtgcatcctaaccctaaccgcccggctcacctgcgcttgaagatgtatgagtttgcagggcggctggtgggcaagtgtttgtatgaatcctctctagggggagcctacaagcagttggtccgtgcccggttcactcggtctttcctggcccaaatcataggactccgtatgcattacaagtactttgaaacggatgacccagaattctataagtccaaggtgtgctttatcctcaacaatgacatgagtgagatggagctggtctttgcagaagagaaatacaacaaatcaggtcaactggataagattgtagaactcatgacaggcggagctcaaaccccagtcaccaatgcaaataaaatcttctatttaaacctgctggctcagtatcggctggccagtcaagtgaaagaggaggtggagcatttcctgaaaggcttgaatgagctggttcctgagaacctcctggctatttttgatgagaatgagcttgagctgctgatgtgtgggactggagacatcaatgtatctgacttcaaagcccatgctgtagtggttggtggatcctggcatttcagagaaaaggtcatgaggtggttttgggctgtggtttccagtctgacccaggaggaactggctaggctgcttcagtttacaacaggctcttctcagctcccacctggaggatttgctgccctctgtccctcatttcagattattgctgctccaacccatagcacgcttcctactgcacacacatgttttaaccaactgtgcctccctacatatgactcatatgaagaggtgcacaggatgctacagctggccatcagtgagggttgcgagggctttggcatgctctgaccgctcctctgtcacctgcttggctcccaagctctctagagcatctggacacatgttaacaagcatagccactgaccttaaccacaaccattagccagaagatactgcatgctcccttgtgtctggagtattctgtcatctgcaagccctgttcttacctcacctgtccacgttcaccacaggccacttgagcacgtggcacctatctgagctctactcagtcatgagaggaggaccatgctgctgtcacttcgttggtcccttgaagatctctgtgaccggatctgcctccgtggctgggagacattcataacacagaggactcagttctgttggaaagccagcatgtgagacccttccaccatgcctcattccagccctccttgagctcactacttgaccagactgggtaatgcatcacctcttctcatcagtggtcaggagaagtgcagctagaaagtggcccacacaagccgtctgatttgtcctcccacataatggcaggcacaggccatggcactggattagttctcatggggactggtagtacaaaaggatgtctttaaggtgacagaactggaaaagatactccctgtgggcatttttaaagatgatcattaatctataaggaatttgctaagctttctcttgaatttgagccagtgagaaaagcagtcagaagaatgtgaaggatgtctgcgctgcagcctccagtgctgggtacgcttctctcgtggggaagggccgtgtccaggcatgtggatggcttgaagactactgatgctttcctctgaattgttctttgcactgaaggaggacttggactgacctccgacttacatagtttgttaagagctgtctttagcattctgctggaagaattttgggagcaacagactgggacagagcctgccagctgtggtggtgatctttggcagtgctaaggcaaaggagcggtgaagccactggggacagacaaggtggagacccagcagcagtaaatacctagcaattccaaggacttggtttcatcagttaccaggaagtgggggaaccatggagggagaacgctatattgggttcacagttacatggtgatcaaagagaacttctcagtctccaggaagatagcatcttttcatgagtgtttgaatgaaaacaacacgaaggctcaatatcacatggatttcccagtttctgtctttaataaggctttcctacaagccactattttccatggggcactcactcagaatattacaagccattttattgccaaaaccagcaagtacaccgaatcctgagacaaggcagttcttgtgacagtgccttggcctcctggaagcagtctgagccctcctgttcccaggatcacgagaaacaagctctcctgagctgctagaaccctgcctgacctcctttgcagtcatcatctgtcttttcttggcgtgggtgctcacctcacttatcctcggggtttgggacctggcatcaggacctctccacccaggatcctccatgccacatggtcactgctctcctcagggactgggacaaggtgctgccgcctgcccacagttttcccaaggaacacgtacaagatcatttagccactactctgctgcctctcagcctctgctggggcttccagctgggtacatggctgcttggccgtttggggcggttcttcctcctaggttctgcaatccaggctccagcacccctctgcagactacacagggggtcagtgtgtgtgtgtgactagacctctcattttaagctctagtcgtagcactttttcagagtctcctaggcgctgttgcagcccagctggggcagctagcatgccaggttggtctttaggcaccagagtctttaacaaaaaaatcctctagtactgtgtggttttctattcttccagttcactctcctgactgttcagaagcattttgctctcttttgcattttcttttaccttttttttctaatactgctttggtactagccagtgtggggaagagatacagtatgttggacagataaaaacatgtgttatttcttggtcaattttctattcatattccttattttggccagttcttttgtttgtgctttgtaacataggtacttgggagaccagctgccctcctggcttttggctttttggtgtccttgaaggagaccagtcatgagtaccaaggaatttgtcagcttggttctagaacttagcagaggttgagctctgctgcacattggcagaccaggtcaggatgtctgcagttggagatgtaaatattttgtacagtaaataaaatgcctacaataataaagagaaaaaaaaaaaaaaaaaaaaaaaaaaaa

SEQ ID NO: 2205 - DNA, 1547 bp, Mus musculus
ggagctgctgacaggaccaggtcagaaggggctccctgagcagcgctgcagccggagcatttggggcagcattaagcaacagctcgcagcgtgcactctcccctccgagccctccagggcccctgccccggagcccagcaactctcggccgcggttcacgcacgcatctccgaggaccccttgcctcacctgcgcctgccacgcccgtccggccgccgggatgagcgagcttaacaccaaaacacctccagcagccaaccaggcatctgaccctgaggaaaaagggaagcctggcagcatcaagaaggccgaggaggaggaagaaattgacattgacctgacagcgccagagacagagaaggccgcccttgcaatccagggcaagttccggcgattccagaagaggaaaaaggattccagctcctgaatggccaggcctccccttaacccttctacttcctctctcccctccacagctctgactctcacgtatctcattccttcatccctctagcctctccccaaggcaagcttaacctttatatattcttgtctcaggctctcttaagccatcacagtagtagaggcacaaggatgcgaaggtgaagactctagctggtagtcactaggctaagggtggatcagtccatttaggagaacaaaaggttttgagatgtgaaattctcccctttgcctaatgctaagggcaggagggggcaagccctcagagtgcagagcctcaaggtggggcacatgtaggcttctgccagttgcaccattaacacttcaggcaacactttcagctccctctgcacaactcctcccatctcccgtgtttcagccctagtgcagctgcactttctcccgggctgacctaaatccaggagcttgcaaaatgtggggtgcatgcctttagtcccagaccttggaaggcagaggcaggtggatctctgtatgttcgagccagcctggttgacatcatgagtcccaggttagccaaggctacagagaccctgtctcaaaacagaacaaaacaaaaaccaaaaaaacctacccatgcaaaaataaatataaataaataaataaataaggcggcttactacactagtgcatgctgagtagattcctcccaaggaaagagaactggggctggtagaggcaagggaggaagagcttccttcaccatccagactgaggtcagaagagccagtgatggcagaaggttcagggacgacaggccgggaaatgaaaactgagaaacgtttaggaaggaaagcagaacgagatggtcaagatgtctgaagctacacactattgttgttaacctaatactccacgaggggctctctggcctttgctaacctgcctacctctttacccgcccccatctctagtcatccctagagccatgtgaaccaagtgacacccctatagctctcagccaccccactgtggagtcagggcaaacatcgccactgtatgtgactttagcatgtttaataatgatgacaataaaaaaagccctcaaatgggggcattgaacctct

SEQ ID NO: 2206 - DNA, 2277 bp, Mus musculus
gagtcaacactgccttctgggtaaagtgcacctaggctgggggagagcaagcagaacgcagttccacagttgaaaatgaggctgctcatctgcgcccttctatgcttggggaccctagggctgtgcctggctcttcctgagaagaccatacgatggtgcgttgtgtcagatcatgaggccactaagtgttctagtttccgtgacaatatgaagaaagtccttcctgcaggtggcccagctgttacctgtgtaaggaaaatgtctcaccctgagtgcatccgggacatctcggccaataaagtagatgctgtgactgttgacggagctttggtggctgaagctgacctgcctcaccacagcctgaaacctatcatggcagaatactatggatcaaaagatgatccaaaaacccattattatgttgtggccatggcaaagaagggaacaggcttccaactgaaccagctccggggcaagaagtcctgccatactggcctgggctggtctgctgggtggtacgttcccctcagcaccctgcttccttctggctctcgggaaacagcggcagccacgttcttctccagcagctgtgtgccctgtgcggatggaaagatgttccccagcctgtgccaactgtgtgcggggaaggggacagacaagtgtgcctgctcctcccgggaaccatactttggctcctggggagccttaaaatgtctgcaggatggcacggcggatgtgagcttcgtgaagcacctgacagtgtttgaggccatgccaacaaaggccgacagggaccaatacgagctgctctgcatggacaacacccgcaggccagtggaggaatatgaacagtgctacctggcccgggtcccttctcatgttgtggtggctcgaagtgtggatggcaaggaggactccatccaagagcttctcagagtggcccaggaacattttggaaaagacaagtcatcacccttccagctctttggctcccctcacggggaggacctgctgtttactgatgctgctcatgggctcctaagggtccctcgaaagatagacatcagtctgtacttgggatatgagtttctttctgcctttcggaatcttaaaagaggtctggaagactcccagagggtgaagtggtgtgcagtgggccagcaggagaggaccaaatgtgaccagtggagtgctgtgagcggtggtgctttggcgtgtgccacggaggagacccctgaggactgcatcgctgccaccatgaaaggagaagcggacgccatgagcctggatggagggtttgcctacgtcgcaggccactgcggcctggtacctgtcctggcagagaactacttgtctacccacagcagtgggaggctggggtctaagtgtgtgaacgcacctttggaaggttattatgttgtggctgtggttaagaaatcggatgttggcatcacctggaaatctctgcaaggcaagaagtcctgccacacggccgttggcacttctgaaggctggaacgtccccatgggtttaatatacaaccaaactgggtcttgcaaatttgatgcattcttcagtcgcagctgtgccccagggtctgaccctgactctcctctctgcgctctgtgtgttgggggtaacaacccagcccacatgtgtgctgccaacaacgctgaggggtatcacggctccagcggagctctcaggtgtctggttgagaagggggacgtggccttcatgaagcaccctacagttctacagaacactgatggaaagaaccctgagccttgggctaagggtctgaaacacgaagactttgagctgctctgccttgatggcaccaggaagcctgtgactgaggctcagagctgccacctggccagagtgccaaaccgtgctgtgttctccaggaaagataaggctgactttgttcgaagaatactcttcaaccaacaggagctctttggaagaaatggatttgaatatatgatgttccagatgtttgaatcctcagctaaggacctgcttttcagtgatgacacagaatgtttatctaaccttcagaacaaaacaacatataaaacatacctaggaccacagtatcttaccttgatggataactttagacagtgcttgtcctctgaactgctggatgcctgcacatttcataaatattaaacaccattcagctggggggggcggtaacccaggggctggggacccaactgcttgcctccatgtggacttgtgcagaatgaataaaagtatcttcccagt

SEQ ID NO: 2207 - DNA, 4670 bp, Mus musculus
cgtgaagggaagatgagcttgctgggcaagaatacacatgactggacagtgctgtgaggagttgcagagagccccgaagcccagggtggcactgagaaccaagaaaggattgaaagggtccattgaggatgtccttggagacctcctgggagatgacacaacaccacctgagaagcctgctgagccagcttcccatgccaaagacacagcgagctcacctcagtggcaggcttcaaaggcaaagttcctcccaaaagacagcgttgaaggactggcaggagctgatgctgaggcctccagcgtctcggatgcagacccacaggtcttcctgcagaacatgaaggacttggacagcatggacgatgatctctttggtcggataaagtctcaccagccctccggcaaaggagctgcaaagggtcctgggaaagaaggacctagcaatcacaagcctgctggcacattaacagctaatgagaaagggtacaccatgcccactaagaagccaccaccatcttccagcaagactgggcttcagtataagaagttctcctttgaagactttgaagacccactggcaggacttctctctgatgaggaagaagaaaccgccacgaagctgcctgcagtggagaggaaacctgctcccaagagccygggcgcagcagcaggccaaggtccttctgttcctctgacccctggggatacgcccatcaggaagaaagaactgctctttgatgaaggggatgacatcatgactactctgggctttgaagacagccccaaggcagagaggaagaagacaggagaccaggaagggccactccctgctcgctccaagctggatgaactgctgggtcggggtacagcagccaagctcctcactcgcccaggcactggggaacgcagagagttccagttagacaagaagtatcagaagatgggaggggaggagtctgtaccagctagagacaaggaagacagctgggatgacgagaccctcacctttggggcttacaagcctaccgtggcctcctctgagggccgccagtcccgcaggcagtcagtcagcaggttcttgggagaaggaggcccagaccctaagggagaaagcctaggcttcaaacagagctctccaccagcctccagtcctatccaccccaggaaaggaggagctgactggttaggccttaaggacaatgacctggacctgctgtctccctctcctgttcaaaaggcccaacaggaagactcacccatgacaccctctctcctgcctcctacaaaccagccctcagccccagagccacagtctgccccaactggacttccctcagcagcaaagccaccagccaagggtgcaagaccctctctcaaagccagccaggcctcctcaccaaaagcatctgaggagaaagaagatgactggttaagccatgtcatatctcagaagaaatcccaaaatctagccagagaagagcgtgcggggccccctaaggacctggcctcgctggggtcactgggtcagaccccttctggcagcctgcctgttgctcaggtccttgagcaggcccctgctggagaagcctcgaaaccaactacacaaggaatggcggctgtcaggcctggtgtcacagggtcctccatgagttggagccaagccactactgttctccctgtagatgaccccaagaaaggagcagcctctgcctctggggacttctctagcagagagcctgcggtttacattccacactcccaggaacctacggggctctctgtgcctatccagaccctcctcccagagtccatgatgcagagtctgctgccaggctcaggataccagaagcagctcctggccgcccaggggcagctgcagagtagcactgcccagcttcaggttgagctgctgcagagccagaccaagctgtcagagctggaggcccaggtgcgcaagttggagctggagcgggcccagcacaggatgctgctggagagtttgcagcagcgacaccaggcagacctggagctcatcgaggatgcacatagaagccgtatcaaggtgctagaaacatcctaccagcagcgggaggagcagctgcgcagagagaaggaggtgctatcagctcagcatgcgtcatattgccgagaagctgagcaggccagggctgagctcgtagcccagcaccagcggcagatggccatggctgaacaggagagggaccaggaggttgcccggctccgggagcttcagcaggcatccatcctggagatgcgcaaggatcatgagcaccagctgcagcggctgaagatgctgaaggaccaggagattgatgctgtcaccagcgctacctcccatactcggtccctgaatggcatcatcgagcagatggagaagttttccagcagcttgaacacgctgtcctcccgcgtggaggcctcgcaccttaccacctcacagcaacgagagctggggattcggcagcaagatgagcaattgcgagctctgcaggagcggctgggccgacagcagcgagacatggaggaagagcggaacaggctacaggaggtcatcgggaagatggaagtacgcctgagtgagcagagccggctcctggaacaggaacgttggcgggtggccgccgagaagactaaggcagagtcagcccagcgcactctggaggagcaaaggaagatcatggtccagcagattgccatggagagggaggagctggagagagccaagagcgccttgctggaggagcagaagtcagtcatgaataagtgtggggaggagcggcggcgcctggcagcagagtgggctgagtatttcacacagcagaagctgagtaaggaacgggcggagcgtgaggctgagagggcgatgcatgcagactcccagcgggagggcaccatcatcagcctgaccaaggagcaggcggagctgacagttagggcctgtgagctccgggccaaggaggagaagctgcttgctgagagggaggctttggagagagagcgccaagagctccggctggagaaggacaggttacacaaagccagcctgcgcctgcaggcccgtgcacaggaggtggaacacatgagtaaggtagcctccaagaaatacgaggagggggagcaggccttgcaggaggcgcagcagatgcagaatgagcagcagggccggctgcaggtggtccagcggcagcaggagtggctgcggcagcaggagcaacgtgtgcaccaggagcacctgagcctggcacagcagaggctgcagctggaccgcgtgcggcaggaagtgcctgctagccttccggggctgccccccagggttcagggcccggcagcctccagccgggatgctgtccaggcccccgcttccagcagtcctcagtgtagccagccagctgctgcccaggtgcccacacaccttcttgccaagctgctgctgctaaagcatacagcagaagaggaccacgacttcttggagaatgaacagttcttcctggagactctgaagaaagcaccctataatatggcgtaccattctgcctgaaaatgccccgtgcttcctcagcgggcatctggcctggagtgctcgcccactgctgaccagctccaatctgtgagaaaggctcccagcaaagtactgcactgcttgcccagagcctgattacaacttcttgtatggacagggtatctgtgtgttcttcccaggcgctctgacctgcagcttagaggcagcaggtgcctccccagggagcagtgacagtaagaccatcttagcacccatcatagtaagacccccgctcatcactgccttccacggcagtcactggggtctttatgcctgggctactttagaggcaggaacctatttcaggacagtagggtcatacaccatgaacagcctttgctttcaatgagaggtccttcaaatgggaatagggagaagagccttctagctgagagtgggaggcctggccagggacaaggatggcactgctgaggcacaccatgcccagatggattgattctggggcttgaatatgtccgggcttcacccagcccttcatctcaccctcgggtagctcacacacagctccattactccccagtgactcagcattactccccagtgactcagcattactccccagtgaccagcattactccccagtgaccagctaactcagcagcagcactggcttctcccgccccctccaggttccctccagaggtggggtggggagctgtaggagtagaggggtgtgtggagaagcagaggaggaagggagattgtgagagctagagactgcctgaagactaggaaggagccctggggccaggctgctgctcctcccgtatgaaaagtgccaagaccctctagtagggtatcaggagacggcctcggaagggaaatgatccagcagacccagcacacagagaatctgctgttcctacacagcagcttccattcaggagcacttcctcccttcccagctgagagggtgtgtccacagaagcaggggggaagaggaggggcacaccagagggtcagagggtagggcaccgctgctctgcccctcagaacctctcctggagacacctgaaaccttgctatccgacccattaaactgttgtattgtttcgaaaaaaaaaaaaaa

SEQ ID NO: 2208 - DNA, 5353 bp, Mus musculus
gtcataaagcagctgatgaagaaggagttcactctggagttttcacgggatagaaaatcaatgtccgtctattgtaccccaaacaagccaagccggacatccatgagcaagatgtttgtgaagggggctccagaaggtgtcatcgataggtgcacccacatccgagttggaagtaccaaggtccccatgactcctggtgtcaaacagaagattatgtctgtcattcgggagtggggcagtggcagcgacacgctacggtgcctggctctggccactcatgacaacccactgaagagagaggagatgcacctggaagactctgctaacttcatcaaatacgagaccaacctgactttcgtcggctgtgtgggcatgctggatcctcccaggattgaagtagcctcttctgtgaagctgtgccggcaagcaggcatccgggtcatcatgatcactggagacaacaaaggcaccgctgtggccatctgtcgccgcattggcatctttgggcaggatgaggatgtgacatcaaaggcttttacagggcgagagtttgatgaattaagcccttcagcccagagagatgcctgcttaaatgcccgctgttttgctcgagttgaaccttcccacaagtctaagattgttgagttccttcagtcctttgatgagatcacagctatgactggtgatggtgtgaatgatgctcctgctctgaagaaatctgaaatcgggattgccatgggctcagggactgcagtggctaagactgcttctgagatggtcctggcagatgacaacttctccaccattgtggctgctgttgaggaggggcgagccatctacaacaacatgaagcagttcatccgctacctcatctcatccaacgtgggggaagtggtctgtatcttcctgacggcagcccttgggtttcctgaggctttaattcctgtccagttactctgggtcaatctggtgacagatggtctgcctgccactgcgctggggttcaatcctccagacctggacatcatgaacaaacccccccggaacccaaaagaaccactgatcagcgggtggctctttttccgttacctggctattggctgttatgttggcgctgccaccgtgggtgctgctgcatggtggttcatcgctgctgacggcggtccaagagtctccttctaccagctgagtcatttcctacagtgtaaggaggacaacccagacttcgatggagtggattgtgcaatctttgagtccccatatccaatgacaatggcactttctgttctagtaaccatagagatgtgtaatgccctcaacagcttgtctgaaaaccagtctttgctgaggatgcccccctgggagaatatctggctcgtgggctccatctgcttgtccatgtcacttcacttcttgatcctctacgtggaacctttgccgctcattttccagatcacaccgctgaatctgacccagtggctgatggtgctgaaaatctccttgcctgtgatcctcatggatgagacgctcaagtttgtggcccgaaactacctggaacaacccggtaaagagtgtgtgcagcctgccaccaaatcttcctgctccctgtcggcatgcaccgatggcatttcctggccgtttgtgctgctcattatgcccctggtggtctgggtctacagcacagacactaactttagcgatatgttctggtcttgactgacagcgctacatacagaagatgtttaacttaatcaattaattttttattgtttaaagcaactgtctatttctgctgaattttcacatgaacatattggctggtgaaggaggtttcatatctagattttgttttgctttttctgactccagtgggacaagattttcctttttttatacacataattaaagtgtccattgacgtgtacagagaactaacactattttatgcagatatttttttgtagatgaaaaagcatgtacagtgttctgtttaatactcatacttgtacaaagatagttgagccagcagacattgtcagcaaattaattggcagcagacttaggaaatgaatgtgtgtggtttttaaaagaaaaaaaactaaatagcatgtattgtgtcttttgcatgattctctggatttaatttggtatcacagtctaatttttattcataagccaatttttctgcactgagcagagtcctgctacctcagtcagtatttttggtttgccacttcctgcaccctcagcctctgtcacccccagcccaccccagcctgctcggcttcttctgtaggtctgatggttctgtttacatccgtcttcacgagaggtttgcctgtctcgcttgtgcagaaaacattgctccagatccaatcgactgggtttctgtcccttcgcctagtttttaaggttatttatttaaatgtctaatgtattttattgtaacagacattgttttgccaacattgcctattcaatggcacttcacaatctagtttaaaagaaaaataaaacattttaaatggacagagaaaaataactgtcttgttcttaatggccttgaattacgtataatcagttcaaatttctgagcttctcagcttagagccttagtttcctgttctgagaagagtcctgttctgccgcatagtaggattttatttataatgtataggcacgatctgtcatgtgatatacattactcaagtttctgctggcccgttgtatgtaggttggtgtaagggcaagtgtgtgtttatgtgtgtgtatgttttgtaaaatctgtaaatagcacatgaccaaatgaacatattgtatagaaatatttttatttgactatggcactaaccaccaccaccatgactgatgaacgtttgcgcatgttcaaggtcagtcttaacggcagtgtgagtcattaacagtcctaactgtggtgttttcctccaatgccttccaacatccatcaactaacgtgagtatcttccctgtgggactggggtgctgtggcctgtgtacaggtggtgccactgatgagctggcccctgttgctagtgagctgcatggctcctgtgtccaccaggcagccactcactacacaggctaccctagtgtagacactgaccaggacagcgatccctatgagctgtgggaaggagagccttgggacctggctgacttcaggctgaaggagctgtgtcacctctagtaccaaactgagactggacacaaaccatgtcacaaggctatgggttttcagtggctgaggaagactaggaaagccagctgactccgcataggcagcttttgtcacccttcaggacatgtctcaaccctctggtgtgcagaggcctggagactgcgacctcctccctaagttgcaggagaaagtgccaggttctgagggaacctggcactgacccttccttggggaggcctctgtgtgctacagggagcagtgattctcaggaagcaggcaggttttgatggagtgggccaaacacaaaggtacagctgagttaaagaccaaatcagaatgatagcgtgctgggccctaacaccatgctgttcagtgccgtttacgaatgagtgggccctaaaggaaatggacctcatccctgagtgctgtgttgcttactgggacctgttcaaccccaacagatagactaacacttgacccatccagccacaagcaaggctgacaaaaccttcccctggcccgcatagaccaaggccaacagcacagtcccagccacaggccacctcctgcatgtcctcagccctgctctcacccagcaccctcaagaagggacagcatttattgtgtcagcatcatgctcaacccactagggcagtctagcctggaccccagccttgaactttcccggaatggcctcttcagcaaagctgtctaaaggttccaccctgcagcccactcagcaaaattcaggtggtggcctccccggagagctagcagggctactaaggctggagaaggctagccatctcacagcagctgctatcacagcaccctcaaaatagggtctcagccccaacaatggcacaggcctcaggaacatctaagatggcagcattggctcggtgcctgcagagccgcagagccaaaaagcatggttgccctttgtcgtgagctgccaaactccattaggactgacccctgcaattgggaaaccttcaaagcagagctgagcctgtagcccaggactggctgccatagagaacagggagggacaggaaggcctctcccctggtgccatgccactcactgctccacctgcctcaccctctgcatggctctcagccctgtacctgacatgccttctagtttctgcctcctggaactttggtaggaggcggcccagggcagtcaccaagccactgcttctagatgtgcctgggcagcaagcacttggaacactccgtcagaaatgctggttttgcatctagaccaaatgcagtgttctttctgtctgtccctgttgttgtgtcttaacattgctctacgtttcgaaaagctgatttcctctctctttccttttcagcaatactggagtaaccgcttcctaaaccatttgcagaaatataagggtgttcgggtgcgtgcatgtgcgttgttagcaacacatctaccagccctctgcatgactgaggttggggaaaagaaaaatagaaacagtccccaactcactgtgtgatgtggaggaaatgtgtattaccagtggggttttagctgttcaatcaaaataataacaaatgtacaatttagcataacaaatcagagagcctctccagagaagttggtttctttgctgcgagaaggaggttctgaaaccttatccaagaacagaagccatcagccaagtctccacatttctctgcaaaatgtcatagcctctctaactgtatgataattgtaatgcatgccttcagttgtaagtggccagattgctctacagtgacattgaaacatgctttctaatgggccctgtacagtttgcttatttataaattcatttaaaacactacagctgctgaatggttacaacataggcctccagtcctaacttcagttgtttaggtgtgcagccagctgttccacactgtattattgtaacttatttaatgaagtcagaagcagtagacagatgttggtgcaatacaagtattgtgtgcatttatcgtaataaagtgctcagcgtcagttcagttgctcacagcttctcacagcgcatgtttgactgtagtctgtaaatagaggtcagtttctgtgctggtaacaggtattgcacagacatgatttcaggtaaataaatctattctacgataaaccctc

SEQ ID NO: 2209 - DNA, 2818 bp, Mus musculus
tgctgcggaacagtggctcggccgccgagcaggagcaggcgcgccgcgtgcaggccgtgcgcggcagggggacccatctgctctgcaccctgctcctgggccaagccggcagccaatgccgcgctggccggctggctgtacgcctcgctgccgccgggcgtcggggaccccggggaggactccggcgaggcgggggttcacttcccgtggctgccggcgctggtgtgcaccggcgccgtgttcctgggagccgagatctgtccgtactcggtgtgctcgcgccacgggttggccatcgcctcgcacagtgtgtgcctgacccggctcctcatggcggctgccttcccggtgtgctaccctctgggccgcctcctggactgggctctgcgccaggagatcagcaccttctacacgagggaaaagctgctggagacgctgcgggccgccgacccttacagcgacctggtgaaggaagagctcaacatcattcagggagccctggagctgcgcaccaaggtggtagaggaggtgctgacccctctaggggactgcttcatgttgcgctctgacgccgtgcttgacttcgccactgtatccgagatcctccgtagtggctacactcgcatcccggtgtatgagggcgaccagaggcacaacattgtggacattctgttcgtcaaagacttggcctttgtggacccggacgactgtaccccgctgctcacagtcacccgcttctacaacaggcccctgcattgtgtcttcaatgatacccggctggacactgtactggaggagtttaagaagggaaaatctcacttggccattgtccagagagtgaacaacgagggtgaaggagaccctttctatgaggtgatgggcattgtgactctggaggacatcatagaagagatcatcaagtcggagatcctcgacgaaactgacctctacactgacaatcggaaaaagcagagggtcccacaccgggagagaaggcggcatgatttctctctgttcaagctttcagactccgagatcagagtcaagatctcgccacagctgctgcttgccacacaccgcttcatggccacagaagtggagccctttaagtccctgtacctttcggagaagatcctgctccggcttctgaaacatcccaacgtgatccaggagcttaagtttgatgagaggaacaagaaagccccagaacactacctctaccagcgcaaccgcccggtggactattttgtgctgctcttacaggggaaagtggaagtggaggttggtaaggaaggccttcgctttgagaacggagcctttacctactatggtgttccagccatcatgaccagcgctttctcagataatgacgtgcggaaggttggaagtctggctggatcctctgtcttcctaaaccggtccccttctcgctgcagcgggttgaatcgctccgagtctccaaaccgagagcgcagtgacttcggcggaagcaacacgcaactgtacagcagcagcaacaacctctacacacctgactactcggtgcacattctcagtgatgtgcagttcgtgaagatcacacgacaacagtaccagaacgcactcacggcctgccacatggacagctcaccccagtccccggatatggaagccttcactgatggggactccaccaaggcccccaccacccggggcacaccccagactccaaaggacgacccggtcctcaccctcctgagcaacaggaccagcttgccatgcagccgctcggatggtctgagaagcccaggcgaggttgtgtacctgaggatggaggagatggccttcccccaagaagagatgcccaactttgaggagcacaggtcacagcaagtctcgctgtcccctgtcgcagttcctacaacagcagcttcggatcctgaatgctgtaatatccacctggatccagaggccagcccctgcagcagcgactctgaggaaaacatgggcaagaagctgctgagaaccttgagtggccggaaaagaaagaagtccgcagacggggagcgagcctccgaggaaaactccaatttaacgcccctgatcacatgaccaggtcttccctcattggctgagtgtgagactctgaggctttgggggaagacccaccctcccgtcactcgccacccccaaggcctcccatcagtgacagaacattcggcccttcacccttcacccctcagtcagtctggcacgttttatcagttgcctccagtctgacacagaaggagacgcctgtaatggaagacgctagaaatggttttgtctgtagcatagtctaagaactggccagggccgacgcaaagctgagaatgccattctgaggctcccaataataatctttgttctttggtgtccctgggccacaggagacccatgtcctggaattcaccattctttcttccaggacaaaataatgctttctaccatagttcatgcttagcattcgctcagacagtgatgcgggcagagaggtgtactggagtctagaggagccggtgtgaaaatcagctccagggatggacagatggacaaggattgttccctgttagtgtgtggattctccccacagcctggggaagggcagttcggctgcagtgaagaaagagagaggaagccctgagtccctgtatctcccagagacgtcagtttgggcttcccgagtctataagcttgcttcagaagaggaggttcaggggacacagagaccaagttgtgagccagatacagaacttcaggttttaagtgaaaataaaagcaggaaaaaaaaaaaaaaaaa

SEQ ID NO: 2210 - DNA, 1303 bp, Mus musculus
ccgccactccgggtcaccctgtcggaatggggatgccactgccctgggccctcagcctcttgttggtcctcctgcctcagacctggggctcagagacccgccccccactgatgtatcatctcacggctgtgtcaaacccatctacggggcttccctctttctgggctacaggctggttgggtcctcagcagtatctgacctacaacagcctgcggcaggaagctgacccctgtggggcctgggtgtgggaaaatcaggtgtcttggtattgggagaaggagaccacagacctcaaaagcaaagaacagctcttcttggaggccctcaagaccctggagaagatattaaatgggacctacacactgcagggcctgctgggctgtgaactggcctcggataattcctcagtgcccacggctgtgtttgccctcaatggtgaggagtttatgaaattcaacccaagaatcggcaattggactggggagtggcctgagacggaaatcgttgctaatctgtggatgaagcagcctgatgcggccaggaaggagagcgagttcctgctaaactcttgtccggagcgactgctaggccacctggagaggggccgacggaacctggagtggaaggagccgccgtctatgcgcctgaaggcccgtcctggcaactctggctcctccgtgctgacctgtgctgctttctccttctacccaccggagctcaagtttcgattcctgcgcaatgggctagcctcaggctccgggaattgcagcactggtccgaatggagatggctctttccacgcatggtcattgctggaggttaaacgtggagatgagcaccattatcaatgtcaagtggagcatgaggggctggcacagcctctcactgtggacctagattcatcagccagatcttctgtgcctgtggttggaatcgttcttggtttattgctggtggtagtggccatcgcaggcggtgtgctgttgtggggcaggatgcgcagcggtctgccagccccatggctttctctcagcggcgatgactctggtgacctgttgcctggtgggaacttgcccccagaagctgaacctcaaggtgcaaatgcctttccagccacttcctgatgcagactcgggccccctgcccactgcagcctttcgggctgtgtgacctcctgaactgtctccgagcctcctgagggagcctgggccgatgtcctccatggatccctgctttgtggcctgcttcagtttcccttcttaatgtacatggttgttttccatctccacataaatttggcccc

SEQ ID NO: 2211 - DNA, 2621 bp, Mus musculus
cggacgcgtggggaactcacgagccttgcacgcagaggctctcagcgccccgtctcccgcgccacggtgtccccttattcccatacgggcgctgtgggaggctgaggacggcatgcgggactacgacgaggtgaccgccttcctaggcgagtgggggcccttccagcgcctcatcttcttcctgctcagcgccagcatcatccccaatggcttcaatggtatgtccatcgtgttcctggcggggaccccggagcaccgttgccttgtgcctcacaccgtgaacctgagcagcgcgtggcgcaaccacagtatcccgttggagacgaaggacggacgacaggtgcctcagaaatgccgccgctaccgactggccaccatcgccaacttctctgagctagggctggagccggggcgggacgtggacctggagcagctggagcaagagagctgcctggatggctgggagtacgacaaggacgtcttcctgtccaccatcgtgacagagtgggacctggtgtgtaaggatgactggaaagccccactcaccacctccttgtttttcgtgggtgtgctgatgggctccttcatttcaggacagctctcagacaggtttggtcgcaagaatgtgctgtttttgaccatgggcatgcagactggcttcagcttcctgcaggtcttctctgtgaacttcgagatgtttacagtgctttttgtccttgttggcatgggtcagatctccaactacgtggcagcatttgtcctgggaacagaaattctttccaagtcaattcgaattatattcgccaccttaggagtttgcatattttatgcgtttggcttcatggtgctgccactgtttgcatacttcatcagagactggaggatgctgctgctggcgctcactgtgccaggggtgctatgtggggctctctggtggttcatccctgagtccccacgatggctcatctctcaaggccgaattaaagaggcagaggtgatcatccgcaaagctgccaaaatcaatgggattgttgcaccttccactatcttcgatccaagtgagttacaagacttaaattctacgaagcctcagttgcaccacatttatgatctgatccgaacacggaatatcagggtcatcaccatcatgtctataatcctgtggctgaccatatcagtgggctattttggactatctcttgacactcctaacttgcatggggacatctatgtgaactgcttcctactggcggctgttgaagtcccagcctatgtgctggcctggctgttgttgcagtacttgccccggcgatattctatctcggctgcccttttcctgggtggcagtgtccttctcttcatgcagctggtgccttcagaattgttttacttgtccactgccctggtgatggtggggaagtttggaatcacctctgcctactccatggtctatgtgtacacagctgagctgtaccccactgtggtcagaaacatgggtgtgggggtcagctccacagcatcccgccttggcagcatcctgtctccctactttgtttacctaggtgcctatgatcgcttcctgccttatattctcatgggaagtctgaccatcctgacagctatcctcaccttgttcttccctgagagctttggtgtccctctcccagataccattgaccagatgctaagggtcaaaggaataaaacagtggcaaatccaaagccagacaagaatgcaaaaagatggtgaagaaagcccaacagtcctaaagagcacagccttctaacaccctgtccagaaggcaaaaaaactgattggaaaccttcatgttgtcagaaatgctctccatgactgagggcttttctgttctgttaaccttgtgtctaacatgctcatggattggggcatctgtcctggagagtcaccttcctctagggccaccaaggctaaccaaacagcttgcacgtcccatcacagtggtggatgtgggccttccaaagaaatgaatgagtctcttgaacaagcaggacttggaagactatgagaaacatcctgctagacatgctttgttattttttaagacctgataagggtgcacatagaacagcaggtctttttccctctcctttccctaactgcagaacttacaggaaaggaataagtgtccctcaggggcagtgtgcttgtctaggatgcaccggaaggaaacaaaaatttcttttcagaaaataagtgattccattgatagtttgatttctcgtcttttctcagttaaaaagttttaactgcaacactcttaactcgtgacataacaaagactgagggagcccaaaggagactaaggtggaggctggtccataaagcagacaatgtgttgactgtgactgctcagtcccacagccaggtactgtgtgtgtggtcagggtcctgggcttgtccaggccctgtgagaaatctactgttgaggccaaggcttgtcttccactgctgtgtaaatcaaaattctggctgccagccacttatctgtgtcttgaaggaaatgtatggataacagagtgtcccttccctctcccaaaaaaaaaaaaaaaaaaaaaaaaaaaaaaaaaaaaaaaaaaaaaaaa

SEQ ID NO: 2212 - DNA, 304 bp, Mus musculus
tctagaaagaacaacgggaccaaataattcgtggctgatgtagggccattaaaattggggatgatatttagggtggtggaagggatgggagtgggtggggggcggcttccctgttctgtggggtttgtcattttgttaggcccttgcctttctgcccttcttgcccttcttccacctgaggttttgcttcttgccaggacctgccccacccctgaaaggctggttccctttttcctgattcggtgtatgaatctgtgttcatttcttttgcagaaagaataaagattgttcaggcttgcttggc

SEQ ID NO: 2213 - DNA, 3866 bp, Mus musculus
attgtggccggcggcagggcgggcgagggcgcggagccgcggggagcggcagggcgcagagggaagcacacaccccactcggacagacttcgcggcgcggccgctacgagcgccgctgagcgcactccactgggatcgcacaacttcggagcagggcgcggacggcgctcgcagcgggagagcgcggaaagggcgcaccagagccgggatccccagcggcgtccgactcccggagcgctcctagtcgccgggcggcctcccggcgctgcgcggttgcctctgcgcctacggagggcacgggctggcgctgccgggcgcctgcgagaacggcgaggcggcggcgaaggcgaaggcggcgaggctggggaccgggaaagaaccccgagggagaggcgcccgggccgggggacaggagcatgagggcccggagcggggtgcggagcgcgctgctgctggcgctgctgctttgctgggatccgacaccgagcctagcaggcgttgactctgctggccaggtgctcccagactcctacccatcagcccctgcggagcagctgccgtacttcctattggagccacaggacgcctacatcgtaaagaacaagccagtggaactgcactgcagagccttccctgccacgcagatctacttcaagtgtaatggcgagtgggtcagccagaatgaccacgtcacacaggagagcctggatgaggccacaggcttgcgggtgcgagaggtgcagatcgaggtgtcacggcagcaagtggaggaactcttcgggctcgaggactactggtgccagtgcgtggcctggagctcttcgggaactaccaagagtcgccgagcctacatccgcattgcctacttgcgcaagaactttgaccaggagcctctggccaaggaggtacccttggatcatgaggtccttctgcagtgccgcccaccggagggagtgcctgtggctgaggtggaatggctcaagaatgaagatgtcattgaccccgctcaggacactaacttcctgctcaccattgaccacaacctcatcatccgccaggcgcgcctctcagacacggccaactacacctgtgtggccaagaatatcgtggccaagcgccggagcaccgcggccacagtcatcgtctatgtgaatggaggctggtccagctgggcagagtggtcaccctgttccaatcgctgtggccgaggctggcagaagcgtactcggacctgcaccaatccagccccactcaatggaggcgccttctgtgagggacaggccttccagaagacagcttgcaccaccgtgtgcccagtggatggagcgtggaccgagtggagcaagtggtctgcctgcagcacagagtgtgcgcactggcgcagccgcgagtgcatggcaccgccaccccagaacggaggccgtgactgcagcgggacgctacttgactccaagaactgcactgatgggctgtgcgtgctgaatcagagaactctaaacgaccctaaaagccaccccctggagacatcgggagatgtggcactgtacgcaggccttgtggtggccgtctttgtggtggtagcggttctcatggccgagggagtgatcgtataccggagaaactgccgggacttcgacacggacatcaccgactcctctgcggccctcactggtggcttccaccctgtcaacttcaagactgcaaggcccaacaacccgcagctcctgcacccgtccgcccctccagacctaacggccagtgctggcatctaccgcgggcctgtgtatgccctgcaggactccgccgacaagatccccatgactaattcgcccctgctggatcccctgcccagcctcaagatcaaggtctataactccagcaccatcggttctgggtctggcctggctgatggagccgacctgctgggtgtcctcccgccgggcacgtacccaggcgatttctcccgggacacccatttcctgcacctgcgcagtgccagccttggttcccagcacctcctgggcctacctcgggaccccagcagcagtgtcagcggcacctttggttgcctgggaggaaggctgagcctccccggcacaggggtcagcctgttggtaccaaatggagccattccccagggcaagttctatgacctgtatctacatatcaacaaggccgaaagcaccctcccactttcagaaggttcccagacagtattgagcccctcggtgacctgtgggcccacaggcctactcctgtgccgccctgtcgtcctcaccgtgccccactgtgctgaagtcatcgctggagactggatctttcagctcaagacccaggcccatcagggccactgggaggaggtggtgaccttggatgaggagaccctcaacacaccctgctactgccagctggaggctaagtcctgccacatcctgctggaccagctgggttcctacgtattcatgggcgagtcctactctcgctctgcagtcaagcggctccagctggccatcttcgccccagccctctgcacctccctggagtatagcctcagggtctactgtctggaggacacacctgtagcactgaaggaggtcctggagctggagaggactctgggtggctacttggtggaggagcccaagcctttgctctttaaggacagttaccacaacctacgcctctccctccatgacatcccccatgcccactggaggagcaaactactggccaagtaccaggagattcccttctaccacgtctggaatggcagccagagagccctgcactgcactttcaccctggagaggcatagcctggcctccacggagttcacctgtaaggtctgcgtgcggcaggtcgaaggggaaggccagattttccagctgcacacaacgttggccgagacgcctgctggctccctggatgctctctgctctgccccgggcaatgccatcaccacccagctgggaccctatgccttcaagatacccctgtccatccgccaaaagatctgcagcagcctggacgcccccgactcccggggcaacgactggaggctgttggcgcagaagctgtccatggaccggtacctaaactacttcgccaccaaagctagtcccacaggtgtcatcttagacctctgggaagctcggcaacaggatgacggggacctcaacagcctggccagtgccttggaggagatgggcaagagtgagatgctggtagccatggccacagatggcgattgctgagtgcctgtgaccacaggcctgtggggatcagtaggagacggtgcaaggaggcctggcagcctctgcacaggggtgcccagcctccaccactcctggctcacagcaggaatggtccttcaactccctccccgccacaaccctcagaccaccaccaccagccttagaaagtctctgtgctctactgccaagaggccgggatcctctggcccactgtttccccagctcactctggggtgggctgaggcctctgggacagctgaaagccagaggctttcccctgcgacaacacaccaccctcagccctgtgactttggggacccacaggtttcaattctgtgttcacatggtcctgggctagggaccgctctcttatcccgggtcgagttcagttcaggcaaactgctttttcctgtccacaagcagagagggaagattaggggagtgggggtggggggtgggggatgagcctcagaagtcagcgagactcaggtagtgagagagcaaaaacagtaagggcaaagaaagacccagttttttagggaacgcaaatgatttattatccagatacttggatagttcctttttaagaaaacaaaacaaacaaaaaaaagt

SEQ ID NO: 2214 - DNA, 1309 bp, Mus musculus
gggaggcggcggtaacggacccagagttgagtgtggtgcagtgtacctatgatacatgctttagaaacagaatattttggttcaaagggaaaatggctctcagtccatctgtagttcctcaagaaagtaaagaagataatgcaaactgtgtagaaacaaaaccgtcacaaaccacttccattgcttcagaagacccccttcaaaacttatgcttagcgtctcaggaagtgctgcgtaaggctcaacaaagtgggaggtcccggtgtcgccaatgtggtggctcaaggatgttctactgctacacatgctgtgtcccagtgggaaacgtgcccaccgagcagatcccatgtgtgcagcttccattgaagattgatatcattaagcatccaaatgaaacagacggcaagagcaccgctgtgcacgcaaagctcttagcgcccgactctgtgaacatttacacatatccgtgcattccggagtacgaagggaaggatcacgaggttgtacttgtttttcctgggcctcagtctatctcaatagaagatgtctctttccatctacaaaaaaggattgaaagtaagggtagaaacaaagctgacaaccttgatgtgccacctcggaaactcaagaggactacggacgaggaaggctgggatctgcatgagagcacacgccaaggccccgagttgaaaagagttgtctttattgacagcacctggagccagacaaaccagatcgcctctgatgagcggcttcgggagttattacaagttgaactgagaacaagaaaaacttgcttttggcgccatcaaaaagggaagccagatactttcctttccacaattgaagccatttattacttcctagtagactaccatagtgccgtgcagaaagagaagtacagaggacagtatgacaaccttttattcttctactcttttatgtaccgcttgataaagaatgccagaggctctggagagaaggctaaaccgcagctcgtccagtagttctgcacacccgcttgtcctgggctcttgcagtcgagccttgtttactccggggtggtaaccatgtgttatgcccatgagagaacatggggaagattccagccttgttcgttttattgtatttttttaaagggaattttgaatttgggcaatttttaagagatgatcctgattgaaagacaaatcagaagctatttgctcaatttgggcatatcccactatactgtacattttaatatgctgtgttacatttatgtgattgtaattatatgtgattaaagagtgtctttatcttttcactt

SEQ ID NO: 2215 - DNA, 802 bp, Mus musculus
gagaatttaaggccttttctggcagaagagaccaccaggccggctaatcctcccagctgagaccgtgaggctcggaatggcttccacgcgaatccgagaggccagggagagcgattgtggagacattatgaggatgatccgggaactggcagagttcgagaaactgtcccatcaggtgaagatcagtgaagaagctctgcgagcagatggctttggagagaacccctttctttcactgtttggtggcagagattatcccagcacctggggagtcacaagggtcccttgtggtgggctatgggctgtactacttcatctatagcacatggaccggacgaaacgtttatctggaagacatctatgtgatgccgcaatatcggggtcaagggattggtaccaaaataatcaaaaaggtggctgaggttgccctgaataagggttgctcccagttccgcctggcagttctggattggaacaagaaggccgtgaacttgtacaaatttctaggggctcaagatctgactgaatcggaaggctggctctcctttcgatttgaaggcgaggcaatgagggagttggcaggacgctgacttacgccctctctctcctgcctcttctttgggatcaccatatcaagttttcctaagaccataaccataggcactgacccagacagacgctcgctcacccagaggcctcccagggtgcagactcctgaagtacagaaagagtggaagagggagaagccttattaggaaccacaaataaaatacttgctttgccctcatgggtagaggatgtg

SEQ ID NO: 2216 - DNA, 501 bp, Mus musculus
gagaatgcgaccagtgtagacagtaaaccggtgtggtccttgagttcacactcaccagggcagaaaggactggcgcaggagacatagttttccactgttagcacggttcagagcaaggcttccgtgtgatctccaagcgccgtgcctagtttgctgtggcttccgcccgccccgccctggccctgcaagcctctccctgcgccttgatgccgcagggcgccttctgctgctgctggggcggtgggcggccaggcagctggaggagcccacgacgaggaccaggatgagaatgaagacgggaccgagacgcccccagatcatggcgtctctgcggaaaccgacacatagacgaaggaccttgtatacagagctattttaaagaaattgcgagtggcaccatggtattttttgtggagcctcaccctctcctgggcccgcaccccgtcgtcctcctcagtccctgggcagacattcataagcccgttaccggtgactctagcc

SEQ ID NO: 2217 - DNA, 678 bp, Mus musculus
gaaacctctgcatgggaaagtgaatagatgagctgcttctggttcatatctatgggtgtaatcttacaaaaagactcttggtcatgtgacccagacagttggagtgcccagaggaaagcctacatattaaagaataaaatcccccgaggaggctggcaagcaaatgtgttgagttcttaaatctttgttcggtttttctgttcagagttttaattgcaaatgaatttatttcttcagcttaaagatctaatttcctaatagtttcctccgcatttatatactctgtagtgtttaggcagctcctgttataagtttattaatattatgtaagtgttgttcttgtatttatgtatagtgtatgtattgtaaatatactcagagcttttcctttttactgtaaaatggtgatttttttttgccctatgataatgaaaagagagactctcctaatgaggttctctcagaagattattccagtctattctcagagatttaaatgaacaagtgttatcgttttcaatggtgtctcagacatattctgttggtgcatcgcttttctgtattcaactttcctatgaattgagctgtgaactgaaatagagtttaaacctttatctgtatgcatttgtataattatctgaatgaaggcatgaaggttaaataaagcattttgtatgg

SEQ ID NO: 2218 - DNA, 1402 bp, Mus musculus
cttggctgaaccagatggacagaaggaggatgcctctctgggcactcttgttgctctggagtccttgcaccttcagtctcccaacacgcaccgctacctttgaacgaatcccgctcaagaaaatgccttctgtccgggaaatcctggaggagcggggagtggacatgaccaggctcagtgctgaatggggcgtattcacaaagaggccttccttgaccaatcttacctcccccgtggtcctcaccaactacctgaatacccagtactacggcgagattggcatcggtaccccaccccagaccttcaaagtcatctttgacacgggttcagccaacctctgggtgccctccaccaagtgcagccgcctctaccttgcttgtgggattcacagcctctatgagtcctctgactcctccagctacatggagaacgggtccgacttcaccatccactacggatcagggagagtcaaaggtttcctcagccaggactcggtgactgtgggtggaatcactgtgacacagacctttggagaggtcaccgagctgcccctgatccctttcatgctggccaagtttgacggtgttctaggcatgggctttcccgctcaggccgttggcggggttacccctgtctttgaccacattctctcccagggggtgctaaaggaggaagtgttctctgtctactacaacaggggttcccacctgctggggggcgaggtggtgctaggaggtagcgacccgcagcattatcaaggcaattttcactatgtgagcatcagcaagactgactcctggcagatcacgatgaagggggtgtctgtggggtcttccaccctgctatgtgaagaaggctgtgcggtagtggtggacactggttcatcctttatctcggctcctacgagctccctgaagttgatcatgcaagccctgggagccaaggagaagagaatagaagaatatgttgtgaactgtagccaggtgcccaccctccccgacatttcctttgacctgggaggcagggcctacacactcagcagtacggactacgtgctacagtatcccaacaggagagacaagctgtgcacactggctctccatgccatggacatcccaccacccactgggcctgtctgggtcctgggtgccaccttcatccgcaagttctatacagagtttgatcggcataacaatcgcattggattcgccttggcccgctaaggccctctgccacccagtaaccctaggccaagccaagctggcagtcctgggggccattttgtctggctttgtccccaacatagggacactggacacagagaccctaacgagtgtttgccccttcacctgcactcacccttccctgctttaaggaaaaatcgaataaagatttcatgttt

SEQ ID NO: 2219 - DNA, 1871 bp, Mus musculus
gagatgcccctccgggccgagtggaggcggcgctcagctgcttctctttcaaccaagactgcacatccctagcgattggaaccaaggccggttacaagctgttttctctgagttctgtggagcagcttgaccaagtccatggaagcaatgaaatccctgacgtgtatatcgtggagcgcctcttctccagcagcctggttgtagtggtcagtcacacaaaacctcggcagatgaacgtctaccatttcaagaaaggcactgagatctgtaattacagctactccagcaacattttgtctattcggctcaaccgacagaggctgctggtctgcctggaagaatccatctatatccacaacattaaggatatgaagttattgaagaccgtcctggatattccctcaaacccaacaggtctctgtgccctgtctatcaaccattccaactcttacctggcctatcctggaagccagagtacaggcgagattgtactctatgatggaaactccctgaaaacggtgtgcaccattgctgcccacgaggggacgctggccgctatcaccttcaactcctcgggctccaagctagcaagcgcgtctgaaaaaggcactgtcatccgagtgttctctgttcccgagggccagaaactctatgagtttcgtcgaggaatgaaaaggtatgtgacaatcagctccctggtgttcagtatggactcccagttcctgtgtgcctccagcaacacggagaccgtgcacatcttcaaaatagaaacacatgacaagaaagccgcccagaagagccttccacctggagcggctacatgggaaagatgttcatggcagctaccaactacctccccgcccaggtgtcggacatgatgaaccaggacagggctttcgccacaggacgcctgaacttctctgggcagaagaacatttgcaccctgtccacgatccagaaactgccgcggttgctggtggcctcctccgacggacacctttacatctacaacttggacccacaggatggaggagaatgtgtcctaatcaaaacccacagcttgcttagctcaggaacaacagaagagaacaaagaaaatgacctcagaccttccttacctccatcttatgctgcaactgtagcaaggcccagcacgtctgcagcctccacggtgccaggatactctgaggacggcggggcgctccgaggggaagttattccggaacacgagtttgcgacgggaccagtgtgtctagacgacgagaatgagtttccccctataatcttgtgccgtggaagtcagaagggcaaaacgaagcagtcctgacaagaagcctacctcagaagtcaggacactcccctgtcaggtggttttggagagaacgaggaaagtggaagaaacggaatacagtcaatgctgtgggcagaggggagggagggaggcaggagtcctgggtgcctcactgcagtcaatgctgtgggcagaggggagggagggaggcaggagtcccgggtgcctccctgcttgagccatagaccgcagttagccccccgacccaagcccctcagccttgactgccagtgggcaaggggaatgctggagtcacaccatgcagtctaaaagaccttcaaaccacagtgtaaatgctaactaaccatattggtatgtaaccagaattttatattaaaaagggcatccttgtcaaatgtatgctgtgtaaaaaaacaaaaaaaaaaacaaaaacaaaaaaaatgtacttagtgggaaatctcttagaattgtgtttcgtgtatattacaaatatagagagaaactattttagccaggcaaagtatttttgcagtgattggaataaatcatttattacctt

SEQ ID NO: 2220 - DNA, 2774 bp, Mus musculus
gagagttcgtacttgggagtcctcctgacacctctggtgttgacgaccgtggccatgtcctccgtgagccccatccagatccccagccgccttccgctgctgttgacccacgagagtgtgttgctgcctggctccactatgcgcacaagtgtggacacggcccgcaacttgcagctggtgcggagccgcttgctcaagggcacgtcgttgcagagcaccattctaggagtcatccccaacacacccgacccggccagcgacacgcaggacctgccaccattgcacagaattggaacggctgccctggcagttcaggttgtgggcagtaattggcccaaaccacactacactttactgatcacaggcctgtgccggttccagattgtgcaggtcttaaaagagaagccatatcccgtggctgaagtggagcagctggaccgacttgaggaatttcccaatatctgcaaaagcagggaggagctgggagagctgtcagagcaattctacagatacgcagtgcagttggttgaaatgttggatatgtccgtccctgcagttgctaaattgagacgtcttttagataatcttccaagggaagctctaccagacattctaacttcaattattcgaacaagcaacaaagagaagctccagatcttagatgccgtgagcctggaggatcggttcaagatgaccatacctctgcttgttagacagattgaaggtctgaaattacttcagaagactcgcaaacctaaacaagatgacgacaagagggttatagcaatacgccccatcaggaggattccacacatcccaggaactttagaagatgaggaggaggaagaagataatgatgacattgtcatgctggagaaaaaaataagaacatctagtatgccagaacaggctcataaagtctgtgtcaaggagataaaaagactcaaaaaaatgcctcagtcaatgcctgaatatgctctgactagaaattatttggaacttatggtggagcttccttggaacaaaagtacaactgatcgcctggacattcgggcagcccggattcttctggacaatgaccattatgccatggaaaaactgaagaggagggttttggaatacttggctgtgagacaactgaaaaataacttgaagggcccaatcctctgttttgttggcccgcctggagtaggcaaaacaagtgtggggagatccgtggccaagactctgggtcgggagttccacaggattgcacttgggggtgtgtgtgaccagtctgacattcgagggcacaggcggacctatgtgggcagtatgcctggtcgtatcatcaatggcttgaagaccgttggggttaacaatccagtgttcctattggatgaggttgacaagctggggaaaagcctgcagggggatcctgcagctgcgctgcttgaggtgttggatcctgaacaaaaccataacttcacagatcactatctaaatgtggcctttgacctttcccaagttcttttcatagcaactgccaacaccactgctactattccacctgctttgctggacaggatggagatcattcaggttccagggtacacacaggaggagaagatagagattgcccacaggcacctgatccctaagcagctggagcagcacggtctgactcctcagcagattcagatcccccagcacaccactctggccatcattaccagatacaccagagaagcaggagtccgttctctggacagaaagtttggggctatttgccgtgctgtggcagtgaaagttgcagaaggccagcataaggaagccaagctggaccgttcggatgtggctgatggagaaggttgcaaagaacatgtgctggaagatgcaaaacctgaatccatcagtgacactgcagacttggccctgccacctgaaatgccaattctgatcgactcccatgccctgaaagacatcctggggccaccactgtatgagctggaggtatctgagcgtttgagtcaacctggagtggcaatagggttagcatggactcccttgggtggcaaaatcatgtttgtggaagcaagtagaatggacggtgaaggccaactaacactgaccggccagcttggggacgtcatgaaggagtctgcccatctcgccattagctggcttcgaagcaatgcaaagaaataccacctgactaatgcttttggaagttttgatcttcttgacaacacagacatccatctgcacttcccagctggagctgtcacaaaagatggaccatctgctggtgttaccatagtaacttgtctcgcctcacttttcagtgggcggcttgtgcgctcagatgtagccatgactggggaaattacgctgagagggcttgttcttccagtgggtggaattaaagacaaagtcctagcagcacaccgagcaggactgaagcagatcataattccgcagaggaacgaaaaggaccttgaagagatcccaagcaacgtcagacaggatctaagttttgttacagcaagctgcctggatgaagttctaaatgcagcttttgatggtggctttcctgtcaagaccagacctggtctcattgacagcaaactataggcccgaacataagctgaatttaattatgaggcaaagcttgtttgaggcaccaaatgatcaagcaaaatatccctaatctgtggatataatcaagatagcaatgagtctgtttaagtagttgtttattacagaaatgttggcttaataaagtcattaaacct

SEQ ID NO: 2221 - DNA, 2408 bp, Mus musculus
ggagggcggagcgcgagccggaagtgggcgagaggcggctgaggcgtgcttggagagccgcggccgccactttgcgctggagccgcggccgagcgggcgcgggtcgtgatggagggcccgggcctgggctcgcagtgcaggaatcacagccatggctcccacgttccaggatttgggcgacacggcatctgtgtacatgaaaacaaagaacttgcaaaagcaaaagaaattcttcctcttatagaggactcgagtaactgtgacattgtcaaagctacacaatatggaatttttgaacgatgtaaagagctggtagaagcaggatatgatgtcagacaaccagacagagaaaatgtgtctcttcttcactgggctgccattaacaacaggctggaacttgtaaagttttatatttccaaaggtgctgtgatagatcagttgggtggtgacctaaattcaactcctcttcactgggccatccgacaagggcatttgcctatggtcatattattgctccagcacggtgcagaccccactctgattgatggagagggattcagcagcatccatctggcggtcctgtttcagcacatgcccatcatagcgtatctcatctcaaagggacagagtgtgaatatgacagatgtcaatggacagacgccgctcatgctatcggcttacaaagtaattgggccagaaccaactggatttcttttaaagttcaatccctctctcagtgttgttgataaaacacatcagaacactcctcttcactgggcagttgcagcaggaaatgtcagtgcagttgataagcttttggaagctggttctagcctggacatccgaaatgctaagggagaaacacctcttgatatggctctacaaagtaaaaaccagctcattagtcacatgctaagaacagaggccaagatgagagccaacaaacagtttcggctttggcgatggctgcacaaatgcgagctcttcctgctgctgatactctctatgatcaccctgtgggctgttggatacatcctggacttcaattcagattcttggcttttaaaaggatgtcttctagtagcattgttttttctgacatctttgtttccaaggtttttggttggctataagaaccttgtgtacttaccgacagtctttctgctaagttccattttttggatatttatgacttggttcatcttattctttcctgatacagcaggtagccctttgtattttgcttttattttcagcatcatggcctttctctattttttctacaagacttgggcaactgatccaggcttcactaaggcttcggaggaagagaggaaagtgaatatcgtcaccctagcagagactggctctctggacttcagaacattttgcacatcatgtcttataaggaagcctttaagatcactccattgccacgtgtgcaactcctgtgtggctcgctttgatcagcactgcttttggactggacgctgcataggttttggcaaccatcatcattacatcttcttcttgctttccctttccatggtatgtgactggatcatatatggatctttcgtctactggtcaaatcattgtgccacaacattcaaggaagatggactatggacctacctcaatcagatagtggcctgttctccctgggttctgtatatcttcatgctagcagctttccacttctcatggtcaacatttttattaataaatcaactctttcagattgcatttctgggcctaacctcccatgagagaatcagcctcttaaagcaaagcaggcacatgaaacagacattgtccctcaggaaaacaccatacaacctcggattcacacagaacctggcagatttctttcagtgtggctgctttggcttagtgaagccctgcatcatagattggacatcccagtacaccatggttttccacccagccaaagagaaagtccttcgctctgtatgaaaaaaaaagcacctcaaaaagcactctgacttgtttttgtttatgctggtgctcttattgctgaaagtgaagtgagatattcagctaccacggtcaaaggataagggatacagtcttcagcaagagtggaccttccgtcagacccagaaagatggcctgttactgagcaatttggcaagcagcttttaaaaacatatgaaaatattttccccaagaacatgagttacttttgaaaaaaacctaatagtcactgattatggataaaataaagtattttcaaatactatattggctttttaaaaatagtactctttaaacttgtaatttttgataagttatttgtctttgttgtatctataaatatgtaaagaatatttaaatagatgtatctgttttgctttcacacttaataaaaacatttttttatactc

SEQ ID NO: 2222 - DNA, 452 bp, Mus musculus
agaatccatgtagttatagttatagttagttatagttacatactaaggattgtattttttagcagataggaaatggcttttctgacttaaatatctaggaagggtaatgaaaactgtggaagaaagcagggtataaagaaaggggaaaaaaatctcttaaggaagagatgctcttgcagagtggaacacacttgtaatcccagcacttgagatgcagaagcaggaagatcaggagttcaaagccaaccttgattatacaatgactttgaagatagtctaggttatatgtgaccttgtctcaaaaaagtgaaaaatcccagatgtgagaggttactcctataagtctagtacttgggaggttgggacactgggattgcaagaagttcgaagttagcctggggttcacagctaagttgaagcacatctataactaaataataagaccataattc

SEQ ID NO: 2223 - DNA, 1332 bp, Mus musculus
tggcagtagccctttctcctctactcgcaaagatgacgcttgccgtcctggccctgcggctggtggtctgtaccctggcgcttcccatgtttctgctgaaccttctaggcttgtggagctgggtatgcaaaaagtgctttccctacttcctgaagcgattctccgtgatgtacaatgagcagatggcgagccaaaagcgggagctcttcagcaatctgcaggagttcgccggcccctcggggaagctgactctgctggaggtgggctgcggcaccggagccaacttcaagttctatccccccgggtgcagggtcacttgtatcgaccccaaccccaacttcgagaagttcttgttcaagagcgtcgcagagaaccggcagctgcagttcgagcgcttcgtggtggcagccggggaggacatgcaccaggtgaccgatggctctgtggacgtggtggtctgcaccctggtgctgtgctcggtgaagaaccaggagaagattctgcgtgaggtgtgccgagtgctgaagccgggaggggctttttacttcatggaacacgtggcagatgaacggtctacctggtgttacttctggcagcaggtcctggatcctgtctggttccttttttttgatggatgcaatctgacgagagagagctggaagaccatagagcacgccagcttctcgaagctaaagctacagcacatccaggcccccctctcctggacattggtgcggccccacatctatggctatgctgtgaaatagagtgaggtggtgggagagatccggtctgctccgagctggttccaggcttccgttttagatgtaaaattctcactgggaggggtgaaaatcaaattcatccctacaggtttctgtttagccattttctatgttgtttcttctgatcaaatatcactggtcctgagtgggtgtggtggttcagccttagtcccagcactcaggaggcagaggcagaggggcagagagagaggcagagagagaggcagagagacagaggcagagacaggtagatatccttgagtacagcctggtctacagatcaagttccaggaccgccagggctacacaaagaaaccctgtattgaagaagaagaaaaaaattccactggtcctgaaacaaaaccatggatatcattgtgttcatacagagagcaagtctgggtgggcccaagggtttcagctgcatttgtatgtatggatctaaacaaatgtatatttttcaagatgattttgcagaagttctattttaaatgttgatcaataaattcatattcatttaataaatgaaaataaaaaaaaaatatat

SEQ ID NO: 2224 - DNA, 3380 bp, Mus musculus
agtttcccccgcggttcctgcactgaggttgtcgccggcgcgtcccctatcccgcggctcgctcgccctgccggtgccatggcggccttcagcaagtacttgacggcacggaacacctcgctggcgggggccgcgttcctgctgctctgcctactccataagcggcgtcgcgccctcggcctgcacggtaagaaaagtggaaaaccgccattacagaataatgagaaagaaggaaagaaagagcgagctgtggtggacaaagtgtttttatcaaggctctcacagatcctaaaaattatggttcctagaacattttgtaaagagacaggctacttgttacttattgcggttatgctggtatctcgaacatactgtgatgtttggatgattcagaatgggacgctcattgagagtggcatcattggtcgcagcagcaaagatttcaagagatacttattcaacttcatcgctgccatgcctcttatctctctggttaataacttcttgaagtatgggttaaatgagctcaaactgtgcttccgagtcaggctcacacggtacctctacgaggagtatctccaagctttcacctattatgaaatgggcaacctggataacagaatagcaaatccagaccagctgcttacacaggatgtagaaaaattttgtaacagtgtagtcgatctgtattcaaatcttagtaagccatttttagacatagttttatatattttcaagttaacaagtgcaattggagctcagggcccggcaagcatgatggcctacttgcttgtttctgggctattcctaactcgactcagaagacccattggtaagatgacaattatggagcagaagtacgaaggagaatacagatacgtgaattcacggcttatcactaatagtgaagaaattgccttttacaatgggaataaacgggagaagcagacaatccactcagtcttccgaaaactggtggaacacctacataatttcattttctttcggttttctatgggtttcattgatagcatcattgccaaatatgttgccactgtcgtcgggtacctggttgtcagtcgccccttcctagatctggcacaccctcgccaccttcacagcacacactcagagctgctggaggattactaccaaagtggaaggatgcttttgagaatgtctcaagctttgggtcgtatagttttggctgggcgtgaaatgactagattggctggttttacggctcggattacagaattaatgcaagtactaaaggacttaaatcatggcagatatgaacgtacaatggtgtcacaacaggagaagggtattgaaggagcacaagctagtcccttggtccctggtgctggagaaatcatcaatacagacaacattataaagtttgatcatgttcctttagcaacaccaaatggtgacatcttgatccaagaccttagttttgaagttcgatctggggccaacgttctgatttgtggtccaaacggctgtggaaagagctccctcttccgtgttcttggtgagttatggcctctttttggagggcggcttactaaacctgagagaggaaagttattttatgttcctcagcgaccctatatgaccctgggaacactgagagaccaagtcatatatccagatggaaaggaagatcagaagaagagggggatctctgaccaggtgctgaaggagtacttggacaatgtgcagctgggtcacatccttgagcgagaaggcggctgggacagtgttcaggactggatggatgtactcagcggaggagagaaacaaagaatggcgatggcaagactgttttatcataaaccccagtttgccattttggatgaatgcacaagtgcggtcagtgtggatgtggaggactacatttacagccactgtcgaaaggttggcatcaccctctttaccgtttcacacagaaagtccctttggaagcaccacgagtactacctgcatatggatgggagaggcaattatgaattcaaaaagatcacagaagatacagttgagttcggatcatagagaccatctcaagaacttcatttgcttcaaaacaagataatgaacagaatgcatttgtaaatgcaagatgcattgtaaaataaagttaagcttgtttttttttaaaaaaaacaaagcaacaaattgactagatataggataattgaaacatgttaaaacatttaatattgtataggatattgctaattgtgtatatgttggtttaattattaattatgtactaagaatgtccttattcttgtggttaaaaaacctgcctgaattaaattgggcttaaatcagtgtaacctgattcatcctgggatgtaaaccatttgaagtcagctaatttgacttttatggctctgtctttttctttcatgaagaaccctgtttaaaactggggtcattaactgttctattctaacaaagtagtcttgagtttcatttcttatgccccatggtagtgggaaccagaccaatcacaatgttttattgaaacatattccatcgttacaggatagcgttcggtacacagtggcgggtttctttagctgctgtgtttattctcattcctcacacatgcctttaagtgcattggactccaggagagccatttggggtttctctagctaaacaataaatgtacctgtctcagtccgctggactgagttgttttgaaggttctcatggtgcacagcagtgtgtatgtggtgtacaacagtgtgtatgcagccgtgcttacagcctgtggttgctacctgttgtaccagtctgaccagtgtttggaatgttcagacataatctcctgtgtgaagctcaaggtcttaggaggattttggattttgtgaagagatggacagtctcatcagaaatgtggttgtataatggtgagcgccacatgagtgtagaggcactatatgacgtagtgtactgagcatgcaacgctgctgccgtccttgtctgtggtttcagtttgtaaaactgctaagccattctcatgcacatgggtgaatgacatttcctaggaacggtctctgactcctggacaactactcctgtatcggctctggctccccggaaccattagagactaactgttgtttccacaaaggagggctgagagtgaacgtgatcatacgtagttgtgaaatcggtttgattgagtgggctctgaaaggggcatttaatggtcttgtttcttcataactcacaatcactggctaccaagataaccctgatgtattgattccataaatgcatcacattcagttttaccatgtctccttagcaaacttgtgtacttattttctgttcagattaaaaaaaaaaaatgataacct

SEQ ID NO: 2225 - DNA, 360 bp, Mus musculus
ttcgtggcagagaccccgcgacgaatggagggcttggagccgggcctggagtacccacccttcgatgaggacgacggcccggtggattgcgactgcccggtctcctgctaccgcgggcaccgggggtacaggaccaagcactggtccagcagctctgcatcgccccctcccaagaagaagaagaaaaagaaaggcagtcatcggaggagccgcaaaaagaggagactagagtcagaatgcagctgtgggagtgcttcccccctgcgcaagaagaagaagaatgtgaagaaacaccgtcgagatcggtctgattctgggtcccggaggaagagacgatacagatcgagaagcctcaagagc

SEQ ID NO: 2226 - DNA, 1047 bp, Mus musculus
gaagtgaccttctgtggcaggctccgaccagctcctgcattgtttccaccatggcttgggtgtatgtgctgtttggcaactgaggcacataaagagtggtaaagcctggagaaatggtggcctttggatatttctcctggacaagagtcagaaacctgcagagagagaccagagcagagatacccatctttcccttcttgtaggctcttgccacagcgacaggaacagtcaggcctattgagactcagcttggagattgacatcagagccctaaagagcagcagtgatttgtacatcctcctgctgatatcaccaccctgtgcagtcagagaggtctgggatccggtctctactctgcatctggtgatacatctgattctcaaagatagtgactgtcagggcagggccttttaaacatccccacatcgacagaggggcttgagtgagacttgtaaggtgtgcagatctgcatgctgacagatggcttcgagtctccaaagtttcagattcctaatttttttttcatatgagaagagcctgtgccacatgtctataatctcagcacttggggggtgggaggcaggaggttcagggcttccttcatccccagatacatagcaagtgcagggctagcctaggctacatgaaactgccacaaagcaacacattgaaaagagttatttgaattttgttctgatgcaaattttcaataggaaattaatgtcacccactgctcggcccccagatatataactcagtaccctgaggagagaatccttgtttgtcttgggccctagcctacattttccaaatataactcattttgagaatcagtaaatgttggccgggcagatggaggtgtctgcagagcacaaaactcgaggacggaaagacctgtgggaacctttgctctgccgttttgtagacttagaccattcatttaacctttcaaagatagtttctatacttacaagatgaatatgactagttgctacctcattctcttaagagttcagctgtattctgcaaataaaatgcttgaaaccg

SEQ ID NO: 2227 - DNA, 2397 bp, Mus musculus
cagtaagatggcggctgctgaggaaggttgcggtgttggggtcgaagacgaccgggaactggaggagcttctggaaagtgctcttgatgatttcgacgaagccaaaccctccccagaacatgctccgaccatctcggctcccgacgcttcaggaccccagaagagagcgccaggagatactgccaaagatgctctcttcgcctcccaagagaaatttttccaggaactgtttgacagtgagctggcttcccaagctactgcggagtttgagaaggcaatgaaggagctggctgaggaagagccccatctggtggagcagttccagaagctctcaaaggcagctgggagagtgggcagcgatgcaagttctcagcaagagtttacttcttgcctaaaggagacgttaagtggcctggccaaaaacgccactgagctgcagaactcgggcatgtctgaagaggagctgatgaaagccatggaagggctgggcatggatgagggggatggggaagcgagcattctccccatcatgcagagcatcatgcagaacctcctgtctaaggatgtgctgtacccatccctgaaggagatcacagaaaagtatccagaatggctccagagtcaccaggactccactcctccagagcagtttgagaagtaccagcagcagcacagcgtcatggtcaaaatctgtgagcagtttgaggccgagacgcccacagacagcgaggctactcagagggctcgctttgaggccatgctagatctcatgcagcagttacaggccttgggccatcctccaaaagagctggctggggagatgcctcctggcctcaactttgacctggatgctctcaatctgtcgggccccccaggtgctaatggcgaacagtgtctgatcatgtgaaacacagcacagtttcctccctgagccccagccgtggggaacatctggagtcaacagagtcactgggaactgaggcaggagtatcatctgtgggagctggctgccccacccacactctccatcccattcaagactgtgccataccagctgatctgtaggccttttctatgagtcctactccatcagggtttctgctgttagaaacaggccaattatctgccaggtgaaggaaggcatcccttgtggggcatttcacttcttcccactccccaaataatgttacacatggcagtactcatgttccccttgattcccagggacgtcgcgccttgtttctcctccctctctgtgtctggggaggaggagctgagtcctgactctgtgctcctgttaggcagggcctctgggaagaggagaaatgtagcctgagctggggctggaggctggtcaccgcatatccttgccttcctttggaattctcttaagggaaaggaattttgcacttagccatggtcgggttggaagcaaagccttgggcttttcctgtccctaggtgctgagccccaatccccctttcctcctgagaactcatgttgctgccctggttctttctacagctctgggatttagggggagccaactcttggccttcctttgctccctgactgtccttacgtcctctctgtttagagtcttatttattctgcccttttaaccagtgctgtgatggatgaaggccaatcttgtttcctttcatctagtacctggaccattctccctagacccttgccttcctccctggccaacacatacttgcagtgtcagatctggtacatgaatggccattctacccagataggttttagcttatatataggacatcagattccctggaatccttggttcaggaaggtgcttgggaaaggggtgtagccagaatattttttccctgcaagccctatggggtagtatctaataaatattctgagcaagtgtgtgggttatttttcatccaggtctatttctaatcttccctagtttctataaactgcagagtgagatgtgttaggagatggatagttctgtatagtgttgttaggctctaccatggcccagccctccagctcagcaaaagaatactgtcttcgtctccttggcacttatttcagtcttaacgttttacgatatagctgatgttagtgattgatatattatcaacatgttttttaaattatctaactttgaatcaacctgctttttcacagtggttttaagcaccatggttgccatatattttatggatattcttttaggccacctagctagttcacttggaaaataacgttttaaaaatatattttttatttattctttggaattttatacatgtatacaatgtatcctgatcatatccaccctcccaccccaccccaccccacctgctggaaaataactttggcaagaagaaattcacatttatcatttgagtc

SEQ ID NO: 2228 - DNA, 2024 bp, Mus musculus
ggattcggccagagctgccagcggggtagccaccgccgctggtttgttacagctgctggagcggccgctggcccgggttctcgggctctctcccgggccctcgacctccaaccccgcgcgacagcagtcaagaggggtggcaggatgaatgtgggcacagcacacagtgaggtgaaccccaacacacgggtgatgaacagtcgcggcatctggctctcctacgtgctggccatcggactcctgcatgtcgtgctgctgagcattccctttgtgagcgtccctgtcgtctggaccctcaccaaccttatccacaacctgggcatgtacatctttctgcacaccgtgaaagggacgcccttcgagactccagaccaaggcaaagcaaggttgctgacccactgggagcagatggactacggggtccagttcacagcctctaggaagttcttaaccatcacgcctatagtgctgtacttcctcaccagcttctacaccaagtatgaccaagtccatttcatactcaacactgtgtccttgatgactgtgctcattcccaagctcccccagctccacggagtccggatctttggaatcaataagtactgaggttgtagccccttccccagccgggttggcaggggaagggtggaaggcctttgctgtgatgctgaagacaggagcctctggacactgccagagatgggggtgtgccctgggcctggcttccccctcgcttccccagtagccgacttggagtagcttgtagtggggttagggtggggcccttgggctctaacccattctgaagtttttgatctttttccttttgccttttgaatagagatgccatgggggtggtcaggaaagaggctgggctctctggctgactgtgggcctgagaaattgggacaggaagccaggaaaaggctctgttggcttgtttaccctcaggcagccatagcactttagcccccaaaaaggggggcagagggacggtacagcttctgcattggttgccctcattccttcagtgtgtgaagcgagactcgctgttctgtatgtattagaaccctgcgccgtgctgcctctgccgccaggcagggagcaggcgggctttgtgggcttcctggcaacccacgatgggtaggctgtggggcaggggagattaggaaaggaagatgggttgatgggacacctagaggtggggacaggatgctgccaccttggtcctggggagaggggagttctgagcaagggttgggtggggatagtaagttgggtcttacttagaatggacaagataactgcagccgatatggatcagtgtaaaaaaaaaagaggtctgggaaggagaagccagactccgcctcctctgagatgtgggctaggaggagagctggcgtggagggttaatttacccacagaacgatgctgataggaagggaggcccctgtgggtttgaactcctgggttggaatgaggatatgcacaggctggaagggcctgtgagtcctcagaagcgggttcacttcgacacttcccttagtggtgtgtgtgggcgcgcgcggaagctttctgagaggctcttccttaagcgttcaattcgtattcttgtgtagattgtgctggggcagtgcctcttgtgtggcttgcatgtgaatggtcaggaggccacctccacatgtggtcagtggcctccacagtgctacaggatctctgcccaaaccaggcagtagtaggggcagctgcaggcactgtcctcagcccaaagagaggcaggtcatggagcctgaggctaggccgagaggagctgtctctccactcgctgggtcgactggggcatgttcctttggaaacgcgtggctacccaagccctctcccagggaggggctggagggaggtcactcacctgtttgtccccctccccctcattctgaacccagtgtatcatagggaactttcaccttctggtctttctaagcaaagtgtgaataggatttttactccctttgtacagtattctg

SEQ ID NO: 2229 - DNA, 1336 bp, Mus musculus
tggccctaacaggaaagttcttcaggaaaagaaacacacacacaaaatctagtattagtatgtctaagagtaatatatattaaaaatagttgacaatatcagacttagtgttattttctgtttgtcttctatgattatgattttttggaaacttttatagagaaattatttaaactattaagtcacagcctttgttttcaacaggaaaatgagggtatagagcattgagaggaaaaatgattttccaaaagtcatccatcaagagagagagaccagaccatacaaaagaaaaaagtcaattctatagaacagttgcacatcaaataaagcaatagcgctttcttgcaatgaacataacctgaaagccaccaatatccagaatttgtaggactcagtgactcagtcagaaaaagaaacaagttatttacagaggaaattgaagtggccaatgcagagctgaaccttctaccagaaaggagagaggcaggggaggaaattacatgtgccagtctcaccatctttagactaaaatgttgacatctcccagagctagggatgctatgctcagcacgcagcagtttcactgtggataagaccaagagaacacctcatacatgccaaaacgaaagacaaaagcaccctggaaatctagacacaaggaaattgtcgtctggctattttagtatgagttctctccaatgtgtattctgaaacaattcagtgaaagtggtgtgtgtggtaggatgcaccagaaagcacagttgggatatgggaaaacaagaaacctagttcaaggtcattaagcagattcccattgacaacccgggaaactgagggaggaagaaagctggagtgtgtagatcctgatcgttgtttgcacgatgttccacactgccagcttgttgctctgtgtaaaccggacacactccaactgccaaggtcccaagctgctaacataaatgcaaagaatacgaaacactagcaattccatgtttctgctactttctacataaaaaaaagtgcacagcccagtaatttatttgaaatataatatccatcagggtgagggtaagggtgataatcatagcttccaccaaagcattgtgtatactgaaaaggagacatgatacgtttttgtgttagaaggcgaggtttcaggtgggctttgaatttggtttgactgagactcattgagtttgaggtgtctttaggaaaggaagaaagaagggaacaaaaaataaaaagcaatggaaacatgccttcaaattctgaaaaggaaattattttcaactaatacatctatgctcactcaaataaagacagacgtgtgtgggtc

SEQ ID NO: 2230 - DNA, 1357 bp, Mus musculus
gtcaaagttcaggagctagaggcgccgggagcctgggaaatggaatacccctacacaaccaagatgctgagttcctccctgagcccgcaaaacggcacctggtcagacaccatctctctgctcttagctcttggcgttgctctctacttgggctactactgggcatgtgtgcccagaggcctcgtctggtggctggcccagtttctggccttcctggaacaacactgtccagtcactgtggagactttctacccgacactgtggtgctttgagggacggctgcaaaccatcttccgagtcctcctgcagtctcagcctgtggtcccttaccggagtgaagtcctccagaccccagatggaggccagttccttctagactgggccgagcagcctaacagcactcactacccggaccctaccacccagcccatagtactgctgcttccaggcatcagcggcagtagccaggagccgtacatcttacacctagttaaccaagctctgaaggatggctatagggctgttgtatttaataaccgaggatgccgaggggaagagctgctgactcacagggcttactgtgccagcaatactgaagacctagaaacagttgtgaagcacataaaacgtcgctactcccaagctccactgctggctgtgggcatctcttttggagggatactggtgcttaactatctggcacagactgggaaggctggaggcttggtcgcaggactgaccatgtctgcatgttgggattcctttgagaccgttgactccttggagaccccactcaactcactgctcttcaatcagccactcactgctggactctgccggcttgtggccaggaaccgaaagccaattgaaaaggtgttggatgtagactttgcgataaaggcccgcacgatccgccagctggatgagcgctacacatctgtggcttttgggtataaagactgtgcggcttattaccaagccgcaagcccaagaaccaaggtagatgccatccacacccctgttctctgcctcaatgcagcagatgaccccttctccccagtccatgccttccctctgcaggctgcccagaagtctccctatgtggccctgctcatcacagctcggggtggccacattggcttcctggaagggctgatgccctggcaacactgttacatgaaccgcgtactacatcagtatgcccgagccatcttccagcactcagtggggctacctgacctgggagtactcactcctgaagatggaaagagctgacaagaggactgctgggctctcggttcaattgttctctctttattaaatatcaactcttcccgccttaaaaaaaaaaaaaaaa

SEQ ID NO: 2231 - DNA, 1456 bp, Mus musculus
cccacgcgtccgctgggcatcagctgccatcccggagcccacgccgcatgatggagcatgtccgagtggcagcggggcagatgaacgcttgcctaggcttgagcaggagtgtgctgggcccacgggactgtgcaccactgcctgtggccagggctccggcctcagcagcaggctgcagaaggagctgtgtctctcccgggaggaactggactcgtctgaaatgcacgtttctgaggctcaggaagccttcccacctttgcctgccctgggtgatctggagactctccacagcagccacagtgcccccactctacctgaagacacagccatttgcagctgcctgcacccttgccctcttgagaggctccctgagagtggaaggctaggacagctcgcagacctgcccctcaccaatggccaaacccaggttcctggcacagaccctctccccagcagcatgcctgtggcacttcctccccagcatcctgtgggtgtagagcccagtgtggagccatacgggaatggagcccaggagagccactcagccctgccacgcagttcccgctcacctgactctccgggccccagcccctctgcagacagaactggcttcaagccatccccatctggacgccacgcagggctcgtgcccatgaacctctacacccacagtgtgaacggactggtgctgtccctgctggccgaagagactcttctcagcgacactgcagccatcgaggaggtgtaccacagcagcctggcgtcgctgaatgggctggaagtccacctgaaggagacgctgcccagagacgaggctagcctcaccagcagcacatacaacttccttcattatgaccgcatccagagcgtgctctcagccaacctgcccctagtgactgctccccaggaccgccggtttctgcaggccgtcaacctcatgcactccgactttgccctgctgcctatgctgtacgagatgaccatcaggaacgcctccacagccgtgtacgcctgcagcagcccagcccaggagacctacttccagcagctggcacccactgcccgcagctctggcttcccaaaccctcaggattgcgccttcagcctcgcaggcaaagccaagcagaagctgctgaagcacggggtaaacctgctgtgagctgggtgcagcttgcatatcacgagggccatgtccccaatgctaacggttgagcgggcccttgctcctcagtggcagctgcaagaactgagtgggctcaggtcctgtcctgtggaagccttgagggcggtgcagagcaggctgcaggctcaggaatgcagcggcaggattcactgctgaccgtttacttgagatacccatggtgctttgtaaccgtatggtgcccagttccaggtttatgaagcagattcccaaaggctcaaaaataaaatgaccaaagtgaaaaaaaaaaaaaaa

SEQ ID NO: 2232 - DNA, 1940 bp, Mus musculus
gcagcacaggctggtgaatgactactttctttataagcaaccaccttgagcctgaaatggcagtcgctagtctctattgccttgctgtggcctcgggatggaaatctgctggggaccctacagtcacctaatctctctccttctcatccttctgtttcattcagaggcagcctgccgcccttctgggaaaagaccctgcaagatgcaagccttcagaatctgggatactaaccagaagaccttttacctgagaaacaaccagctcattgctgggtacttacaaggaccaaatatcaaactagaagaaaagatagacatggtgcctattgaccttcatagtgtgttcttgggcatccacgggggcaagctgtgcctgtcttgtgccaagtctggagatgatatcaagctccagctggaggaagttaacatcactgatctgagcaagaacaaagaagaagacaagcgctttaccttcatccgctctgagaaaggccccaccaccagctttgagtcagctgcctgtccaggatggttcctctgcacaacactagaggctgaccgtcctgtgagcctcaccaacacaccggaagagccccttatagtcacgaagttctacttccaggaagaccaatagtactgccgaggcctgtaataatcaccaactgcctgatcactctggccatcattggggcctgaggaacaacttttgcagggtgtatgtacagtagaaggagacagaagagttctgatgatagatctctgcctcagtctgttggctggcctaatccccatgatgattccagaataatcttgcaaattggatcatggcaggtgcttgttcaaagccctttcttgttgcctctgccatctgggtgaagtctagaccacttgcttggcctaggtgtcttctgctctaccacccaccctacccctgccacaaacacacactttttttgtttttgttttttccattgttctgcacttccacagtccagaccaatcaagtcacttgacaatatgccccaagtgactcccttaccctgttttataaacctgtgcctgtctatggagaaggttttaattctccttgttattcattttgggctttttgatgaaaccaccagggcatcacatatactaagcatgtgctctaccatcatgctatgcttccagctcaggggggcacttttaaggatctagaaaacagaaattaaggatctcatagttattttattaggccagccttattccatgtcggcaagaggtttcttgtggaaattatgtcctttctgagaggagctggggattagatgctcctgcatttgtgaaatggttataagcatagaaaaataggtggtaagctttccttctttccttattttgtgtgatgccttaaactgaaaagttaaaaattgatggattgtagcattcccataatctcccccttctttttttttcctttggaaatgtccaatagtctatattcctctgtcccgcccaaacaccatcttcactccaagcctaccacagatgcctgaagaagttcctcactatctgcaaatgtggctctcaggcccttcctgatgtgatgaatgaatctactaatcatttcttgaccattcattttatcacttctaaccttgaaacatgtggaagtagctatgttcctgactgtttcctctgccagacaatgaactctggagatcagggagcttcgtgtgtgtgtgtgtgtgtgtgtgtgtgtgtgtgtgtgtgtgtgcgtgcgcgcgcgcgtgcgcacgcacgtgcatgcacatgctatgtattgggtccctccaaggatgaaccctctctttggcttagaaggcactcagagaatatgtgttattcgtgctcacggaaagtttcttactcatccctgtgactttggctttattttacaataaaacactgaaaatgtc

SEQ ID NO: 2233 - DNA, 1707 bp, Mus musculus
gcccggcttgggccgcgcccgccgttcggcggccttttcttccgctcccgcaccgaggtgctcccgggcggctgcactggctccgaggagtagcaggaggagctccgccgcgggaacaaacccggaggcaaacctgtaggaggcaatgcttgaataactctaagacgactagacagtgaaaatgtcagccctcaactggaagccctttgtgtatggagggctggcctccatcacagcagaatgcggcacatttccaattgatttaactaagacacggcttcagattcaaggccagacaaatgatgccaacttccgagagatcaggtaccgaggcatgctgcacgcgctgatgaggataggccgagaagaaggcctgaaggcgctgtattcagggattgcacccgcaatgctgcgccaggcctcctatggaaccatcaagatcggcacgtaccagagcctgaagcggttagctgtggaacgcccagaagatgaaaccctgctggtcaatgttgtgtgtggaattctgtctggagtcatatcctcagctattgctaatccgactgatgttttgaaaatccgaatgcaagcacagaacagcgctgttcaaggaggcatgatagacagcttcatgagcatttaccagcaggaggggactagaggactgtggaagggtgtgtccctcacagcccagagggcagccattgtggtcggcgtggagcttccagtctatgacatcaccaagaagcacctgatactctcaggcctgatgggagacactgtcgcaacgcattttctctcgagcttcacctgtggcctggtgggggccttggcctcaaacccagttgatgttgtgagaacccgcatgatgaatcagagagcccttcgagatggcagatgtgcgggctataagggtaccttggattgcctattgcagacatggaagaatgaagggttttttgctctatataaaggattttggccaaattggttgcgccttggtccttggaatatcattttctttttgacttacgaacaactgaagaaactggacttgtgaccacaagtcgtcgttctgacaaaccgacttccgcgacggtagcccctcctgtgcttctggctgcctcttactgcacagctcatcatggcttctgggatgggagcaatggatggagaccaggttcctcagattgccatgcgttggtcctggatgctttcatctgtgttcagagcctagagcataggaacacccactcaccggtggttaccatcgaagtgcccttgacatcctagataactgatgtacataacagatcgtccttgctgtagaaaacctgcaaggaaatgagaaccgcctgctgctttcttcctggagagtagcctcgctgcctctggtcttctggctgtgtacatcgcccctctgagggggctcctgaagtgggggagcactgttatccccctaccatcgggagctttcgtttcctgtcagtgaagagattttacattgggacagttgtaggaagtacgtctctagcatactgcacggcttcatggttcctgcttgggcagaatctttcacttacagtaagactcgacctttgtgaggcaacactaaccatttgccctaagatttttttttagcaaagtttattatttccatatatcaaatgggggtaattatgctttgtgaagtagggattaaatgaaggg

SEQ ID NO: 2234 - DNA, 1256 bp, Mus musculus
atttagggctcagctcctggaacgtggagtgtgtttcagcccgggttcgaaggcaggcggcgagatgaagcgggcgccagcgttcctgagcgcagaggaggtgcaggatcaccttcgcagctccagccttctcatcccacccctggaggccgcactggccaacttctccaaaggtcccgacggaggggtcatgcagccagtgcgcaccgtggtgcctgtagccaagcaccgaggcttcctgggagtcatgcctgcctacagtgctgctgaggatgcgctcaccaccaagttagtcaccttctatgagggccacagcaacacagcggtcccctcccatcaggcatcggtgcttctctttgatcccagcaatggctccctgctggcggtcatggatggaaatgtcataactgcaaagagaacagcagcggtgtctgccattgccacaaagctgttgaagcccccaggcagtgatgtgctgtgcatccttggagcgggggtccaggcgtacagtcactatgagatcttcacagagcagttctccttcaaggaggtgagaatgtggaaccgcaccagggaaaatgctgagaagtttgcaagcacagtgcaaggagatgttcgggtctgttcatcagtgcaggaggctgtgacaggtgctgatgtcatcatcacagtcaccatggcaacagagcccattttatttggtgaatgggtaaagccgggggctcacatcaatgctgttggagccagcaggcctgactggcgagaactggatgacgagctcatgaggcaagcggtgctgtatgtggactcccgggaggctgccctgaaggagtcaggagacgttctgttgtcaggggctgacatctttgctgagcttggagaagtgatttcaggagcgaagcctgcacactgtgagaagaccacagtgttcaaatctttggggatggcagtggaagacctggttgcagccaaattagtatatgattcttggtcatctggcaagtgagttgaaggaaccgtgcctgagttggccatcacagctcaacactgtttcacaagtgtcaaaatcaaaggaggtccagtccccagtgaatggtagtgattgtcattcataagtactgacacccctattcatgtttgtggttggatagctaaaccaggtaaccatttcttctgttaaggggtgatggccacattatctacccttgatcttactagtcttgtatctctctgaaataaatcatttccacttcttc

SEQ ID NO: 2235 - DNA, 385 bp, Mus musculus
tttttttttttttttttacagttttccaaggttttatttttcattggcgtttagttttcatcttgagacaaaagaattacaaccacagaaacaatggcacaacatttgtaaattgttctaacagaattgagaaggaaggatagaagatacaggactggaggttaagtcggtcactgggggggggggtcactgagagtcactgggtatcactgggggttttggcagattgacagatctacctctgtttgaagttgcattactataaaaaattgacaccctgaaatgactataaaacaacttaaaaaaatgacaacctgaaagtcttgggaaacagaagtgacatgttcctttggtgtagtgctcaccaccaaatcaaacagaatga

SEQ ID NO: 2236 - DNA, 689 bp, Mus musculus
gactcttctaccgcctgctcaagtacgacccccggcgcgacgagtggcaggagtgcccatgcagcagcagccgagagcgctctgccgacatggtggccctcgacggcttcctctatcgctttgacctgtgtgggagccgtggggaagctcaggctgcagtcggttcaggtggcggggtcagcgttttccgctaccattgcctggccaagcaatggagccaatgtgctgtacacctgaggccccctggcgcacccgcaggcctccagccctttcgttgtgttgccctggatggtaccatctactgtgtgagccgcgccgggacctggcgtttcgtgccttctcaggacaccgaggctggcagcgatatgggacctggtggcagctttgagcccgagcccctgggatcccccctggatgtccggggcgtactctttccatttgtactcaacctgcctgagaagccggaccgcggggagcagggtgcagtctaggacaggatcggctgggcagctccactgtccagcatttgaggggacgggggtgctcaaaagagtgggctagcccccaaacccccagtgggggaggaagggcaaagatgtctcaggaatagaggaagcagaaaggccaggctgctggccatagtgcatcatgcaaacgctttgagagtaaaagaagcttcgctggctctg

SEQ ID NO: 2237 - DNA, 2186 bp, Mus musculus
gacatgtgtctgtctggcctcatctgtgcatgggctctgagccgctccgctcctgacagttcggaattctcttcctctctccctgctgcaaagagcggatttctctccgtgtctcttctgtcatctccagctcccctctccaaggacgcaccttgatttatggtagctttggacttccttcagcgtctgcctgtccttgacttctagaatggaagaagctgagctggtgaagggaagactccaggccatcactgacaaaagaaagatacaggaagaaatctcacagaagcgtctgaaaatagaggaagaaaaattgaaacaccaacatctgaagaaaaaagccctgagggagaaatggctcctggatggaatcggcagtggaaaagaacacgaagagatgaagaagcaaaatcagcaagaccagcaccagacccaggttctagagcaaagcatcctcaggcttgagaaagagatccaagatcttgaaaaggctgaactgcaaatctcagccaacgaagaggcaattctgaagaagctaaagtcgatcgagaagaccacagaagacataataagatccgtgaaggtggaaaaggaagaaaacccagaagagtcaatcgaggacatctatgctaatatccatgaccttccaagttcctacataccttcccgattaagaaaggaaagaaacgaaggaccagatgacgaacaaaacagaaaagctttgtatgccatggaaattaaagttgaaaaagatttgaagactggagagagcgtagttctgtcttcaataccgctgccatctgatgactttaaaagcacagggataaaagtgtatgaggaccggcagaaatcagtctatgctgttagctccaatcagaacacaacctacaatggcaccgacggcctcgcacctgtcgaagtggaggatctcctaagacaagcctcagagaggaactctaaatcgcccacagagtaccatgagccagtgtacgccaatccgttttgcaggcctgtgaccccacagagagaaagagtcataagccctggaccaaattttcaagaaaggataatgatgaaaacgaacggactgggcaaccatgcaaatgaatctgcgcacaatatgaccgacgggctctcagagaggagaagcaacggtcccactcacaccagtcccactcggccaacacctcagccccgatcaatggttcagcaagtggaagagatggtccacacccaacaaaagaggatggcaagcccttgggaagaatccagcaacaggcaaaacgaacacgaagtttctccaaggatggaactgagccccagcagagcaagccctgggaaatcgggaccccagtgttcttcacccacttgccaggaggagacagaagatgtcagatataacatcgttcattccctgccttctgatgtggatgacacagaacctgtaacaatgattttcatggggtatcagcaggcagatgataatgaggaagaaaagaagcttttgacaggctacgacggggtcatccacgctgagctcgttgtgattgatgacgaggcggaggataatgaaggacaaaccgagaggccatcctaccatcccgtagctccctacagtcaggtttaccagccacccaaaccaaccccacttcctagaaagagagcggaagttaggccgtatgaaaacacaaaccataaatctcctcacaaaaattccatctctctgaaagagcaagaggaacgcttaggcagccctgcccggcactctcccctggatgtcccagtagctggagacgggactgaggatccttccttaacagctttaagaataagaatggccaagctggggaaaaaggtgatctgagagccgtggtgcccacctgaataacctctgaaggagaagccacgaaatgcctgaaaacttctcttctgaattcttttatttcttgtccctaaagtccaaaactatataattatacccatagtaagtcacataaataaatattagtcattatttaggggggaatcccccctcaaaaaaaactgggacaacaaatgctaacttttccagttacttgatatgactcagtggggccgggggaaccagtatatttttattgtattgataccaaagcatttctaataagagcttgttgaatttaagaataaagttatttaaaatacct

SEQ ID NO: 2238 - DNA, 1280 bp, Mus musculus
agttaacaccagaaaaggtgccgaattggaacagtgaaattctcgctaaacagaaacctctcattgccaaaccatctgcaaagctcctgtttgtcaacagactgaagggcaaaaagtacaaaagcggcagcgcctgcactaaggttctccaagacgccagcaactccgtggaccaccgcgcgccacgctcccagaagaaaatcagttcagacacgattggagatgaaggattctttgacttgctaaggcgatttcagagcaacaggatggatgaccagaggtgccacttacaaggaaactgtcgcacaacatccacagcagctgcttctgctacccccaagttgatgaaagcaccgtctgtctctgtggtgtcccccaacacagatgagttcttagatcttcttgctagctcacagagccgccgtctggatgaccagagggccagtttcagtaatttgccagggctccgcctgacaaaaggcaacagtccatctgtacttgagcgcctgatgacaaatgacaagaaagagcctgatgaagacttcttcgacatccttgtaaagtgccaggggtcaagattagatgatcaaagatgtgctcctccatctgctgccactaaggggccgactgtcccggatgaggacttctttagcctcatcttacgctctcaagctaaaagaatggatgagcagagagttctgctgcaaagagatccaaacagagacagtgagtttggactaaaggaacttttgcaaaataacgctttgttggaatttaagcattcgggaaaataactagcaaaccacaggatggtgtggtaacctactgaagaaaaggactggtcccctcaggacactgcaggggctcgccactgtagcagtcaccacatttttagggtgtgaatgttgagtactgagggactgacattcttctgtctcagggcagaacgtcctgtaaggtgctccgtcagcttaactgaccttgagattctgtgtgcgtgactagattccttggctagggtttgtgtaatagggatttaaatgactcctacattagaactcagtcttttcttacagaggccatctttaaggagctagttgacagggactttttgtacctgcccatgaatatagcagattgcattgtttattggaaataatgtaaatgtcctatgtaaaaaagatgaaaatagtcataaaattctagtttaagaaaactatattcaatatatttttaggcaaagccagtgagggaaatgagaaataaactgcttttagcat

SEQ ID NO: 2239 - DNA, 2586 bp, Mus musculus
caggccgccgcgctccggacccgcagcccccggcgccgcgcgttcgggcggcccagggcggcaccttgctatttcttctcaggcgcggtcctccccttagagttgagcatctgtttgcctgaagtgaatttccagaagcaggtgtccccagaactgggccagggggatgaaccgcgagggagcacccgggaagagtccggaggagatgtacattcaacagaaggtccgcgtgctgctcatgctgaggaagatggggtcaaacctgaccgccagtgaggaggaatttctgcgcacctatgctggggtcgtcagcagccagctcagccagctgccacagcactccatcgaccagggtgcagaggacgtggtgatggcgttttccagatcggagacggaagaccggaggcagtagctggaagcccctcggaactccctggaagctgcagatggccaagagatctgtgtggctcctctgccggttgagtggtagcaaaccaccgtcttcttaccctttgcaccccttaccccatccgaccctccccacccagccgccactcagcagggctggcatcaaggtggtttgtgattggcttaaagggatggacttgagattggctgcaggaagaaacctttttatttttaaatcttgactaacggaaaccttttatttttatttctgactctttatttttttaaacatttgcgcctcggtatctggcttccccggaagctctccgagctctggtgctttatttaggtcatttttaggaatgtgaagaggcctgattggttgcttaaactggaaaagggttatgattggctggctagtgggacgtggtcttttctttgattggctataggtgttctgttcacatcaccgacttcctctgttctgaaagcagaaaacggggtttgggatattgttatatttgacttgaaaaaaaaaaaaaaagaaagaaatgaagtgagctttgcaatatttattacacaaagagctggctgctgccttcacgtagtgggtttgtgtttggatttgattggcagtaagatgcgggtttggtttcccattggctcacccctgactcccgttgctatggtctttcttccactctgctggttacatgaggcctgagggtacacctggagaatgcacgtgctttaatgaccacacctgcctccaccagcgaagggaccccagggacgcgagcgcgagcggggtccacagctggagaacaggcccccaaggggctttgtgttctcctgagccagcagcccagagctcaggggtgaccgggaggcaggattgatgtactcagttctaagagctggcagccagccagtttcctggagcgaatggattgtgcagagctcttcaggcctttctggccagcccatgctaagtacaggagtgttgaccggcagctccagcctctctgctgccccctgtgtctcacttccccaggtcttggcatccccagatcctgaaggttatgaggggtctttactggagccttgaacccaagcagataccccagtttcacttctagaaccccagaggtttcaaacttggctccaagcacaacctagccaggcttcccagggtccattgccagtggctgtagttcccggatagcagatgtgttctacctgagcccaggcccccattacaccgtgtatcaccctgtgtgtcagcatagaagggggagtagcatggcttatttattaggaagcacccacttggaagaccagctagactttcacacagtaggccccacaggctactcagatccagcccaagggtcacattttagagcagcgactgagaagaaagatatgggtggtcgtcccatgcccaccatgccttccctgggagtgagagaaacggtgacggccctttctggtcctgggcaccatgatccggaaaacactggagcatcttttcccttcttggggcttcggcctcccgtgtggcagggagtgtgcaggatgccagtgccagcaggtcttgagttcaagccctggggcacctccctgttggtggacggttcaagcttcccagacatgtcccaggaggagaatgtgaacatctggtccctcagcacatcggccctgttagctgacagtaacatgctcgctttggccattgagctccagggagcaaggacagtggagaatcagctccgccaaccccagcctgaccagcaagagcctgagaggagagcgtcattgctggggaggagcagcgtgtgtgagcaggcacggtatgagctcacactgactgacagacgcgtgcttgttctgctggcgcagtgtggcctggagatgtggctgggcccgtgggcagagatggggtcattcagtcttcctcccctgtgagattgtatctaaagtccggtgttgccagcttcagttggttcctgtgactgcctcgaggccaagccctggtgatggtgtgtgctctgtcttagcagtggttctcggctcagcctctgagggaaaaagatgcaagtatcgatgtggcttcttattctaactgaaagtctatctaatggagaaaaaaaataacaataaagatttttcacagct

SEQ ID NO: 2240 - DNA, 1264 bp, Mus musculus
ttccagcctgctgcatcacctttgtggtttatgaaaatgtctctccctttttatatgaccttagagaaaagaaagtgagctaaaagaagatcccagtctatgttcttgaggcaacagcaaagtcctttgtgtttgaagcgcaaagctcagaagagttctgcagagctacatagctggtaaccccatgtctgtgttacaagtgaaagaactgctaagtcatcttgatgtcttctgctctttgcatctccgtgtgtgtggagcttggcagcctctacctggagtgggtaccatctgcctgacgttgcaactgatagccacggcgaaaatgtacaggatcttccattttgttattcagggagaagctcatttgcaatatttgtaaataatttgatgaatgttctttttttctgaactctcttgcctggattggctttaaaactgaccatgtgcaatagcaaggaactggcttcttacaagaatgactatatttcaagggtaaattaaacttggggaacttataataaggtattatctaactctagcccattttgaatggggatatttttgttagaaagaagtctgttatagacgtgctttagttttaatccaactggaacatactaagtacagaaattggagaagtcatggatttctctgagaaatatctagcaccttttgccattccattgcttaattatttacagtgagattctggacgcagaccttgtattttggccataaacacttagtgtgtggttagggtgtataaaacctgaacttgcaggatccggtgaagcctttatttagcatgtgtggctacaaatcactcatcagaaatgctggctcatgtttcacagagatggaatgtttgatgtaagcttgttgaaaaactgaatagaaacaagcattctagtttcccttcatttttagatttatggttccagattccaaataattatttgtctgcattggttgctcaaattcaggttgaaatacaaattacatttgtctgtggccattactggtttgatttctaagtcattgtagatctccaggtaaaaggcctgctcccgaaggatgctagactaatactaactcttctgatgagcaactgtcagtactgttgcactagcctctattttttgtaaataaatcattataatcatagctgtatttaaagggttctttgaaaataagcctatttttttatattttgcaaatggaattgtttttaaaataaaaaatgaaaagataatttatattt

SEQ ID NO: 2241 - DNA, 983 bp, Mus musculus
  misc_feature 6, 97: n = A,T,C or G
ggagtnagtcgcgcgttggttaaggctctgggaaagggggcaggccatgttgcatgtgacctgggggtccaaggtccgactatggtccctggtgccnctctcctcgggactccccgagctctgtcgtccctggagaacaggatgggggtgtaccgcaagatgtggaaccccaaggagccctgcgactgggcccagcagtaccgcgagcgcttcattccattctccaaggagcagctgctccgcctcctgatacaggtaccgcccatcagtggtctaaggacctagagactacagtttccagccgacctcgcgactgcaccactatacctgcttttgaggagttccactccagcccagcggagagagcagctttggaggcattctcagctcacgtggacttctgtaccctctttcactaccatcagctcctggccaggctgcaggccttgtatgaccccatcaaccccgacagggagaccctggaccagccgtcccttactgaccccgagcgcctgtccagtgagaaggatgtgctccaggctctgaggcccctgctggcccaggccaacttctctccactctctgaagatgccctggcttatgcactagtcgtccatcatcctcaggatgaggtccaggtacctgtccccagaggagccatgtttgctagcctagaggaagcatgcctccctcacctgtcaggcaagggctatcagatgagggtctcaggtacagtgctgccacctaagaggattttatgataaacagtgtagcactcactccatggggttggacagatagtccatggttaaggacacttgctgctgttgtagaggactagtatctacgaggtcacgcatgacagtctgtagttccagttctgggccatccattgtcctttcctggcttttacaggtaggcaccagacatgcatgcagcacccttacatacatgaacaccaaacacctatacacataaaatac

SEQ ID NO: 2242 - DNA, 2368 bp, Mus musculus
ggcgcggcgggccgtgagcgagtgggggtttggcggcctcacctgtcctcactctcagcggcggcgagaggcggcggcggcaccgtccggcggagagggccgccgccaggtgtgcaacagaagaacatggctcaagaaactaatcacagccaagcacctatgctttgctccactggctgcggattttatggaaaccctcgtacaaatggcatgtgttcagtatgctataaagaacatcttcaaagacagaacagtagcaatggtagaataagcccacctgcagcttctgtcagcagtctgtctgaatccttaccagtacagtgcgcagatggcagtgtcccagacgctcagtcagcgctagattctacgtcttcatctatgcagccaggccctgtgtcaaatcagtcacttttatcagaacctgtagcaccttcccaagtggacagtacatctgtggacaaagcagtatctgagacagaagacctgcaaggacccagagcagagggccttgttcctcttgaatgtgatcctccatcttcagtatcagatacgacacagcagccatctgaagagcaaagcaagtctcttgaaaaaccaaaacaaaaaaagaatcgctgtttcatgtgcaggaagaaagtgggacttactgggtttgaatgccggtgtggaaatgtttactgtggtgtgcaccgttcctcagatgttcacaattgctcttacaattacaaagccgatgctgctgagaaaatcagaaaagaaaatccagtagttgttggtgaaaagatccagaagatttgaggcgcggcgggccgtgagcgagtgggggtttggcggcctcacctgtcctcactctcagcggcggcgagaggcggcggcggcaccgtccggcggagagggccgccgccaggtgtgcaacagaagaacatggctcaagaaactaatcacagccaagcacctatgctttgctccactggctgcggattttatggaaaccctcgtacaaatggcatgtgttcagtatgctataaagaacatcttcaaagacagaacagtagcaatggtagaataagcccacctgcagcttctgtcagcagtctgtctgaatccttaccagtacagtgcgcagatggcagtgtcccagacgctcagtcagcgctagattctacgtcttcatctatgcagccaggccctgtgtcaaatcagtcacttttatcagaatctgtagcaccttcccaagtggacagtacatctgtggacaaagcagtatccgagacagaaggacctgcaaggacccagagcagagggccttgttcctcttgaatgtgatcctccctcttcagtatcagatacgacacagcagccatctgaagagcaaagcaagtctcttgaaaaaccaaaacaaaaaaagaatcgctgtttcatgtgcaggaagaaagtgggacttactgggtttgaatgccggtgtggaaatgtttactgtggtgtgcaccgttcctcagatgttcacaatgctcttacaattacaaagctgatgctgctgagaaaatcagaaaagaaaatccagtagttgttggtgaaaagatccagaagatttgaactcctgctggaatacaaaatcctttgactatctgcaaactaaacattgacttgaggttttttttcctagtccttgggaatgtagagcaccgtatcttgcatagacccttgaatcatgcatgtcatcagaagaatagatttttggttttgttttgaaaatgactctgaacatttatttggattgcagtttctgtggctaagaagaagtattatacttttaagatcattttaattttagttgagtgcagagggcttttataagaaatgtggagaaattctggagggctgtgatttttccagtattaaacatgcatgcgttgatcttgcagtttatttctcattgtgtatgtatatatagcttttctctgcagcacgattcccttttgataaggcccttctgggtacaactagttatcagtaactgaatgtttcttatcattacggctgcttctgtttgttttgttttcattaacaaaggttatacatatgttagcatatagtttctttgcacccactatttatgtctgaatcatttgtcacaggagaatatgtgctgacgagattctaaatttgtggtttttggttccttttatttttttttttaagcaagggaaagaaaagctgagtgcatttcactgctgactgcaagtttctttgagattactgttcattggtctgtgtgtgcacaatatgaagaatgagctggtcattgtgcggtatttatgtttattcaccagtctttgattaaataaaaaaaaaaaaaaaaaaaaaa

SEQ ID NO: 2243 - DNA, 1338 bp, Mus musculus
gagtgataggccccatcccttgggctgccagggggtggggccttatagagtcctgggcggctagagtccatctcacaagagcagcatcagtcctagtaaagactgaaaagtatggacaagaagactgaagcatccctgtaagacccaagaagaaagaccaccctgcccaacttcttgccttcccatgaccctatgacaagaaaaaccacagtggtcttccggtgaaatctgtgtgtctgtgtactctgagatacacagactctgaggcacagcgtcctccctccgactatctcctgcagctgtcgcgtgaatcagacaaggaaatactaatatcagcagtctgagccaaagagcagagcgcgtgtctctttagaatgccttcactcctgctgggcaggcaatggtctatgactttggcttaaatgattcttagacattatccgaccaactctttcaatttatagatgagaaaactgagtcaaagagaaacaggctgaaggactatggaggcgagtaccaaggcggccgtcggcagtggggctatggaggcgagcaccaaggcggtcatctgcactgtttgcagcagctttgttgttttccagattcttttccattttgtcagttactggttttcagcaagagtttcttcaggttataacagtcttagcatcgacaagaagattgaatggaactcaagggtagtatccacgtgccactctttgttagttgggatttttggcttatacctcttcttcttcgatgaggccactataactgatccgctctggggtgatccaacgtatgtgaacataaatattgcaactgcttcaggctacctcatttctgatttattgattatactttttaattggaaagtgatcggcgacaaattttttataattcaccattgcgcaggactaactgcatactactttgtattgacaactggagcgcttgcctacattgccaatttccgcctgcttgccgagctttccagcccctttgtaaaccagaggtggttctttgaagccctgaagtaccccaagttttccaaagccaatgtcatcaatggaattcttatgacggtggtctttttcatcgtgcggatcatttcgatacctccgatgtatttcttcctttactccgtgtacggaacagaaccctacataaggacctgcatcctgaaggtgaatttttaaacctctctccccgatgagattccagcatcagagaaaacccaaagctgaagaaatctagtttgtgcctattagcaagaccggagctacccagtcaatgccagtcaatggctcttgtggattaagtgaaaccttgcaagct

SEQ ID NO: 2244 - DNA, 3339 bp, Mus musculus
gttgtggggcggcagcatgttcagctggatggggcggcaggctggcgggcgcgagcgctcgggcggcatggacgcggtgcagacggtgacgggcggcctgcgctctctgtaccagcgcaaggtgctgccgctggaggaggcgtaccgcttccacgagttccactcgccagcgctggaggacgccgacttcgaaaacaagcccatgatcctgctggtgggccagtacagcacgggcaagaccacgttcatcagatacttactggagcaagatttcccaggcatgagaattggtccagagccaaccacagattccttcattgctgtgatgtatggggagactgagggaagcacccctgggaatgctttagttgtggatcccaaaaagccattccgaaagcttagtcgctttggaaatgctttcctgaacagattcatgtgctcacagctgcccaaccaagttctgaagagcatcagcatcatcgacagtcctggcattctgtctggggagaagcagcgcataagccgagggtatgacttctgccaggtcttacagtggtttgccgagagggttgacaggatcatcctgctctttgacgctcacaaattggacatctcagatgagttctcagaggcgatcaaggccttccggggccaggatgacaaaatccgagtggtactgaacaaggctgaccaagtggatacacagcagctgatgcgagtctatggggccctcatgtggtctctgggcaaggtcatcaacacacctgaagtacttcgagtctacattggttcattttgggcacagcccctgcaaaacaccgacaaccgccggctctttgaggctgaagcacaggacctcttccgagacatccagagcctgccccagaaggctgcagtgcgcaaactcaatgacctcatcaagcgtgcaaggttggccaaagtccacgcctacatcatcagctacctgaagaaggaaatgccaaatatgtttggaaaagaaaataagaagcgagaacttatctacaggctcccggaaatctatgttcagctgcagcgagaataccagatttctgcaggggacttccctgaggtcaaggccatgcaggagcagctggagaactacgacttcaccaagttccactcactgaagcccaagctgatcgaggctgtggacaacatgctgaccaacaagatctcatccctgatgggcctcatcagccaggaggagatgaacatgcccacgcagatggtgcagggcggcgcctttgatggcaccacagaggggcccttcaaccagggctatggggagggggccaaggagggggccgatgaggaagagtgggtcgtggctaaagacaagccggtgtatgacgaactcttttacacgctgtcacccatcaatggcaagatatcgggtgtcaacgccaagaaggagatggtgacctccaagctgcccaacagtgtcctgggcaagatctggaagctggccgactgcgactgcgacggcatgctagacgaggaggagttcgcgctggccaagcacctcatcaagatcaagctggacggctacgagctgcccaacagcctgcccccacacctggtgcccccctcccacaggaagtccctgccaaaggctgactgagggcccacagctggggtgggaggggtggtgcctgggcctgaagtctgctctgccactgactcgctgaatgtccgtggccaaagttccgtcctctccgtgactcggttttctcatatgtagggcagggagggcagatcccggacactagatgaggtctttatgcctctaaaatcctgaagtttctatcaaaatattgagaagagcagtatatagatatggagatcaaagaataagaagaaaaaaaattatccaaagaagaatgtaggtgtgacacaggctgtcgaagtctgggcactcagggattgagccagggactcactggagccatcagagctgtgctggacagtaagttaccatgagcctctttgtccttcagggggcactgagaggcagcaaaggacctaatttatttttcttactgtgtttcctgctctatctagagaggaaaaggaacagaacagagagtttctgccttccatagattaaaaaccaaagagaagactaatacccaggtttgaaagaggatgtgccatgtctgtgtgggcccatctgcagtccccatcagagtaggcagccaggcaaggagaacctgtcttgtcccagcacctgctgcctgaccctgccaagcctccctcagttaggaattcataattcacaaactgtcagcccctgggcaagacctgtgtgcccttcaaccactgaatgtccccaaagcttttttggcaggtggcagaatttaaattcaataaagcttgtcttgatttgtgtggagtcccagagccttcggacccaggtaaagcgagagcagccccatcctgagctgtgagtggaagagaccagcgccctggtgattgatgatgttgtttgatttttaaagaaagaaatgcatttcattgtgtccaggtatgtttttctcacaagatgtagcctctctgaagaaatctctgtaataccttttcttccaagctagacacctcacatcaggagtgcctatctgggccaggattggtctacttctgcctcttcagtgttctttcccaagcccacctagtcaggcgccgcaggggctgcctcctactgtaccctgctctgtggcccagcagaagaacactgtcaccatcacttacgaagtaggaatcacagcgcagcagtgaccacatgaccaacagcagcagaaatgaatgaatctgaacagcatccctgaatcttcacaaaaacatactccaatccctaattgtctgcatctggcaacctcagggtcagaaccggggatttaagagaaaatgctaagagctcacacccatttcgcagcacttgggaggcagatgcagggggattaccatgagttcgaagccagtctgaactacatcgtttgttttatggtagtctgtgtaaaacagaatacttacgccaccattcacacttcctatcttactttctaaataatggttttaagagaaacacagtgtttgctttactctgaaagcgtgtttttattaattggacacacacaggtgaatgtttgatcccggggctgtaactgtatttgtgtcagtgtccatggagaggtgatgcctgggaggtcttgactttcctcctagttgtcttctgctttctctgcacagttgtcatatatctacctaaatataatcacaaatgtaaaaaaaaaaaaaaaaaaaaaaaaaaaaaaaaaaaaa

SEQ ID NO: 2245 - DNA, 670 bp, Mus musculus
cctctgctttcctagagacacacacagctgagatcatggcattcgacggcacgtggaaagtagaccggaacgagaactatgaaaagttcatggagaaaatgggcattaatgtgatgaagaggaagcttggagctcatgacaatctgaaactgacaatcacacaggatggaaataaattcacagtcaaagaatcaagcaacttcagaaacattgatgttgtgtttgagctcggtgtaaactttccctacagtctagcagacggaacggagctcactggggcctggaccattgagggaaataaacttattgggaaattcacacgtgtagacaatggaaaggagctgattgctgtccgagaggtttctggtaatgaactaatccagacctacacatatgaaggagttgaggccaagcgattctttaagaaggaataagtcaacttctcagagcctggagcaacgctgaagagctaagctgatgtcagatttctttctccatcatgctaatgccaggctcattcgtcatcctatcagcactggtctccagccttgtcaaagctaaagaagtaaaagctaattaaaagaacttcatttgttttatggtccttaagctatacatgaactagtcttttaaaagaaaataaatcctgttctcacacaaaaaaaaaaaa

SEQ ID NO: 2246 - DNA, 1107 bp, Mus musculus
  misc_feature 627: n = A,T,C or G
ggggtcttccgagcttcgggaacgtcagcacgtcgacgcgggggttttctctggtgtcccactgacgccgctcctgtgttcctgagccagtgttcgggctgtcccggggcggctggcggactcggttaggggccggaccccgcgatctgtccgggtcaccgccctcccggcctgccctctttccggtccacactagggacgcctgaggccgtggggtccctgagctgggccggggagctcggggctcatcccctcctcccgaggctcggatgggaggtggcgggaggagagacctgggatgttcagtctgatggccaactgctgcaacttgttcaagcggtggcgggagcctgtcagaaaggtgacacttgtgatggtcggccttgataatgctggtaaaacagccacagcaaagggaatccaaggagagcatcctgaagacctaccttccactgttggctttttctaaaattgatctgagacaaggaaagttccaagttaccatctttgacttaggaggtggaaaaagaattcggggaatttggaagaattattatgttgaatcctatggggtaatatttgttgtggattccagtgatgaggagagaatggaagaaacaaaggagncaatgtccgaagtgctaagacacccgaggatatcaggaaagcctatattggtgctggccaacaagcaagacaaggagggggctttaggcgaagcggatgtgattgagtgtctctcgctggagaagctggtcaacgagcacaagtgcctgtgtcagatcgaaccttgttcagcagtcttgggatatggaaagaaaattgacaagtccattaaaaaggggctttattggctactgcatatcattgcaaaggactttgatgccttaagtgaacgcatccagaaagacacaactgaacagcgagctcttgaggaacaagagaaacgtgagagggctgaacgagtccggaagttaagggaagaaagagaacgagagcagacggaacttgatgggaccagtggtctggctgagattgactcaggaccagttcttgcgaatcctttccaacccattgcagctgtaatcattgagaatgaaaagaagc

SEQ ID NO: 2247 - DNA, 1707 bp, Mus musculus
gagctctctgcgaggggctgcggacggccatgcagttcccgcacccggggcccgctttgcgcccgccgtgggagtcccgctgtatgcgcccacgccgctgctgcagcccgctcacccgacgcccttctacatcgacgacatcttgggtcgcgggcccgccgcccccacgcccactcccacgctgccgtcccccaactcctccttcaccagcctcgtgtcctcctaccggaccccggtgtacgagcccacgccggtccaccccgccttctcgcaccacccggccgccgcgctggccgccgcctacggccccagtggcttcggaggccctctgtacccgttcccgcggacggtgaacgactacacgcacgccctactccgccacgaccccctgggcaagcccttgctctggagccccttcctccagcgacctctgcacaaaaggaaaggcggtcaagtgaggttctccaacgaccagaccgtcgagctggagaagaagttcgagactcagaaatacctctccccacccgagagaaagcgtctggccaagatgttacagctcagtgagagacaggtcaaaacctggtttcagaatcgccgagctaaatggagaagactgaaacaggagaatcctcaaagcaacaaaaaggatgcgttggacagtttggacacttcctgtgagcagggtcaagacttgcccagtgaacagaataaaggtgcctctttggatcgttcgcagtgttcaccctccccagcctctcaggaagaccccgactcggagatctcagaggattccgaccaggaggtggacatcgagggggataaaggctactttaatgctggatgacagtcatcggccatgtttagagaccggactttagaataatgttttgctacagaccaactggaaaattcggggggagagagagagagagaaagagagagagagagagagagagagagagagataacaattcttgtagagttttgaaaatgtttggtgcactggctaattaacaaacatgcattgcgttgagaccttaactttggtttaacatacggtatctataccagtttttaagttgttttgataaagtgactaaatgtgacctcattttttaaaaagtgaatttatttctatttatgaaaggtaatttgaacttttgtctaaagcttaaattatgactttaaaggttttaagttttaggaggctgatcttgactgactttcctaagtctgtagctattccctcgactttagaggtgcacttaggtgggggcaacatttggggaatccatggaacactttgaaagggtatacccaacttttacatggcatcttacattgctgccttaactccaaagccatttcagagcacttggctcccggtgtctgttcttacaagcaagatagttgataagattctaaaaatcttgttttgctcagccagtgcctctgaccctggtgttaagggatgacgcagtccctacaggcagggaaactgactcatttgagactgatctcacacgaactagaaatagcaggacaattcaatgtaagtagattgtagatagtgtgttttatagaaactgtgtctataacatgtatatagcattacttcttgtaaaaactctgccaaaatgatgtttgtttgtttggttggttttttgtaatttaatgaattaactttcatatacattcatcatcagg

SEQ ID NO: 2248 - DNA, 1031 bp, Mus musculus
gaagagagaggtatggggctacgcgcgggtggagcgctccggagggcgggtgcggggcccggggcgcccgagggacagggacccggtggcgcccagggcggcagcatccactcgggctgcatcgccacggtgcacaacgtaccaatcgccgtgctcatccggccgctgccgtccgtgctggacccggccaaagtgcagagcctggtggacacgatcctggcggaccctgacagtgtgccccccatcgacgtcctctggatcaaaggggcccagggtggcgactactactattcctttgggggctgccaccgctatgcagcctaccagcagctgcagagagagaccattcctgccaagctcgtgaggtccaccctttcagacctgaggatgtacctgggagcatccacaccagacttgcaatagcaacctcctgatagccccctgcccctctccacatcagcaccactacccggcgctcagaagacacatgcagcccccagtgggcagaagctgtagatgggatatgttctctttattcttaagggaggtctgcctcttggtgcctctgcactagctcccaggggctagctcccaggaatgagggggttcagttcttctgtctatggaaagatatcatggccttgaccctgaaggagtaccaggaaggaagaaaggagatggacttggagacaaggactctcattttaatctttatgatagcactatatgaactatgtactaggaagtaaaggaaaacccaggtcaccatggcttcagtgagagaagctggttatccatccccatagcctgaactctggaaccggcagctaacacagcactgactaacacagtattgtgtcaacagctcagtgaaggcagggcttcctctcgggagtcctttggccttgtcctccttgctccttacttcgtagtcgctgttgctgtgtttctaggaaccgtgtctgtgctcaaggaagaaacccactggaccaacttctgtcagaaaggaaaaccttgttcaaagtttcagg

SEQ ID NO: 2249 - DNA, 2129 bp, Mus musculus
gagatcgcgtagtccatgccctggcttccgggcttcacctatctgtggcgccaggacggttcccagatccactgcttctttcgagggcgcagacgaggtgagaccggcggttccgaggcccgctgggtctggcacgcagggaagacaccccgcgtggatgcgatttggaattgggatcctgggtctcaggagatccggagtgtggaagcgccggggagactctgtgttactccgggtgtcaaaagctgcgggaggcaagtttgtcggggacagagtctcggccaccatggctcccacgctgaagcaggcgtaccgcagcgctggtggatggcttgcaccgctgtggtggagaacctcttcttctccgcggtgctcctgggctgggcctccctgctgatcatgctcaagaaggaaggcttctattccagcctgtgcccagctgagaacaggaccaataccacccaagatgaacagcatcagtggacaagctgtgaccagcaggaaaagatgctcaacctgggtttcaccattggctccttcctgctgagtgctaccacactgcctctgggaattctcatggaccgctttgggcccaggcctcttcgactggtgggcagtgcctgctttgccgcatcctgcactctaatggccttggcctccagggacactgaagttttgtctccattgatattcctggcactgtccttgaatggatttgctggcatctgcttaacgtttacctcactcacgctgcccaacatgtttgggaatttgcgatccactttcatggccctcatgattggctcctatgcgtcttctgccatcacgttccctggaatcaagctgatctacgatgccggagtccccttcactgtcatcatgttcacatggtctggcctggcctgtctcatctttttgaactgtgctctcaactggcctgcagaagcctttcctgcccctgaagaagttgactacacgaagaagatcaaactcattgggttagccttggaccacaaggtcacaggtgaccgcttctacacccatgtaaccattgtgggtcagcggctgagtcagaagtcccccagcctggaggagggcgctgacgcctttatttcatccccggatatccctggtacctcagaggagactcctgaaaagtctgtcccttttcgcaagagcctctgctcccccattttcctgtggagccttgtcaccatgggcatgacccagcttcgggtcatcttctatatgggtgctatgaacaagatcctggagttcattgtgactggtggcaaggaacgtgagacaaatgagcagagacagaaggtggaggagacagttgagttctactcttccatctttggagtcatgcagctgttgtgtcttctcacctgccccctcattggctacatcatggactggcgcatcaaggactgtgtggatgctccaacggagggcaccctgaatgagaatgcttcctttggagatgccagagatggggctagcaccaagttcactagaccacgctaccgcaaggtacaaaagctcaccaatgccatcaatgccttcaccctgaccaacatcctgcttgtgggtttcggcatcgcctgcctcatcaagaacttacacctgcagttgctggcctttgtcctgcataccatagttcgcggtttcttccactcagcctgtggaggtctctacgctgctgtgttcccgtccaatcattttgggacactgacaggtcttcagtctctcatcagtgccgtgtttgctctgctgcaacagctactcttcatggccatggtgggacccctgcatggagatcccttctgggtgaacctgggcctcctacttctctcgttcctgggatttctcctaccttcctacctctactactaccggtctcgcctgcagagagagtatgccaccaatttggtagacccacagaaggtgctcaatacttcgaaggtggctacatagactcctgaggccaagagacttggaggacaggcagtcaaggcctgataaaccgaagggaatggcctgtggctttctacctgcatcgtgttcatagagccgggttctgtggatttataaatactaagagttctatttttgtagggacttgc

SEQ ID NO: 2250 - DNA, 1735 bp, Mus musculus
gtctccatggatccatttgtagtcttggtgctttgtctgtcctttctgcttgtcctgtcattgtggagacagagatctgcaagagggaacctccctcctggccctactcctctcccaattattggaaattaccacctgatagatatgaaggacattgggcagtgccttaccaatttttctaaaacatatggccctgtgttcactctgtattttggctcacagcctattgtggtattacatggttatgaggcaattaaagaagccctcattgaccatggagaagagttctctggaagaggaaggattccggtttttgacaaggtttctacaggaaagggcattggttttagccatggaaatgtatggaaagccacaagggtcttcacagtgaataccttgaggaacttgggcatgggaaaaaggaccattgagaacaaagtgcaagaggaagcacagtggctcatgaaggaactgaagaaaacaaatggctcaccctgtgatccccaattcatcataggatgtgctccctgcaatgtcatctgctccattgttttccagaatcgtttcgattataaggataaggattttcttagcttgataggaaaagtgaatgaatgcactgaaattttgagctctcctgggtgtcagattttcaatgcagtccctattcttattgattattgtccaggaagtcataataaactttttaaaaatcatacatggattaagagctatcttttggggaaaataaaagaacatgaagaatcattggatgttacaaatcctcgggacttcattgattacttcctaattcaaagacgtcagaaaaatggcattgagcacatggactataccattgaacacctggcaacattggtgactgatctggtttttggtgggacagagaccttaagctcaacgatgagatttgctctcctgctcttgatgaagcacacacacatcacagctaaagtccaggaagagattgacaatgtgattgggagacaccgcagcccctgtatgcaggacaggaaccacatgccttacacaaatgccatggtgcatgaggtccagcggtacattgaccttggcccaaatggtgtggtgcatgaagtaacctgtgacactaagttcagaaactacttcatcctcaagggaacacaggtaatgacatcactgacatcagtgctgcatgacagcacggagttccccaacccagaggtgtttgaccctggccactttctagatgacaatggaaactttaagaaaagtgactacttcgtgcctttctcagcaggaaaacggatttgtgtgggagagagccttgcccgcatggagctgtttctattcctgaccaccattttacagaatttcaaactgaaacctctggttgatccaaaggacatcgatatgacccccaaacattctggattttctaaaattcctcccaatttccagatgtgctttatccctgtggaatgaagatgataaaatagaagtgaagatgatgaaagcttctgctatgctgtttttctcaatcacccacggaagccctcatttaacccagtcccagaaattccatctatattccttcttatcccagcttctgttctctaattgcccaaggctaacagttctctattatatagtttctgaagtcaatgtaaaaaatcctgaaggataaaatcattgcaaattaaaggattcaactatgaaaaaaaaaaaaaaaaaaaaa

SEQ ID NO: 2251 - DNA, 2206 bp, Mus musculus
gacgctggagagcaggcgcttggctctgcctgctccgttatttccgctgctggctggccggagcctgctcgccccgtcgcgctcccccgagggcatgcgacagcggcgggacgctcggctcccgggctcggcggcgcgggcgagcgacagcggaggcacagttcttgtccaccatgaatgagtgtcactatgacaagcgcatggactttttctacaacaggagcaacacagacacagcggacgagtggacagggacaaagcttgtgatcgtcctgtgcgtggggacgttcttctgcctctttatatttttttctaactccctggtcattgctgcggtgatcacaaaccggaagttccactttcccttctactacctgctggctaacttagctgctgcggatttcttcgccggaatcgcttacgtgttcctgatgtttaacactggcccggtgtcgaaaacgttgaccgtcaaccgctggttcctccgccaggggctcctagacaccagcctgactgcctccctggccaatttgctggttattgctgtggaaagacacatgtcaatcatgaggatgagagtccacagcaacttgaccaaaaagcgggtgacgctgctcattctgctggtgtgggccatcgccatcttcatgggggccgtccccacgctgggatggaattgcctctgcaacatctcggcctgctcttctctggctcccatttacagtaggagttacctcattttctggactgtgtccaacctcctggccttcttcatcatggtggcggtatacgtacgcatctacatgtatgttaaaaggaaaaccaacgtcttatctccacacaccagtggctccatcagccgccggagggctcccatgaagctaatgaagacagtgatgaccgtcttaggcgccttcgtggtgtgctggaccccgggtctggtggttctgctgctggacggcctgaactgcaagcagtgtaacgtgcaacacgtgaagcgctggttcctgctgctcgcactgctcaactccgtcatgaaccccatcatctactcgtacaaggacgaggacatgtacaacaccatgcggaagatgatctgctgtgccctgcaggacagcaataccgagaggcgcccctcccgcaacccctccaccatccacagcaggagcgagacgggcagccagtacctggaggacagcatcagccagggcccggtgtgcaataaaaacggctcctaagccacggacgcctccgccctcttcccctggggaaagagctgttaagcgtcctcacctgtctcacaaagcacgtggacagggttgtttgagggctccatgcatcacttctggggcttttaagttttcatggtcaaggaaaatagatttacggcgtttagtaaaagcgcacaggaaagggagagatgagcagtgggttccggcttgtctgtgatccgctcccaacatcctccagctcttgcgagagcatgctgggctctgtcaccatcttgccaccattgtctgtgtgttttcaatgatggtgttgaaagtcctaggtcaaaagaaagtagtaaataatggtacctgagccccccattgtgtggctactagattctgtagttgtttccgcatgggtttaaaatgttcagaaaaatattttagcagtgaactttgatttcctcagagaagccatggccaggagctaggtgggcaactgtatagtagagtaagtgatgatattgaccggtaggttgaacttcttccaaatagcgtcaaatatgagcacgattagatcttcagtcttggttatcaggataccgctgaggggcttgctggatcccaagtgcaaagtaattgcacatcgagtattttaaccaaagctgccagcgtattctatcttgtggactgcattttgatcttgtatttttctccttcaaagacctctgaaaggtagatcagttaaaaacaaaaatagtgttcatacacataggctactgaccagtgttttcggtgtaagacgtttagagtgtatctgacaaagtaagaataacttcaaggcaggcactatggtatttatgtagcttgcaaacgtttacatgttctctctctctctctctctcccctctgctgttgtgatgtaacatttatgtgcacaaactacttgtaataaaatattttaagaagcaaaaaaaaaaaaaaaaaaaaaaaaa

SEQ ID NO: 2252 - DNA, 2057 bp, Mus musculus
ggacacatgccgggtagcctgagtatgacgccagtacttctggaaggacataaagaatactttaggttggagactctaaaggatgctgggcagagggtcagggctgaagcttcaagcagcaaaatttccaactcaagtttgtggtgtctaaggatattcctgccaccagaacgctgcttccttccctctcctgtgtcctacaggtgcaagccctgtaatccagcttgcctgatttctctgttctgtcacgccagaagcattggcaggttggtgagggtcctgaggtgctctggccacaggtaccatccatagctccaactcatgtgaccaaagggaaccacccagatgtggtccaggggcgtctccatcatctgcccacgggcctccttacttgagcagggagatgtcatcagcaaagtcatcgtgctggtggcgcaggcaacgcaggcagcgccactgacataccatgaggcagagtggcaacatgaagagggcgcagatggccgccatgacataggctatggtcataagtgttgactcatctgtctggggaatgttgtagccacagtcttccatgtctgccgtaacaaacggaccttccactgccgccgtcctgaactcatcgtgcactggagagagggtggagatgaaccggtagctcttactgtcatagagtagcttaggttatacaattaaaagagcttcctgacaggggccccttgggatccacccaagtgagactgcagagcccaacttggacagagcgagcagtaggcagggaagctagtactgagggaggctgtttctccttccagggcctcgggaactggactgcaagcctctcccattctcacatccagtagaggtgatatcaaagtcaacagttccaagttgaccaaaatctagctccttccacacatagcagacttacctgtcttcatgaaaatgcaaccacaaagccctggcccttttctgcagtagtactcagctttactgtgggcgggcagccacccttgcagctagtatttccaagtgcctgggaagctcgagctgctatcagtttccaatagtgctttccccaccaggcgtgttcaccagagcaagccttagccctagctctcacacatggttgattagccagaggcagctactactacctcccaaacaaagagatctgggtattagcagctgacagcaagaacatgagctgactgaccccacaccctcctcaccatggcaagcgctgacagcaaagccaattcgctttcgggcttcgatcgaagacgacatagaaaccttccatgatgacggctcccataacagtgcccgtggatgactgtgagacagcgaacttgtaacagtcgtcttgggacgtggccacgtcctccaccggccgtaggtattgctaggggtaaacagtcacagggtgagagcatgtctgattcttcctgccttcctctgccttttagtctcctacactcttcctcaagccccaagatgtggattcttctgagacccctttaccaccacacattcgtttcatctttcaagttgtagcaagctatgtctctttacatactttgtctgctgcttggcaccccactgtctcagcttggggacatacctgaggaaggatggtgatgcggaaggactgattggtgacttcacccatgaggtaaagtgaaatgactgggaaaatgttccaaggggtcgtgcctgcttgccagcacaccagctgctcccctagccaaaagccatccgggaacttctccgtctgttgacaagagaggaatgtgaagcctcggcctatcccaccatgtcttctctgtgttcagaaccacagtgacagtaccactgtgtgcttttccagggaattttccaaagtagcaaaggtaaactgaagtctacggatcaggaggagaaagtgagatactggcctcataaagctgtgagtgggcatggtggctcacactgcctgtggtcccagaacttagaaggctaaggcatgaagttgtcaagttcaatgctaacctgggctacgttcatgaccccatctc

SEQ ID NO: 2253 - DNA, 1931 bp, Mus musculus
tcatctgagaacgtgaacagagtttacctgctggagaaagcggtctgactctcagacttctagatctgtagatccggggctcatgagggattgtgccagagcctcagtgaatgccaaagtcttcagaggttggagacctaaaggcaagaaatagaaatgagtgagccaaagaaggtagttccaagatgacagcagatctaggaaggagaccagacagactaaagaagataccagcagcagggattggaaggtcagggtggtaaaaacaaattagaaagaagtgtcctggagagttggaagaaaggccttttggatggcttcgtgtaggtgaagaccagctgcatagagagagccccaggttggaactgacatccagagaaacagaggggcaatgattcactggtgaggctcccttgaaatggaagtcagtgtcatagccatctgggtaaatgtggggactcggtatcagtgacagacagtgtcacccccactagacccttttcagaaagtgactcatcaagaagtctgagttgagtgtccattctaactgtaaccaagtgagtagatcaggaacaattaaagtgccagactatggaagagtaatttaatcaaagtgccctggattcttatgcagttgttcaatagtgataaccacagagagttgtgaagtagatattctccaagtatgagatggagaaagcaggacacaaaatcatatttgtactacacttataactgttttaaaatgtacgcttatagtcaaaagctattgtgttgttgtaggcttatagtcaagcattattttcttaaatttctagaatgttctttatggtagtgttattcaaaagttaagaatcatatttccattgtgagcataattggaactctttatgaaacacttggaaaataacagagaagtggagaaagataacccatgtccccaccatccaaagatagatatactctttaataccttgtttattcttgttgctgtgcacagacttatatattacaactgtgtcaaaatgtgtattcaagatagctgttctagtatttcctgtgtaattacggtaaaatactttgaagtttccctatgttccttgtaatagtcgcctgataataaagtttagtatgtaatatcaccaccataagcatactatgtacccagtgaaaattggaaaataagtaaaattgaacagaaaactttgcccacactccccatacccaacaactgttaagatcttcatctgtgtccttcatttcatgtcattgcacaaatttgtgattaaaacagtgttaaatagatttgcataatgcctaaaacaaacagaaatgtgggaaacaattaaaaatagtgtttttttggggggggggttcatggttaaatgttttgtttaagatttcttgaataatcttcagtgtttgggtaacaaactttacgtatgtactctgcatcacaaatataaggcatactcaaagaaaactgggaaactgaagtgaagtcgagaaaaactgtatttccaacaaacttctggtaacgcctggatctgtgccccactggtgtgattgtgaggttttccatgacaagtgcgtagtgtcaacagcaggaagaaatgtggaaaggtgtggaatggcagggcagttgtggcggaattacagtgagctgtattttctcagtttctttgagggttctttgtcatagtgttctagcaggctgcccgtattgcttatatatgcagtacgtgaccattctagtagccttgaagatgtgcaaatgtagaagagaaactcacccatattgtcattacccaaagactgtgttaacatctccatttgttttctttgtcttgtttctgtgcacaggcttttggtttgttaatatggctgtagttggtctatcttgtaatagtgtcatcaataaaaataaagtt

SEQ ID NO: 2254 - DNA, 1867 bp, Mus musculus
tgcctgcctccggaataagctgttgaattcttgtttcttccagcgcggtgtctgcctgcacgctgccatgcgtcctgccatgatgataatggactgaccctctgaaactgtgccgatccccttgccacagtcgagtctccatggcctgaccgtgtcttgacaataattttgagcaaaatctatgtctaataagaagataaccacatcaagatggttgggaagctgaagcagaacttactcttggcgtgtctggtgattagttctgtgaccgtgttttacctgggccagcatgccatggagtgccatcaccgaatagaggaacgtagccagccagcccgactggagaaccccaaggcgactgtgcgagctggcctcgacatcaaagccaacaaaacattcacctatcacaaagatatgcctttaatattcatcgggggtgtgcctcggagcggcaccacactcatgagggctatgctggacgcacatcctgacatccgctgtggagaggaaaccagggtcatccctcgaatcctggccctgaagcagatgtggtcccggtccagtaaagagaagatccgcttggatgaggcgggtgtcacagatgaagtgctagattctgccatgcaagccttccttctggaggtcattgttaaacatggggagccggcaccttatttatgtaacaaagatccgtttgccctgaaatccttgacttaccttgctaggttatttcccaatgccaaatttctcctgatggtccgagatggccgggcgtcagtacattcaatgatttctcggaaagttactatagctggctttgacctgaacagctaccgggactgtctgaccaagtggaaccgggccatagaaaccatgtacaaccagtgtatggaagttggttataagaaatgcatgttggttcactatgaacagctcgtcttacaccctgaacggtggatgagaacgctcttaaagttcctccatattccatggaaccattccgttttgcaccatgaagaaatgatcgggaaagctgggggagtttctctgtcaaaggtggaaagatcaacagaccaagtcatcaaacccgtcaacgtgggggcgctatcgaagtgggttgggaagatacccccggacgtcttacaagacatggccgtgattgcacccatgctcgccaagcttggatatgacccatacgccaatcctcctaactacggaaaacctgaccccaagatccttgaaaacaccaggagggtctataaaggagaatttcagctccctgactttctgaaagaaaaaccccagacggagcaagtggagtaactgagcccgtaacttcccacagggacgactgctgccttgtctacagaagggaaatctcgggaacggctgtctgctgcgacaaggagtgtctgtgcccatcgctcctgttcacctgccagcctcctgtccccagggggggtgtcacacacccgggcctccccaagtgatggctcttgagcccaggaacatgcatggccctcaggatgaggagcccagcagggacacagttctgtcacagctcctcttgtccttgtctttccttcccaggttccagtctttaatttcaaggaaaggagagtttgaagttggcattctgttaacaaaatcaggcagtctcattccgaataggttctatgtacacgttccgatgttttgtagaacactcgtgcctgttgaaacgtatcgatgtggataatagtaaataccttaattatttaaataattcattgtattgtttcagagacgtttggaaattactgtatacatttacaacctaatgacttttgtattttatttttcaaaataaaagcttaaatgtgaagca

SEQ ID NO: 2255 - DNA, 529 bp, Mus musculus
aaacttttattgttaatcacactgacatgacagggttcactggttcctgtagcagagtgcagagaagtgtgcttgctgcacaggagcataaggtcacagccacccctcctaggcaggagggaaggagtactttaattgaattgtacaaatacctgctaacctccagaatatactcatgaagtactggcctgccttcttgaagcccatgcccaggtagagagtcacagcaccttgctgcaaggcgctggtctcaaggacaacatcactgtaactctggtcccttgcaaactggaggacagttctggtcagcgctttcgctatcccctgtcctcgatgctgtgaggacacagacaggcgaaagagctgcagctgctttctccctagtggaggatccttgactggctgagcagccactatgcccaccacctgccccccagactcagccacccagaagcaggcgccatgtacattcaggtaagacttggtgatgtcaaccatgtctgtctgcaaacatttggccacatattcc

SEQ ID NO: 2256 - DNA, 2587 bp, Mus musculus
gtcagatgacttttcctctcccctagctctccgttctactgtcctggagaccatggcccctctgctggctctcttctacctgctgcagctgggcccaggcctggctgctctcttctgcaaccagaatgtcaatatcaccggtggtaatttcaccctcagccatggctgggcccctgggagcctcctcatctactcctgccccctgggcaggtacccgtccccagcctggaggaaatgtcagagcaacggacagtggctgacaccaaggtctagctcacatcacaccctgcgatcctctcggatggttaaagcagtctgcaaaccggttcgatgcctagctccttcatcctttgaaaatggcatctatttccctcggctggtgtcctaccctgtgggtagcaacgtgagctttgagtgtgacgaagacttcaccttgcggggctcacctgtgcggtactgtcgccccaacggcctgtgggatggagagacggctgtgtgtgacaatggggctagccactgccccaaccctggcatctcagtgggcacagctcggacaggcttgaactttgaccttggggacaaggtcaggtaccgctgctcctcctcaaatatggtattgactggctctgcagagcgggagtgtcagagcaatggagtgtggagtgggtcggaacccatttgccgacagccttactcttacgacttccctgaggatgtagcatctgccctagacacctccctcaccaacctgcttggagccaccaatcccacccagaaccttctgacaaaaagtttgggccgtaagatcataatccagcgctcgggtcacctgaacctctatttgctgcttgatgcttctcagagtgtgacagaaaaagactttgacatcttcaagaagagtgccgaactcatggtggagaggatcttcagctttgaggtaaatgtcacggtagctatcatcacctttgcctctcagcccaaaaccatcatgtcgatcctgagtgagagatcccaggatgtgacggaggtgatcaccagtctggactctgccagctacaaagatcacgaaaatgccactggcgctaacacttatgaggttctcatccgcgtttactccatgatgcaaacgcagatggatcgcctgggcatggagacctctgcctggaaggaaatccgtcacaccatcatccttctgactgacggaaagtccaacatgggtgactctcccaagaaagcagtcaccagaatcagagagctcctgagcatcgaacagaacagagatgactacctggacatctatgctattggggtgggcaagctggatgtggactggaaagaactgaatgagctgggttccaagaaggatggcgagaggcatgccttcatcttgcaggatgcaaaggccttgcaacagatctttgagcacatgttggatgtctctaagctcacagataccatctgtggggtggggaacatgtccgccaatgcctctgaccaggagaggacaccttggcaagtcacctttaagcccaagagcaaggaaacttgccagggatcactcatctctgatcagtgggtgctgacagcagctcactgcttccatgacattcagatggaggaccaccacctgtggagggtcaatgtaggtgatcccacctctcagcatggcaaagaatttcttgtggaggacgtgataattgccccagggtttaatgtccatgcaaagcggaagcagggcatctcagagttctatgctgatgacattgccttgctgaagctatctcggaaagtgaaaatgtccacccatgccagacccatctgccttccttgcactgtgggagccaacatggctctgcggagatccccaggtagtacctgtaaagatcatgagacagaacttctgtcacagcagaaagttcctgcacattttgtagctttgaatgggaacagactcaacatcaacctcaggacaggacctgagtggacaaggtgtatccaggctgtctcccaaaacaaaaacatcttccccagcttgacaaacgttagcgaggtggtgacagaccagttcctatgcagtgggatggaggaggaagatgacaatccttgcaaaggagaatctgggggagccgttttccttggacggagatacaggttcttccaggtgggcctggtgagttggggtctttttgacccttgtcatggttcctccaacaaaaacttgcgcaagaaacctccacgtggtgttctgccaagggacttccacattagtcttttccgcctgcagccctggctgaggcagcacctggatggtgtcctggactttctgccactttaacatggtcactgactcctttattaggtctgaacttcctgtctaatacctctgagcgttctcactcctggatacataaatcttgggccccgggagcccagagacagtggcaaaagctagggaatccccaggattgtgccgggacctctgtgccacctgtgaagcaagtctctctctagtgtggatgacccgtgctccttttgctttcacacggaatttcccagttatgtaattaataaaaatcaatgatttcca

SEQ ID NO: 2257 - DNA, 1242 bp, Mus musculus
ttgggatctcatttgcacaatgacggacagaagcccctttgagacagacatgctgaccctgacccgttacgttatggaaaaggggcgacaggccaaagggaccggagaactcacccagctgctcaactcgatgctgactgccatcaaagccatctcttccgcagtgcgcaaggccggcctggccaacctgtatgggatttcggggagcgtgaatgtgacaggagatgaggtgaagaaactggacgtgctgtccaactccctggtcatcaacatgcttcagtcctcctacagcacctgtgtgctcgtctccgaagagaataaagaggcggtgatcacagcccaggagaggagggggaaatatgtggtttgctttgaccctctggatggatcttcaaacattgactgcctggcctccatcggaactatatttgctatttacagaaagaccacggaggacgagccttctgagaaggatgccttgcagcctggccgcaacatcgtggctgcgggttatgcactgtatggtagtcgaaccctggttgctctttccacaggacaaggagtggatctgttcatgctggacccggctcttggagaattcgtgctagtggaaaaagatgtccggattaagaagaaagggaaaatttttagcctcaacgagggctatgccaagtattttgatgctgctactgctgagtatgtacagaaaaagaaattccccgaggatggcagtgagccttatggagccaggtacgtgggttccatggtggctgatgtgcatcgcaccttggtctatggaggaatcttcatgtacccagccaaccagaagagtcctaatggcaagctccggctcctgtatgaatgcaatcctgtggcctatatcatcgagcaagcaggaggtatggcaaccacaggcacccagccagtactggatgtgaaacctgagagtattcaccagcgagtccccctcattctgggtcccctgaggatgtgcaagagtatctcagctgtgtgcagagaaaccaggcaggcaggtagtgagcctgaacccatgagcccgcttccctttgtctttgtcaattgaaaaactagatgaatgagctatggagatgggaggaaaggcaaagaagtcaagtgacacaggtcacggtcagaacagcgccctgctgctaaggacagggttagaagccaggggtaaagaaagatacagtctttggactaaaataaaaatatgaatctgaa

SEQ ID NO: 2258 - DNA, 2163 bp, Mus musculus
  misc_feature 2163: n = A,T,C or G
gggtggtagcccgggagcaggactgcaggttggctttagaggactgggctctgagagactatgcctgaggctcatctctagagtttttacgtgcctgcccagacaaactgttccctccacattttctgcagccaattcagtgagaaccccaggatggtgaggtggtttcaccgggacctcagcgggcctgatgcagagaccctgctgaagggccggggagtccctgggagcttcctggctcggcccagccgcaagaaccagggtgacttctccctctcagtcagggtggatgatcaggtgactcatattcggatccagaactcaggggacttctatgacctgtacggaggggagaagtttgcgacgctgacagagctggtcgagtattacacgcagcagcagggcatcctgcaggaccgagatggcaccatcatccaccttaagtacccactgaactgctcggaccccaccagtgagaggtggtaccacggccacatatctggagggcaggcggagtcactgctgcaggccaagggcgagccctggacatttcttgtgcgtgagagtctcagccaacctggtgattttgtgctctctgtgctcaatgaccagcccaaggctggcccaggttccccgctcagggtcactcatatcaaggttatgtgtgagggtggacgctatactgtgggtggctcagagacgtttgacagcctcacagacctggtggagcacttcaagaagacagggattgaggaggcctcgggtgcctttgtctacctgcggcagccttactacgctactcgggtaaacgcagctgacattgagaatcgggtcttggaactgaacaagaagcaggagtcggaggacacacgcaaggctggcttctgggaggagtttgagagtctacaaaagcaggaggtaaagaatctacaccaacgtctggaagggcagcggccagagaacaagagcaagaaccgctacaagaacattcttccctttgaccacagccgagtgatcctgcagggacgtgacagtaacatcccaggctctgactacatcaatgccaactacgtgaagaaccagctgctaggtccagatgagaactctaagacctacatcgccagccagggctgtctggatgccacagtcaatgacttctggcagatggcttggcaggagaacactcgtgtcatcgtcatgactaccagagaggtggagaaaggccggaacaaatgtgtcccatactggcccgaggtgggcactcagcgtgtctatggtctctactctgtgaccaacagtagggagcatgacacagcagaatacaaactgcgaacattacagatctccccactagacaatggggacctggttcgggagatatggcactaccagtacctgagctggcctgaccatggggttcccagtgagcctgggggtgtcctcagctttctggatcagatcaaccagcgacaggaaagtttgcctcatgcagggcccatcattgtgcattgcagcgctggcatcggccgcacgggcaccatcatcgtcattgatatgcttatggaaagcatctccaccaaggggctagactgtgacattgatatccagaagaccatccagatggtacgagcacagcgctccggcatggtgcagaccgaggcccagtacaagtttatttacgtggccattgcccagttcatcgaaacgaccaagaagaaactggagatcatacaatcccagaagggccaggagtcggagtatgggaatatcacgtaccctcccgctgtgaggagtgcccacgccaaagcctcgcgtacttcctccaagcacaaggaggaggtgtacgaaaacgtgcatagcaagagccagaaggaagagaaagtaaagaagcagcggtcggcagacaaggagaagaacaaaggttctctcaagaggaagtgatctgggcattcgtctgcaggtggccatgcatcagccgtgatccctgcagaggcttccacccgatagactgagacctgtggccctcaccagaccctaggaccacccccatcttcttgtaatttaagtgactgtggtcatctgaatctgtatatagcccggcaagtccccagggagagccgggcccttctattcttgtaaataaattccctggaccactgtgan

SEQ ID NO: 2259 - DNA, 1109 bp, Mus musculus
  misc_feature 9: n = A,T,C or G
gacattcancggctgccaagaggagccgccgggcgctcgcaggctcgcaggctcgcaggctgggcgcgcgctgctctcgggaggaccgagccaccgactcaaacccagccaccgtcgcctcctctccgcgcgaaccatggccggcctcggccacccctccgccttcggccgggccacccacgccgtggtgcgggctccgcccgagtccctgtgccgccacgcgctgaggcgctcgcagggcgaggaggtggatttcgctcgcgccgagcgccagcacgagctctacgtgggcgtgctgggcagcaagctggggctgcaggtggtgcagctgcccgccgacgagagcctgcccgactgcgtgttcgtggaggacgtggccgtcgtgtgcgaggagacggccctcatcacccgccccggggcgcccagccgcaggaaggaggttgacatgatgaaagaggctttggaaaaacttcagctcaacatagtagagatgaaagatgaaaatgcaactttggatggtggggacgtcctattcacaggcagagaattttttgtgggcctttccaaaagaacaaatcaacgaggtgctgaaatcttggctgatacttttaaggactacgcagtctctacagtccctgtggccgattctttgcatttaaagagtttctgcagcatggccggacccaacctgattgcaatagggtccagcgaatctgcacagaaggccctcaagatcatgcaacagatgagtgaccatcgttatgacaagctcactgtacccgacgacatggccgccaactgcatatatctaaatatccccagcaaagggcatgtcttgctgcaccgaaccccagaagagtacccagaaagcgcaaaggtctatgagaaactcaaggaccatctactgatccctgtgagcaactcggagatggaaaaggtggacggcttgctcacctgctgctccgtttttattaacaagaagatagactcctgagccagagagtcccttccctgtggccagcaagtggccgaggccaggctgatggctctgtacctattcctcctttttcctttgacaatctactgggccactgtgctactaactcttg

SEQ ID NO: 2260 - DNA, 842 bp, Mus musculus
aggaagggaggccaacgtcactaacactgtatgtgcaaatgtccgcaataaaacactttccaactttgtaacttcctcttgtataagtacttatttgccacacgtaacttttaccacagaatcgatttttttctcttctttttaaaagtaagatgtgatgtggtaaagagaacaccaggatgtaacctctaagattgtaatgtcctttcttgctcgaatgtcatagatgctgtcacttgaaccgtgttcctccgttttattctcatacatgagagggatgggggggaggcagatgaagaatgctgaaaactaactgaattctgccctgctcacactaactgttcctctaccctagccgatgcagtgtgctcccgcaaggcgaagccaggcagatggtcctgtctgtcagagctgcaggtgactcagcagcctctgtccagggttggcttttaggctggcagagcctgggacagctttgcagccatagctctttggtgttgcctccgctggtccgaatgatcagttattggggtgttgcctctgctggtccgaatgatcagttattggggtgttgcctctgctgctccgaatgatcaatgttactgggtgtttcttttctccttgttgcgtgtgtctgattataacagccacttgatgaaatgtctgaccttctccacactaagatctctcaggcttctctcagctctccagggaagaaaatatcttactaaacagtgtatttctttttggttgagaagtgtgtattaagtgtgtacataaattattatgtaagttggatgtgggtttttttaatctttgtcatttaataaaagcaatatatg

SEQ ID NO: 2261 - DNA, 1558 bp, Mus musculus
gcgcccccgcgcgtcggtccgcgcgtgtccccgcgtccccgcccctggcgtcccgcgccggcggaactgtgggatcgccgcgcacaggaagtggcggcggcgccgaggcggagggcggcgatgggggcccggggcggcgggcgcgcactcgctgaggccccgacgcagggccgggccgggcccaggccgcgcgcgcccgacgcgagaaccgcgaccagcaggtggagtgcaggccctgcaggtcggacacccttgaggacagccatcgcctggccctgctagcctgtgccttggacggctgttctcagtgaaggaccgtgcggccgcccctgagcagcgaccatgggcctgcttgcctacctgaagacccagttcgtggtgcacctgctcattggcttcgtcttcgtggtgagcgggttaattatcaacttcacccagctgtgcacactggccctctggcccatcagcaagcacctataccgccgtatcaactgccgcttggcctactcgctctggagccagctggtcatgctcctggagtggtggtcctgcacggaggcactcttcttcaccgaccaggccaccgtggaccactttgggaaggagcatgtggttgttatcctcaaccacaacttcgagatcgacttcctttgtgggtggacgatgtgcgagcggtttggcgtgctggggagctccgaggtgctggctaagagggagctgctgtgtgtgcctctcatcggctggacgtggtacttcctagagatcgtattctgcaaacgaagtgggaggaagaccggacaccgtcatagagggcctgaggcgcttagctgactacccagagtacatgtggtttctcctgtactgcgaaggaacacgcttcacagagaccaagcatcgcatcagcatggaggtggctgcctccaaggggctgcccccactcaagtaccacctgctgccccggaccaagggctttaccacggcagtccagtgcctccgggggacagttgcagctatctatgacgtgaccctgaacttcagagggaacaagaacccatctctactggggatcctgtatgggaagaaatatgaggcagacatgtgtgtgaggaggttccccctggaagacatcccagcagatgagaccagcgccgcccagtggcttcacaagctgtaccaggagaaggatgccctgcaagagatgtacaagcagaagggtgtattcccaggggagcagttcaagcctgcccgaaggccgtggaccctcctgaacttcctgtgctgggccaccatcctcctctcacccctcttcagcttcgtcctgggtgtctttgccagtggatccccgctcctcatcctgacgttcttggggttcgtgggagcagctctcttcggagtccggagactgataggagtgactgagatagagaaaggctccagctatggcaaccaagagcttaagaaaaaggaataattaatgctgtgattgaacacccataacctgatgcggtatccaattaactcaattaaaaacagaacacacaagcgcgagggaaagagt

SEQ ID NO: 2262 - DNA, 2476 bp, Mus musculus
ggaagagaacacaattctctaggacctgcactggaacccggggtttccagggagaaatggtgaccccgggggaacagaggtctcccgtcccatcctaagaactgctagatcccgtgtgacatcaccagtcccctcactgctgccactgctagaagctctgagctctgtgctgggggcaccaggcactgacacttggctcttgttgggagaacagagagagtctctcttgtccacagcctgtgctcagctccaactgctgcatctcccagaggctctgccctgccccagctgcatagagcctacctgatcacagctccagaatggcctccagcccagttggagttcctagcccacagccctctagggccaatgggaacatcaacctggggccatcagccaacccaaatgcccggcccacagactttgatttcctcaaagtcattggcaaagggaactacgggaaggtcctactggccaagcgcaagtcggacggagccttctacgccgtgaaggtgctgcagaagaaatccattttaaagaacaaagagcagaaccacatcatggcagagcgcaacgtgctgttgaagaacgtgcggcatcctttcctcgtgggcctgcgctactccttccagaccccagagaaactctactttgtgcttgactatgtcaacgggggagagctcttcttccatctacagcgggaacgcaggttcctggagccccgggcccggttctacactgcagaggtggcgagcgccattggttaccttcactctctcaacatcatctacagagacctgaagccagaaaacattctcttggactgccagggtcacgtggtactgaccgatttcggcctttgcaaggaatgtgtagagcctgaggagaccacgtccaccttctgcggcacccctgagtacttggctccagaagtgcttcgtaaagagccttacgatcgagcagtggactggtggtgcttaggggcagtcctctacgagatgctacatggcctgccccccttcttcaacactgacgtggcccagatgtatgagaatattttacatcagccgctacagatccctggaggccggacagtggctgcctgtgacctcctgcaaggccttctccacaaggaccagaggcagcggctgggctccaaggaagactttctggacataaagaaccacatgttcttcagtcccataaactgggatgatctgtaccacaagaggctgactccacccttcaacccaaacgtggaaggacctgctgacttgaaacactttgacccagagttcacccaggaagctgtgtccaagtccattggctgcacccctgacaccgtggccagcagttctggggcttcaagtgcattccttggattttcctatgcacaggatgatgatgacattttggactcttgagagacgtgcgcttggaaagccaccaagcccagccggtacctgctggaactatcttctgctgcactaagacacaatgagtcccaaagaagtaagacacagtggctcggagaagaggggaaacacattttccatcatgtgaaggaacagttcaggctccccagtatccagccgtctgcagttctgacttgcccttcttgagaaatgacttctgtgcttggtttttcatttttgttttgtcttgtttgttgttgctgaggcagtgacaaaatatgcaagaaaagtaaagaacatctatttggactcacgattttagaaggtaaagcccacagttggctcatctattgctacggtcttcagccaaagctgagtcatctcactggaaggggtggcttaccttatgactaccaggaggcagaaacagaagtccgagctgggaataagataccttcaaataagatatcccaagtggcctactcccttccagcctggggtgggggaggccccacctcgatttatcacctctccatgctataaaattacacatctatgaacggactatattgctgaggaagcctgagcccctccctcattggatagtgatccaatcatttactgaaggctccatcagctggacacaggaaccttcagaaaagagactagaaccgtggtagctttggatgttgagttatgagatcacagagtggttactggccacttttgtgtgctaagcaagagaaaaggaggaacgggacagaggtgggctgcccagaaaccgtctggtggcttcctttagtgtgtcgtaaatctccacctctcctggaatgcagcctgggcacaagctacctctcgtagtaaaagggttcaaatgctgagagaaaggggaggatgtaggtgaccagcactctgggagagagcctcttggtatctgaatttatatttcagtgtatacattgatgaaatgtaataagcctgtcatgtgttgtctttggtttgaggttgctctatgtggacggtgtctttgtttcaggtaatattaaatgcactggatatta

SEQ ID NO: 2263 - DNA, 950 bp, Mus musculus
agacagccttagtgtcttctcagctggggattcaacacaggagaaacagccattcactttgcctgagccccagtctgaacctgacccatccctgctgggcaccggagtcagaacacaattccagctgccttggctcctcagccgctcgcttgccaggggctctcccgaacggagcgcagccctgatggaatggatgagatctagagttgggaccctgggactgtgggtccgactgctgctggctgtcttcctgctgggggtctaccaagcataccccatccctgactccagccccctcctccagtttgggggtcaagtccggcagaggtacctctacacagatgacgaccaagacactgaagcccacctggagatcagggaggatggaacagtggtaggcgcagcacaccgcagtccagaaagtctcctggagctcaaagccttgaagccaggggtcattcaaatcctgggtgtcaaagcctctaggtttctttgccaacagccagatggagctctctatggatcgcctcactttgatcctgaggcctgcagcttcagagaactgctgctggaggacggttacaatgtgtaccagtctgaagcccatggcctgcccctgcgtctgcctcagaaggactccccaaaccaggatgcaacatcctggggacctgtgcgcttcctgcccatgccaggcctgctccacgagccccaagaccaagcaggattcctgcccccagagcccccagatgtgggctcctctgaccccctgagcatggtagagcctttacagggccgaagccccagctatgcgtcctgactcttcctgaatctagggctgtttctttttgggtttccacttatttattacgggtatttatcttatttatttattttagtttttttctcttacttggaataataaagagtctgaaagaaaaatgtgtgttgtt

SEQ ID NO: 2264 - DNA, 1252 bp, Mus musculus
  misc_feature 82, 152: n = A,T,C or G
gtcagtgtccacctctcccttaggcattgttgagtgcgtccgagcgctgccgctggcccgtgtggtcgcacgacctcggagncggacgcagccgagcggggcagccgatcagaccgggagtgggtgccgaggtactggtcgactggggccantgtttgtcccgaggtaagcgtcgtctggaatccataaacaacccttccggtcgcccgctgtgacctaggtaaccgcctctgtcgctcgcggagggacaccctggctccgcgtgcacctagacggccctgcgctcagcagtcagcagcgacgcactctccagggggcgctcgtgctatcagatcgagcacccttcaaggtcccttcacccttcgctgaacttgtcctcccaccgaccatcgcacagccctaagtctcgaacccagctcagccaggagcttcaggtccacgatgctactggctctagggcccaaagcttggcccaagctctctcagttcaaacccctcctcaggatctcaggaggtgaaactctgcatagaaattcccgacactgggcagggcacgggcagcgccaaggccctgggctaagaactagactgctgatcacagccctgtttggggctgggctgggctgggcctggctggccgcgagggctgagaaggaacagtggcgccaacagcagcgtacagaggccctgcgccaggctgctgtgggccagggtgacttcagcctactagaccacaaaggccagcctcgatgcaaagccgacttccgaggccagtgggtgctgatgtacttcggttttactcactgccctgatatttgccccgatgagctggaaaagctagtgcaggtggtgcggaagctagaggcggagcctgacctgcccctggtgcagcctgtcttcatcactgtggacccagaacgagatgacgtggcagccatggcccgctatgtgcaagaattccacccaagactgttaggtctgaccggttctacagaacaggtggcccatgctagtcgcaactaccgcgtatactacagcgctgggcctaaggatgaggaccaggactacattgtggaccactccattgccatctatctgctcaaccctgatggtcttttcaccgattactagggtcgcagcaggtcagcagagcagatcgtagagagtatacgtcggcacatagctgccttccacagtgtcttgccctgaactatacctattgcctaggccctgtcattaaatggatgtactg

SEQ ID NO: 2265 - DNA, 2048 bp, Mus musculus
aactttggtcctggatctttctgggcggagcgagcaacctgcagaacgctgcgttttgcgttggaaaggtagatctggttcctggttccactgtccttgccatcccggacacgcagcaatcatggcccagccgccgcccgacgttgagggggatgactgtcttcctgaataccaccatctcttctgcccggatcttctccaggacaaagtggcctttatcacaggtggtggttctgggattggcttccggatcgcagagattttcatgaggcatggctgccacactgtcatcgtcggcaggagtctgcagaaagtgaccacggctgctaagaagttggttgctgccaccggaaagcggtgcctccctctgtctatggatgtccgagttcccccagaggtcatgactgctgtggatcaagcgctgcaagaatttggcaaaatcaacatcctcattaactgtgcagctggaaacttcctatgccctgccagtgctttgtctttcaatgcctttaagaccgtggttgacattgacaccatcggtaccttcaatgtgtctagtgtgctttacaagaagttcttccgggaccatggaggagtgattgtgaacattactgccaccctcagtatgagggggcaggtgctacagctacatgcaggcgctgccaaagcagctgtggatgctatgacgcgacacttggctgtggaatggggtccccagaatatccgtgtcaacagcctggctcctggtgccatcagtggcactgagggtttaaggcgattaagaggctccaatgccagttcgaaattaaagcatttttcaaatcctattccaagacttgggaccaagacagagatcgctcacagcgtgctgtacctggccagccctctggcttcctatgtctcaggtatcgtgctggtggttgatggtggaagctggatgacattccccaatggcatcaagcaactgctagagtttgaatccttctctgctaagctgtaggggagtcctcccgtggatatccaccttcttcttctttgaagataggatctcatgtacactatgtagctgaagatgattttacaaaagagccaccctgccaatttttgcagtgtttgaagatcacacccaaggcttccagcaggttcaaccagcagaatcaactgatctgtacgtcctcccccggggatcttctgacacataaacttcgtactcaagatagttgttttgaggaggcagtgttcttcatggggaatgcctcctgccttgcataggtctatagtcacacaggaagtgttgagtctgacttggaaatccgagcccactcccctgcctctgggaacaagctctttgcaagctctgcctctcctccgcccacatcttgagtaggaataacccgatcatgcatagctgaaacttgcttacagtatctgaggaattcctatggttttaccagaaaaaaaatgcattttcttgtaaaaaaaaatttttttttttgagacagggtttctctgcatagccctggctgtcctggaactctgtagaccaggctggcctcgaaatctgcctgcctctgcctcccaagtgctgggattaaggattcgccaccactgccgggtttttttttttttgttttttgttttttctactataaaaatagctatgagttggaatttgtaaaagtttctagagggctggcaaaatggttcagcaggtaagagcactgactgctcttctgaaagtcctgagttcaaatcccagcaaccacatggtggctcacaaccatctgtgataagatctggtgcatctgaagtcagctacagtgaactcatgtataataataaataaatctttgggccagagctagcaggattgagcgagcagagcagaccagagcgagcagagggtcctaaaaattcaattcccaacaaccacatgaaggctcacaaccatctgtacagctcagtgtactcatatacataaaataaataaagaaatctttaataaaaacgtttctagacagaaaaaaaattgactgattctaccatgg

SEQ ID NO: 2266 - DNA, 1481 bp, Mus musculus
atgggggcgatggcgccgcgcacgctgctcctgctgctggcggctgccctggccccgacccagacccaggcaggctcacactccatgaggtatttcgaaacctccgtttcccggccgggccttggggagccccggttcattattgtcggttacgtggacgacacgcagttcgtgcgcttcgacagcgacgcggagactccgaggatggagccgcgggcgccttggatggagcaggaggggccggagtattgggagcgggagacacagagagccaagggcaatgagcagagtttccatgtgagcctgaggaccctgctcggctactacaaccagagcgagagcggctctcacacgatccagtggatgtatggctgtaaagtggggtccgacgggcgcttcctccgcgggtacctgcaatacgcatacgacggccgcgattacattgccctgaacgaagacctgaaaacgtggacggcagcggacgtggcggcgattatcacccgacgcaagtgggagcaggctggtgctgcagagtattacagggcctacctggaggccgagtgcgtggagtggctcctcagatacctggagctcgggaaggagacgctgctgcgcacagatcccccaaagacacatgtgacccatcacccaggatctgaaggtgatgtcaccctgaggtgttgggccctgggcttctaccctgctgacatcaccctgacctggcagttgaatggggaggagctgacccaggacatggaactggtggagaccaggcctgcaggggatggaaccttccagaagtgggcatctgtggtggtgcctcttgggaaggagcagaattacacatgccatgtgtaccatgaggggctgcctgagcccctcaccctgagatgggaacctcctccttccactgactctatcatgtcacacattgctgatctgctgtggccatcattaaagctctggtggtatttgtgatgaagagaaggagaaacacaggtagaaaaggaggggactatgctcccgctccaggcagggatagctcccagagctctgatatgcctctcccagattttaaagtgtgaagacacctgactggagtggactgagtgacaaccagtgtgttcaggtctctcctgtgacatccagagccctcagttctctttagacaacagtgtctgatgttctctgtgttcctgtgggctcaatgtgaagaactgtgtagcccagcctgccctgcacaccaggaccctgtccctgcattgcttgctcccttctacagtcagccttccaactccagccaaacactgggagacatctgcatcctgtgagctccacgctaccctaagctgcagctcctcacttccacactgagaataagaatctggatgtgaactttattgttcatatccttgatctgagggttgattgacaggtaaactaaagaattaagaatacttagagtttgtggaggaaataaa

SEQ ID NO: 2267 - DNA, 3238 bp, Mus musculus
ggtccgaagcccctggaggtcccacgcatgcctcctgcaccatgcagtcacgcctcctcctcctaggagccccgggcggccttggggacgtggcctcccggcgagtgcggctgctcttgcggcaggtgttgcggggcaggccgggcggggaccagcagcggctggaggtcaggctgctgcactctggggcgaccgactcaggtgaaacggttagtattggagatgtgtcctacaagctgaaaactcccaagaatccagaacttgtcccacagaactacatttcagactctccagctcagtccatagtccagcatctgagatggctgatgcagaaggatctgctggggcaggatgtctttctcatcggacctcctgggcctctccggcgctcggtggctatgcagtacttggagctgaccaaacgagaggtggaatacatcgccctgtcaagggacaccactgaaactgacctcaaacagcgccgggagatccgagctggcacagccttttacattgaccagtgtgcggttcgggctgccacagaaggcaggacgctggttttagaaggcttggaaaaggcggagagaaacgtgcttccagtactgaacaacttgctggagaaccgggagatgcagcttgaagatgggcgcttcctcatgtctgcggagcgctatgacaagcttctccaagatcacactaaagaggagctggacgcgtggaagattgtccgagtcagtgagaatttccgagtgattgccttgggcttgccagtgcccaggtactctgggaatccattagacccccctctccggtctcgatttcaagccagagatatctattttctaccctttcaggaccaactaaaactattgtattcagttggagccaatgtttctgctgagaagatttctcagctcttgtcctttgcgacaaccctctgctcccaagaatcctctacgcttgggcttccagactttcccttagatagtttgccagaggcagttcaaatcctggactcctttcccatgatgtcgattgaacatgcactccagtgggtgtatccttacactcttttactcggacacgaggggaagatggccgtggagggtgttttaaaacgctttgagctccaaggttctggacattccctgcttcctaaggagattgtaagagtggagaggatgactgacagccacggctcctatgcccacgtgacaatccgggtcgcaggaaaagaggtgaccattaaggtaccagcggggaccagagcagtaaaccagccttgtgctcctgaccatttcattcagactgtcagtcacaagcaattactggctgagatggtgcagtctcatatggtgaaggacatatgcttaattggagggaagggctgtgggaaaacggtcatcgctaagaactttgctgctctcctaggatacagcatagaacccatcatgctttaccaggaacatttcagaggcctggcccaatatgaagatccgagtaggagcaagtaaggtcccaccgtctgtttccatagagacggagacatcctgttatttgtatctgcgtaaaggcgcacttaatccatgagttttgctgtacttatgatgactatttttataactagtttcatatgaagtcagaggaaaatggggcttgaacagatttgtggcagtacataaactatatttcacgctaggctgtaaaatctcacatcgcttggctcgtgtgtgaaggtggattcttttcaatttttattctttgtcagttttgcggcagtgagtttatagcgttgaagaaacgcttgttgttcttttccttccgggccagaaatccagatattgttttttgtttttgtttttgacattgtcaaagtgctgtgggtttgagatctccttctctcagatgctagttggattaaaggctaaattaagtcaaattagaattttaaggcgatctacatctctggtactttgaatgaaaataatccttgtgttgggcacattaacattttagggttagcatagctccttagttaatctttttcttgcccctgagttgagctgcacccattttccccttcttctatatctgctgctgcccttgctttttgtgtttaaatgctgagaaccttgtcacagtttcctgctgtgagcgtgcctctatttattcctcatttgttttgcctgtgcacctcagccttcctaaccagccttggctctccacacttccatttttccagtccagattttacccagtttttctttctaatacttacttttgctctttctaactccattttatatcttgtgaccacattttatagttggcaagatcatattagaattctcttgttttgcttgcctgtctccctccaaggcctcagcctgtgtgcaatgacacaggctgttgagttctgtgtccccttcatgactgcccaaggggcttctagtcagaaaaggaaggaagctcttagtttctacatcccaggtcctttttgtgataagctaaaggcaaatgtgttttcttccttgttagtattattttgtcctttcccagctgcagaggattcagtcaaagtgaactagaatattctcagtctttcatgtgtgacgtattgagttgtttatacagtgtgattaaaaatgaagttgaagctgggcagtggtggtgcacacccttaatcccagcacttgggaggcagacaggtggatttctgtgttcgaggccagcctggtctacaaagtgagttccaggacagccagggctacacagagaaaccctgtcttgaaaaaacaaaacacaaaacaaaacaaaaaaacccaaagttgacattgaaaccttgtttgtatgtatttcatgttggtggaagtgcatttccaggataatgctggaagtccattgctaaatagatctgccttctttgcgtagacttactcttaactcctttgtaagaactgtgccaattgagcaccttccaccaacaccgctagactagaacctgtcagagtgcgcacatttcgcccgtctggcagttgacatgcgtcttagtacagctttaattttcttaggaaaaagttgaattttttattttttttgtaagagctttattaagatacagttgttaatagagaatctcatataagattcattttaatatctttataattcatctgttcattttgtttgcttattttctgtatgaagtccttcatttttaaaaataaacccaaacctt

SEQ ID NO: 2268 - DNA, 1823 bp, Mus musculus
  misc_feature 11: n = A,T,C or G
aaattctaaanttggtgtattcgttaatgaaaaaattacaacatctttttgcttttttggctcatacacaaagggaagcttacgcacctcggatattttttgaggcttccagacctccgtggtttactcccaggtcacaacaggactgctctgagtacctcaggtttctgctggacagactccatgaagaagaaaagatcttgcgagttcagtcctcacataagccttcggaaggtctggactgtgctgaaacttgtttacaagaggtgaccagtaaggtagcagtgcccacagagtctcctggtacaggtgacagtgagaagactctaatagagaaaatgtttggagggaagctacggactcacatctgctgcctaaactgtgggagtacctcacacaaagttgaagccttcacagatctttcgctagccttttgtcctagcccttctgtggaagacctgtctttccaagatacagcttcgttacccagtgctcaagatgatgggctaatgcaaaccagtgtcgctgacccagaagaagagccagtagtttataatccagcaacagctgcctttgtctgcgactcagttgtgaatcaaagagtattaggcagtcctcctgttgagtttcactgtgctgaaagctcttctgtccctgaagaatctgcaaagattctcatcagtaaagatgtacctcagaacccaggaggtgaaagcacaacttcagtgactgacttactacactactttctggctccagaggttcttactggggagaaccaatactactgtgaaagctgtgcctctctacagaacgcagagaaaactatgcaaatcacggaggagcctgagtatcttatccttacgctcctgagattctcctacgatcagaagtaccatgtgagaagaaaagtattagacaatgtgtcactgcctctggtttggagtgccagtgaaaagaactgcttccttctcttccttgtcccagagttgatctgtagatgttgacttcactgatattaatgagaacctacctaaaaaattaaaaccttctgggactgaagagctttctgccccaaattagtgccctacctattaagttctgttgttgtgcactctggtgtgtcctctgagagtggccattactactcttatgccagaaacatcacaggtacagagtcttcataccagatgtgcccccagtctgaaagtctggcattagcaccctcccagagttgtttactaggggtagaaagccccgatacagtcattgaacaggacttggaaaataaggaaatgtcacaagagtggtttttatttaatgacagcagggtgacatttacttcatttcagtcagttcagaaaatcacaagtaggtttccaaaagacacagcttatgtgcttttgtacaaaaaacaaagcagagctaatggcatagacagtgacaatccagccagtggtgtctgggccaatggagatccacccctacagaaagagctgatggatgccataacaaaggacaacaagctgtatttgcaggaacaagaattgaatgctcgagcccgggccctgcaagctgcatctgcttcctgttcgttccgacccaatggatttgatgacaatgacccaccaggaagctgtgggccaactggtgggggcggtggaggaggcttcaatacagttggcagactcgtattttgaccctgagagaactgaaaatgtatctggtcacaaaacatccaatactgtggctgttaaaatgtcaggctgtaacctatagcatatctatcttttatttttcttttcattagacccgaatacttt

SEQ ID NO: 2269 - DNA, 887 bp, Mus musculus
agcggcctcccccccgccctgggatttcttaacttttgtgcccagattttcacctggctgacatccagggaccatctgagggctgcacactgctgagctctgacttgctgaaagctgattatttatcagctcagtggataccgtggtttcctgtctttcatctgatcacctagtcctgtgctcctgatagatgcctcattgcctaacatatcagcctccctgggcccttttgacaacctcctaatgccagcaggaagcagttacagaagaaaaaaaaatacaacgtccatggccccacttgtaagggtaatgagatgctaagtcaaaaaggcccatgttttgccaataacatatggctcttaggtcccaattaatcccttggccaaccatgactatgatcttgggaaaaataactgacgaatcaatgatttgattcagttactaatcagaggagggatgcggggacttggttacccagcgccagaatgactccacgacaggctacaaacctgcagttttggagactaagcctaagtttctgtttctcagaaatgagaacctggatcggggaacctgtggtcagccaaccacaccagcgggcaggcagtgtgaggacaccttgccatctggcctgaagttagaataggtagctagaatgagtaagtggcctcctgggaagtctccagagcctaagcaatagtagaatcagtcagaaccctagagacagagctaaccaatccaggcaaaagggcacacatcctccctggaattcctcctaactgacaataaaagctgagcccaagaatccactagaagtctccagttcctaatggggagacccctgcatgcaggaaattcagctgaataaatgttctttgcttttgtat

SEQ ID NO: 2270 - DNA, 493 bp, Mus musculus
gtctgttgtaagatgtaaagaaagacagctgagtctgattctaacttagccagaggacaccttgacgaatctgttatctctatctgcaggtaagctagccagcctgtctccttgaattgttccctttgggaaatctaattcacagtattgatctacttttttgccttgtactgaatgacattacctccacgctctcccggactaactggtccacagggccacagggttgcttgctctctcttgcaggaatggggagtcgacagggatgagggtccaaggaatgagcatgaatgacaagaaaacaaggggaacattaagcttttccagggtgtgcggttaaaggtatttgaccattcactggctgagccagatcacgggaactcgagagcttttactgtgattcttcaatgtaaaaaataaaacaatgtcagactgtgtttatatgatttgtataaagcctttttaagattactatttaaataaacattatacc

SEQ ID NO: 2271 - DNA, 1522 bp, Mus musculus
caggcgtacagagaaccacagcaccacccaacactatggaccctgctatgcccctgcaactgtggaatttgccgctgctcctggtgggctccgttcttggtctcacttcagtgtctgcccaagggaataatttagagatctgcctcttgcccttggacgcaggaccttgtcaggccctcatccccaagttctactatgacagagaccagcaaaagtgccgcagattcaactatggaggctgcttgggcaatgccaacaatttccacagtcgggacctctgccaacagacttgcggaagtatcgagaaagttcctccagtttgtcgatcagagctaaaaacatatccatgtgataagcccaatatacggtttttcttcaacctgaataccatgacatgtgagccccttaggcctggtctgtgtagcaggactataaatgtattctctgaggaagctacatgtaagggcttgtgtgaaccacggaaacatattccatcattttgctccagtccaaaggatgaaggtctgtgttctgccaatgtgacacgcttttattttaattcaagaaacaaaacatgtgagactttcacctatactggctgtggtgggaatgagaataacttttattacctggatgcttgccaccgtgcctgcgttaaaggctggaagaagcccaagagatggaagataggtgacttcctgcccagattttggaagcatctttcttaagcattttctcatactgaaggaaacaaatcattagtaatttgctcctctgattttactgatctgttattttttttaatctgtgtgcttttattcataccagctgccttccaaatgtgaaaattaatcattttcgatgtactgttcaaatgtctaagaagactgaatccttgtgaatgtatccgcatatgaatgtgaacatgacttgcccaacttcttgggatagctagtactaatttcagaagacaacagttactaaaataacagaaaacaatttagatgtgcagttttaacctacatgggcatcattaggaatggcaaaaccacttcattatgaacttaaaggtttagattgcattttaggctccaggagaccagtaaccgattcatgaacactttattcaatcattccactgaggtattacttattccttgccaagtgtccttgaattcctttcttgccatattgcaatattatgaagaataagagttattacaaaaaagagctataattgttattggatgaatttaaaatgttggtgatttatgaaaagaaacacatttttcctagaaaaaaatcattatatatttaattctgtgtctctttatttttccacatttgacaagtaaatcttctttgaccatatgtgctacagtattccctcagacaaaatgtttgggagaatagaaatttctggatcttttgtactatgtaagatatattctgccccaaaatgcatgtatgctttgacttgaatttaacctaataaattatttttaaaagtggttattacaat

SEQ ID NO: 2272 - DNA, 2586 bp, Mus musculus
aacagccagacatgtgctcttaaaagagcaggctacagctgggctcattactgtgatccctgtagcctgctttttgaacagccagacatgtgctcttaaaagaagaaacccaggaatctgaagagcagttttcaaaccacagcctttcccctttgctgctttccaggctttaaaactacaaattattgactgggaaaggcagacatcatgttcacagcacctggtatggctacgacccaggaaagaccttattcctgcagtgtgtgtggcaagagctttcagtatagtgcagtgctgctgcggcacgaacgggcccatggtggcgacaagcgtttctgctgtctagagtgtggtgaacgctgtgctcgagcagcagacctacgtgcacacaggtggacccatgctggccagaccctctatatctgcagcgagtgtggccagagtttcagtcacagcggcctgctggatctacacctgggaacgcaccgaaggcgcagccgcacccgtccttgccgcctctgtggccgtcgcttccctcatgtccctgcgctgctgctgcatcgtgctcgccagcacccacctgagaagccccaccgctgccctctgtgtgcccgctcttttcggcagagcgctcttcctttccacctggcacgagcacacccccctgagatcatcactgtcaccgccccttcccccagcacgctctaccactgtacacagtgcccacgggccttccatagcagtgctgggctgcggaaccattcccgcatccatgtggtccccagcctcagtgaccctggcactgaggcccatctatgtggcatatgtggtaagagcttcagcaagagttccacactcacacgacacctccagaggcactctggggaaaagcctttcaagtgccctgagtgtggcaagggcttcttggagagtgccacacttgtgcggcaccagcgaacacacactggggagaagccatatgcatgtagcgactgtggacgctgtttcagcgagagctccacactgctgcgtcaccagcgcagccatcagggtgaaaggccgcacgtgtgtgccacttgtggcaagggctttgggcagcggtatgatctagtagtgcaccagcgtagccacacaggggagaggcccttcccatgcccgcagtgtggccggggcttcacagaccgctccgacctcaccaaacacctgcgcacacacacaggggaaaagccctaccactgtgagttgtgtggcaagcgattcacctgcatttccaacctcaatgtacatttgcgcaaccatgcaggccataaaccacacaagtgcccagagtgcggcaagtcctttagtgttgcctccaagcttgcactgcatagaaagacacacctaggtgagcggacagcagagtgcacagagtgtggcaaattctttagccatggccggtcactatcacagcaccagcggtcccacagaagggctcgagcagctgcaatggcagccactaccaccaccactgtagtcactgaggtgacaataggtccttctctcactctcacaggaccaacagaacaggagaaatcagggctcttagtatccccatttcaggaaacttgctaagagggctccaggagatagctgggtgaacagactttcagtcccaaggaaaagctcagatggtttgggaagccagacctgctgttgttacattgttgctagccgttcacctagcttgccttgtctctaaatggaaatccccaccagttcttctatcatccatccttgtattccccaactctgagtactaggagtcagggaaccgatgtcacagccctatgcaagacaaaccaggtgcttgtgctccgttgctgccactctgctctgttacgtgggctgagctctacctttgctgcctgtttacctccactgctttctcttgcttgagacatagttgaagaggtaacatacaggcagtataggagagtggaatagctcccttcattaaaggaccaagatctgtgacaagtttctcccttgcagaggtaaccagaatacatgtaagtaggcagtcttcagcctggccatccatatgtcctttgacaagatgatcttagggcccaacaagatggttagacaggtaaaggtacctgcagacaacctaatttgatccttcgaatccacatatgtactatggtacatgtgcagacataaagaaatgtagaatttttttcagtaaatggctcttagcacagctttctccaatcagttaggaaatgtttgtcttgggatgcagaagactgtttgggtccataaagcccagtactgtgtgaaacaaaagaatatttccagatgaaacttcaaggcccaagaaaacaagttacctgaagtcctgggcaagagcaggctgtaaagcctggaattgttcaatgactgcttatagctggtgatattgttacttgcttgggtttgtgacaccaagaacccctttgtcaaaatgagttccaagttctcttccttttaggtggtggtttcttcattgctgtgacaaatgcctaagaaaatcaacttaaaggtttaaaaaaaaaaaaaaaa

SEQ ID NO: 2273 - DNA, 2099 bp, Mus musculus
ggaggaggcacaatatggtctctgaaaaatgtgttgcggcattttttctgctgcagctttgctgggccggctgtggattctgcagcaaggtcctcgtgtggccctgtgatatgagccactggctgaatctaaagactattcttgaggagcttggagcaagagggcacgaggtaacagtcctgaaataccccagtatcatcatagatcagagtaaacgtattccactgcactttgagaatattcctttgctgtatgaaatcgagacagctgagaatcgtttaaatgagattgcaaatctagctgtgaatgtcattccaaacctgtcactgtgggaagcagcaaaaacattacaagacttctttcttcaagtaactggagattttgaaagtatttgtaggagtgtattgtacaaccagaaattcatggacaagctacgggatgcacaatatgatgtagtggttatagaccctgtcgttccctgtggagagttggtggcagaagtgcttcagatccctttcgtatacacactgaggttcagcatgggctactacatggagaaacactgtggccagcttccaattccactctcgtatgtaccggttgtcatgagtgagctgacagacaatatgaccttcacagagagggtgaaaaatatgatgttttcactgttgtttgagtactggctccagcaatatgactttgcattctgggatcagttttacagtgaaaccctaggaaggcccacaacgttctgtaagactgtgggggaagctgacatttggctaatccgaacatattgggatgttgagtttcctcgtccatatttaccaaattttgagtttgtgggaggactgcactgcaaacctgccaagcctttacctaaggaaatggaagaatttgttcagagctctggagaacatggtgtagtagtattttcactggggtcaatggtcaaaaacctgacagaagagaaagccaacctcattgcctctgtccttgcccagattccccagaaggttttgtggagatactcaggcaagaagccagccatattaggatccaatactcggctttttaattggattccccagaatgatcttcttggacatcctaaaaccaaagctttcatcacacatggtggaacaaacgggatttatgaagccatttaccatggggtccctatggtgggcgttcccatgttaggggatcagcctcacaacatcgctcacatggaggccaagggagcagccctgaaagtcagcatcagtacaatgacgagcacagatttactcagtgctgtgagggcagtcattaatgagccttcttataaagagaatgccatgcggttatcaagaatccaccatgatcagccagtgaagcccctggacagagcagtcttctggattgagtttgtcatgcgtcacaaaggagccaagcatcttcgtgtggcagcccatgacctcagctggtttcagtaccactccctagatgtgattgggttcctattgttgtgtgtcgttactctgacattcatcatcactaaattttgtttgtttgtgtgtcaaaaactttatatgaaagaaagtaagaaaatggggaacagaaagaaaaagaactaggtcttttttaggtttgggaaagccctgagtgacaattatattaacaatcaccacaagaagcatgcaacttcctgctttatacctattttcaaataagcagctctgtttcagactggaaataaatgtaaacattaagcatgataattaactactgattagttccaatcttctatcttgtaggcattctcctctcactcttctaagatatggaaaattaattctaaatatattctatagaaaggaagtgatgaataacaatatgctagacctctgggaagacatataataccaatcttattgatgtatatgaggatctcttacagtcaatgtcataagcctatcatattgtctaagaacaaccaaaagaatttagtgtgagagggtacttttttaataagaaggaacgtttctgtttttatagtgttgcagatattagagcatgatttcttttttattttccaaaaataatttattgaaaag

SEQ ID NO: 2274 - DNA, 1837 bp, Mus musculus
  misc_feature 817: n = A,T,C or G
gagacgcgtcgctgcggtcttctccgacggtcgcacgggagtcggcagctacctcagtcgcgttaaacttctgtgaccgagtcagcggcgatccctgacgcagcgagaggatggtggtccgcgtcttcgtcgcctcatgctcaggcttcgtggcgatcaagaagaagcagcaggatgtggttcggtttctggaagccaacaagatagagttcgaggaagtggacatcaccatgtcggaagaacagaggcagtggatgtacaaaaacattccccctgagaagaagcctgcgcagggcaaccctctgccacctcagatatttaatggggatcgatactgtggagactatgacagtttttttgaatcgaaggaaagcaacacagtcttttcattcttaggcctgaagccacggccggcatccacggcggaaccttagaggtaaaaagtagaaggtgatggagttgcgtttggagcaccccctggtactcagcactcgcctgcttacctgatgcatcactgtgacaaagccacacacacaatcagtaacttcgtctgacctggagaaggtgtctttggaggacatgggaataatggggactgcatgattgctctgagccaatcagttctgtggtggtggatcctcttattttctgattcgtctgcagttgcctcactcacctgaaagtactctccccgtgataggtcaacttccttaatgactgacaggtaattgggcgacaccatcagggagaaaacgttgaacctgccctatgttttattagaaactggccttgcagaaacccattcctctctaagctngctgcgtcccatccttgaaaccattttgccaggatggtaacgtcaattgaatccaaaagaagaaagcagtgccgactgacattgactctgagggttcttgttggagagtcacaaatgtcactgctctggtactttgtaataacgcctgctggaagagctggatgctctcagctccgttctgtgatggaaaccctcacccctataaattctccaggcttctccaggtgcttccaaaacctccattgcaatatcaaatgatcacagccaagttacagggcagaaaagagttgctgtttttggaaaatgtctcttttatctcttgcaagggggaagtttcactgtatgcataagactacttgagagatatattttaagaagtgcaccggttacatatagtaagttaatagagtttgctctgtcagtatgcaaaggcgttttcagctcttgtagtttgcttacacacacatgcacatatatttttaaatgcagctccccaaagtaacagctgcttgttctattttgtgaagggattatatttttggaggaagaaaatgcttggttagatatattttgtgaaccgttggcgccagccctgcgaggacatttgcatagcacacacaggttctgcattcagctccagcatactgggaaggaaaaagagacaccacgatggctgcctagtgtcacttcccatgtcacgcacctttgtctctgacagttgacagtcttaggcttttcagaataacacagacacacattcttgcttgatgtaggagcacgtgtgagatttcagagcagcccagacaggaaggggctgtctagagcatggtcctcaatggttcttaagaagcaaagtccctgctccctctgggtgaacactggcaaacactgaggttactctcctgtatcctggcatatttagagttaatctcacacatagaaataatcttgaataggataaagggctgactgaaatctccacctagcctgcacgatgctaggcctttcactctgattctg

SEQ ID NO: 2275 - DNA, 651 bp, Mus musculus
acccactctgacctgctgtgtaaacgacccggacctaccaaaatgaccgcacctgcaataaagatacacatcatgtcgtcttcacacctcttctacctggcgctctgcttgctcaccttcaccagctccaccacagctggaccagagaccctttgcggggctgagctggtggatgctcttcagttcgtgtgtggaccgaggggcttttacttcaacaagcccacaggctatggctccagcattcggagggcacctcagacaggcattgtggatgagtgttgcttccggagctgtgatctgaggagactggagatgtactgtgccccactgaagcctacaaaagcagcccgctctatccgtgcccagcgccacactgacatgcccaagactcagaagtccccgtccctatcgacaaacaagaaaacgaagctgcaaaggagaaggaaaggaagtacatttgaagaacacaagtagaggaagtgcaggaaacaagacctacagaatgtaggaggagcctcccacggagcagaaaatgccacatcaccgcaggatcctttgctgcttgagcaacctgcaaaacatcgaaacacctaccaaataacaataataagtccaataacattacaaagatgggcatttcccccaatgaaa

SEQ ID NO: 2276 - DNA, 5841 bp, Mus musculus
ccagagttgtaggaagcgctcaggtcacaggctactatggtggctgtggccacgcagtggtattaataccattccctgtctctcctcccagcagcatgtcatggtttagtggcctcctggttcccaaagtggatgaacggaaaacagcttggggggaacgcaatgggcagaagcgcccacgccacgcgaatcgagccagtggcttctgcgcacctcgctacatgagctgcctcaagaatgcggagccacccagccccactcctgcagctcacactcggtgcccctggcaggatgaagccttcatcaggagggcgggcccgggcaggggtgtggagctggggctgcggtcagtggccttggggtttgacgacactgaggtgaccacaccgatgggcacagctgaagtggcaccggatacatcgcctcggagcggtccgtcctgctggcaccggcttgtgcaggtgttccagtctaagcagttccgctctgccaagctggagcggctgtaccagcggtacttcttccagatgaaccagagcagcctcacgctgctcatggcggtgctggtgctgctcatggctgtactgttgactttccacgctgcgcctgcccagcctcagcctgcttacgtggccctgctgacctgtgcctctgtcctttttgtggtactcatggtggtgtgtaaccgacacagcttccgccaggactccatgtgggtggtgagctatgtggtcctgggcatcctagcagccgtgcaagtcgggggtgccctggcagccaatccacacagcccctcggcgggcctttggtgccccgtgttcttcgtctacatcacctacactcttcttcccattcgcatgcgagccgcagtactcagcggcctgggcctctctactctgcatttgattttggcctggcagctcaacagcagcgaccccttcctttggaagcagctcggtgctaacgtggtgctcttcctctgcaccaatgccatcggtgtctgcacacactaccctgctgaagtgtctcagcgccaagcttttcaggagacccgaggttacatccaggcgcggctgcacctgcagcatgagaaccgtcagcaggaacggctgctgctatcggtgttgccccagcacgttgccatggagatgaaagaagacatcaacacaaaaaaagaggacatgatgttccataagatctacatccagaagcatgataatgtcagcatcctgtttgcggacattgagggcttcaccagcctggcctcccagtgcactgcacaggaactggtcatgaccttgaatgagctctttgcccggtttgacaagctggctgcggagaatcactgtctgaggatcaagatcttaggagactgttactactgcgtgtcagggctgcccgaggcccgggcagatcacgcccactgctgtgtggagatgggggtagacatgatcgaagccatctcgctggtgcgtgaggtaacaggtgtgaacgtgaacatgcgtgtgggcatccacagcggacgtgtgcattgcggcgtccttggcctacggaaatggcagtttgatgtctggtcaaacgatgtgaccctggctaaccacatggaggccgggggcggccggcgcatccacatcactcgggctacactgcagtacttgaacggggactatgaggtggagccaggccgtggtggtgaacgcaatgcgtacctcaaggagcagtgcattgagaccttcctcatacttggcgccagccaaaaacggaaagaggagaaagccatgctggccaagcttcagcggacacgggccaactccatggaaggactgatgccccgctgggttcctgaccgtgccttctcccggaccaaggactctaaggcattccgccagatgggcattgatgattctagcaaagacaaccggggtgcccaagatgctctgaaccctgaagatgaggtggatgagttcctgggccgagccatcgatgcccgaagcatcgaccaactgcgtaaggaccatgtgcgccggttcctgctcaccttccagagagaggatcttgagaagaagtattcacggaaagtagatcctcgcttcggagcctacgtcgcctgtgccctcctggttttttgcttcatctgttttatccagctccttgtgttcccatactccaccctgatactcgggatttatgccgctatcttcctgctgttgctggtcactgtgctgatctgtgccgtgtgctcctgcggttctttcttccccaaggccctgcaacgcctgtcccgcaatattgtccgctcacgggtgcacagcaccgcggttggaatcttctcggttctgcttgtgttcatctctgccatcgccaacatgtttacctgtaatcacaccccaataaggacctgcgcggcccggatgctgaacttaacaccagcggatgtcaccgcctgccacctacaacagctcaattactctctgggactggatgctcccctgtgtgagggcaccgcacccacctgcagcttccctgagtacttcgtcgggaacgtgctgctgagtcttctagccagctctgtcttcctacacatcagcagcatcggcaagctggccatgaccttcatcttggggttcacctacttggtgctgcttttgctgggtcccccggccgccatctttgacaactatgatctactgcttggcgtccatggcttggcttcctccaatgagacctttgatgggctggactgcccagctgtggggagggtagcgctcaaatatatgacccccgtgattctgctggtgtttgccctggcactgtatctgcatgcacaacaggtggaatcgactgcccgcctggacttcctgtggaagttacaggcaacaggggagaaggaggagatggaggagctacaggcatacaaccggaggttgctgcataacattcttcccaaggacgtggccgcccacttcctggcccgggaacgccgcaacgatgagctgtactaccagtcgtgtgaatgtgtggctgtcatgtttgcctccatcgccaatttctcggagttctacgtggagctcgaggcaaacaacgagggcgtggagtgcctgcggctgctcaatgagatcatcgcagactttgacgagatcatcagtgaggagagattccggcagttggagaagatcaagaccatcggtagcacctacatggccgcctctgggctaaatgccagcacctatgaccaggtcggccgctcacacatcacggcgctggctgactatgccatgcggctcatggagcagatgaaacacatcaatgaacactctttcaacaatttccagatgaagatcgggttgaacatgggtccggttgtagcaggcgtcattggggcccgaaagccacagtatgacatctggggaaataccgtgaatgtttccagtcgtatggacagcactggagttcctgaccgaatacaggtgactacggacctataccaggttctagctgccaagggctaccagctggagtgtcgaggggtggtcaaggtgaagggaaagggggagatgaccacctacttcctcaacgggggccccagcagttagcagagtgcagcagctgagattcaaccgaaggaccaaggtgggcattgagtgggactttgtgctcgctgggtggagctgtgacaggggggcactgagcctccggatcttgctgacagcaaaagggaacaccccagcggctgcgcttggactgtgttcgtctgccttcagaatggcgatggaggggacgccgagaggattatcgagggactttcttaattggagtaaggctggtcttcgtttgtttggatgcagatgagaaagcgcagaggcctgggagcctcctgtttgagagttaaatggcaactctctatgcctactgtttccctgtctgggcaacaggctcagggctgggtcctttctttccctatttttcctgggactactttttgtacaaagactgtggcaggcatgaagaacacttgcctttgcttgcctgtgtctgcagcacgggtcttgggcactctcagaaccagccaattctccttcttaggcacaaggcagaagaaggagagttctatgggacctagctctgactgaccatatttcaggggaatgtttccatttgccaaatcctagtcccgtgatctgtccccaaaggggaacaaagggacctctgacagtgaagatttagccccagttcctgcatgatcctgggaaaggggcatctggccttactggtactgtgaaaatgaccagccagagagcaagcctgtgtgtgtgaggtcatccgaagaacaggaactggatggtggatggtgacctgctggcaggggccatggaacatctctatcccttgtattgccaaatagcaaaagggtcagggttccaaaaaagatgacctgaccccaaacctggcctcctaagtctggcactagggaggtcctgtgtgtttgtgtaattgtgtgggcctgtgtgttgtgtgtgtatgtgtgtctgtctgtctgtctgtctgtctttgaggtctccatgtgtcctcatgctccagttcctcagctcttcaccggggactgcctctctcccgtgggcctctgtcttctggcgttaaggccaagtttcctgtgctaagggatggagagtaatacccaggttgcacaggaggttgggtggtgtttggtagtaaaatgataacggtctggggagaggagtccttttttgtgccaaatccctaagtgccatttgggggccacatatctgcactatgactgtccccctgcctagggcagggacccaagcacctgcttaatctctagtgttccttggaacttgaactgttggaggtttgtgggtagaggtgcaggcatttcctgggttcctgggcttgtctcttgggggcatggtgtgctttctgactggggtagtgtgggatccctctctgaggaccccgatgttggtactaggggatgggaacctaggaacttggaactgggctgccccaagcgttcggcctgaatctaccatggctagactctagccccggctcccaatcttcacgaagcctgcaagggttgtactctgtcctcgcctgcccttgcctgcctctgacccttgcagcctccctgactctggtctgagttagctggtgccttggtttctctgtctgcatctagttaagccagaggcattacgcctccatgtcgactgatgatcttagacgtgggcaggaaaggcagaggagagtttcaggaggtgcggaaggggcaggctgtactttggcccttcctcaagcttctgccacccattctctgcagaggcctgggttctggtttggtactgctttcctggaaatctccatgtaccaatcggtggaccactgggcgcttgattagccaaggcagaggagaggaagatcagctggtccaggcagaaaatttcctgtctccccgagccatatcctagccttggataggaagggactactagacgccattggggcaggtgtgaggtatataagccaaagcagggagaccttggctttgggtctgcttcttgccaggtgggaggggcttgtccacaccctggctccccgtaccacagtgccagccagtcatgtccctctctgagttaccgtagccactctcctcaccatttggggaggaagtcagggcacgggaggcaatgggctctggttttataatgtaaccactgtcggagtgggggagggtgacgtaccatgtatttcagtgaaatatttaatatatttaaatatcaataaaatcaaactctttgtataaaaaaaaaaaaaaaaaaa

SEQ ID NO: 2277 - DNA, 8587 bp, Mus musculus
aggcgggtggtgaggctgggggcctgaagcggcggtaccggctccggcggcggcagctgaggcggtggccgaagccgcgcgaacctcagggcaagatgcttgggacgggtcctgccgtggccaccgccagtgccgccacatctagcaacgtgagcgtcctgcagcagttcgccagtggactgaagagccggaatgaggagaccagggccaaagcagccaaggagctccagcactacgtcaccatggagcttcgagagatgagtcaggaggagtctactcgcttctatgaccagctgaaccatcacatttttgaactggtttccagctcagatgccaatgagaggaagggtggcatcttggccatcgccagcctcataggagtggaaggtgggaattccaccagaattggcagatttgccaactaccttcgaaacctcctcccctcaagcgatccagttgtcatggaaatggcgtccaaggccattggccgcctggcgatggcaggggacactttcactgctgaatatgtggagtttgaagtgaagcgagccttggagtggctgggtgctgaccgaaatgagggccggagacatgccgctgtcctcgttctccgtgagctggccatcagtgtccccaccttcttcttccagcaagttcagcccttctttgacaacatttttgtggctgtgtgggaccccaagcaggccatccgggaaggcgctgtagcggcccttcgtgcctgtctgattctcaccacgcagcgggaaccaaaggaaatgcagaagcctcagtggtaccggcacacatttgaagaagcagagaaaggttttgatgagaccctggccaaagagaagggtatgaatcgagatgatcgaatccacggagccttgctgatcctcaacgagctagttcgtatcagcagcatggagggagagcgtctgagagaagagatggaggagatcacccagcagcagctggtgcatgacaagtactgcaaagacctcatgggcttcgggaccaagcctcggcacatcactcccttcaccagtttccaggctgtgcagccccagcagccgaacgccttggtgggactgctggggtacagctcccctcaaggcctgatgggatttgggacgtcccccagccctgccaagtccactctggtggaaagccgctgttgcagagacttgatggaagagaaatttgatcaggtgtgccagtgggtgctgaagtgcaggagcagcaagaactcgctgatccagatgacaatccttaacctgctgccccgcctggctgcattccgaccgtctgccttcacagatacccagtacctccaggacaccatgaaccatgtcctgagctgtgtcaagaaggagaaggaacggactgcggcgttccaggccctggggctgctttctgtggccgtgaggtcggagtttaaggtctacttgccccgtgtacttgacatcatccgagcagcgcttcctccaaaggactttgcccacaagaggcagaaaaccgtgcaggtggatgccaccgtattcacgtgcatcagcatgttggcgcgagcaatggggccgggcatccagcaggacatcaaggagctgctggagcccatgttggcagtgggcctgagccccgcgctcactgctgtgctctatgacctgagccggcagattccgcagctgaagaaagatattcaggacggccttctgaagatgctgtccctggtccttatgcacaaacccctccggcacccaggcatgcccaaaggcctggctcaccagctggcttcccctggtctcaccaccctccctgaggccagcgacgtggccagcatcactcttgcccttcgaacccttggcagctttgaatttgaaggccactctctgacccagttcgtccgacactgcgcagatcacttcctgaacagcgagcacaaggagatccgcatggaagctgctcgcacctgctcctgcctgctcacaccctccatccacctcatcagcggccatgcccacgtggttagccagactgcagtgcaggtggtggcagatgtgctcagcaagctgcttgtggttggcataacagatcctgaccctgatatccgctactgtgtcttggcatccctggacgagcgctttgatgcccacctggcccaggcagaaaacttacaagctctgtttgtggctctgaatgaccaggtctttgagatccgtgagctggccatctgcactgtgggccgactaagcagcatgaacccagccttcgtcatgcctttcctgcgcaagatgctcatccagatcctgacagagctggagcacagcggcattgggagaatcaaggagcagagcgcccgcatgctggggcacctggtgtccaacgccccccggctcatccgcccctacatggagcctatcctgaaggctttaattttgaaactgaaagatccagaccctgacccaaacccgggcgtgatcaataacgtgttggccactataggagaactggctcaggtgagcggcctggaaatgcggaagtgggtggacgagctctttatcatcatcatggacatgctgcaggactcctccctgctggccaaaaggcaggtggctttgtggaccctgggacagttggtggccagcactggctatgtggtggagccctacaggaagtaccccactttgcttgaagtgctgctgaatttcctgaagacggagcagaaccagggcactcggagagaggctatccgagtgttggggctccttggggctttggatccctacaagcacaaagtgaacatcggcatgatcgaccagtcccgggacgcttctgctgtcagcctgtcagagtccaagtcaagtcaggattcctctgactacagcaccagtgaaatgctggtcaacatgggaaacctgcccctggacgagttctaccccgctgtgtccatggtggccttgatgcggatcttccgagatcaatctctctctcaccaccacaccatggtggtgcaggccatcaccttcatcttcaagtccctggggctcaagtgtgtgcagttcctgccccaggtcatgcccacattccttaatgtcatccgagtctgtgatggggccatccgggaatttctgttccagcagctggggatgctggtgtcctttgtgaagagccacatccgtccctacatggatgaaatagtcactctcatgagagagttttgggtcatgaacacgtcaatccagagcacaatcattcttctcattgagcagattgtggtggctctcggaggggaatttaagctttatctgccccagttgatcccacacatgctgcgggtcttcatgcatgacaacagccaaggccgaatcgtctccatcaagctgttagccgcgatccagctgtttggcgccaacctggatgactatctgcacttgttgttgcctccgattgtgaaattgtttgatgcccctgaagtcccgctgccatcgagaaaggcagcgctggagacggtggaccgcctgacagagtccctagacttcactgactacgcctcccgcatcattcacccaatagttcgtacgctagaccagagcccagagctgcgctccacagccatggacactctgtcttcgcttgtctttcaactggggaagaagtaccagatctttattccaatggtgaataaagtcctcgtgcgacaccggatcaaccaccagcgctatgatgtgcttatctgcagaatcgtcaaggggtacacacttgctgatgaggaagaagaccctttgatttaccagcatcgaatgctaaggagcagccagggagatgccctggccagtggaccagttgagacaggacccatgaagaaactgcatgtcagcaccatcaacctccaaaaggcctggggagctgccagaagggtctccaaggacgactggctggagtggctgaggcgcttgagtctggagcttctgaaggactcctcatcgccctccctgcgctcatgctgggccctggcgcaggcctacaaccccatggccagggatctcttcaatgctgcctttgtgtcctgctggtctgagctgaatgaagaccagcaagatgagctcatcaggagtattgagttggctctcacttctcaagacattgctgaagtcacacaaaccctcctgaacttggctgagttcatggaacacagtgacaagggccccctgccgctgagagatgacaatggcatcgtgctcctgggtgagagagctgccaagtgccgggcatatgccaaagcactgcactacaaagaactggagttccagaaagggcccacacctgccatacttgagtccctcatcagcattaacaataagctccagcagcctgaggcagcttctggggtgttggaatacgccatgaaacactttggagagctggagatccaggccacctggtatgagaagctgcatgagtgggaggatgctctcgtggcctacgacaagaagatggacacaaacaaggaagacccggagctgatgctgggccgaatgcgctgcctcgaggccttgggggaatggggccagcttcatcagcagtgctgtgaaaagtggactctggttaatgatgagacccaggctaagatggcccggatggctgctgctgcagcgtggggtttaggtcagtgggacagcatggaggagtacacctgcatgatcccacgggacacccacgatggagccttttacagggcagtgttggctctacatcaggatctcttctccttggcccagcagtgcattgacaaggccagggacctgctggatgcagagctgactgccatggcaggagagagctacagccgagcctatggggccatggtttcttgccacatgctgtccgagctggaagaggttatccagtacaaacttgtccctgagcgtcgggagatcatccggcagatctggtgggagagactgcagggctgccagcgtattgttgaggactggcagaaaatcctcatggtccggtcccttgtggtcagccctcatgaggacatgagaacctggctcaagtacgcaagcctgtgtggcaagagtggcagactggctcttgctcataaaaccttagtgttgctcttgggagttgatccatctcggcaacttgaccatcctctgccaacagctcaccctcaagtgacctatgcctacatgaagaacatgtggaaaagtgctcggaagattgacgccttccagcacatgcaacactttgtgcagaccatgcagcagcaggcccagcatgccatcgccacagaggaccagcagcacaagcaggagctgcataagctcatggccaggtgttttctgaaacttggggagtggcagctgaacctccagggcatcaacgagagcaccatccccaaggtgctacagtactacagtgccgccacagagcatgaccgcagctggtacaaggcttggcatgcatgggcagtgatgaacttcgaagcagtgctacactacaaacatcagaaccaagcccgtgatgagaagaagaagctgcgtcatgccagcggggccaacatcaccaatgccaccactgcagccaccactgcagcctctgctgctgctgccaccagcacagagggcagcaacagtgagagtgaagctgagagcaatgagaacagccccaccccgtcccctctgcagaagaaggtcactgaggatttatccaaaactctcttgttgtacactgtccctgctgttcaaggcttcttccgttctatctccttgtcaagaggcaacaacctccaggatacactaagagtcctcaccctgtggtttgattatggtcactggccagatgtcaatgaagccttggtggaaggggtgaaggccatacagattgacacttggttacaggttatacctcagctcattgcaagaattgacacacccagacccttggtgggccggctcattcaccagcttctcacagatattggtcggtaccacccacaggccctcatctaccccctgacggtggcttctaagtctaccaccacagcccgtcacaatgcagccaacaagatcttgaagaacatgtgtgaacacagcaacacgctggtccagcaggccatgatggtgagtgaagagctgattcgggtagccatcctctggcatgagatgtggcatgaaggcctggaagaggcatctcgcttgtactttggggagaggaacgtgaaaggcatgtttgaggtgctggagcccctgcatgctatgatggaacggggtccccagactctgaaggaaacatcctttaatcaggcatatggccgagatttaatggaggcacaagaatggtgtcgaaagtacatgaagtcggggaacgtcaaggacctcacgcaagcctgggacctctactatcacgtgttcagacggatctcaaagcagctaccccagctcacatccctggagctgcagtatgtgtcccccaaacttctgatgtgccgagaccttgagttggctgtgccaggaacatacgaccccaaccagccgatcattcgcattcaatccatagccccgtctttgcaagtcatcacatccaagcagaggcctcggaagctgactctgatgggcagcaatgggcatgagtttgttttcctcctgaaaggccatgaagatctgcggcaggatgaacgagtgatgcagctctttggcctggtgaacacactcctagccaatgaccccacttctcttcgcaagaacctcagcatccagagatacgctgtcatccctctgtccaccaactcgggcctcattggctgggtgccccactgtgacacactgcatgccctcatccgggactacagagagaagaagaagatcctgttgaacatcgagcatcgcatcatgctgcggatggctcctgactatgaccacctgacgttgatgcagaaggtagaggtgtttgagcatgctgtcaacaacacagctggggacgacctggccaagctactgtggctaaaaagccccagctcggaggtgtggtttgaccgaagaaccaactatacccgctccctggccgttatgtcgatggtcggatacattttaggccttggagacaggcacccatccaatctgatgctggaccggctgagtgggaagatcctgcacattgactttggggactgctttgaggtcgctatgaccagagagaaatttccagaaaagattccatttagactaacaagaatgttgaccaatgctatggaggttacgggtctggatggcaactacagaaccacatgccacactgtgatggaagtgctccgagagcacaaggacagtgtcatggctgtgctggaagcctttgtctatgacccgctgctcaactggaggctgatggacacgaataccaaaggcaataagcggtcccggacaaggacagactcctactctgccggccagtcagtagaaattttggacggtgtagaacttggagaaccagcccataagaaagcagggaccactgtgccagaatccatccattcattcattggagacggtttggtgaaaccagaagccttaaacaagaaagctattcagattattaacagggttcgagataagctcactggtcgggatttctctcatgatgacactttggatgttccaacccaagtggagctgcttatcaagcaggcaacatctcacgagaacctctgccagtgctacattggctggtgtcccttctggtaactgaggcctggaaaaccacgtcgcctcctcccaggctttagtaccttgtctgtgcttccagtggactaaaaccatggacagacagttggacttgttaaatattttgaaatgtatatgaaaagaactactgtatattcaaagttggcttccgccaacctcctagctgctgttgaaaagacactgtcagaaacacaaggcttgattcagttcccaggacagtgaaacacagtaatccttcagaagccaagccttggattttgggagaacagaagatgggtaactgagaaatacgggttttgacttaacttacaagaaaactcatcataaacattgctgacagaataatccagttggtcctctcaaccaggggctccaacggcaaggacacagaggtcggcactccaccatcctgttacctcacccgtccctggatgcagtggcgacatttgcaggatgggccaacatggctaagagagtctgtcttccgcctgaccccacgatgctgaaactcacaagacctgcccttccaggaggacatttgttcagaagcctggccaccgggcatgagcaggtgtgccaaggatctccatgcggggccacactggctctactgtgttcagtgagggagggatatgctgtatttgcagcagggactcagaacataaatgctgatcacagagggacacactagagcaggttgtgagttataagcaaagtaaatatccaactaaatacacaaagtataaagtaaagccacatctagacaccacgttgtatctgagtaaattttgtgccaataaatgacatcagaattttaaaagcaaaaaaaaaaaaaaaaaaaa

SEQ ID NO: 2278 - DNA, 1386 bp, Mus musculus
ccggctggacctcttggggctccttgccgggaggggagacagcggggctgcaggcggcgagatgctcggtcccacggtgctgggcacggtcgtagccgcgctggtggcttcaatgctactgttgcagagtggggacgaggggtccggggctgctcccagcatggcggacaaggaagcactgccgaagcttcgggaagacttcaagatgcagaataaatccgtctttattttgggcgccagcggggaaactggcaaagtacttttaaaggaaatcctgggacagaacctgttttccaaagtaacgctcattggtcggaggaagctcaccttcgaggaggaagcttataaaaatgtgaatcaagaagtggtggacttcgagaagctggatgtctatgcttctgcctttcaaggtcatgatgttggattctgttgcctgggcaccaccagaagcaaggctggagcggaagggtttgttcgtgttgaccgagattatgtgctcaagtctgcagagctggcgaaagcaggagggtgcaaacatttcaacttgctgtcctccaggggggccgataagtccagcagtttcttatacctacaagtaaagggagaagtggaagccaaggttgaagaattaaagtttgatcgactctcagtgtttcggccaggagtcctactgtgtgacaggcaagagtctcgtccaggcgaatggctggctaggaaattcttcggctctctgccagactcttgggccagtgggtacgctgtgcctgtggtgacggtggttagagcgatgctgaacaacctggtgagtcccagcagcggacaaatggaacttctggaaaataaggccatcctccacctggggaaagacagggatgtgcccaaactgtgaccatgctggaggacattcgtgaaaacctcagtgcctgtcaccaaatcagtcatttgggggctctataaaaagtctctttgtggtcctttgtggtgtgcttctccttagccaagcggctccatcagaaaatggcactactccacgtcagttgttgagagccccgttgctcatgtaatcatccaggcagcttttggagaacaggtttatatcatagacttatactttgtaggttgcaaacagggatctctggaggtcccggtgcctttgggtgtaaggccagctttgaagcactcctccagggccacctgagcagaggggccctagcactacaggcagtctcgtctcctggcggcacggtgctgttgggctgcatgtagctgagtgaacactgtgccttgattctctgtcagcacagaagctgtaagacaagcttctgtatttcaccgaggaataaaaataaatggagaaaaaaaaaaaaaaaaaaaaaaaaaaaaaaa

SEQ ID NO: 2279 - DNA, 286 bp, Mus musculus
cccctctaatctaatatcaattaatcctcgcaatcatactcgtttttcagagggcttgcgcgtagaggatgagaaatatctaagaatgaacactcagtcgctaacctgactaacatgcactgtccggggacaagcttacagttaggtgaccagaagttctcccgtgtactatgtatcacaatagtacttaagtgtgaggcttcagaactgtgacctgatacattcacaaagccccccctttcccagggatgtgtgcacccctaaacctgcctccaagtaaaatctc

SEQ ID NO: 2280 - DNA, 2975 bp, Mus musculus
  misc_feature 9: n = A,T,C or G
gagtcgccnatcagtctcgccatggcttgctacatctaccagctgccgtcctgggtgctggacgacctgtgccgcaatatcgacacgctcagtgagtgggactggatgcagttcgcttcctacgtgatcacagacctgacacagctgaggaagatcaagtccatggagagggtccagggggtgagcatcacccgggagctactgtggtggtggtccatgcggcaggccacggtccagcagctggtggacctcctgtgtcacctggaactctaccgagctgcccagattgtcttgagctggcccatcatggctggggcccagcggcagcgtccgtgcgagatggatgccccttgttccctgaaaactgatgcacccgactctccccagtctaagtattgcagtacttccacatctgcccccaagcaagaaaggcttttgggtttgcccggagacaggcttttctggagtgaagcagatgtcgtccaagcaactgaggactttgaccaaagccaccgaatcagcgagggcacctttgccgatatctaccagggtcaaaggaacggtgtggccttcgccttcaagaagctcagggaggtggccggctccagtccagggtccatggacagattcctacaggcagagatgcagctctgcctcagatgctgccacgcgaacgtcctacctctgctgggtttctgcactggaagacagttccacagcctcatctacccctacatggcaaatggctctctgcacgacagactctgggctcagggcaactcagacatgctgccctggccacagcgggccagcatctgctcagggctgcttctagccgtggagcacctgcatagcctggacatcatccacagcaatgttaagagtgccaacgtcttgctggaccggcatcttaaccccaagctggctcatcctgtggctcaccctcatcccgacaataaaaagaccaaatataccgtcatgaggactcacctgttccaggcctcagctgcatatctgccggaacacttcatcagagtggggcagctgaccaagcaggtggacatcttcagctgtggaattgtattggccgaggtccttaccggcatccctgcgatggacaaggaccgcagtccagtttacctgaaggatttgcttctcagtgagattcccaacagtacttcttcagtctgctccaggaagaccagcatggggaaggcagtggtgaaagagatctgccagagacatgtggagaagagggcagggctgctgcctgaggcctgtgaggaagcctgggccaccgctgtgagtgtctgcctgcggaggcgcaatgccagcgtggaggaggcacgagtctccctggccggggtggaggagcaactccgagggcagctgtcccttccctggagcagggtttctgaggccacaggctcatcttccaataccccggaggaaacagatgacgttgacaattccagcctcagcgtcccttctttggttatgatggcatcgtgcccaggggctgcctcctctccactcttcacgggacatggagcagcacagccatccaccagtgggagacaggaggctgactcctcgtcagaggcttgcacaggcccacagacaccccagaacgctacagagacttcatggaaaattgagatcaatgaagccaaaaggagactgatggagaacatcgtactctacaaagaagagagactggacagcagcgagctctttggaccctgatgaccagcgcacagctgaagacccttattctcaactggacagacaaacgtccaggcagggaagaggtctttggctgcccaaggtctgttgagacccacacaacccaaacatcagcctgaacagaaggaaacatggcttcatcagagtcgagttgcaggggggtgggggtaggggacctcagcttatacagacaccatatccaggaagcactcctcctctctgagtcgtcttagttagagggctgtgaagtggaacaccttgtatgtgatccaaggatttgggtggtttttgtggttccggggaacccacgttgttgaccaccccaagagatgctgttgcccccaaacctcttagttctccacaacggacagagcaatcctgcagcatccgtggcgttttccagagttatcatctgtcagtcatatttgtagacagctttctgcaaattcccacttcttaaaagacctacagccggtgtctccgcaagttctcaagttcaggactgcaaaagcaggacggttggcaaaggactccgtaggctttctccttcttcagttggtgatcctgtaagccaccggtatttaggaactgcctgcttttcaccttcgacctcccattgtgcccatatttattttaatggagactcagaggttgtgtgttatttatagctaggtgaagaagcatgagaaacagtctcatgtttgattctgctgctagttaagtcaatcacttggtgggtggtagctcagtatccttgtaagataaccctgctctgttctccctggggaagaacagagctgctctattcagctcttgggaggatgggtgcagcggctgcagaagcactttgaaaatgtatctgttctgtgttctcaatggagtaaaaggtatgtagttcatggctctgccatgtagaaaatgtttatgaagtgaatatatttttgaaaagtcatgttgcaaacatgttttgtaaaacaaagctatttctttctttttttttttgttttttttttgttttttcgagacagggtttctctgtatagccctggctgtccgggacctcactttgtagaccaggctggcctcgaacacagaaatccgcctgcctctgcctcccgagtgctgggattaaaggcgtgcgccaccatgcccggctaacaaagctatttctaattcactatttaaaaaaagaattccattatagtgacaaaataaaaatgtttgtaatc

SEQ ID NO: 2281 - DNA, 2824 bp, Mus musculus
tcgacggtatcgataagcttgatatcgaattcggcacgagaggcaactatggtgaagatgatcatgtagaccaagtaacaggcgaagttgaagaagaatcttgggatgagccgatcccatttctcctgcagaagcttgttcagtgactataaaaccaacaaagaaacacaaacacaagcagaagatgcttagaactaaggtggagggtggacgatacagagaaagctacggccagctacggaggcttccgcggcacttcctctctcaatccccgctgctggagagtcccgctaggcttggtgatcccggcttgtagtctgctgccgctacgccttgacttcagcctgaggggtcccagccaggcctaccccactgcggtatgagagagagagggaacttaagatctccatctccacagaagtttcagcgataaggagcaccctcctctctcaggatgacttcagcctccaaccccccagcttttaggctggagacgtccgatggagatgaagaaggcagtgctgaggtgaacaaaggaaagaatgagccaccccccatggagtctcccttccagggagaggaccggaacttctcccctcagattaaagtgaatctcaactaccgaaagggactgggtcccagccaacaggacccaaatcggtttgaccgtgaccgactcttcagtgtggtctcccggggtgtccccgaggagctgactggactgctagagtacctgcgccggaccagcaagtacctcactgactcggcatacacagaaggctccactggaaagacgtgcctgatgaaggctgtgctgaaccttcaggatggggtcaatgcctgtatcctgccgctgctgcagattgacagggattccggcaatcctcagccccttgtcaatgcccagtgcaccgatgagttctaccgaggccacagtgcgctgcacatcgccatagagaagaggagcctgtggtgcgtgaagctgctggtagagaatggagcgaatgttcacatccgagcctgtggccgcttcttccaaaagcaccaaggaacttgtttctattttggagagctacctctttctctggcagcgtgcaccaagcagtgggatgtggtgacctacctcctggagaacccacaccagcctgccagcctggaggccaccgactccctgggcaacacagtcctgcatgctctggtaatgattgcagacaactcacctgagaacagtgcgctggtgatccacatgtatgacagccttctccaaatgggggcccgcctctgccccactgtacagcttgaggatatctgcaaccatcaaggcttaacacccctgaagttggctgccaaggaaggtaaaattgagatcttcaggcacatcctgcagcgggagttctcagggctgtaccagcccctttcccgaaagttcaccgagtggtgctacggtcctgtccgagtgtcactgtacgacctgtcctctgtggacagttgggaaaagaactcggtcctggaaatcatcgctttccattgcaagagcccgcaccggcaccgcatggtggttttagagccactgaacaagcttctgcaggagaaatgggatcggctcatcccaagattcttcttcaacttcgcctgttacttggtctacatgatcatcttcaccatagttgcctaccaccagccttccctggagcagccagccattccctcatcaaaagcgacttttggggactccatgctgctgttgggccacattctgatcctgcttgggggtatttacctcttactgggccagctgtggtacttttggcggcggcgcctgttcatctggatctcgttcatggacagttactttgaaatcctcttccttgtccaggcgctgctcacagtgctgtcccaggtgctgcgcttcgtggagactgaatggtacctccccctgttagtgtcatccctagtgctgggctggctgaacctgctttattatacacgtggctttcagcacacaggcatctacagtgtcatgatccaaaaggtcattctgcgagacctgctccgcttcctgctggtctacctagtcttccttttcggctttgctgtagccctagtaagcttgagccgggaggcccgaagtcccaaagcccctgaaaatagcaacaccactgtgacggaaaagcccacgctgggtcaggaggaggagccagtcccatatgggggcattctggatgcctccctagagctgttcaagttcaccattggtatgggtgagctggctttccaggaacagctgcgctttcgtggggtggtgctgctgttgctgttggcctacgtcctcctcacctacgtcctactgctcaacatgctcattgccctcatgagtgagactgtcaacagcgttgccactgacagctggagcatctggaagttgcagaaagccatctctgtcttggagatggagaatggttactggtggtgcaggaggaaaaggcatcgcgcagggaggctgctgaaagttggcaccaaaggggatggtatacctgatgagcgctggtgcttcagggtggaggaagtaaactgggctgcatgggagaagacccttcccaccttatctgaggatccatcaggggcaggcatcactggttataaaaagaacccaacctctaaacctgggaagaacagtgcctcagaggaagaccatctgcctcttcaggtcctccagtcccactgacggtccagatgcggcagcagcaggctggcagggtagagtagggaattttgccagccacacccgaggctactgaattttggtggaaatataaatattttt

SEQ ID NO: 2282 - DNA, 819 bp, Mus musculus
tagggcaaggccctcggcagcacagcagctgacagtacacgcctgacattttgggcaggagacttggtgggtcccatgtgctccgcagatctcccgttggctctagcctctgatgacgtaatcttctactttaacacctcaccacctcggatgtgagagtaccgttcctctagtcattgctctatagattaacatttaacactgctgtgactgattgctcaaaggacattttatgttatggctttaaagcagaggcatgattattagaaatgacttaagctcttttctttgaaaaacaagctccttttgcagacgaagcaaacagtagtgcctgtggtttagcccgccaatcttgacgactcaaagtagctgatgcattgtgcatatgatgcttgagatggttttgcagatgcagacatcgctgcaaggtcattctaatagagacaagcggtattttaaacctttgaaaggaatgtatgtaactgtacgttggtacagcttttcacttgtttagtttttaaacgttagtataatctgaataaagttaatataaactgttgccaaattcaatgtagaaagaatgtgacaaacaccttgggtagttctgtttgtgtttttgcatattgtaaaagcagtgtcacagctgaaaatgaaccctttctaaaggtaaattattgtgatttagttgctagtttgtattgagagttgacctctccctgtgcagtttttgtttggaacttgtatagataacagcgtgtaatgtgtccccttctacactgtaacagttgcttctgcctaccttataaataaagaatcact

SEQ ID NO: 2283 - DNA, 493 bp, Mus musculus; identical to SEQ ID NO: 2192

SEQ ID NO: 2284 - DNA, 1250 bp, Mus musculus
gaggaggcaagatggtgttggagagactatggtttgtgtggacaacagtgagtacatgcggaacggagacttccttcccacccggctgcaggcccagcaggatgccgtcaacattgtatgtcactcaaagacccgaagcaaccctgagaataacgtgggcctgatcacactggccaatgactgtgaggtgctgaccacactcaccccggacactggccgtatcctctccaagctccacactgtccaacccaaaggcaagatcaccttctgcactggcatccgcgtggcccacttggctctgaagcaccggcagggcaagaatcacaagatgcgcatcatcgcctttgtcggtagccctgtggaggacaacgagaaggatctggtgaaactagctaaacgccttaagaaagaaaaagtgaatgttgacatcattaattttggggaagaggaggtgaacacagagaagctgacagcctttgtgaacacactgaatggcaaggatggaactgggtcccatctagtgacagtgcctcctggacctagcttggctgatgctctcatcagttctcctattctggctggtgaaggcggtgccatgctgggtcttggtgccagtgactttgagtttggagtagatcccagtgctgatcctgaattggccctggcccttcgagtctctatggaagagcagcggcagcggcaggaggaagaggcacggcgggccgctgcggcctctgcagctgaggctggaattgctacacctgggactgaagactcggatgacgccctactgaagatgaccatcaaccagcaggagtttggccgtcctgggcttccagacctaagcagcatgactgaggaagagcagatcgcctacgccatgcagatgtccctgcagggaacagagtttagccaagaatcggctgacatggatgccagctcagccatggacacatctgatccagtcaaggaggaggatgactatgacgtcatgcaggacccggagttccttcagagcgtcctagagaaccttccaggtgtggatcccaacaatgcagccattcgaagtgtcatgggggctctggcctcccaggccaccaaggatggcaagaatgacaagaaagaggaagagaagaagtgagaccggagggaggggtagctgtgtctgcccggggactgtaaagagggggttggatagaggcttagatgtgctctgctgcctttatgatggaataaagcttggcaagttt

SEQ ID NO: 2285 - DNA, 1957 bp, Mus musculus
ttttccggaagcgaacgcttgtcctctacttccgcggggtcctggcaggtggcggtgacagagtgggtaccaggactagtggcgagactttatgatgcattgcagcagtgtcctgagtctgaaagtgtctatgtgtatggatcccagaatttgctgagagatggaggagcctcagaaaaatgacctgagcatgagagagcaggaggaagagcatcctgtcagaagcagcggccctcagatttctgtgagcgagttctcctgccactgctgctacgacaccctggttaaccccaccaccttgaactgtggccacagcttctgccggcactgcctggctttatggtggatgtcttcaaagaagacagagtgtccagaatgcagagaaaaatgggaaggttttcctaaagtcaacattctcctcagggatgccattgaaaagttatttcctgatgccattagaatgcgagttgaagacattcagcagaataatgatgtagtccaaagtcttgcagcctttcagaaatatgggaatgatcagaatcccttagctcccagcacagggcgagtaaatcctcagagaggagggggattcttctccggtgttctcacagctttaactggtgtggcagtcatcctgcttgtgtatcattggcgcagcagagaatctgaacatggcctcctggtgcacaaggctgtagataagtggacgacggaagaagttgtcctctggttagaacagctaggaccttgggcctccctgtacagagacaggttcttatctgaaagagtaaatggaaggttgcttttaactttgacagaagaagagttttccagggcaccttataccatagagaacagtagccacagaagggtcatcctcacggagctggagcgtgtgagagccctgggagtgaagccaccgcagaatctctgggagtacaaggctgtcaacccgggtagatccctattcttgctctacgctctcaagagctcacccagacttggcttgctatacctgtacctgtttgactacacagactgcttcctacccttcatccacaccatctgccctctgcaggaaaacagctctggcgaggacattttcaccaagcttctggacctgagggagcccacgtggaagcagtggagagaattcctcgtcaagtactcctttcttccgtaccagctgatcgcggagtttgcctgggactggctggaggtccactactggacatctcgcttcctgatcgtcaatgccgtgctgctctctgttctggagttgttctctttttggaggatctggtcgagaagtgagctgaagacagtgccccagaggatgtggagccacttctggaaagtatcgacacaggggcttttcatggccatgttctggccgcttattcctcagtttgtctgcaactgtttattttactgggctctgtacttcaacccaattattaacattgatctggtggtcaaggaagtccgacggctggaaacccaagtgttatgatgggcagcaaggcccgagcgagcccgtgaatctacctgacaaccaagctgtgacattcaaagagacaagggactcgtttctacccctggtaatgcgaggtgctgcttctgtgtgtcaaggcttcaaccaggtccctcttcctctgactctggcaccatgccggctgactgctacccaggtcagattggactcatggtcaatacccagccagtcttcttacagggacttgagaggctcaggctactatgaccaatagaagtgaaagtcttggtcataatttggggtgacatgctgtcaaaaggctaatatagactgggtgtggtagtgcacaccttgaatctgagcactaggaaaacaggcaggtggatttttgagttcaagaccagagtggtctacagagtgagttctacaacagccagggctacatagaggaaccatgtctct

SEQ ID NO: 2286 - DNA, 1024 bp, Mus musculus
  misc_feature 4, 9, 43: n = A,T,C or G
gtanatatnaaggtacaagtgatgtatggcaaataatcttctnactgctttgtatgtatcacatactctaattcgcacagtaggcgtgtttattaaacagattggctgagaaagttatgaaatagtactgaattcacagtctcagagctattcctgttgctgtgtatgtggtagattataccgaagtaactaatcttctaatgaatgctgatattttattagaatgaaagcacagattagcattaatattttttatcctggaaatcctttggcaagtactgggcagcccaaatttagaaaactatgagatttcaaaccacgtaaacatggttctgttggacattttattttttaactgttaacttaggtgttcgcagttctgttgaatgggacttctgcaggactgtatttagcatgctgtaagtactttggggtgaaataggctccgagtctaaattctcagaaatgtctgtgatgtattgaccatgaatagcgtgtaccacatgacagaagtgaaattacactcttaaccccttctcaacgtggactggtctttacaggggcaccaataaatgacagatctggagagtctcctggtgcttattttagaagtcaaatcaccccaattagtatcttgttagtagatataatgagcctatttctttctaaaaaggcttgtggtctggacgtgcttttacaagaaatagtgaccttggggaatatgtaaacaagagatctttttctaagagtttggggggaggttgggggacctgtataatgacaaaaaaaaaattagcttacaacaatgacaacaacaaaaaacaaaaacaaaagaaattgatattcaaagtattttacgcaaagccagtcaaaatgctttcatgatattttgagatgtaaatttttgtctgatttgtattgttcttttcgtttgccttcttaactttatatgtgacctgaattttccataacttgatgactatagattgcatctaggcattccaataaaagccaacccattgtc

SEQ ID NO: 2287 - DNA, 1550 bp, Mus musculus
tgcccgacatccgattagaagagggggccatggaagatgaagagctgaccaacctgaactggctgcatgagagcaagaacttgctgaagagctttggggagtcggtccttaggagtgtcagtcctgtgcaggacctagacgatgacaccccaccatcccctgcccactcggacatgccctatgatgccaggcagaaccccaactgcaagcccccctactcctttagctgcctcatatttatggccatcgaggactctccgaccaagcgccttccagtgaaggacatctacaactggatcttagaacatttcccgtattttgcaaatgcacctactgggtggaagaactcagtgagacacaacttgtcattgaataagtgtttcaagaaagtggacaaagagaggagtcagagtattgggaaagggtcattgtggtgcatcgacccagagtatagacaaaatctaattcaggctctgaaaaagacaccttaccacccacctcctactcctcaggcttatcaaagcacatcaggtccacccatctggccgggcagtaccttcttcaagagaaacggagccctcctgcaagtttctccaggagtgatacaaaatggagcgagggttctgagtcgagggctgtttcctggtgtccggccgttaccaatcactcccattgggatgacggcagccataaggaatagcatcaccagttgcaggatgcggactgagagcgagcccccatgtggctccccagtggtcagtggcgatccgaaggaggaccacaactacagtagtgccaagtcctccactgcccggagcacctctcccaccagcgactccatctcctcttcctcctcctcagccgacgaccactatgagtttgctacgaaggggagccaggagggcagtgagggaagcttccagagccatgagagccacagtgaaccagaggaggaggaccggaaacccagcccgaaggaaggcaaggatgccctgggggacagcggatacgcatcccagcacaagaagcgccagcacttcgccaaggccaggaaggtccccagcgacacactgcccctcaaaaagagacgcacggagaagccgcccgagagcgatgacgaggagatgaaggaggcggccggttcactcctgcacttagcagggattcggtcctgtttgaacaacatcaccaatcggacggccaaggggcagaaagaacaaaaggaaaccgcaaaaaattgaaacaagtctctgatttgttttgaacttatggccatttggtttcagcatgtcaggagatttctaatgatttgtggcaatatcagcaatttttttcttttttcttttttttttttcttttttccttttgttggtttggttttcttttctttctttctttctttcttttgttttttaatttgccccccactcctttgtttttggacccttaaaattttttctgtttaaaggagattgaagccatagaaactcatattgacactcagccgttttacaaaagcttttctttatctgaatacaaaaaccgaaagg

SEQ ID NO: 2288 - DNA, 811 bp, Mus musculus
cgctgtatcctggctgcggaaggatggcgggggccgcatgctgcttctcggacgagcagttccgggaggcttgtgctgaactccagaaaccggcgctgaccggggccgattggcagctcctggtagaggcctcaggcataaccatctaccggctgctggaccagccaagtggactttatgagtataaggtgttcggtgtcctggaaggctgctcgccggctctcctcacagatgtttacatggacttagactacagaaaacaatgggaccagtatgtgaaagaactctacgagaaggagagtgatgaacagatggtggcatactgggaagtgaagtaccctttcccactgtccaacagagattacgtctacacccgccagcgccgagacctggatgtggacaggaggaagatctacgtggtcctggcccagagtatctcggcacctcagtttcccgagaagtctggggtcatccgagtgaaacagtacaaacagagcctggcgatcgagagtgacggcaagaaggggagcagagttttcatgtactactttgataacccgggtggccaaattccgtcctggctcattaactgggcagccaagaatggagttccaaactttttgaaggacatggtgaaagcgtgtcagaactaccacaagaaaacctaaggaggggactgggactccgtcatccatgaaggacatctctggctgtgctacaccacctgaggctcgccttccattcatacttccatcttcaagcgcatcctattccagcactgctctgcagctcatcgctcatgctgcttctt

SEQ ID NO: 2289 - DNA, 6346 bp, Mus musculus
cggcgcgagcggtgcgatcggcgggacgtgagcccagcgagctgcaggcaggtgataggagatgacaggaacctccatctaagactccagtgtccctggtgctgacgagctgcctctggtcttaaactcctggcttgactaagccctccctgtaaccactccaggccaaccgctgtgtaggttgctcagccttccttgatgatgggtatcggcaagaacacggcatccaagtcagtggaggctgggggctccacggaaggcaaatatgaagaggaggcgaagcactcgaatttctttactctcccggtggtgatcaatggtggggccacatccagcggagagcaggacaacgaggacacggagctcatggcaatctacaccacagagaacggcattgcagagaagagctctcttgcagagaccctggacagcactgggagcctggatccccagaggtcggatatgatctacactatagaagatgttcctccctggtacttgtgcatattcctgggattgcagcactacctgacgtgtttcagtggcacgatcgcggtgccctttttgctggctgatgccatgtgcgtgggggatgaccagtgggccaccagccagctcatcgggaccattttcttctgcgtgggaatcactacattgctgcagacaacatttggatgcaggttacccctgtttcaggccagtgcttttgcatttttggcccctgctcgagccatcctgtctttagataaatggaaatgtaacaccacagagattacagttgccaatggaacggcagagctgttggaacacatctggcatccccgaatccaagagatccagggggctatcatcatgtcctcactgatagaagtggtcattggcctccttggcctgcctggggctctgctgaggtatattggacccttgaccatcacacccaccgtggccctcattggcctctctggtttccaggcagcaggagagagagccggaaagcactggggcattgccatgctgacgattttcctagtgttactcttctcacagtatgccagaaatgttaaatttcctctcccaatttacaaatccaagaaaggatggacggcatacaagttccagcttttcaaaatgtttcctataatcctggctatcctcgtgtcctggctgctgtgcttcatcttcacggtgactgatgtcttcccttccaacagcaccgactatggctactatgcacgcacagatgccaggaagggtgtacttctggtagccccatggtttaaggttccatacccatttcagtgggggatgcccaccgtctctgcagctggcgtcattggcatgctcagtgccgtcgtagccagtatcattgagtccatcggtgactactacgcctgtgccaggctctcctgtgccccgccgccgcctatccatgcaataaacaggggtattttcgtggagggtctttcctgtgttcttgatggcatatttggtaccgggaatggctctacctcctccagtcccaatattggagttttgggaattacaaaggtcggcagccgccgggtgatccagtacggtgcagctctcatgctgggcttgggcatggttggcaagttcagcgccctcttcgcctccctcccagaccctgtgctcggagccctcttctgcacactctttggaatgatcacggcggtcggcctctcgaacctgcagttcattgacttgaattcttcccggaacctgtttgtgcttggattctccatcttctttggccttgttcttccaagttacctccgacaaaaccctctggttacaggaataacaggaatcgaccaaatcctgaatgtccttctcaccaccgctatgtttgtaggaggctgtgtggctttcattttggacaacaccatcccaggtaccccagaggaaagaggaatcaagaaatggaagaagggtgtgagcaaaggaagcaagtctctggacggcatggagtcctacaatctgccatttggcatgaacattattaaaaagtaccgatgcttcagctacctgcccatcagccccacctttgcaggctacacttggaaaggctttgggaagagtgagaacagccggagttcagacaaagattcccaggccacagtatagcctttgctgtgccctgtggcctggccacagtgaggcatgtatctgtagttccttgctgaataacaagaagatatatgtttgtatatctacatggcatcctgcacctcagagctaagacaggttgcacgtcactcttctgttgtgggtggtgattgtgtccaatatggtgtctcgcttgtgtccttattggtcccttaccctttctgtgtccattgctggccatggtcactgaacttgaaatcacagccctgccattggagtgggcgtttggaatccctagtgctcctgctttcagtcccctctgccttccagtgatctctttcctacaagctgcttcgaggtccaggggcctctgcttcttaaacactatgtcccagtcttctcatgtgacctcagcctgaaccctgtggagacctcctctggccagggggccactggtgtcctcactgtgttgggattctgttatccctgataccccaggagcctattgacctgactgagaatagtgacatgtctgtcttgtgaccagatatgagtgtgcataaggtcctgtctagccgagactgactgggggggactgtataggagactgacggggagcagaaaggtcctgactccctccctccctgtcaccctggacccgtccaggccagcgcaccttctttcttactagtctgttttactggctgagacaccctatttggcattttcactgctggctggtgtgatgggtgtagagtgcccacagatgagtctatggatgtcttggctctgctgtcctgtacttgcgtgtgttttattcctatttaatgttattgactatagcggatctttgaaatcagtgttttccgtgtgaatttccaaccttgcaccccgttccttgtccttactcttgactccatccagaaaagaaccagcatctgcaaacgccatgggtgccgtcagcgagcgaagcctctcgtgtcggctgataaaagccagtggcagctgtcgtggctgtgctttgtactgctctctaccatgaaagtgtaaatactgtaatgtctaatctatttatcacaactgactactggaccagggcccagaaatgtgggtcaagttacatgtgaatttgtttggtgaagaagggaagctgggatggtaacagagcgtcaccacataggatgtgccattatctagctaaagtcattccttccttccttctgtttcaagtcattgctgccagatctggcttaataagacttggtgtggcttatcaggtcacatgtccaccacatcttgattcttgcaggagggaagayttgatcccttagagaaatagcctgtgggacttgttaaagaagatagatagtaagaaaagcagccattgcgtgccctctgtgaagagttctaacttggagaacaaatctctcagacaaatgacttgtactaaatttggctttggtttccaagccaagggaaaagctgaagacatgagtaatgatcttgcttcatgagattgtacctcttaagtggctgcggacctggctaaactgtgggtggcagtgggcatccccatcacccttagcaaggtgtggttctcagtgcctgtcattgatgtgtgttcccgtgcccaggctgtctcagtgtcatcatgttgccaggtctttgtgtttctgcagcccacatgrtccttgagagttttgggtttcggtaacacctcagggccactgcattgttttgccaaaatcttactccagattaagtacagaacttggtttctaaccgtatttagttttatatgtgtattcagacagttagagttttggaagcacactggtgagtagctttttgcccctccttccttagcaagcccgtttgattgacagctctcctgctctgagttcactctgtgcctccatttgcattttgcttagttgatccggtttctctgttctgacaaggtggaaaactggtaagcatctcagatctgcagtattgtggtggtgctccactgagcaggagtccactcagaagcatgagaacggcctgtaatccaggccgtgtcctgccactatgcctgtattgctgagtgccacccaagtcctctatttggctgtagtctgctctggggctttcactgtcagtctggggcatgggctgagcaagtatttgtgtggtcaaggaagtgctatgccaacatctcccattggaaacagggtttctcctccttgcttcatcagagccaacctttgatattcttggaggggacaggaggtgggaacacagagggagtagcctgcgaatgtgcctccagtcagtgggatactttctgcaccactctgagtgattgttaccttgtaaccactagtaagctttgttcatgcagctcatagtcctcccaaacatatggggaatgtgtgtttatgtaccagatggggagtgttgaggggatatggcggctctgtgatctgtttgtccatttgtgtccagtgttgacctgcgttactggaacttggagctaccctgtttggttaccagtggactgttagaaagtatttcagatacgagcatcttacagggcattccatccctagttctcacagtgaacacctgcctcctctctctcctgagagcaagcatttgtgtcagccacaggaagcagaagtattaagggaggaagtgctggtagctgccctgtggggagactccctaggaaagtaacgggcaccaggcttcgtgactttcattctcatttataagttagacattcattcactagaacatttatgctcagaatcttccttaagagggtgcccagtattaactttgattgggattaatccaggcaaaagaagagactttatcagagagtggagtgaagcattgtgggtactacccgtgtcccatgttcacagtaacaaattcacatgcaggatttactttatactgtagaatactgactttcatgatgacaacttgatttatgcatgaatatcaacagtatttccatatagtaaaataacatttctgcccaggataatagtcacagttttccagggagggaatgatataattttcatgacaatgtcatgtgctgatagaatttctccattgatgaacctctagtatgtgtgtatactttatttacccatgtgtatattttatgatcatgatctaagctgttaattctttcattcatgtccctgctgagacactgatattagcaacttagagttggtgagtttaatcttcagtcataccagctccaagagatgaggcctcagtccagaacccatcttcatacaaaagcttcagtagcctgtaggcggctgtacttggaacagacatttggctgccagtagcaggcctggcatggcgtgacgggaggggcctaattacctagctgttgctggacaccagctgtgcatacctgagcatgcccagtgcatgttgggtccatgcacaactcctggacccgagctttcaccaagctctggcctccagggagctgtgtctttctctgtcccattaagatttgggcacagataagacatcttccactttccatccttcctacagttagagccccagtagtgcgagaaggccccatatatggcagcattcagctctcacccaacacttgtgctgggcttcccttcagcagcctcccagacctccccattcttccaggatgctgtctgccaggtcaccactctgatacccagcgttctctggttgctctctgtttccagtgattaaacacccataaccaacgttgctgtctgctgccactgacagtccagtgaatccttttctgtctgttcctaacaacttttatttgacacattaaaaaatttctgactgtccttaagacagtagagatgtctctcttttatttgagtttgtgactgactttgcctatatatctttctggggttttgtttgtgtttaatttttattttgcatactgagggtatttggggtggggttgttttttgagatgtgtaattcttttatggagtttttaaaaagaattttcatattgttttttctaacatggcttcattaaacgtttaagtattttaaaactatgtaatatttggaccagatgttgtgaataacagtagagaaagctattttattctgtatttttaaaactgttccgtacaaataaaagctctcctggatgtaaaaaaaaaaaaaaaaaaaaaaaaaaaaa

SEQ ID NO: 2290 - DNA, 2455 bp, Mus musculus
tgagtagtgcggatcggatcgtggccgcggacggtggcccgcggaccggacggtagaggtccttctctgagccgctctggtgctcaggaccagtgccgggacggacggacagacgagacggatcccacgccgtgccggacgcccacgatcctcgagtggcgtccccgggaccctccggtccgtggctgaagagtctccgacgtgagccgatccttcccgggtgtcccagtccccacgtgcgtcttgccgcggcggagccggggagccgggtaaccgagttagcgggacgcctccagacgctcacccagaagttggcaaagccgcgtcccagcggctccttctggccacagcgaccgacccgaagttggttgacaggccgggtgtctgccggcgcgacccgggaggcgggtgtctcctgtgggcagcccttttgctttttcgcagtaaaactgtgatactgtaactccaggggcactatgaacgaagaggagcagtttgtaagcattgacttgaatgatgacaacatttgcagtgtttgtaaactgggaacagacaaagacacgctctccttctgccacatttgcttcgagctaaatctcgagggagtgccaaagtcgaatcttttacacaccaaatcagtgagaggccataaagactgctttgaaaaataccatttaatagcaaaccaggattgttctcgttccaagctttccaaaagtacttatgaaggagttaaaaccatcgtgagtaagaagataaactggattgtgcagtatgcccaaaataaaaatctggatttggagtccgagtgttccaaaacttcccagcatcccctgttgaatttcaggcataagccagagaagaaattgctcccacagtttgactctcaggtgccaaagtactcggcaaaaggctcagccggaaacgcaggcagcatctcaagctatgcgcagagaatcctggagcacagagaaaatacagacttccggctgggtttattggaagacgcggatgcattgtggactcacagtcacagccaggcacagaaaacagaagagacaagctctggtccggaggggactatccagacccagaatccacattacagccgtgaagaattgaattcgatgactcttgctgaagtagtacaactgagtgcgaagctccaacagcgaatccaagaggtttttgaagagttaacacaccaggtgcaagagaaggactctctggcgtcagagctccatgtccgtcacgtggctatcgagcaactcctcaagaactgctccaagttgccatgcctccaagtgggacggacagggacgaggtcacacctacccatgaaccactgaagggaccggagctgtcctgctttcatcctctactgctctgctaagcatatggaccgagaaaacatgggaaggaagtcatggtccatttttatggttgttgttcttgcaaaacctaagataatactcattatctttatctaataaagcagatcactctagtccagggttactcaatcatttggcttcatcgggggacttcttataattactaaatgcccctccctatcttttaccatatgtgactacttaaatattctgttatagtgtttttactgaccaatttttattgtaactcagttgtcaaaaacaatagaagcctagtaaggtcttatgttcacctaaactactagagagaatttttaagagggaaatagaattcgtaatatcaccttatttataagcaatattttaatataaaattttatatagagaattgctattttgggtatttttcattgtctttataagtctgtatttgaatggccatgtgtatttgcacttcctgtgtgaatatgttcacctctgtcaagatcgctgcattttggcaatacggtgtttttataacttatctttctttccaaagatacatgtgtttcggatagtattcggagaagcagtctacctagctgagctgttttaactacttaacagaatatgaaagtggaattaatcgttcctttaaagcaaatatccaagtaaacaaagcagcagattattgttttctaatggaaacagtgctgaattcgcttaggaagaaaagactattctagtttgtatgtgtcagtctccataaaagtagtggccctgccctgcttcttaattctcaacactttcttggatgtgttagttttggacaaagtaggtcaactatcttcagactgcactggtcttcctttgggggaaaaaataaaattattatgtgtgccacttcacatggagttcccgtaatctacgaactgtccaaattctgctatccacatcactgaaattagtccaaaaaataataataacaaaccattaaagaaagaaaaggaaaagcatttcaaggtacttttctaagttttaaaactctaaagggatagacgattatagcaccaccaccaccc

SEQ ID NO: 2291 - DNA, 1535 bp, Mus musculus
gagttgtgaagtcagttctcaagagagctctgtattttgcacttctcaattagatctaaacttggaaacttttctcagaagttaactgtcctttgacctcttctcttctgaattgcagaaatcagacaggatcttggtatttgttaaaatgacctcttgtgttgctaaagaacctattaagaagattgccatctttggagggactcatggaaatgaactgaccggagtgtttctagttactcactggctaaggaatggcactgaagttcacagagcagggctggacgtgaagccattcattaccaatccaagggcggtggagaagtgcaccagatacattgactgtgacctgaatcgtgtttttgaccttgaaaatcttagcaaagagatgtctgaagacttgccatatgaagtgagaagggctcaagaaataaatcatttatttggtccaaaaaatagtgatgatgcctatgaccttgtttttgaccttcacaacaccacttctaacatgggttgcactcttattcttgaggattccaggaatgactttttaattcagatgtttcactatattaagacttgcatggctccattaccctgctctgtttatctcattgagcatccttcactcaaatatgcaaccactcgttccattgccaagtatcctgttggtatagaagttggtcctcagcctcacggtgtccttagagctgatattttagaccaaatgagaaaaatgataaaacatgctcttgattttatacagcatttcaatgaaggaaaagaatttcctccctgttctattgacgtctataaaataatggagaaagttgattatccaaggaatgaaagtggagacatggctgctgttattcatcctaatctgcaggatcaagactggaaaccattgcaccctggagatcctgtgtttgtgtctcttgatggaaaagttattccactgggtggagactgtaccgtgtacccagtgtttgtgaatgaagctgcatattatgaaaaaaaagaagcatttgcaaagacaacaaaactaacactcagcgcaaaaagcatccgctccactttgcactaaaagtctttgcaagctcagttataggagtcttgcaaacacctagaactctgtaaacctccaagaccagagtgccttactctagttcttttcctcagtgcctggccccgtgcctcaagcagtaagcatccaggccaggttctgaaaggaaaggataaattaatgaacgtctttcaaatatattttggatgtgctatgtacaggcaagtgtgcttctggtttctgtattattctttatacagtatattcttgtagcgtaacattgttaactttcacatttagaacataacattgaaatacatgctagtgcaacttagcacacagcaggacagactatatgttttcaagtaatgcataagtgctaatcaaaactaatagtacagactttgtgtttttaagttctggtgtgtgaattaatgacagtgaattaaatgtccattccataaactct

SEQ ID NO: 2292 - DNA, 295 bp, Mus musculus
ccactgttgtttcccccacccccgcccccaaggaattagatcacttctcttttgcacagcacacacgggacactatactgagcccaaacatcccttcctgatttcagttcttttttccctttatttctttgggtatgttttcagagtggtggactctgtgcgaccatcacagacgatggatctctcaatggtttcttaccctctcttacaccccatggggataccactgtacatccataccttcatatcaaatttttatatcccatgaaaataaaagcatgggttgattctgcct

SEQ ID NO: 2293 - DNA, 758 bp, Mus musculus
tcatggatgacaggaacacaggcagatcaaggtgacaggtcatacagaacctattggactctagaaagcaggccatgtgactgagcagctatagagggcctgagtgtgtggccttcatcagtgcagtcggaagatgctggaacctgactccctgtgtgctaatgtctattacaaggtctgtccttggagagcgtatggagagcacacttcacacatcccgttaacaacgcctgccatgtatttatgggttaagtcgatcagctgactctccgctcgctttgcatttctgaaattgttaattgactggcacacaagggtaaattcttctgactactgtggtgtgcgtgtgcttctgttttgagtgtgagagaaaatgtattcatgtgtctgtgtgtgcatgtgcccatgctttcctatagtgtcaggtagacattttaatttcttttaaagcagtgctgtcagactgaaatcttgtacactggagtgtaatgtgctttgtgttctcaggcgcagagtgtgaacatcccaagagtactccatactgaatatgtatacacaagcctaatggtagtagtggtgaccacactactctatttattattctgtctttcagatgttattcatttagaacaaataaggtatatttttagaatcaaatttgtaaacactataaaatctttaataagttataaggtctatgatatgtttactttgaaaattgctgttgaaagcaagatgtattaaatatgtaattatct

SEQ ID NO: 2294 - DNA, 1502 bp, Mus musculus
gacgcccacacactcttgcagagatggcaggcagcgaagacaagctcgtcgtgggcactctccacctgctgctactgcaggcgaccgtcctgtctctgacagctgggaatctgagtctggtctccgctgcctggacgcaggagaagaaccaccaccaaccagcacatttgaattcttcatctcttcagcaagttgcagaaggcactagcatttctgaaatgtggcaaaacgacttgagaccattgctgatagaacgatatcctggatcgcccggaagctattctgctcggcagcacatcatgcaacgaattcagagacttcaggctgagtgggtcgtggaagttgacaccttcctgagtaggactccctatggctatcggtccttctcaaatatcatcagcactcttaacccggaagcgaaacgacacctggtcctcgcctgccactacgactccaaatattttcctcgatgggacagcagagtgtttgtgggagccacggattcagctgtgccatgtgcaatgatgttggaacttgcccgtgccttagacaagaaactccattccttgaaggatgtctctggttccaagccagatctctcactccggctaattttctttgatggtgaagaggcttttcatcactggtcccctcaagatactctgtatgggtctcggcacttagctcagaagatggcatcaagccctcaccctcctggatcaagaggcaccaaccaactggatggcatggatctgttggtcttactagatttaattggagcagcaaatccaacattccctaattttttccccaagactaccagatggtttaatagacttcaagcaattgaaaaggaactctatgaattgggattactcaaggatcattctttggagaggaagtattttcagaattttggctatggaaatattatccaggatgaccacattccatttttaagaaaaggtgtcccagttcttcacctgatagcttctccttcccctgaagtctggcacaccatggatgacaatgaagaaaatctacatgcgtcaaccattgacaatctcaacaaaatcattcaagtctttgtgttggaatatcttcacttgtaatgtttggatttagtttctggtaattgcttctacagcaacttcaagacaccatttatacaatctgcttccagataaatgtgtgtagacttctgtcctatagattcattctgtaggtgtttttgaatatgtgatcagcgaactgtagaattctatgatgccttcactaattttcctctagagatgagaaagaaacatgtaaagaaataaaataataataatttttaaaattcttttggattaaaactttaacataaagttagatttatttaccaataccatagatttgtaaacaatacttagatacaatgatgctgtatggtatagtggtagttttatatgtgatattatatagtgtgttatataatatgtaataaaacacaggcatatact

SEQ ID NO: 2295 - DNA, 3973 bp, Mus musculus
cgcgaggactgtcctcgccgccgtcgcgggcagtgtctagccaggccttgacaagctagccggaggagcgcctaggaacccgagccggagctcagcgagcgcagcctgcacgcccgcctcgcgtcccgggggggtcccgcctcccaccccgcctctggacttgtctctttccccgcgcgcgcggacagagccggcgtttaggcccgagcgagcccgggggccgccggccgggaagacaacgcgggcaccgattcgccatggagggcgccggcggcgagaacgagaagaaaaagatgagttctgaacgtcgaaaagaaaagtctagagatgcagcaagatctcggcgaagcaaagagtctgaagttttttatgagcttgctcatcagttgccacttccccacaatgtgagctcacatcttgataaagcttctgttatgaggctcaccatcagttatttacgtgtgagaaaacttctggatgccggtggtctagacagtgaagatgagatgaaggcacagatggactgtttttatctgaaagccctagatggctttgtgatggtgctaacagatgacggcgacatggtttacatttctgataacgtgaacaaatacatggggttaactcagtttgaactaactggacacagtgtgtttgattttactcatccatgtgaccatgaggaaatgagagaaatgcttacacacagaaatggcccagtgagaaaagggaaagaactaaacacacagcggagcttttttctcagaatgaagtgcaccctaacaagccgggggaggacgatgaacatcaagtcagcaacgtggaaggtgcttcactgcacgggccatattcatgtctatgataccaacagtaaccaacctcagtgtgggtacaagaaaccacccatgacgtgcttggtgctgatttgtgaacccattcctcatccgtcaaatattgaaattcctttagatagcaagacatttctcagtcgacacagcctcgatatgaaattttcttactgtgatgaaagaattactgagttgatgggttatgagccggaagaacttttgggccgctcaatttatgaatattatcatgctttggattctgatcatctgaccaaaactcaccatgatatgtttactaaaggacaagtcaccacaggacagtacaggatgcttgccaaaagaggtggatatgtctgggttgaaactcaagcaactgtcatatataatacgaagaactcccagccacagtgcattgtgtgtgtgaattatgttgtaagtggtattattcagcacgacttgattttctcccttcaacaaacagaatctgtgctcaaaccagttgaatcttcagatatgaagatgactcagctgttcaccaaagttgaatcagaggatacaagctgcctttttgataagcttaagaaggagcctgatgctctcactctgctggctccagctgccggcgacaccatcatctctctggattttggcagcgatgacacagaaactgaagatcaacaacttgaagatgttccattatataatgatgtaatgtttccctcttctaatgaaaaattaaatataaacctggcaatgtctcctttaccttcatcggaaactccaaagccacttcgaagtagtgctgatcctgcactgaatcaagaggttgcattaaaattagaatcaagtccagagtcactgggactttcttttaccatgccccagattcaagatcagccagcaagtccttctgatggaagcactagacaaagttcacctgagagacttcttcaggaaaacgtaaacactcctaacttttcccagcctaacagtcccagtgaatattgctttgatgtggatagcgatatggtcaatgtattcaagttggaactggtggaaaaactgtttgctgaagacacagaggcaaagaatccattttcaactcaggacactgatttagatttggagatgctggctccctatatcccaatggatgatgatttccagttacgttcctttgatcagttgtcaccattagagagcaattctccaagccctccaagtatgagcacagttactgggttccagcagacccagttacagaaacctaccatcactgccactgccaccacaactgccaccactgatgaatcaaaaacagagacgaaggacaataaagaagatattaaaatactgattgcatctccatcttctacccaagtacctcaagaaacgaccactgctaaggcatcagcatacagtggcactcacagtcggacagcctcaccagacagagcaggaaagagagtcatagaacagacagacaaagctcatccaaggagccttaagctgtctgccactttgaatcaaagaaatactgttcctgaggaagaattaaacccaaagacaatagcttcgcagaatgctcagaggaagcgaaaaatggaacatgatggctccctttttcaagcagcaggaattggaacattattgcagcaaccaggtgactgtgcacctactatgtcactttcctggaaacgagtgaaaggattcatatctagtgaacagaatggaacggagcaaaagactattattttaataccctccgatttagcatgcagactgctggggcagtcaatggatgagagtggattaccacagctgaccagttacgattgtgaagttaatgctcccatacaaggcagcagaaacctactgcagggtgaagaattactcagagctttggatcaagttaactgagcgtttcctaatctcattccttttgattgttaatgtttttgttcagttgttgttgtttgttgggtttttgtttctgttggttatttttggacactggtggctcagcagtctatttatattttctatatctaattttagaagcctggctacaatactgcacaaactcagatagtttagttttcatcccctttctacttaattttcattaatgctctttttaatatgttcttttaatgccagatcacagcacattcacagctcctcagcatttcaccattgcattgctgtagtgtcatttaaaatgcacctttttatttatttatttttggtgagggagtttgtcccttattgaattatttttaatgaaatgccaatataattttttaagaaagcagtaaattctcatcatgatcataggcagttgaaaactttttactcatttttttcatgttttacatgaaaataatgctttgtcagcagtacatggtagccacaattgcacaatatattttctttaaaaaaccagcagttactcatgcaatatattctgcatttataaaactagtttttaagaaattttttttggcctatggaattgttaagcctggatcatgaagcgttgatcttataatgattcttaaactgtatggtttctttatatgggtaaagccatttacatgatataaagaaatatgcttatatctggaaggtatgtggcatttatttggataaaattctcaattcagagaagttatctggtgtttcttgactttaccaactcaaaacagtccctctgtagttgtggaagcttatgctaatattgtgtaattgattatgaaacataaatgttctgcccaccctgttggtataaagacattttgagcatactgtaaacaaacaaacaaaaaatcatgctttgttagtaaaattgcctagtatgttgatttgttgaaaatatgatgtttggttttatgcactttgtcgctattaacatccttttttcatatagatttcaataagtgagtaattttagaagcattattttaggaatatagagttgtcatagtaaacatcttgttttttctatgtacactgtataaatttttcgttcccttgctctttgtggttgggtctaacactaactgtactgttttgttatatcaaataaacatcttctgtggaccaggaaaaaaaaaaaaaaaaaa

SEQ ID NO: 2296 - DNA, 1608 bp, Mus musculus
ggctgcccccggagctccgcctcctccaatcagcggccgcgctggcgggcaggggttaaccaggggaccccgcaccggcggaacaggccgcgcctgacagggctgctgagggcgggcggctggcggcgcttgcggccccgcctgcgacgtgaggggtggttggtcggctcgggggcgccgggtaagcggccggggccggagcctcgggagcccgcctttgtggagacagagtcggaggccgacggttgggctgcgcctcaggccgcggacagcgtcggagcggcgacccggcgggactgccgcgctcgccctgcctctcatatacacacattttttggggtgaggaaagaggttgctctgcccagcgatggatccgaggagagagcccgggagcggggcaaggggtgtcactgagttcgcggtgcccacccgatgtccgccagccggccatcccccgcagacatggtccacgtccccagaccccacgccacgccacgccacgccacaggcacggaaagccggccggcggctctcgccttccacgtacctgactggcctggcgtctccagggacaaaggtgtcctgggatcacagccgagccctcaccagcatgcccccctccagagcggaggtcgctacccgccccccggggaactctctcaaagcacctagggggaggttccatcttaacctccggtgacaagatggccctcctggggtgcctggggggtgctcttcagagtgtctgctgagaggtgagcgcctgcgacaggagggctttcctgcatgggaaaggttccactctctgaccccagcgccaaaggggaaaaagtcactttcttcacctagtttcacgagccaagacacggactccaaagtaacgactcagctttttgttttcttctgatgcttccttgaccagatgtctgaacgtgtctgaaggactacaagggaatcacaagagaaacattcaagcttttacacagccggcttgaacttttccaggcgttggcaagtactccaaagtagaattctgttattattaatttttccacatattgactggacagagacctgccaaatgggcaaaggatgataattcctttttgtacattctccatccttcagaactcaagtagaaaaactcaaattgggagtcatcttccagatcccaggctgcttggaaagatgaacgttttgaagggaagaggggaagagcaagtcaggagcaaagggtagggaaagggggcaaggaggagcccccagaatgcagtcagtctcaagcatgaaaatgatgaacaaaaggagtgcactgtggctcctcaagtctgcacagtgggaaaacaaagacagttctttgattatagtgagatcaagaaaataacacccacattcccataacttgggagactgagatgaaacaagattgccagcctgggtatcttaagaccaaaagaaaggggcctggagagatgactccgtggttaagattggcactgttcttgggtttgctccaaaacatctacacccgtaaggcttccatggacagtgcgttcatgtgcacacacagacataattaaaaataaatctgaaaagaatatggcctgc

SEQ ID NO: 2297 - DNA, 1450 bp, Mus musculus
gatgctttgcgcacgggactctcggaggagggcgggaaatgctgcatttcccagaagccccttcgtggggtagtcctctgaagtagggagccgagggtaactctcggacgcccaccctggtggtaggtatgggagctggcgttcagaggagagcggctgtccaaaattcttgtagctggtttcgtggtttgcgtttgcgctgttcactgaggtacggctgtgtgacgagagacgaggaagatgaatgacccagtggtcacactacagcagtttgcaatctgttataaagaacatttagaggatatctaatgttttgatgattgtaagatcatattgtgcatgccagtcagataatccgcatcgtggctcctgaatccatggctcagggaacatcacagagaggctgtaagaaccagaataccaggaagtctgatgcgaaacagtctctagaaatggctgtacaaactatactggagcaatggcaatatctatggacatgttaatgttgaagggagaaagtctccaggtcccaaccctagacaaagaactattggccactaatagagaagaattagcctctcataggaatgaactccttagttggttgtccaatgcagaactgtcagccttgagtttatatgtacaaacaaaaaaatagagctagcaggtttatataatctgtgcacatacacacatatgtatgtaacaataataatttaaaagatgagaagagctaagaaaacctagccagaggccaggatggtggtacacacctttaattccaggattgaagcaagaggatctctgtgagttcagagttagcctgttctacatagttagttccctgacagccagcctatatagacagaccctgtctcaatgaataacaacaaaatttcctcaaacaaattagctgtttccacagaatgaggtcaacacgtttgaagactaactattctctggcagtcagccattccaacttttattcccaccacttcagtaaccaccgttcggtgtgatttgtgaaccttggcttctcttcagtttttttgtttgttttgtggtgtggagggttgaatccagggctaggttcactgatgctaaacaaatgctgtgtcatgaaaccaggttctagctactgattttctttgtcctgtttgtcagataggctccccctaggtggcccagggtataaactgccaaaccccactgccatgagcaacatacttcctgtagcaagcaaggtgccacaacctaaaagctacataacccacacaaaacagaccaccagctggggtctgttcatacactaggttcaaacgcaggaaactatgggctgtggggaggtggggcgggggcgggcatttctcattcaaactaccactcactctggctttaggtatctgacaatcaagatgaaaactattaccagtcaaaaagggagggtagc

SEQ ID NO: 2298 - DNA, 2445 bp, Mus musculus
gcggcggagccgggaggaggtggcggtgcagggcgggcgctgagccccgctgaggagcaagatgcagccggggctgtgaggccgggcggcggcggggaggtcggatgcgggtctcggggtgccgctgaggaggctggtccctgagctcggagacgggtccggacgcccccgccgcgccggtccgtgacgccggggccgacacgatgaaggatttgggggccaagcacttggcaggtggcgaaggggttcagcttttcggattgttgaacttctacctggaacaagaacagagataccaacctcgggaaaaagggctgatcttgatggaggctaccccggagaatgataacactttgtgttcaagactgagaaatgccaaagtggaagatttaagaagtttaactaacttctttggatctggcactgaaactttcgttctggctgtcaatattttggatagattcttggcccttatgaaggtgaaaccgaaacacctgtcctgcattggcgtctgctgctttttgctggccgccaggctggcggaagaagaaggtgacgttccccccacgcacgacgtgatccgcatcagtcagtgtaaatgcacagcgtctgacattaaacgcatggagaaaatcatctcagagaaactgcactatgagctggaagctaccactgccttaaactttttgcacttgtaccacgcgattgtattttgtcacacttcagaaaggaaggagattctcagcctcgataaactcgaagcgcagctgaaagcttgcaactgccgagttgtcttctccaaagcaagaccatctgtattagctctgtgccttctcaatttggaaatagaaacgataaaatccgtggaactgctggaaattctcttgcttgttaaaaaacatttgaagctcagcgacactgaattcttttactggagggaactggtttctaaatgtctagcagagtattcttcgcctcgctgctgcaagcctgatctgaagaagctggtatggattgtttcgcgacgcactgcgcagaacctccacagcagctactacagtgttcctgagctgcccactatcccagaggggggttgctttgacggaagtgaaagtgaggactctggtgaagacatgagttgtggagaggagagtctcagcagctccccacccagcgatcaggagtgcaccttcttctttgacttccaagtggctcagacactgtgctttccaccatagaggtcacatgtctgtgtcagggtttaaagtgtgtgtacctatttcaaagcaatacttgggggtgtgggtagttttctagtccagcccccgtctagacaggaatttcacagactggaatacctaccttctatttattattcagatcagatctggcctattttcatatttaatcctaagccatcaaatgggttagtgcctcttaacagtacttaaaacgttggcactttattttttgttgacatttatcttggggaggagggaaggtgctgattccttcattcctttcaggcctttgaaagatgaacagtgtagcctgtctgaaactgtagagccttcaggtgtctttatttaataggttgggagtgtgcaagggcttccttagcagggacagaaggcaatcctttcatggtttatcttggatttccttctcccttgttctcagaacagagactgcagtactcttgagtgtcaaacaccaattctgtttttctaatggtggtgtattgtccgatacagatcctacatgttaagaattgacatgtctgtgaattttagttcataaatgtcttgagctttctgctgaagcagaagttgccatcaagctaggactgttagttgcattcttaatacctaagtattgtcagactgtagtattattttagtgttacctaaaaaagttcataatctgctagctttgcatgcacctgtgtgaaagcagaacagggaatggagttgataagtgctgatttagctcatctcactttcttgtattaaaatatctgcatgattactttctaattgttttataattcacatttcataatgtattgtatatgggtgccaagatgtgaatatgaagtgaaagacctccagtgtttgtagtgttagtttaaagcagttctgtgtggtgatggagccataaggatgaagatgtgtatactctgtacactgaagcttttgtacagagaatttttaactttataaacctatgtgaaaatgtaaatctttaaaaatgtacataaaatactgtatttttttacctttgtgtgtgataattggtcagtgcatgtaaatataatttattgtgtgttctatattatactcagacattgatgacttactttttattagtaagtcaacacccagtgaggtgttttccaaagtagattttttttgaattccgaataggtcataattcaaaaataaa

SEQ ID NO: 2299 - DNA, 5446 bp, Mus musculus
ctgtggcattgatgtttgagcgcacttctgaactggcttttgttgagactatcagtgtagaaagcatgcgctgtcccaaatccgctgttactatgagaaatgaggagctgcttttaagtaacggcacagccaacaagatgaacggagctttggatcattcagaccagccagacccagatgccattaagatgtttgtcggacagatccctaggtcctggtcggaaaaggagctgaaagaactttttgagccttatggagctgtctaccagatcaacgtcctccgggaccggagtcagaaccctccccagagtaaaggttgttgtttcgtaacattttatacaagaaaagctgcacttgaggcccagaatgcactgcacaatattaaaactttacctgggatgcatcatcccattcagatgaaacctgcagatagtgaaaagtcaaacgctgtggaagacagaaaattgttcataggaatggtttccaagaaatgtaacgagaatgatatcagagtgatgttttctccattcggtcagatagaagaatgccggattctccggggacctgatgggctgagtcgaggctgtgcgtttgtcacattttctacaagggcaatggcacagaatgcaatcaaagccatgcatcagtctcagaccatggagggctgctcttcaccaatcgtggtgaagtttgctgacactcagaaggacaaagagcaaaggcgcctccagcagcagcttgcacagcagatgcaacagctcaacactgccacttgggggaacctaacaggactgggtggacttaccccgcagtacctggcgcttctgcagcaggccacctcctccagcaacctgggtgcattcagtggcattcagcaaatggctggcatgaatgctttacagttacagaatctggcaacactggctgctgctgcagctgctgctcaaacctcagccaccagcaccaatgcaaaccctctgtctagcacaagcagtgccctgggagccctcacaagccctgtggctgcttcaacccccaattccaccgctggtgcggccatgaattccttgacctctcttgggactctacaaggattggctggagccactgtcggattgaataatattaatgcactagcaggtatggcggctctgaatggaggacttggcgccacaggcttgacgaatggtacggctggcaccatggacgccctgacccaggcctactcaggaattcagcagtatgcggcagctgcactgcccactttgtacagccagagcttgctgcaacagcagagtgctgcaggcagccagaaggaaggtccagagggggcaaacctctttatttaccaccttccacaggagtttggagaccaggacattctgcagatgttcatgccctttggaaatgttatctctgctaaagtcttcattgacaaacagaccaatctgagcaagtgctttggttttgttagctatgacaatccagtctctgcacaagctgcaatccaggctatgaacggctttcagatcggcatgaaacgcttgaaggtgcagctgaaacgctccaaaaacgacagcaaaccttactgatcctaaccccagaagctccctgctcttattttagctttcttaggacatcttcatgcccgttagtcatcgtttgcctagcatgtccctgtggcgtctcaaaaacagtttcatcgtcccgtcattgtttctgatgtctttctgacctcacatcatatttggttctcctactgacctttgatctagttttgacctttgaaatttgcatgtgacctcatctagctatgaattctgggaagtcaatgtgaaaaacattgctgcattcatgcaagactgaaattattagacaaattatagaaaacaaaacctgtggcaaaaatgtttctttcttatttttttttcttttcataaaacagacttgaaagtattacacagggattggcattctgcccggtcactggtgacaatagcaatatgtgtccagggacacagaatgttggtttctaacagactacttccaaaaacagtttgagaaaaaaaaaaaaactgtctgattttaagtctctagaggtctgtaatagtttttacatttttcaggcagtgtaaagttttttgataaggccattttaggtggctcactttctcattaagatatatatatagaaccactttttgtagattagtataagaaaaatatttaccctgttttggggcaaatgctacctatttgtgtcaccttttgctgaactgactcacagttagacaatccatggtttaatgcacatgaaattacctatattttatactgttccaatgtacaggagaaaggctactgtaagctgcgtcatgttggtgcttctgtggattaagttgtgctctcatcacaagtcttaaggtcttaatgttatttgttgataagacaagcttagaattggtttacttaaaacaaaaaaaaaaaagaatttcaaaaaaaaaagttgtttgcttaaaaaaaaaaagttcatgtgagagaaaaaagaaaaaaaaagaaaaaaaaaaaaactattccagactaagttttgtgttggcctgagaagcattggcgtcactttttttttattgtggactattagatgtgtttgtgttcagcaaaatgtgatgttttgttttttcttttaaagaaaaaagtgaaaactatctagtgccaaattccaaaggtacttcctccctagagcttcgcgtgtttcctgtgagaagtgatttgataacatggtattttattatgtgttttgtataaatccctaatatttaaaacaaacaagaaaaaaaaaaaggttacaaagtttgttaacttgctattccgtggtcttgttgcctgaaattgttattgtttgttatttctctatgctgttttttgtaagacattgtataagtgccgtgtgtcacttttctaacctctccacgtcaatgctgtgacggcagccctcacaatgtattttcttcataatatctggaaacctctaaggtgagaaagtcttgaacttttaaccctttttacccagagttatttggaatgttggtgactttttatactgtcatccttgggtttgttttggggtgtttagatatttttttccatttgtatcttctgagttattttttgttttttgagtcacacaccttcccaaaaaacccttaagtctttttcctaaaccgttttttattttcttttttatcccctccttcctatcaccctgtgctccttcagtttaaatataagagactgagtagaccctgggaaaggaaaaacaggtagagcttagccctacacaaaccctaaagaccgtgtctgctttttgataagggtttcatggtatgccctcgtgtacaatatttttatacaccctggagttaaatggctttttggtggtccaatctttcaagaagttttacttttgtttcttaaacacccctatgtaatgctgagtcagcctttggctcgggattctcagacgcatgtggacacctgaatatgcaaggtgtcttcctgaaaagcccacacatttcaagtggttggccatgtaagaggagatcagctgctcttcaccacaattactaccaaatactaggactagttcctgctgttgctctcgaaagtgccatattcctgagtctggcttcatatgagcagatgtcttgttctgacagaccccaatgtcatgcctacagtccaaacacacacccagcctctgggaaaacacaccctgcaagcttctggtctcagctcccttttccttcacaccctccctccatttgattttatgtgtgtgtgaatgtgatagccctgagatggaaaggattagcctctcacaatgcaaaaaaaaaaaaaaaaaaaaaaaagttccctccttccagcacgcgcacttccagtgacatgattggtgttagcccactgtttaccactgccggggccttccttcatccttgagggctattttgtactttctgcagcactcagctcactaacagtgatcacacacattctcagtctctctatggtggtgtgtaggtacacgtgtagaaacacaagagaataccagttgtatttcatagaccatctcgttcacaatctatttagttattaatgatataaatctcaaaaaaaaatcttgactttttttttccccccatggaagccaactgccctccttcctcttaacccacctgcggcccccgagaggctcgggtcaggcaggtactttctgttgagctcggtttctgattttgcaggcgaccaagaccgtccattgaggcgagggcttggttttgcatgtttcattgttagaaagttagccttcctcagagacagactgtccttcctctctcagtatcaaaaggaaacgctgcaagggtgcgcagggcctgtttccggaagacaaaacacagggaaactgcatttttaaaaatcaagtgtaaagcatatagacttttaaaactcactcagagaactctgatcagatggcacctccacggtgtgacaagttcatctttccttcaccgcaggggttctagttccttggcttgtgctactctggaatcatttactgtttctgtctttattatcttaagtgctaattaaaagaaaataaaacttaaaaaaatgtagtttcattaccttttgaataatgtcatacaaaaatgtatttgtgtttttgtgctgtgggaattgttgtttgtagattaataataccattttgtttagaactacaaaatagtttttaaatattgtctgagaaaagccaaagttaatgcaacctagtggaaactgtaagaccatttgagtattgtttctgttttattgatgcatttggattttgttgtttgatggaatttgagccaaaaaacaaaaatgcaggctttcctatttctacaactgattgtacttacgcattttgtaccagtgggattttttatactggagattaaaaaaaaatggaaatttttgtggcttactcttgtgggccccctgacaatgactgatttcaagtttgatttctggttgataggaagaaagttgcttttcctttaagaattaaaaactttggcttgatttctttttttccctttgcttatatctagcattagaattttgtcttaaaatacagcggtaagtttcactctttattctgtactgtgcagttacacaataagataattagatttagaagtactcagtcactttaagtggataaatgtattagttaaactttaggagtttgcttttttgctgtttagatcgaagttttttctgacccttctgtcctcattgtgaacataaccgtgtagttgaaacagtcagacttatttttgtaatgtatgttattgtgtgatgcggttttttgcttctgtctccaatattaaaccattttcctaataaa

SEQ ID NO: 2300 - DNA, 2216 bp, Mus musculus
agctctggttattcccctcaccagcatacccctcctccccctattcatcttcttctccactcctgtacctcttcacccaacatttccttggttctcaagtctcctttctgctctatcctctgtccagtgtcttgagattattgtccctttccgggacctcagttactcactgcacatttattcacccagcaggatgtcacagctgagcctgtcctggttgggactggggcccgaggtggccttcccatggaagaccctgctactgcttggggcctcctggatcctggcccggattctgatccagatctatgctgcctataggaactatcgtcacctccatggcttccctcagccccccaaacggaactggcttatgggtcacgtgggcatggtaactcctacagagcagggcttgaaggaattgactcgtttggtgggtacctacccccaaggttttttgatgtggattggaccaatggtccctgttattactctatgccattctgacatcgtccgatctatcctcaatgcctcagccgctgttgcactcaaggatgtgatattctacagcatcctaaagccttggctgggggatgggctcttggtgagtgctggtgacaagtggagccgccatcgtcgcatgctgacacccgctttccatttcaacatcctgaagccctatgtgaagattttcaacgatagcaccaacatcatgcacgccaagtggcaacggttgatttcagatggcagtgcccgtctggacatgtttgagcacgtcagcctgatgactctggatagtctgcagaaatgtgtcttcagctttgacagcaactgtcaggagaagtccagtgaatatattgctgccatcctggagctcagtgccctagtggccaaaaggcaccagcagcctttgatgttcatggacctgctgtataatctcacccctgatggtatgcgcttccgtaaggcctgcaacgtggtgcatgaattcactgatgctgtcatccgggagcggcaccgcaccctcccagatcagggtttggatgacttccttaagtctaaggccaagtccaagactttggatttcattgatgtgctgctgctgagcaaggatgaagatggaaaggagctgtcagatgaggacatccgagcagaggctgacaccttcatgtttgagggccatgacacgacagccagtggactctcctggatcctctacaacctggcaaggcacccagaataccaggagcgctgccggcaggaagttcaggagctgctgaggggccgagagcctgaggagattgaatgggacgacctggcccagctacccttcctgaccatgtgcatcaaggagagtctgcgactgcatcccccagtcacggtcatctcccgatgctgcacccaggacattctgctcccagatggccggaccattcccaaaggtatcatctgtctcatcagcatctttggaattcatcacaacccatccgtgtggccagaccctgaggtctatgaccccttccgctttgaccctgaaaacatcaaagacagctcacctctggcatttattcccttctcggcgggacccaggaactgcataggacagactttcgccatgagtgagatgaaggtggcactggcgctgacgctgctgcgcttccgactcctaccggatgacaaggagccgcgcaggcagccagagctgatcctgcgcgcagagggcgggctgtggctgcgggtggagccgctgagcgcgggcgctcattgacctaagacctggtctagagccaccctaccaacatatctctgcggatcccagaatgaacagaactgtcatccatacctgaatcttaccgagagccagcagggggcgctgtgaaatccagtgcgtgggtgagagaggcctgctccataaggtgcattctcctccaaccaacctggactattctctgaacaacataggaagccaaagggatgtctgagcaagaggccagaatcaaaggcaaatttgagctctgattcatgcagctctgtttccattactttgacttccattctaatcacctaatagaccattcttctctcacctcagaattacttttctgtgggcactaaattactgtgtttattaaaccttaagaccggattttttttctcatttaaagctagggtctcattatatcatcttgaacaatctgaaaaaaaaaaaaaaaaaa

SEQ ID NO: 2301 - DNA, 655 bp, Mus musculus
ccgagatgcgccacggcttcggtagcgaccggctgtcttctgctgcttgagcggcgcccgcaccttccctaggagctcgcagcagccggctggcctctgctccacggtaaccatgtgcgaccggaaggcggtgatcaaaaatgcagacatgtcggaagagatgcaacaggactcggtggagtgcgctacccaggcgttggagaagtacaacatcgagaaggatattgcggcccatatcaagaaggagtttgacaagaagtacaaccctacctggcactgcattgtgggccgaaacttcggtagttatgtggcacatgaaaccaaacacttcatctacttctacctgggtcaggtggccattcttctgttcaaatctggttaaaagcatggactgtgccaaacacccagtgatccatccaaaaacaaggactgcatccaaattccaaataccagagactgaatcttcagccttgctaagggaacacctcgtttgaatctgttgtgttgtgtacagggcttcattctctgtacaagtctgtggttataaaattagtaaaacagcttacatttgtatttattttctagtccatacttctgtacccccatttttttctcccttaggtcattcctttaaaaataaatctgttggagatgt

SEQ ID NO: 2302 - DNA, 2691 bp, Mus musculus
gaattcggcacgagaaggtgcttcagggtgggctctggaggccggccagctccctccagccccaggtaccatcaatctccggctccatctgcagctccatgtcccaggcatccaccaccactctggagagtggggcactcctctcgggaccccggggtcttcagtatggaagcccagctcacaggaaggagaaggctgcagcaatgccagactccccggctgaagtgaagacgcagccccggtccacaccccccagcatgccgcccccacctcccacctcatcccagggagccacacgaccaccctccttcacacctcacacacatggcgaggatggacctgcgacgtctcttccccatggccgtttccacggctgcttaaagtggtccatggtctgtctcttgatgaacggcagcagccactcacccacggccatccacggtgccccatctacacccaatggcttcagcaacggcccagccacctcatccacggcctcgctctccacacagcacctgcccccggcgtgcggggcacggcaactcaacaagcttaagcgtttcctcaccaccctacagcaatttggcaatgacatctcacctgagatcggggagcgcgtgcgcacactggtgctgggcctggtgaactcaactctgacgatcgaagagtttcatgccaagctccaggaagccaccaactttccactgaggccgtttgttatcccttttctgaaggctaatcttccactgctgcagcgtgagctcctgcactgtgcccgcctggccaaacagacacctgcccagtacctggcccagcacgaacagctgctgctggacgccagcgccacttcccctgtcgactcgtctgagctcctgctggaagtcaacgagaacggcaaaaggagaacacctgacaggaccaaagagaatggatcagaccgggaccctctgcaccccgaccacctcagtaagcggtcctgcaccctgagccccgcccagcgctgcagccccagcaatgggctgccccacccgacgccacccccacccccgcactatcgcctggaggacatggccatggcccaccatttccgggactcctaccgccatcctgatccccgagagctacgggaacgccaccggcccctggccatacctgggtctcgacaagaagaagtgattgatcacaggctcacagaacgcgagtgggcagaagaatggaagcacctcaacagtcttctgaactgcatcatggacatggtggagaagacccggcgatccctcaccgtcctgcgccggtgtcaggaggccgaccgtgaagaactcaaccactggatccggtgctacagtgactctgaggaggggaagaagggccctacccccatctctgcccggtccctcaacagctgcagtggccctgaggggtctcagctagatgttcaccgggacttcacgcccaggaccctgtctggctacatgcctgaagagatctggaggaaggctgaagaagctgtgaatgaggtgaagcgccaggccatgtcagaactacagaaagctgtgtctgatgcggagcgcaaagcccatgaactcatcaccacagagcgtgccaagatggaacgagccctggcggaggccaagcgacaggcctcggaggatgccctgactgtcatcaaccagcaagaggactccagcgagagctgctggaactgcgggcgcaaggccagcgagacgtgcagtggctgtaacgccgcccgctactgcgggtccttctgtcagcacaaagactgggagaaacaccatcacgtgtgcggccagagtctgcagggccccgcggctgcagtggctgacccactacctggacagcctgacgccactgccagccccagcgaagccggctcggcagggccctctcgtccctgctctccggggccgccaggcccgctggacgctgctgtgccccgctgacctccagatctgacacccagcccatggacgccatgccctgccaacctcctggccccaccgtggcccaccagttgcctggagccattgctgctactgcttctctccaaaagaaaacacagatccaacagaactgcatccgtgcagccccagctacctgacaaggtctgccgggacctctacagcctctcgtccatcgcaagcaccctcagaaagcatcgcagagcgtcagacagtggcaccagcaggagtgtggccagctccgccgctgtctgtcccctctgtgtccgtctctctgtgtccgtctgtctttctgcgtctgcctctctctgtgtgtctctccgtgtctttgtctcctgccgtttccctgactctccggcgtctctgtctttgtaaagtccacatgatctctctgtcatcagagaaacctagttggtagcttttcttttccatgaagaacttttggagattttgttttgttttgttggcaaacaagctacttagaaatggacaaagaagactgtggggttctccccattcctcatgagtaagggaagaaactgtgatttttctatccagagttgctgtatcgcccagccagccccaggggcatcagcgagcacacagcaggaagataatgagaggcaaactgcaatttcccaactttaagaagcagcttttgtttcaggttttactcctttaatgtcaaactctttggctttaagctcgtgcc

SEQ ID NO: 2303 - DNA, 1909 bp, Mus musculus
gagccgagaggtgtgagccgccgcggtgtcagagtctaggggaattggagtcaggcgcagatccacagcgatatccagacattcagagccacaggcaccatgtccaatcctggtgatgtccgacctgttccgcacaggagcaaagtgtgccgttgtctcttcggtcccgtggacagtgagcagttgcgccgtgattgcgatgcgctcatggcgggctgtctccaggaggcccgagaacggtggaactttgacttcgtcacggagacgccgctggagggcaacttcgtctgggagcgcgttcggagcctagggctgcccaaggtctacctgagccctgggtcccgcagccgtgacgacctgggaggggacaagaggcccagtacttcctctgccctgctgcaggggccagctccggaggaccacgtggccttgtcgctgtcttgcactctggtgtctgagcggcctgaagattccccgggtgggcccggaacatctcagggccgaaaacggaggcagaccagcctgacagatttctatcactccaagcgcagattggtcttctgcaagagaaaaccctgaagtgcccacgggagccccgccctcttctgctgtgggtcaggaggcctcttccccatcttcggccttagccctcactctgtgtgtcttaattattatttgtgttttaatttaaacgtctcctgtatatacgctgcctgccctctcccagtctccaaacttaaagttatttaaaaaaagaacaaaacaaaacaaaaaaaaaccaaaacaaaacaaacctaaattagtaggacggtagggcccttagtgtgggggatttctattatgtagattattattatttaagcccctcccaacccaagctctgtgtttcctataccggaggaacagtcctactgatatcaacccatctgcatccgtttcacccaacccccctccccccattccctgcctggttccttgccacttcttacctgggggtgatcctcagacctgaatagcactttggaaaaatgagtaggactttggggtctccttgtcacctctaaggccagctaggatgacagtgaagcagtcacagcctagaacagggatggcagttaggactcaaccgtaatatcccgactcttgacattgctcagacctgtgaagacaggaatggtccccactctggatcccctttgccactcctggggagcccacctctcctgtgggtctctgccagctgcccctctattttggagggttaatctggtgatctgctgctcttttcccccaccccatacttccccttctgcaggtcggcaggaggcatatctaggcacttgccccacagctcagtggactggaagggaatgtatatgcagggtacactaagtgggattccctggtcttaccttaggcagctccagtggcaaccccctgcattgtgggtctagggtgggtccttggtggtgagacaggcctcccagagcattctatggtgtgtggtggtgggggtgggcttatctgggatggggaccccagttggggttctcagtgacttctcccatttcttagtagcagttgtacaaggagccaggccaagatggtgtcttgggggctaagggagctcacaggacactgagcaatggctgatcctttctcagtgttgaataccgtgggtgtcaaagcacttagtgggtctgactccagccccaaacatccctgtttctgtaacatcctggtctggactgtctacccttagcccgcaccccaagaacatgtattgtggctccctccctgtctccactcagattgtaagcgtctcacgagaagggacagcaccctgcattgtcccgagtcctcacacccgaccccaaagctggtgctcaataaatacttctcgatgatt

SEQ ID NO: 2304 - DNA, 1675 bp, Mus musculus
ggagaagctccaaagcatgaaggaactacccaaggacaggttttatttggaaggaaaattaaaaacaaagaagccaggaagaaaaagtcatgaaaagtaagaaaaaatgggtagctatccaaaatgataattgcaggacactccagggaagactcaccgagccaggatgttttgacaaatacaccatgggaatgcttcaacaaattggcattaattttaaaaaaagttcccaattctgcagagaataaatgactggctgctgaccaccttggaggggtctcactgagagcagcctgctcggactcagctgtcaacccatgagcaactgaagaaatatcccccctctacagcaacactgagtttctgaggtcactgggcattccgacagaaaccccgacaacaaacagaaatcatctgcagtgataatactcttttcaagaatggaagaaaaacttacttttgggtttaaagtacacagtttccattatatttagcaaaagcaacatggttcattttggagctaggaacaaagcgtcagtggctagagccacactatggaaaatttgataatgtcggtgatagaaaatttgccagtgacagaatataagacccaaacagctcataaaaataaacagataggtacctcttctgctagagagaacagcttgcaggaagacgcctacaggatgctggaaaatttaagtgcaatcctaaaagcccttcttcaaagatgcatgagagtgctatgagacaacacctcggaaggacatccatgggattgaagcctgagcagctgctgccatgtcatcagcacaaggggacactcaaggctcagacctctgtgttctgtagccagcatgtctgaagtggcacagagtactcagcagcagcagtcagaagcgagacctcatgctgctccctctccctggctgcccaagtttgcctgcctgccttccttctccctcagcatctgagtagaaggaacctggaagcatgctcatcttctgcccgtggggagggagctctggaaaaaaaatcactttacctaatccgtcctttttacagagaagctcatttcactgaagtaaacagaaatgatccgacgtggctacaggaaagtgagggtactgttcctttaaaccccttgaagccaaatttattcccccacgaggtcagagtcactggcccctgtttaaatgaaggagtgaatattaaagacctttatactaggaaaatagtttgggtcttaaaaagtaagctgacctgaaatagaccaaacctacaaaatttatttccactccatcagactccataccccgagggtgtgcgagcgtgaccagcaagctgtgttaggtcacgaatactcgagaagcaggcattgcgcgtgcagttcggaacccgtgcgataatcaatgtaagaacagtgctggatccggctccagtgaggggtagggctgatgcatacctttgggtcttctggcatttccactcttctgcagctcatcttcctcattaatggtgaatagagcaaggggaattgtccttgcaggagtcttcttcagtctctcttgtcggatcgctgtagctgacccaggcataacgctgctacttgttcggcaattatattaaatatatatgcttatgtaattgcagctcccagaagctgctagctccc

SEQ ID NO: 2305 - DNA, 453 bp, Mus musculus
  misc_feature 374, 375: n = A,T,C or G
tttttttttttttggggggagcatttaaaatttaaataattttttacaaaaacaatttccggaagggcggccccaggtttatttaaaagggggagtcttttcaggaagggggggaaactggatccccacctaagggaattttcactgggaggtctgggttccaaggaaatttttccaaaaagccgggggaaactgtctaaacatcagaaaaaaacccaaaattttgtttgtttgggggtgggggaaaacccatgatctgctcaaaggcagggctaaaataattatttgtataatcctttaaaggagcttttgccccttttgatgaccccagggggccaaaaactgagtttagtgggccaatgatggaattctgnngttctttattgatggaaactaattctgccggggggaaagccacagtcaaaccacagaagacaggttccccaggccctt

SEQ ID NO: 2306 - DNA, 1377 bp, Mus musculus
aactttttttttttaactgtagaccatgcatgtgattgtaaatttgtacaatgttgttaacagtagaaaaacacacatgccttaagacttaaaaaagcagggcccagagcttgttagtttaattagggtatgtttcaactttgtattattcatttgtattagctctgtttagaaaaatcaaatgtatgatttatgaaacaagtgtgtgatgtgtaacttcaagtgacttggagatgcgaaatctgatggcacccttggttttataacgatggctttaaataagcaggttcaagtctagtggaacagtcagtttaactttttaacagatcttatttttttattttgagtgccactattaatgtgtttaaagaggtggggaaagactccaaagcgtctggagacacttacgtacctgtccctggtcccccagaggctagggtgactataagagtaggtcacttttcacttctgaagtgcttagtgtttttatacaggagataaaaaggccattcgacttcccaccacttggagagagagaactacctttcaggaaaggtgacgagacatttattatctgacagacacacacacacacacacacagtgataagggactggttacctgggtccacatttttttttattcttttctgtagtgctactttgacatacacttccttttaaaatgtgcctaatttaccaagagaccaggaagcaccataagcattgtgaggtaaaatttaagagctggagcgcgcaggaactgggtgtttgggagcaaccgcttttttcagtgtgaatcatggtggcatctgtaatttttttctgattagcacctaaagatcggtttaaagtgcttggactgcttatcctaaaatcgtgtctagtgcgctcgaggcatcggtcatacaaatggggactcttttcatgtgtgtcatttttaaagtgttgaaagcttagcctttgaataccttctgcattggtaaaaaatccatggaaccactcatggcacatcttaggagatgattgacaatgtataaactaattgtgggtttgatatttatgtaaataccagtttaccatgctttaattttgcacattcatattacaaggagccagttggtcctaattagccttgtgggttttctgtttggaaggagttgcggcatctgtttacatttcccttgtcagatctagaatgtgtgtatgtgtgtgtcttctccctgaggtacccgtctgcaggtgtctttacatatctcaatacaaaaattataacatttgatagtgtgctgtcaaagtgtgcttagctcatctggatatacccacactgttaaataatgtctaaacattaatcattaaaacctttttgattacccgt

SEQ ID NO: 2307 - DNA, 416 bp, Mus musculus
ttttttttttttttcttctgcatacatttattgggagagcttgatagtgaaagcgaaagaccccgaggccaaaaaccaatgctgcttatataggcctaggataggcatgtctacaccagattggttatgctttcagtacctcatttacatgcttcgggtcaggcagtgactaggctaaaagaaaactctactgcacatgggcacattggttgtttacccatattcatgggtaaacatattcataaacaaaatcactcccacccattccttaaagtgagaaaatgcagaggtaagccaagaggtaaagcctccaagggtcactagttccactctggttcaattaaggttcaggatctgtatctgcagctccgtgtgcaacctgtccagctcctgcgacgtcctcgtgccgaattctt

SEQ ID NO: 2308 - DNA, 475 bp, Mus musculus
gatcactcgtggtcttcccgtgaagctgccatggagcacaaggtgatctgtgtcctcgctgtggtcctcatgctggccttcggcagccttgcccaggcccaggcccaggcccaggcccaggaagaaacatgtatcatggccccccgggagaggataaattgtggcttccccggtgtcaccgcccagcagtgcacggagagaggttgctgttttgatgacagtgtccggggattcccgtggtgcttccaccccatggccatcgagaacactcaagaagaagaatgtcccttctaaggtccatcctgagagaactggctacatcaagacttggcaccctccacctgggcactggagccacctggcccacctgctacatacacacctattctgtggctggatctggctggtgacacagttcaacccctcagacttttagtcctcgaattcggcctgagaattaaaagagatgaatgtc

SEQ ID NO: 2309 - DNA, 4554 bp, Mus musculus
cagctcggggactccggccgtcacgatgacgaggacaacggtagatgagttggtcttctttgtgaatggcaaaaaggtggtggagaaaaatgcagaccctgaaacaacacttctggtctaccttagaagaaagttggggctgtgcgggaccaagcttggctgtggagaaggtggctgtggggcatgcaccgtgatgatctccaagtatgaccgccttcagaacaagatcgttcatttttccgtcaatgcctgcttgacccccatctgctccttgcatcatgttgctgtgacaactgtggaaggcataggaaacaccaagaagctgcatcctgtccaggagagaattgccaaaagccatggttcccagtgtgggttctgtacccctggtattgtcatgagtatgtacacactgctccgaaacaagcctgagcctactgtcgaggagatcgagaatgccttccaaggaaacctctgtcgctgtacaggctatagacccatcctccagggattccggacctttgccaaggatggtgggtgctgtggaggaagtggaaacaacccaaactgctgcatgagccaaacaaaggaccagacgattgctccctcatcttctttattcaacccggaggatttcaaacctttagatcccacccaagagcccatctttcccccagagttgctgaggctgaaagacactccccggaagacgttgcgttttgaaggggaacgtgtgacctggatccaggtttcaaccatggaggaactgcttgacctcaaagcccagcaccctgatgccaagctggtggtgggaaacacagagataggcattgaaatgaaatttaaaaatatgctatttcctctgatcatctgcccagcctggatccttgaactgacctcagtggcacatgggcctgagggaatctcctttggagccgcttgcccccttagcttggtggaaagtgtcctggcggacgcgattgctacacttccagagcagaggacagaggtgttcagaggcgtgatggagcagctgcgctggtttgctggcaagcaggtcaagtccgtggcgtccattggcgggaacatcatcaccgcgagccccatctctgacctcaaccctgtgctcatggccagtcgagccaagctgaccctcgcatctagaggtaccaagagaacggtctggatggaccataccttcttccctggctatagaaggactctgctcagtccagaggagatattggtgtccattgtgatcccctacagcaggaagggtgagtttttctcagccttcaagcaggcctccaggagagaagatgacattgccaaggtgaccagtggcatgagagtcctgttcaagccagggaccactgaagtgcaggaactgtccctttgctttggagggatggctgacagaactgtctcagccctcaagaccactccgaagcagctgtccaagtcctggaatgaggagttgctgcaggatgtgtgtgctggcttggcagaggagctgcacctggcccccgacgcccctggtgggatggtggaattccggcgcaccctcaccctcagcttcttcttcaagttctacctgacagtgcttcagaagctgggcagagcggaccttgagggtatgtgtggtaaactggaccccacctttgccagcgccaccctgctctttcagaaggaccctccagctaacgtccagcttttccaagaggtgcccaagggtcagtctgaggaggacatggtgggcaggcccatgcctcacctggcagcagacatgcaggcatccggggaggctgtgtactgtgatgacattccccgctatgagaatgagctgtccctcaggctggtcaccagcacgcgggcccatgctaaaatcacgtccatcgacacttcagaagccaagaaggtgccagggtttgtttgtttcctcacctcagaggatgtccctggtagtaacataactggcattttcaacgatgaaactgtctttgcgaaggatgaggttacttgtgttgggcacatcattggtgctgtggtcgctgacaccccagaacatgcacacagagccgctagaggggtgaaaatcacctatgaagaccttccagccattatcacaatccaggatgctataaagaacaactccttttatggccccgaggtaaaaatcgagaaaggagatctcaagaaaggcttttctgaagctgacaatgttgtctcaggagaattatatattggtggccaggagcacttctatctggagacccactgcaccattgccgtgccgaaaggcgaggcaggcgagatggagctcttcgtgagcacacagaacaccatgaaaacccagagctttattgcaaagatgttgggtgttccagacaacagaattgtagtccgagtgaaaagaatgggtggaggctttggagggaaggagacccggagcactctgatatccacagcagtggccttggctgcatacaagacaggccgccctgtacgttgcatgctggaccgagacgaggacatgctcataactggtggcagacatcccttcctggctaaatacaaggtgggcttcatgaagactgggactatagtggcactggaggtggctcacttcagcaatggcgggaacagtgaggatctctctcggagtataatggaaagagctgtattccacatggacaacgcctataagatccccaacattcgcggcaccgggaggatttgtaagactaatctgccctctaacacagccttcagaggctttgggggtcctcaggggatgctaatcgcagaatactggatgagtgaggtcgctgtcacctgtgggctgcctgcagaggaggtacggaggaaaaacatgtacaaagaaggggacctgactcacttcaaccagaagctggaggggttcaccttgcccaggtgctgggatgagtgcatagcgagctcccagtatcaggctcgcaagatggaagtggagaaattcaacagggagaactgttggaaaaagagagggctgtgtataatcccgactaagtttggaataagcttcacactttcttttctgaaccaggggggtgccttggtccacgtgtacacggatgggtcggtgctgctgacacatggaggtactgagatgggtcaaggccttcacaccaagatggttcaggtggccagcagagctctgaaaatccccacttccaagatccatataacggagacaagcactaacactgtccctaacacctctcccacggctgcctctgccagcgctgacctcaatggccaggccatttatgaagcctgtcagaccatactgaaaagactggagcccttcaagaaaaagaatccctcaggctcctgggagagctgggtcatggatgcctacactagtgcagtgagcttgtctgctactggattttataagacacccaaccttggttacagctttgagacaaactctgggaaccccttccactacttcagttatggggtggcttgctcagaagtagaaattgactgcttaacaggggaccataagaatctccgtacagatatcgtcatggatgttggttccagcttgaatcctgccattgatatcggacaggtagaaggggcattcgtccagggtcttggtctcttcaccatggaggagctgcactactctcccgaggggagcctgcacactcgtggccccagtacctacaagatccctgcatttggcagcatccccattgagttcagagtatccctcgtccgcgactgccccaacaagagggccatctatgcatccaaggctgtcggcgagccacctcttttcctggcttcttcgatcttctttgccatcaaagatgccatccgcgcagctcgagctcagcacggagacagtaacgccaaacagctcttccagctagacagccctgccactccggagaagatccgaaatgcttgcgtggatcagttcaccaccctgtgtgccactggaacaccagaaaactgtaaatcctggtccgtgaggatctgaagaggaggctccgcagtatggttttatactacagccctgattcctcggagcatcaagtgcataccgtagtatccagatttccacacatcccatggggactcagcaggatggcattttcaagaaaatggacaattgtgatccaaatcatgagttgcaaacaaaccaataagcaaacggggagctgctggcccaagtggcagttttgagtaattctgggtgattctgagtccatttttgatcacatatttgaaatgaggttagcaagggcttgcgttatgtccctactcgccacatggcctgtgtaactaagattctcacacacctcctgacgctgaaaccaacgtttctctagatctgcatgctttcttcagagagcttatatctgccaagccaccaagggccgtgttgtaaccgcagctgcacactcatagtcttcagtggaatagtgtgtgtgtgtgtgtgggggggggattaaaacctccaactgcctttacatcatagaagacaataaaacatgataa

SEQ ID NO: 2310 - DNA, 4194 bp, Mus musculus
ggactgggaaaaatgactctcataaattacataaagagggttccttggccaatgttgctactacttcatttgaattgcttcctttgaagtaagtttcctttcgggatgacctcctggcctttgtggatatgtgcagtgaagttctgagaaggagctgtggctgtcacacatctgcctgatgcctccgctggaaaccatggccaaaatggaggtgaaatcctcacttctggacaatatgatcggtgttggagatatggttcttttagagccgctcaatgaggagacgttcatcgacaacctgaagaagcgcttcgaccacaatgagatatatacatacattgggagcgtggttatatctgttaacccctaccggtccttgcccatatattcgccggagaaagtggaagattacagaaatagaaacttctatgaactgagccctcacatctttgctttgtcggatgaagcatacagatccctccgtgatcaagataaagatcaatgcattctcattactggggagagtggagcaggaaaaacagaggccagcaagctcgtcatgtcctatgtcgctgccgtgtgcggaaaaggagcagaagtcaatcaggtcaaggaacagcttctgcagtccaaccctgtcctggaagcttttggaaatgccaagactgtgaggaatgacaactcatctagattcggcaaatacatggatattgaatttgactttaaaggcgatccgctgggaggagtgataagtaactatcttttagagaaatctcgtgttgttaagcagccaagaggtgaaagaaacttccatgtgttctatcagctgctctcaggcgcctctgaggagctcctctacaagcttaagctggagcgggatttcagcagatacaactatctgagtctggactctgctaaagttaatggtgtggatgatgctgccaatttcagaactgttaggaatgcaatgcagatcgtgggctttctggatcatgaggccgaggctgtcctggaggtagtggcagccgttttgaaactggggaacatcgagttcaagcctgaatcacgagtgaatggtttggatgaaagcaaaatcaaagataaaattgagttaaacgaaaagtttgcgagtcgaccagcatcggtcaaggtggttttagaaagagcgttcagtttccgaacagttgaagcgaagagggagaaagtttcaaccacgctgaatgtggctcaggcttattatgcccgtgatgccctggctaaaaacctctacagccgcttgttttcatggttggtaaatcgtatcaacgaaagcattaaggcacaaacaaaagtgagaaagaaggtcatgggtgttctggacatttatggctttgaaatatttgaggataacagcttcgagcagtttattattaactattgtaatgaaaagcttcaacaaatcttcatcgaacttaccctcaaagaagagcaagaggaatatattcgggaggacatagaatggactcacattgactacttcaacaatgctatcatttgtgacctaatagaaaataacacaaatggaatcttggccatgctggatgaagagtgcctgagacccggcactgttacagatgagaccttcctggaaaagctgaaccaagtctgtgccacccaccagcactttgagagcaggatgagcaagtgttcccgctttctcaacgacacaaccctgccccacagctgcttcagaatccagcattatgctggcaaggtgctctaccaggtggaaggatttgttgacaagaacaatgaccttctgtaccgggacctgtctcaagccatgtggaaggccgaccactccctcatcaagtctctgtttcctgaaggaaatcctgcaaaggtcaacctgaagagacctcccaccgcaggctcccagttcaaggcgtctgtggccacgctgatgagaaacctgcagaccaagaacccgaactacatcaggtgcatcaagccaaatgataaaaaggcagctcacattttcaatgagagtctcgtatgccatcagatcaggtacctgggtcttttggagaacgttcgagtgagacgggcaggctatgctttcaggcaggcctatgaaccttgcctggaaagatacaagatgctttgcaaacaaacgtggcctcactggaagggaccagcaaggtctggcgtggaggttctgtttaatgagctagagattcctgtggaagagcactccttcgggagatccaagatattcatccgaaacccacggacattattccaactagaagacctaaggaagcagcggctggaggacctggccactctcattcagaagatttatcgaggatggaaatgccgtacacattttctgctcatgaaaagaagccaagttgtgattgctgcctggtacagacgatatgcgcaacaaaagcggtaccagcagataaagagttcagccctggtgattcagtcgtacatccggggctggaaggctcgaaaaatcctgcgggagctgaagcatcagaagcgctgtaaggaggcagccaccaccatcgcggcgtactggcttggactgaaggtacgcagggaatacaggaaattctttagagcaaatgctggaaagaaaatctatgagtttacacttcaaagaattgtgcaaaaatacttgttggaaatgaaaaataaaatgccttccttgtcaccgatagataaaaattggccatcaagaccttacctgttcttggattcgactcacaaggagctaaaaaggatcttccacttgtggaggtgtaaaaaatacagggatcaattcacagaccagcagaaacttatttatgaagagaagctcgaggccagcgaactcttcaaagacaagaaggctttatatccttctagtgttgggcaaccattccaaggagcttacctggaaatcaacaagaacccaaaatataagaaactcaaagatgccattgaagagaagatcattattgctgaggttgtgaacaaaattaatcgggctaatgggaagagtacatctcggattttcctcttaacaaacaataaccttctccttgctgaccaaaagtctgggcagatcaagtccgaggtccccctggtagatgtgaccaaggtttccatgagttcccagaacgatggtttctttgcagtgcacctcaaggagggttcagaagcggctagtaaaggggactttctcttcagcagtgaccacctgattgaaatggcaaccaagctgtatcgcacgactctcagccaaactaaacagaagctcaacatcgagatttccgatgagttcctggtacagttcagacaggacaaagtatgtgtgaagtttattcaaggcaaccagaaaaatgggagcgtgccaacctgcaaacgaaagaacaacagactccttgaagtcgctgtcccttaagtgaggcttcctctctgctctcacggacttgtttcctcgtaacagtgcaattttactttgttttatttggggttcactgtatgtttgggaattgccaaaggctaactgttagcgtcctcttggcacaattaaaagtatttgactaatgagttttaattatcagaatagttcattcctaagtccacattctgtcctgggcagaattcctctgtgtttgtttgtttgtttgtttttcataaatctatttgaaaaagagataaccaacatttaaacatacacatttattggttcagatccgttttcactttagaaaaagtcactgaagcagggctgtagaatgctttgttcctgttccagagaagcatgagataggaccctggatgtgcacagtgtatccacccagggtcattagcttttgaaactgcatgataagaagaggctgagagccgttcagactggcagatcttctctttgatgtgcaataaaacatccaagatcacttttgaaagttttatttataatatgcattttttttgtatgagagagctgattggtacaaggtgtgtattttagtcagatcaaaattaagttagaatgcgttttcagggctttttgattttttttcttcaaaattaacaataaggattcattttggaaaccacattttaaactctggaattaaattgtttcttatttgggaggataatgtaaatacattgggattatgttaataataaaattgttctaatttggtgcca

SEQ ID NO: 2311 - DNA, 3050 bp, Mus musculus
gagccaggacgatggagtcgatggtggcgccgggtgaggtgctcatgagccaggccatccagccggctcatgccgactcccgcggcgagctgagcgcagggcagctgctcaagtggatggacaccaccgcttgcctggcggccgaaaagcatgctgggatttcctgtgtcacagcctccatggatgacattctgtttgaggacacagcgagaattggacaaattattaccatcagagcaaaagtgactagggcgttcagcacaagcatggagatcagtatcaaggtcatagtccaggacaagttcacgggcatccagaagctcctctgcgtggctttctctacgtttgtagctaaaccagttggcaaagaaaaggttcacttaaaacctgtcctgcttcaaacagagcaagaacaagtggagcacaatttggcttcagagagaaggaaagtccgactgcagcatgagaacaccttcaacaacattatgaaggagagcagcaggttcagcgattccatttgtaatgaagaagaaggaacggccaccaccatgggcacctctgtccagagcatcgagcttgtccttccgccccacgcaaaccatcacggaaacacatttggtggccagatcatggcatggatggagacagtcgccaccatttctgcaagccgcctgtgtcatgggcatccctttctgaagtctgtggatatgtttaaattccggggaccgtccacagttggagaccgccttgtcttcagtgccatagtcaacaacacctttcagaacagtgtggaagtcggagtgcgtgttgaggcctttgactgtcaggagtgggccgagggccaaggccgccacatcaacagcgcttttctcatttacaatgctgttgatgaccaggagaaactcatcacctttcccagaatccaacccatttcaaaggacgattttcgccgttaccagggagccatcgcacggaggagaattcgcctaggcaggaaatatgttatttcccacaagaaagaagttccactcagtgcacagtgggatataagcaaaaagggatccctaagtaacaccaatgtggaagctctcaaaaatctggcatccaaaagcggttgggagattaccaccaccttggagaagataaaaatatataccctggaggagcaagatgccatatctgttaaggttgaaaagcttgtgggcagtccagcccacatagcttatcatctcttgtctgacctcacaaagcgacctttatgggacccccattacatatcttgtgaagttatagaccaggtgagcgaggacgatcagatatattacatcacttgctcggtggtaaatggagacaaacccaaggactttgtggtgcttgtgtcacgaagaaagcccctcaaagacaacaacacctacaccgtggcactaaggtcagttgtgctgccgtctgtcccgtcatctccacagtacatcagaagtgaggtcatttgtgctgggtttctcatccaggctgtcgacagcaattcgtgcaccgtaacgtacctgaaccagatgtcagacagcatcctcccttactttgctggcaatattggtggctggtcaaaatccattgaggaagctgcagcctcttgtataaaattcatagagaatgctactcctgatggacttaaaagtgtgttataaatggtcaactctcagctacctgtaatttaattccaaatgtgtccttagcccttttatgtggcaagctttggggccatacaacgatttaatatcagcctaagcaaaatgcagttatgaagagatgaaaaaacaaagtgtattctggtgatttggagccaaaccacaagatctcacagccctactgtactgacacttggaaattgcctggatacgatatcacatgatctataagatggcacaaaattagtcaacactatcacatctggctctggattacagaagctcgatgtgtattctgctatgatgagtttataaaacgtgaaatggtgggctaaaacctgatgagtgtttaatattagtccatgggcggcagacacctttgtcaggagtctttgagaagatatattccatgttttagaactttaaattaggaagcgttaaaacataatggaatccaatcagttttttaaatatgaacgacttcactttcgtcattttacatatattccaggtagatggccaatttagtatctatttctatacacgcacacgccaagcacctgtaaagtgtgatattagagagagaatattaactgagctcttcttcttcatatctcttccattagtactttatctcctagacgtctacatttatcattctacaccatgatgtgtcttaactcataagaccaagcagaatgtgtcaggttagcctccttcaaaggatgacttttacaaatggaagaggacctccatcagagttgagagcaggagacaggtttgggctatcctcaccagatctcctctgctccccggcctgctcccacatgcccactcaaatagtttgaggctggctacagtttttatcttacttatttgtctcaaggttcagccgtatgtgaactttagaccacgttctaattttataaattactatttatatatcataagagtaatgcatagcatagaacattctagaactaaaaaacaacttcaggaaatattttaattctacaaggtaaaagatttagtaataaggggcttataagatgctgtaacttagtgttatcatttcagacttctgaaatgaagaggcttttaagtgctatatgcgtaggcttggtctttgaattcagtttttgaaatgttttcctgaacagaaacagaaatacttgagtaactttagccagcttacttgagacatagacagtatggactccagtttgcaggatctaccttacccaggatgggtataaactctcagaacgttgtcacttgtcctaggtttgtttccatactgcctactttggatgaagtctagttgataagttggagattcgcaataacctctaataaaattgaaccatc

SEQ ID NO: 2312 - DNA, 2435 bp, Mus musculus
tctcaggcaagccggggactaacttttagttttgctcctgcgattattcaactgacgggctttcatttccattttacacaccctaacaacactcacaccttgcgggattgtattggtagcgtggaaaaaaaaaaagcacattgagagggtaccatgccggtggaacggatgcgaatgcgcccgtggctggaggagcagataaattccaatacgataccagggctaaagtggctgaacaaggagaagaagattttccagatcccctggatgcatgcggctcggcacggatgggacgtggaaaaggatgctccgctcttcagaaactgggcgatccatacaggaaagcatcaaccaggaatagataaaccagatccaaaaacatggaaagcaaattttcgatgtgccatgaattccctgcccgacattgaggaagtgaaggacagaagcataaagaaaggaaacaacgccttcagagtctaccggatgctgcccttatccgaacgaccttccaagaaaggaaagaaaccaaagacagaaaaagaagagagagttaagcacatcaagcaagaaccagttgagtcatctttggggcttagtaatggagtaagtggcttttctcctgagtatgcggtcctgacttcagctataaaaaatgaagtggatagtacggtgaacatcatagttgtaggacagtcccatctggacagcaacattgaagatcaagagatcgtcactaacccgccagacatctgccaggttgtagaagtgaccactgagagtgatgaccagccagtcagcatgagtgagctctaccctctacagatttctcctgtgtcttcctacgcagaaagcgaaactaccgacagtgtggccagtgatgaagagaacgcagaggggagaccacactggaggaagaggagcatcgaaggcaagcagtacctcagcaacatggggacacggaacacctatctgctgcccagcatggcgacctttgtcacctccaacaagccagatctgcaggtcaccatcaaagaggatagctgtccgatgccttacaacagctcctggcccccatttacagaccttccccttcctgccccagtgacccccacgcccagcagcagtcggccagaccgggagacccgggccagtgtcatcaagaagacatctgatatcacccaggcccgtgtcaagagctgttaagcctttgactctccctggtggttgttgggatttcttagctttgtgttgttctttgtttgtattatattattttttttctctatgatacctatcttagacacatctaagggagaaagccttgacgatagattattgattgctgtgtccaactccagagctggagcttcttcttaactcaggactccagccccccccccccctcggtagatgcgtatctctagaacctgctggatctgccagggctactccctcaagttcaaggaccaacagccacacgggcagtggaggtgctgcgttgcctacggtcaaggccagcatggtggagtggatgcctcagaacggaggagaaaatgtgaactagctggaatttttttattcttgtgaatatgtacataggcagtacgagcaatgtcgcgggctgcttctgcaccttatcttgaagcacttacaataggccttcttgtaatcttgctctccttcacagcacactcggcgaccccttctgtgtccactaccccactacccacccctccctcctcaacccctccatcccggtcctctatgcgccccttccccccaaccaatcccatcacaacctcttacctatcctttccctcccaaccccttctatcccagcccaccacctaccccactcctccccaactcctccattctagcccattacccacgcctctctcctcagcccagcctaccccatcccaccctgttcctttcctccagtttcctctcctcaaaggcaaggctctacatcttggaggaggaggaggagaagaaaatgagtttcttcaccgctgtcccattttaagactgcttgaataataaaaaaaaatctttctaatctgctatgcttgaatggcacgcggtacaaaggaaaactgtcatggaaatattatgcaaattcccagatctgaagacggaaaatactctaattctaaccagagcaagcttttttatttttttatacaaggggaatattttattcaaggtaaaaaaattctaaataaaatataattgttttttatcttttctacagcaaatttataattttaagattccttttcctgttcatcagcagttgttattacatcccttgtggcacattttttttttaattttgtaaaggtgaaaaaaaaacttttatgagctcatgtagcaatcaaattatcctgtggattgataataaatgaatatggtatatagttaaagatttt

SEQ ID NO: 2313 - DNA, 3752 bp, Mus musculus
taaggggacgctggccccgccctcgcccggcccagtggaaggcagtgcttccaccttccaagagagtgaggctcgccgctgcctgaagttccctcagatcgggatttcaaatcggagacaccagtatcccgcacctccctacacgcgtccaggcagagatcgacagggatgggcggcaggatgtggctgccattccccgtgctgctcctgtccgctctgcccgcagcgttgctgcgcggggcggccggcttcacaccctctttggacagtgattttaccttcacgctgccggccggccggaaggagtgtttctaccagcccatgcccctgaaggcatcgttggagatcgaataccaagttttagatggaggagaattagatattgatttccaccttacctctccagagggcagaaccttagtttttgaacaaagaaaatcagatggtgttcatactatagagactgaagatggtgattacatgttctgctttgataacacattcagcaccatttctgagaaggtaattttctttgaattgatcctggataatatgggagaagaggttcaaggccaagaagactggaaaaagtatattactaatacagatgtcctggagatgaagctagaagatatcctggaatccatcaacagcatcaagtccagactaagcaaaagtggccacatacaaactctacttagagcatttgaagctcgagatcgaaacatacaagaaagcaactttgacagagtcaatttctggtctgtggttaacttgatggtcatggtggtggtgtcagctattcaagtttatacgctgaaaagtctatttgaagataagaggaaaagtagaacttaaaactccaacacagattatttaacattgaaaaaaagaggtagaaaattctaatacactgttacacagtcaagatattagtcatatttcccataacatttttagaaatgtatgtaagtgtaagataatgtaaaatttattatgaaaggaaaatcattatgtccagataactttattgacttgttttatacttaagtatgaaacaagatgtcatgtaaaatttagatttaattgaatgaagccataataactattttcctaaagttaaaaatctttcccagatatcatatatgaattaaatgaattaacaatgttcataaacatgccaccagtttgcttttacctagaattttctctgtatatgtggcaggtacaagttaaagaagtttccaataccttacattagaaatcatttgatggccgggcagtggtggcgcacgcctttaatcccagcacttgggaggcagaggcaggtggatttctgagttcgaggccagcctggtctacaaagtgagttccaggacagccagggctatacagagaaaccctgtcttgaaaaaacaaaaataaaaataaaaataaacaaaaaaaaaaaaaaaaagaagaaagaaaagaaaaaaagaagaaatcatttgataattatataatcatggactgaatagatcagcttttctctactaaatctctccaaaaaaagtaaatacaagcataccactgaaaaaatactcctatcatttttacaaccaaatataatgtgaaatattatccacaagtattagtttttatatacttagtctatacttccaaaacctaacatttttataattaaaactggaaagggattctttctttataaaaattagacagtgtctttgtctttgatataaggtatataaagggtagttgatgtttgtgactgagatgcattctgtctagacgttagctaagattaaattagagataagatgaacttatttttatattacgcatcagcagtgttaagttggtattgataatgcattatcacaagcaggtgtgagggacatactaatgaaaagatctgacatcagtgtaaataaacagctcctttctaaattctcaaaaccatcagaaacatgaaggaaaaaaatgagataaatatgacaccagatccaacaagtttacctagagaagtgtaacatctagaatcaggtgggctcttcttgctaacccaattataataaagatcagatcaaaggagggtaatctaaaattccccagaagaaattgtatttgtcatagctttttattctaattactgtttttattataaatgttcagatagattttgtgaaatgtatattcctaccataagacttagcactaggtatgcatatttattacagtttttattatagctctcacaaaattacctctggtcatttattggcttagaacaatcccaaattataaacacctaatgtagaaataaaagccaatgtatacaaaaacattctgcctttctggtttatcagtctgtagtacaattttattcaagtactagtgatttaggtttatcatgaaacagaatttaagttacactcacttgtagtgtttataataaatgtattgtcaagtagagatagtcaatagtcagatctgggtattgaacccatataaacatacacatatttttttttgctggaattcttattacgtattaatgatcttgcactaccctgctacctcacacacaaaattatgatacccagagaaatactgatttcatttacaatttatactcagaatagttcaaaaatatagtttcctctttctcaggcccttgggaggaaactagaaatttatttttccctatccagaggcttttcaaaatgtgagataaatactatatgtgatcaataactgaccaagaaaaatgccctaggcttctaaccaagctcctacaatagatgcagaaaagaggccaatgagatcgttgcctaaaaaaactctcttccctactttaagtgcaagagaagcaagctctagacagctatcctaactgataaagcagagtccactgcgtctcttctgaaagactgtgactaagaatcctacctcttagatacagctgatactgtactgtgttcttaactgcttacttaacactgtatctgttacatcatcttgtatgtatggaatttgtgccactgactttttgaattcttactcagttactcactgccatttaaaatggtcatagtagctttgctggaaaatcgaataacttaggaatgttaaaagattttatttttatagacaaaagtaaaaagatactaagaaccatgttgcctgtattaatcataaagaagtaaaattgtaagcaaaaaccaaaatgtttatttttaaatgtgtattttctgcttcatagaagttttttgaccttactgtcttaattatactaaaatcaagtaagccatcacttgctctgatttttgtcttgttaattgtataaattactacagtagcttaacaagtttagagatcattgttcttagttgcagttggactgtgtgctcttttatatgaatgtcaataaacagagactaagtaagtgtaagaagacattgttgaaacataaatcaaaatatacttaggaatatttacaattaaacatgatgttttaaacttagtaaaaaacaaaagcaaaaacaaacaagtacctgtaattttgtacctacagtgaaaattctttatctgaaattttaaaatacattgatatagcatgtaattttttttcttctggagtataatacaatgtggctcatatggcactatatactatatttgtgaacttttatcttaaatgaacaacagactatgtactgagctccatacaactaataaaaggtactatc

SEQ ID NO: 2314 - DNA, 2111 bp, Mus musculus
gagagtcgtgaggaacggagcggaggcagctgcgaggccgcgggtgcccgccgggtgtgctgagccgccgccatgggcatcaagtttttagaagttattaaacctttctgtgcagttctaccagaaattcagaagcctgaaaggaaaattcagtttagagagaaggtactatggactgctataacactcttcattttcttagtatgctgtcagattccgctgtttgggatcatgtcatcggactctgcagatcccttctactggatgagagttattcttgcatccaacagaggaacattgatggaattgggtatttccccaattgtaacgtctggtttgattatgcagttgttagctggagccaaaatcattgaagttggagacacacccaaagatagagctctgttcaatggagcccagaaattatttggtatgatcattaccattgggcaagccattgtgtatgtcatgacggggatgtacggggaccctgcggaaatgggtgctgggatctgtctccttatcattattcagttgtttgttgctggtttgattgtgctgctgttagatgagctgctacagaagggttacggcttggggtctgggatttccctctttattgccaccaacatctgtgaaaccattgtctggaaggcctttagtcccactaccattaacactggcagaggtacggagtttgaaggtgcagtcatagctctgtttcatttgctggccaccaggacagacaaggtgcgagccttgagggaggctttctataggcagaacctccccaacctcatgaacctcatcgccacagtgttcgtgtttgctgtcgtcatctattttcaggatgtcagtgggggagggcctgctcgctcctaccctgttggcggcctttgttactatctgtctcctcctgagtctatgggagccatatttgaggatcctgttcatgtagttgtatatattatcttcatgttggggtcatgtgcattcttttctaagacgtggatagaagtttctggttcttcagccaaagatgtggccaagcaacttaaagaacagcagatggtgatgaggggtcacagagatacctccatggtccatgagctgaacaggtacatccccacagcagctgcctttgggggtctgtgcatcggtgccctgtcagtactagcagacttccttggggccattggctctggtactggaattctgcttgcagtcactattatttatcagtattttgaaatatttgttaaggaacaggctgaagttggtggaatgggtgctttgtttttctaaatgttcatctatttctttgtgtgtgtgaaagggaaaatattttgacatactgtttctgtcaaataatgctggttcccctttcttccctcagtttgttgttttcagtgctcactgtcccatttctgaagtgggcacagagctaagcctgtgtgcagcatcagtaccagctgccttaaaactgaagtttacattatttgttgacactgtccatctagtgttagccatgacgctgggaagcagtgtatctgcctcgctgttggtcagacagcaagacagtgatgtggattagcttcgcacacaacattcagaacactgaatattcccttgtttaaaaataagtgcagtgcagattgccactttccagtattttgagcttccctaatgagttatggagcatttatatctaatgtatattttagataatttttatacttttttaactcatcagccccacccctacttgattcatcctatccccaaactgccactcagcctggatgggcaaaaatcaagcattgaagttatttctgtcactggacacaattgcttccaattcccttttctgcttttcatttgtcctcttttcctggtgacagctacgagtgctgtccagctgtattggccatgccttctactccaatgcccccaagtatttcctctctcccctcgtccccaaagcaagacccagttctcaagcagtgtctgtagttgagtggaagtgagcaatgagtattcatgcaaggacttcatgtctgtgatatgcatagcaggacccaagtgtaaacagtagacaataaactttattt

SEQ ID NO: 2315 - DNA, 1137 bp, Mus musculus
  misc_feature 2: n = A,T,C or G
cnccgagctgagctgcactgttgcctcagggaggcaggagaaatgtctcagtcttggggagaggccatgcgggtacccccagctatgctgggcttgtgagtcttgcagatgagacccaagttgggggtctttgctggcactgtcctactagatgctgggtactgactcaggaggccaaacatgcacttgaacgtgggcgtcccaacccctgtgccagctccagctctccttccttcatccagataacagcctcatcgcccagccacccagcaaattcattctactacccacgcctcaagtccttacctcccatcgccaaagtgaccttcgtgcggctacagcagagtcccagggcctttgccccaccttccctggacctggccagccgaggcaacgaaatcgttgacagcctttcagttccagagacaccgctggactgtgaggtttccctgtggtcatcctggggactgtgtggaggaccatgtggaaagttgggagccaagagcagaactcgctatgtccgtgttcagcctgctaacaatgggactccctgtcccgagcttgaagaaaaggcccgagtgtgccccagataactgcgtctaaacccagactccagtagcaagcagcttttaggatccctcaaggctgggactcagatctgggccacaaggtgtttccacaggagtcccatgcaggcagggatggagagcgtgggcagttttgcaccgtttcccaccaatcctgggctgacagaggtcttcacccagaggaccgcagtggcaggtaagccacagactgcctctcccactgtgtgactcctgaggctcgtgggtttgatctacataaattcccttgtaatttattactgtggtgggagggaggctgcctttgatacagagagcaggcatgccaggaacagctgagaggatgctctaagcctgtgaaccccacaactacactgctgtcagatacctcagacctgctgccaccacatgtgccagggagtcaaccttcacaccactcctgtgcccacatgggggtgaccacaggaggaacaaacgaagaggggcagtttttcgaaacttggcccttgtgtgtcgttgatccccttgcattcgaataaaggtcgtgttcctt

SEQ ID NO: 2316 - DNA, 253 bp, Mus musculus
aaagtcaattttataagcctatcttcctcggagggggccataggcctcatcccatggcccaggtggacgcccggcagcgcctccagacttttttccataaatatttgagtggggacaagaggccaagcccagcaaaactatgattttctctgagtagtgacatcgctggcgacatcgctggtgctgttcccctgagaattaggatatatatgcattgtttttttcttttaataaaatcttgaatttttcctcc

SEQ ID NO: 2317 - DNA, 568 bp, Mus musculus
atgacacttggacctttattgcagaaaggagggaagatggagaaacttgtgtgaggattaatagggtagagagagactatgcagggtagatttagatgaacacattaggtaattgtcatgtgaaaatgatactaggctgaataatggcttcacaatgacattcaggccttgggtttggagcccatggtacatattgaataattcctcataattcaaaaggaacttagtaggttagattgaataagatatatttagatgaagaaaatatcttggagcttttagggatcttgatgatgtcataagcatttgtaaaagggaaggagattagaagagacaggacgaggagggtggtggcattgaagcaggggaatattccagtgccaaggaatgatgatctatactgaacagaggatgagaggactcttcttcttgatattttccagctctccctcatcctgcagctgatcctttctcatcttgatcactccatctattccagaacatcaattatcacatagacctaagagctattgtagccccatgtagcttcatgtgtctccttgcctga

SEQ ID NO: 2318 - DNA, 311 bp, Mus musculus
ccccgaaacaggacaccacatttaacccccttacttcccttctccatacctgccccccacacctattttgataagcctttcctccttggaggggaccctaggcctcatcccatgccccaggtggacgcctggcaccgcctccagacttttttccataaacatttgagtggggacaagagcccaaccccagcaaaactatgattttctttgagtagtgacattcctggtgacattgctggtcctgttcccctgagaattaggatatatatgcattgttttcttcttttaataaaatcttgaagttttcctcc

SEQ ID NO: 2319 - DNA, 1937 bp, Mus musculus
cgagcgccggggggcggatacacgcgggatctgagctctgcacccagggatctgattctctgaccgctgcccccacctctgcaacgggggctggtgtgcgggtctgtccctactggaaatggaccagagaggtgaagacaccaccctagcgccacacagcagaatgtccggtgatcagacagctcaggaccctggatccagcctgggagaactggaccagcagaatgtggtgaatcgagtggtggctttgcccctggtcaaggccacgtgcactgccgtgtccagtgcttacaactcggccaaggacaggcacccgctgctgggctccgcctgccgccttgctgagcactgtgtgtgtagtgtgactacctgtgccctggaccacgcacagccactgctggagcacctgcagccccagttggccacagtgaatgatcttgcctgcaggggactagacaaattggaagagaagctgcccttcctgcagcagccatcagacatggtggtgacatcagccaaggatacagtggccaaaagtgtcacaggcatggtggacctggcccaaaggggccggcgttggagtggggagctgaggcgctccatgagtcaagccatggacatggtgctgggcaagtcggagaagctggtggaccgcttcctgcccatgactgaggctgagctagcagtcctggcagctgaggccgagggcccagaagtgggcacagtggaggagcagaggcagcaacagggctactttgtgcgtctggggtccctatcggcacgcctccgccatctcgcctatgaacactctttggggaaactgaggcagagcaaacaccgtacccaggagatgctggcccagctgcaggaaacgctggagctgatccagcatatgcagagaggggcaagccctagccctactttccatcccccaaagactcaggagctgtgggggagctggagcccgtgtctagagaatggccgcagccacagtgaggtggagctggagacactggctctgtctcgaagtttgaccctggagctgcagaatgcagtggatgccctggcaggctgtgttcggggcctgccacctagtgcccaggccaaggtggctgaggtgcagcgcagcgtggatgctctacaggccacctttgctgatgcacactgccttggtgatgtggcacccactgctctggctgagggccggggcagtgtggcccgggcacatgcctgtgtggatgagttcctggatttggtcctgcgggccatgccactgccctggcttgtggggccctttgcacccatcctggtggaacagtcggagcccctgatcaacctggccacctgtgtggacgaggtggtgggtgaccctgatcctcgctgggcacacatggactggccagcccagaagagggcctgggaggctgagtctgcagatcctggggggcaagaggctgagcccccaagggggcaaggcaagcacacaatgatgccagagctggacttctgactatcgaggtctctactgccccctggtggtcatgtgacagcactcacgcaggctagggcttctgttcccttccctgccctggatgattttgaggtctaagtggacctcagcaggtcactttcaacctcataggagaatctccctcccttatgatcctgtccttacccccaaagttgatacatgaggctgaggcaggaggattgagagtctgagttcagtttgagctgccttatcaagattgtctcaaaaacaaacaaacaaacaaacaaacaaacaaggaaaagaaaggtggctggaggaagacctggtgcccacatcatctacctgggggctcagaactcctagaatcaaatgcttttggctggtgtccagagactcaattgctttgctgtttgtggtcctgaataaatatgtttgatgtggtctg

SEQ ID NO: 2320 - DNA, 1338 bp, Mus musculus
  misc_feature 12: n = A,T,C or G
agaacgtggttncgtagactgtcttggaatagttaagcagaatttaagctctgttttatgcagaaaaccagatagattcttttgcagatatagaaaacttcctaacttatttaaacttggcatttaacactttgtgttacttagatatacagttgctaggtactaacatcccattcttctctatatcagggattattacagtcaaactcagtgacatggtacaaatctacaactttgatggtgggaactgaagaattacagagaactgtgttttcccgagtgccaaaagaaacaaaaacaaaacaaaacaaacaaaccccacaaaaaaaagaaaaaaaaaaaaaagccgcgagcctccttgcacaaaattgataggtttttttttgtgtgtatgtgtgtgtttgtgtgtgtgtatgtttaacattagtccatcagttgccgtagtatcacctcccaggtctctgcacaattaaaacacagccacatagcttattttgtcatttacaaccacattgattttttttgaaagatagtctatagtctgtgaagggtataagttaagaaaggagatctggttgtattcaaaaaggcaaaagccaaacttgaattgctgctggggtgatcaatatctgcttccagagagcaataatgtgccacttactcccaggtgcttcagtaccagaaagtgctgtgggactcggtcacctctgtagatgaccgtccttgtcagtgaatgactattgtggaaatgacttgggctccatagtttcactaagtcacttgaggatgtctcatcagcaattatttcaggaaggaaagaaagcaaatctaaagaaagaaactaaatacactgtagcaagaaataactcttcaatcatgctttaactttttaccatagtctcagctatacaaaaaactttagtttgaagattttacattgctgttaatttgaaatctgttgttcttactgtggagtttgatttgttcgtttgtttgctttctgttggtttttttttttttttttttaagatgtttctaaatagattttttaaaaaaaagaaagaagaagaagaatggaatctggttgctattttaaggtagaacctgagactttttgtggttcttcatgtcctctgtaaaatttggtgtcaagagtcatcaactctgaggttgtcccttctgttctgctttatattactgcccatcaggaaatgggaacctggtgaatatataatgaattgtaaaatattttaaatgtgtaactttttcaactgtgaaactgactattggtttttttttttttttgatgaaaacagctgctcataaagtattttgtgt

SEQ ID NO: 2321 - DNA, 3452 bp, Mus musculus
ggcctcccggagaggcaccggcgggcggcgctccctttgtgtgtttctttccaaggtgcaaggacccccacccccacccgcctaggcagtcctcccctaaccaccagccctcttctcgtcgtcctcagtccctgccagctgtgggggaaccagatcgcttccaggaggagggacaaggtcggtagccccctccccggtgcgggacctgagcccagtagagtccaggacctctgctgccagtcatgtgggctagactgttgctccatgtcgcctacatcttgatcccgttgctggggtcttcagcccgaggctataccgggaggaaggcgccagggcactactctgcggagagacgtcgtctggggccccacgtctgcctctctggctttgggagtggctgctgccctggctgggccccttccatgggcagcgggcactgtaccctgcccctctgctcctttggctgtgggagtggcatctgcatcgctcccaatgtctgttcctgccaggatggagagcaaggggccacttgcccagaagcccatggatcctgcggggagtatggctgtgatctcacctgtaaccatggtggctgtcaggaggtagcccgagtatgccctgtgggtttcttgatgactgagacagctgttggtatccggtgtgcggacattgacgagtgtttaagctcatcttgtgagggtcactgcgtgaacacagaaggtggcttcgtgtgtgaatgtgggccaggcatgcaactgtctgctgatcgtcacagctgccaagacactgacgagtgcctgggaacaccctgccagcagagatgtaagaacagcattggtagctataagtgctcctgccgcgctggcttccacctccacggcaaccgacactcctgtatagatgtcaacgagtgtcggcggccacaagagaggagagtctgtcaccacacctgccacaacactgtgggcagcttcctgtgcacctgtagacctggtttcaggcttcgatctgaccgtgtgtcctgtgaagctttcccgaaggccgttctggccccatctgccatcctgcagccccgacagcatcctgctaagatgtccctgctcctccctgaggcaggccggcctgccctgtccccaggacacagccctcctccaggggccccaggataccccactggagttagaacaatcagtcagccatctaccacccaggtcctacccacattctttcccacacagttgatatccactccagtgccaagttcctccccactggggacccttggacccccctcactcctccagggggctgtagggaccccttcctcacctaggggtcctgaaagcccaaagctgggagcagggtcctcttcctgttggcacctgggagccacgtatgaatcaggcagccgctggaaccagcccggatgttctcagtgcttgtgccaggatggagaggtgacctgtggaggagtaaggtgtgacgctacctgttcccacccagttcccccgagagatggggggtgctgcccctcttgcactggctgctttcacagtggcgctatccgagccgaaggggatgtgttttcacctcctgaggagaactgtactgtgtgtgtctgtctggctggaaatgtttcttgtatctctcccgagtgtccccctggtccctgcaaggcttccccacagtcagattgctgtacttgtgttccagggagatgctatttccatggccggtggtacacggatggggctgtgttcagtgggggtggtgacgactgtaccacctgtgtctgccagaatggggaggtagagtgctccttcacaccatgtccagagctggagtgccctcgagaggagtggctgctgggcccaggacagtgctgttttacctgtcgggaacccacacccaccacaggctgctctctggatgacaacggggttgagtttccgatcggacagatctggtcgcctggtgatccctgcagacggctctgtgagctgcaagaggacagactgcgtggactcttgcccgcaccccatccggattcctggacagtgctgtcctgactgttcagcaggctgcacctacacaggtagaatcttctacaacaacgaaacgttcccgtcagtgctcgacccctgtctgagctgcatctgcctgctgggctcagtggcctgttcacctgtggactgtcccatcacctgtacctaccccttccacccggatggcgagtgctgccctgtatgccacgactgtaacttcgaagggagaaaggtagtgaatggtcaggtgttcaccttggatgatgagccctgtacccggtgcatctgccagctgggagaggtgagctgtgagacggtaccctgccggccaatctgtactgacccctcctgcccagattctgtgtttcctctagaagaaaagcagcaaccatcccctcatggagaacttgccaaagctgcacggaacgcccgtggagacactgaagtccctgtcaactgtagctcctgcccggggcctccatcggcatcacctacaagacccatggtccacctcctgcagaggcttttaagaacaaacctgtctaacatacagtctgcatccccaagccctcccatagcccagacctcatcctcacccctgttggagccagagggcatatctcttgggaagcccagagcctcccagccccccgagccctcagcagggtcacctgtctctcctagactgtccactctacctccagccattccagggactcctttgtcacctgtcactccagaaagctcttcttcaacctttgggactcagacagcattccagtggcttctgtctgccacccccttaactgaggcagaaacaccttcaatgaccaatgctgacctctcagagaccctcaccacttcctcgagctctcaaaggctatctgcagctctcccggacacccccaaccctgttccccaacagtccacaattgacaccccaaagaaggagaactctactatctgagtggatcacaatgcccgggacatgccagatagagctctcggctcatggcctcgaatgtggaatgtgtgtgaccacaggggtaaaaccggtggggtgttcagagaagaccttagagtaagatggttcatctataaatcaaggagagaggcaccagaagaaataacccaaacaccccctggctttggactttcagtctccagaattgtgagaacctatgtttctgtttggcccctgccattgtctgtgttggtccccgtggccctggcacactaagtcagcaatgtccaccctcactcgggcagagccatgcctcgggtgatcccatcagcgcatactcttgacattgacgtcatgtgacatccatcctagaagtgtttttggacttgtctgttatctctgtcactatgctttgttttcaacactgatttcatgtaatactc

SEQ ID NO: 2322 - DNA, 3223 bp, Mus musculus
  misc_feature 51: n = A,T,C or G
agtgtttggggtccgggcgccgcagtagcgagcaggccgggcgggccgatngggacctcagagtggcgggaggcgagtggcggccgcggcgcccgtgactactgcctgcgtcccggtaagaccatgaattatggaatttcctaaatgaagcattcaggaatggaatgagagaatgtcacatagaaaataaatgatttttaagttatgtctattaatttgactctagatatatatatttacttccttaataatgcaagaagtctttgtgggaaacagagaagcaaacaattgcattttgtgtgttctaaacagtattggcgcatgaaccatgtcaatgtgcacagagagtttcacacaagtaagaaaagctgtaaatggaatagaagtgaagcacattgcagcaaacactggcactctccaagcaaccatggcttacactttggaattgtgagacttagcacttctgctcccaagggacttacaaaagtgagcattcatatgtcccgtattaaaagtactttgaattcagtttcaaaggctatttttggcagtcaaaatgaaatggttacacggttagctcaatttaagccaagttctcgaatattaagaaaagtatcagataagggatggttaaaacaaaaaaatgttaagcaagccgtcgagtctctgaaaaactatagtgataaatcagcaggaaagaattctttagcagaacagaaaagttactttgcagataaagaagaagattcaggtaaacacagccttttccattacacatacggtataaccaccagatttggagagtcattctccgttttagcaaatcatattaattcctatttcaaaagcaagggaaaaatgtctcaaacaaaggaagataaacagcttcaggacaagccagaccttgaagaaaggaaatccagttctccaggccctgacaccgtggcagacaggccagactcggaatctcccctagaagttaaagacaaactttccagcccgacccagatgcctgaggctcacccagtgtctgcaaaacaaagtattgctaacttcctttctcgtcccactgaaggcgtacaagccttagtcggtggttacattggtggacttgtacccaaattaaagtctgatcccaagagtccgcccgaagaacaggaagtgtctgctaaaacagagcaggctgttaacaaagacaagaaggcagaggagaaaaagcgtgtgctacttcagcaagaaaagattattgcaagagtgagtattgataacagaactcgagccttagttcaggccttaagaagaacagccgacccaaagctctgtattactagggttgaagaactgacttttcatcttctagaatttcctgaaggaaaaggagtggctatcaaggaaaaaattattccatatttattacggctgagacaagttaaggatgaaactcttcaggctgcagttagagaaattttggctttaattggttatgtagatccagtgaaaggcagaggaatccgaatcctcaccattgatggtggaggaacaagaggtgtggttgctctccagactctgaggaagttggttgaacttactcagaagccgattcatcagctttttgattacatctgtggagtaagcacaggggccatattagcatttatgctgggattgtttcacatgccgctggatgaatgtgaggaactctatcgaaagttgggctcagatgtgttcacacagaatgtcattgtcgggaccgtcaaaatgagttggagccatgcgttttatgacagtaacacgtgggaaaagatcctcaaggatagaattggatctgcactaatgattgaaacagcgagaaaccccgcatgtcctaaggtagctgctataagtaccatagtaaacagaggacaaacaccaaaagcttttgtgttcagaaactatggtcattttcctggcaccaactctcactatttaggaggctgtcagtataaaatgtggcaggccattagagcctcatcagctgctccaggctactttgcagagtacgcgctggggagtgatcttcatcaagatggaggtttgcttctgaataacccttcggccttggcccttcacgaatgtaaatgcatctggccagatacgccactggagtgtatagtatccttgggcacaggacggtatgagagtgatgtgaggaatacctcaacatacacgagcctgaagaccaagctctctaatgttatcagcagtgctacagatacagaggaagttcatatcatgcttgatggcctgttgccttctgacacgtactttagatttaatcctgtgatatgtgaaaacatacccctagatgaaagccgggatgaaaaactggaccagcttcagctggaagggatgaagtatatagaaagaaatgatcaaaagatgaaaaaagttgcaaaaatattaagtcaagaaaaaacaactcttcagaagatcaatgattggataaaattaaaaagtgacatgtatgaaggccttccatttttttcaaaattgtgggtagggtacacatgtgttctcataaatgaaggccatcaaaagatccaccagtttagagaggaacggtgtgattcaacatgacacttagtgagttatcctgaatcagataatgctttgaacagctccatcctcatggaagatatgattggtaacacaagttatgtgggaattaggtattaagatgttcataacctttaggcattttattactgtgctagtggttttagtatctattgatcttaagttgtttactgtttgaatgttttaatatatgtgccaaacaagaaatgggggatgttacacttcagcctttgcttttactcgtttcaatcatgtggaatttgtgtgacttgattttctttcatgtctttccatttacactacttagcatttcactaggtgcgcccacaatccatgtgttacttttcactgtaataatcactgaaagagatataggaaatgggattttctttattaaagtacatttatgtttgaaatatgaaaaaactggacagttttctattcaaaaagattgaagaatttccagtgaactaactttttcttgaaatttcaagataatgttcacttttgtagatcaaatgctcttatcatttcctgttacagaattgattattcaattttactgagaaaatattcttatcattaacaaaaataaattattgaagtg

SEQ ID NO: 2323 - DNA, 2506 bp, Mus musculus
cccacgccggccccgcagtctcctcccggtcccacgctgcggcccgctgtggacttccctggtgcagacatggcctcgggctccgcctgcacggcggtgaagattggaataattggtggaacaggcttggatgatcccgaaattttagaaggaagaactgagaaatatgtggatactccattcggcaagccatccgatgccttaattttggggaagataaagaacgttgattgtgtacttcttgcaagacacggcagacaacacaccatcatgccttcaaaagtcaactaccaggcaaacatctgggccttgaaggaagagggctgtacacatgtcatcgtgaccacagcttgcgggtccttgagagaggagatccagcctggtgacatggtcatcattgaccaattcattgacaggacatccctaaggcctcagaccttctatgatgggagtcattgcagtgccagaggagtgtgccacatccccatggctgaaccgttttgccccaaaacaagagaggtcctcatagaaactgctaagaagctaggacttcggtgccattcaaaggggacaatagtcacaattgaggggccccgtttcagctcccgggcagaaagccttatattccgtacttggggcgcagatgttgtcaacatgaccactgttccagaggtggtacttgctaaggaggctggaatttgctatgcaagcattgccatggcaaccgactatgattgttggaaggagcatgaagaagcagtgtcagtggatggggttttaaagaccatgaaagaaaatgccaataaagccaaaagtttactcctcactactatacctcagatagggtcgatggaatggtcagaaacgctccgtaacctaaagaacatggcccagttttccgttttaccaccaagacattaaaacagcatggctgacacaagaagacgttctacttctagtctttgggggattttgcttaaacaaaaatgggaaagatccgcagccttcatgcctttgcctagaaagaaagacactgttagcgactcaaccaagatcccaactcctccgggacccagaaggaaagcagacagcctgccaaacagagccggagagcacatctgtctcactttccctattaaactgacaacaaggattactagtgaaaacatccactaccctacagcgctaaggagccaatacgagctcgagatgggactgtgtgattgtaaactggcgccatgtttccgacacttggtattctaagagtttctcttgaagaagttatgagatattccttcaaagaatcatgtgtaaagaagaatattacctgccatagtaaaataatcaaaactatctgaatatcaaaaaaaattagctgtgccgtgtttccgttatacttaggttatggagcaatcaagtggaaatcatgtttcctcacgaagaaatgattaatctttttctctacttttaaatataatcaaataataaagctgtaaaaattaaaatggacttagagaactttgaaactcctttggtggtgaagtgaagacaacaacaataatataactgcgctgtgtatgtgaatcaagatatataagccaaataaccccctttcccaaataaagaaataaaggaaaatgctgtgtgaggagcttactaaacctttgctaagaaagatcctgggtcaccacacagctaagatgatgtaactgagaaagccaaggccggtgtttaatgcaagccagtgtgactcatcacagtgtatcgagagttgacacataatcagttggcaatttttttcttttgtttaaaagaagaaagtagaagcctaactttttatttttcaaattactgttgttacaggtgccctacagcgcccgtaaagggtctgtaaagtgagtgtgcctgtgtctgaaattgacttcaagataataagctgttgattgtaagcaataaatgaattatttgctccagtgttaatgtcgagcgaggccctggataagtgcaattgttacttccgcccatgttgcagtgctcccatctctggctgtaagcagtccgtggagactccgtgaggcctgatcagggctttaggttgtttttactcactgcagtgtcaacacttctttccccttagccactgcggggtgggcatccgttttgttgcctttagaaaatgctgctctcttcaacatggagaatgactttcttcagtggcctttctagcatcatgtgcaggcttcttccccttttccttaatccttcatcatgatgaaacatgcatataatcactgggtctggctcaacatgatgctgtccgttctgtccatcttcctacgggtatcgtaattccattctttttctgacaagatgaaatctccttgtgtatcctttccgcatccttatccatgcatgtgttgatggacgtgtgggctgctcccataatgtacctgttctgagtagtgtttcaataaacatcagtttgcagacttctcagatgatcagg

SEQ ID NO: 2324 - DNA, 4597 bp, Mus musculus
cctccttaacactgtcctcctgtcctttcttaccacaccatgtggaagagcagacgggctcagttgtgccttttttcggttctccttgccttcctgcattctgcttctttactcaacggagactcgaagtatatggtgctggtcccttctcagctctacactgagacccctgagaaaatctgcctccatctataccagctgaatgaaacagtgaccgtcacagcttccttggtatctcaatcaggaaggaaaaacctgttcgatgagctggtgcttgacaaggacttgttccaatgtgtttccttcattatccctagactctcctcttctgatgaggaggattttctctacgtggacatcaaagggccaacccacgaattcagcaaaaggaaagcagtgcttgtgaagaacaaagaaagtgttgtctttgtgcagacagataagcccgtgtacaagccaggacaatcagttaaatttcgggttgtctccatggataaaatgctacgtcccctgaatgagttgcttcctctggcttacattgaggatccgaaaaagaaccgaattatgcagtggagggatattaagactgagaatgggcttaagcaaatgtccttcagcctggcagcagagcccattcagggcccctacaagatagtggtgcacaaagagtcaggggagaaggaagaacactcctttactgtgatggaatttgtgcttcccagatttaatgtcgacctgaaggtcccaaatgccatgtctgtgaatgatgaagtgctcagtgtgactgcatgtgggaaatatacctatgggaagcctgttccaggacatgtgaagataaacgtctgccgtgagactgagactggatgcagagaagtcaattctcagctagacaacaatggctgcagtacacaagaagtgaacatcactgagctccaatcaaagaaaaggaattatgaggttcagcttttccatgtgaatgcaactgttacagaagaagggacaggattggagttcagtcgatctggaacaactaaaattgaaagaatcacaaacaagctcatatttctgaaggcagattcacacttcagacatggaattccattctttgtgaaagtccgcctagtggatatcaagggagaccctatcccaaatgagaaagtcttcatcaaagcacaagaacttagctataccagtgctactaccactgatcagcatggcctggcagagttctccatagataccacatgcatctcgggctcttccctccatatcaaagtcaaccacaaagaggaagattcatgttcctatttctattgcatggaggaaagacatgcaagtgcaaagcatgtggcctatgctgtttactccctcagcaagagctacatctaccttgacacagagaccagcagcatcttgccctgcaaccagattcacacagttcaggcacattttattctgaagggggacttgggagtgctgaaagagctcattttctactacctggtcatggcgcagggaagcatcatccagactggaaaccatactcaccaggtggagccaggagaagctccagtaaaaggaaaatttgccttggagatccctgtggagtttagcatggtccccatggctaaaatgctcatctacacgatcttgcctgatggagaagtgattgcagattctgtaaactttgaaattgaaaagtgtcttcgcaacaaagtggacctgcgcttcagcacttctcaaagtcttcccgcctcacaaacccgtctgcaggtcacagcttctcctcagtccctctgtggcctgagagctgtggaccagagtgtgctactcctgaaacccgagtctgagctctccccttcctggatatacaatctgccaggtatgcagcaaaacaaattcgttccaagttcccgtctgtctgaagaccaagaagactgtatactgtacagttcatggttggctgagaagcacacaaacttagtaccacatggaactgagaaggatgtctatagatatgtggaggacatgggtttaacagcattcaccaacttgatgatcaaacttcctataatttgttttgactatggcatggttccaatatcagcacctcgtgtggaatttgatcttgcatttacccctgaaatttcttggagtttacgcacaacattgagtaaaagacctgaagagccaccacgtaaagatccatcatcgaatgatccacttacagagaccattcgaaaatattttcctgaaacctgggtctgggatatagtcacagtaaactccacaggactggctgaagtggaaatgactgtccctgacaccatcactgaatggaaggcaggagctctctgcttgtccaatgacactggccttggcctctcttctgtggtacctctccaagccttcaagcccttctttgtggaggtctcattgccctattctgtggtccgtggagaagccttcatgctcaaggccactgtgatgaactatctccccacaagcatgcagatgagtgtgcagctggaagcctctcctgatttcacagctgtcccagtgggagacgaccaagattcttactgcctcagtgccaatgggaggcacacctcatcctggctggtaactcccaagtctttagggaatgtgaatttctctgtgtctgcggaagcacaacagtcctcagagccctgtggttctgaggtggccacagttcctgcaactgggagaaaggacacagtagtcaaagtcctgatagttgagcctgaaggaatcaagcaagagcataccttcagctcactgttctgtgcatcagatgctgagatatctgaaaaaatgtcctctggtcctccaccaacagtagtgaaagattcagcaagagcccatttctctgtgatgggtgatatcttgagttcagccataagaaacacacaaaaccctctccatatgccctatggctgtggggagcagaacatggtcctttttgctcccaacatctacgtactgaaatatctgaatgaaacccaacagctgactcagaagatcaagactaaagcccttgggttcctcagagctggttatcagagagagctgaactacaaacacaaggatggctcctacagtgccttcggggatcaaaatggcgaaagagaaggaaacacttggctcacagcctttgtgctcaagtcttttgcccaagctcgagccttcatcttcatcgatgaatcacacatcacccatgccttcacctggctctcccaaaagcagaaggacaatggctgcttccggagctccggatcattgttcaacaatgccatgaaggggggagtagatgatgaaatgaccctctctgcctacataaccatggcccttctggaaagttcactcccagccacgcatcctgttgtctccaaagccctgagctgcctggagtcatcctggaagaccatagaacaagaacgaaatgccagctttgtgtacaccaaggctttgatggcctatgcttttgctctggcggggaaccagaataagagagatgaaatcctgaagtcacttgatgaggaagctataaaagaaaacaactctatccactggaaaagacctcagaaatccaggaaatctgaacaccatttgtacaaaccccaggcttcctctgctgaagtagagatgaatgcatatgtggtcctggctcgcctcactgcccagccagccccatcccctgaggatctgactttgtcaatgagcaccatcatgtggctcacaaagcaacagaattccaatggtggcttctcctccacacaggacactgtggtggcccttgatgctctgtccaaatatggagcagtgactttttcgagaagtcagaaaactactttggtgactatccaatctacagggtcattttcccaaaagttccaagtggagaacagtaatcgcctgttactacagcaggtcgcattaccagacattcctggggactataccatcagtgtgtcaggggaaggatgtgtgtatgctcagactatgctgagatacaacatgcacttggagaagcagctgtctgcatttgctatatgggtacagacagtacctctaacttgtaataaccccaaaggccacaacagcttccagatctcactagaaatcagttacacaggcagccggccagcctccaacatggtgattgctgatgtgaagatgctatctggtttcatcccattgaaaccaacagtgaaaaagcttgaaagattagagcacgtgagcagaacagaagtgagcaacaacaatgtcttaatatatttggatcaggtgaccaatcagacactggccttctccttcatcattcaacaagatatcccagtaaggaacctgcagcctgccattgtgaaagtctatgactactatgagacagatgaaatggcttttgctgaatacagcagcccctgcagcacagacaaacaaaatgtttgaaactcctatttgtagacaaggcattgctggaatccccagacccaggaaccttcaagatggtgatttgtgtttgtctctgaaatacaactactgaacaagcttgataaataaatgcctagtcctcgag

SEQ ID NO: 2325 - DNA, 2259 bp, Mus musculus
atgcagttcttcggacgcctcgtcaacaccctcagtagcgtcaccaacttgttctcgaacccattccgggtgaaggaggtgtccctgactgactacgtctcaagtgaacgtgtccgggaggaagggcagctgatcctgttacagaatgtctccaatcgcacctgggactgtgtcctggtcagcccgaggaacccacagagcggcttccggctcttccaactggagtctgaggcagacgccctggtgaacttccagcagttctcctcccagctgccgcccttctacgagagctctgtgcaggtcctgcatgtggaggtgcttcagcacctgaccgacctcatccggaaccaccccagctggacagtgacacacctagccgtggagcttggcatccgggagtgcttccatcacagccgcatcatcagctgtgccaacagcacagagaatgaggagggctgcaccccactacatctggcctgccgcaagggtgacagtgagatcctggtggagctggtacaatactgccacgcccagatggatgtcactgacaacaaaggcgagactgccttccattacgctgtgcaaggggacaatccccaggtgctacagctcctagggaagaacgcctcagccggcctgaaccaggtaaacaaccaagggctgactccactgcacctggcctgcaagatgggaaagcaggagatggtgcgcgtcctgctgctctgtaatgcccgctgcaacatcatggggcccggtggcttccccatccacacagccatgaagttttcccagaaggggtgtgctgaaatgattatcagcatggacagcaaccagatccacagcaaggatcctcgctacggagccagcccactccattgggccaagaacgccgagatggcccgaatgctgctgaagcggggctgtgacgtggacagcactagctcctcagggaacacagccctgcatgtggcggtgatgcgcaaccgctttgactgtgtcatggtgctgctgacctacggggctaatgcaggtgcccgcggagagcacgggaacacgccactgcacctggccatgtcgaaagataacatggagatggtcaaagccctcattgtatttggggcagaagtggacaccccaaacgactttggggagactcctgcattgatagcctccaagatcagcaagcagcttcaggatctcatgcccatctctcgagcccggaagccagcgttcatcctgagctccatgagggacgagaagcggagtcacgaccacctgctctgcctggacggagggggcgtgaaaggcctggtcattatccagcttctcatcgccatcgagaaggcctcgggagtggccaccaaggacctcttcgactgggtggcaggaaccagcacagggggcatcctggccctggccattctgcacagtaaatccatggcctatatgcgtggtgtgtacttccgtatgaaggacgaggtgtttcggggctcacggccctatgagtctgggcccctggaggagttcctgaagcgggagtttggggagcacaccaagatgacagatgtcaaaaaacccaaggtgatgctgacagggacactgtctgaccggcagccagcagagctccacctattccggaattacgatgctcccgaagccgttcgagagccccgctgcaaccaaaacattaacctgaagccaccgactcagcctgcagaccaactggtatggcgtgcagcccggagcagtggggcagccccaacctatttccggcccaatggacgcttcctggatggagggctgctggccaacaaccccacactggatgccatgactgaaatccatgagtacaatcaggacatgatccgcaagggccagggcaacaaggtgaagaaactctccatagtcgtttctctggggacaggaaagtcccctcaagtgcctgtaacctgtgtagatgtctttcgtcccagcaacccttgggaactggccaaaactgtttttggagccaaggaactgggcaagatggtcgtggactgttgcacagatccagatgggcgggctgtggatcgggcccgggcctggtgcgagatggtcggcatccagtacttcagactgaacccccagctagggtccgacatcatgctggacgaggtcagtgatgcagtgctggtcaacgccctctgggagaccgaggtctacatctatgagcaccgagaggagttccagaagcttgtccagctgctgctgtctccctga

SEQ ID NO: 2326 - DNA, 1626 bp, Mus musculus
cccacgcgtccgagacgagagagcaggagacgccgcctgactttttttttatttctctgactatgagaggcacaatgcggagatcgctgccttccacctggacaggatcctggatttccgcagagtccctccagtggctggtaggatgatcaacatgaccaaggagatccgggatgtgacgcgggataagaagctatggagaactttctttgtgtctccagccaacaacatctgtttctacggggagtgttcctactactgttccaccgagcatgccctgtgtgggaggcccgaccagatcgaaggatccctggcggccttcctgcctgacctgtcgctggccaagaggaagacatggcggaacccctggcgtcgttcctaccacaagcgaaagaaggcagagtgggaagtcgaccctgattactgtgaggaggtgaagcagacgccaccctacgacagtggccaccgaatcctggacatcatggatatgaccgtctttgatttcctcatggggaacatggatcggcatcactacgagacctttgagaagttcgggaatgagaccttcatcatccacttggacaacgggcgcgggtttgggaaatactcacacgatgagctttccattctcgctcctcttcatcagtgctgcaggatcaggaggtccacctacctgagactgcagctgctggccaaagaggaacacaaactgagcctgctgatggccgagtccctgcagcatgacaaggtggcacccgtgctctaccagctgcatctggaggccctggaccggcggttgcgcatagtgctgcaggctgtgcgagactgtgtggagaaggacgggctgagcagtgtggtggaggacgacctagccactgagcacagagcctccacggagaggtagtgaccaggctgcccatgaggaaggaggagcacagagcctagccacctgtgaattcagtgaattcggacgggatcggtcatccccatagggtgacctgcggcagggagcatggggtctccctcatggttctgatagggatgtatgggcctccaattccagcagaaaccagacaaagcactctgaacatgcagcagagtggccagcgctccgtccttcccatagggagggacctttaactcactattttgtacttaacaaaaggctcacactcctgttaatggagaaccatccagcagaccagagataacctctgagccacttcaaggaccttctatgatgtgatcacactctggcccccaattacaacccaccttctgctcctctatcctggggcctcctctctcaaagactgtagagctctaggaaggggagacagcgatggacatcatggcctgtgtcggagcagatgggcacccaagaatgggtttttggataccaatgaccagctatgcacttgtccgctgctgcagagcagtcagccttattagttggtggtgggcaccgcctgccttggctgagctttggacgatgggtgtcaagacactacacagagcccattggccccaggccagcaggccagccttgggacatttttgtggagtagtttgcagtgagataacagtgcaataaagatacagcaagcgtgaaaaaaaaaaaaaaaa

SEQ ID NO: 2327 - DNA, 939 bp, Mus musculus
cccacttgagtgcaaggctaatctctgtgcagaggcaccgcccactccgcctccaccggccccgcggctccgcagccctgcgctcccggcctggtttgcacagcctcaccatgagctcttctgcagctagcccgctcttcgcgcccggcgaggactgcggccccgcgtggcgcgcggcccccgcggcctatgacgcgtctgacacgcacctgcaaatcctgggcaagccagtgatggagcgttgggagaccccctatatgcatgcgctagcggcggctgctgcctccagagggggccgggtcttggaagtgggcttcggtatggccattgcagcctccagggtgcaacaggcccccatagaggaacactggattattgagtgcaatgatggggtcttccagcgtctacaagactgggccctgcggcagccacataaggttgttcccttgaaaggcctgtgggaggaggtggcacctaccctgcctgacggtcactttgatgggattctatatgacacgtacccgctgtctgaagaggcctggcacactcaccagttcaactttattaagaatcatgccttccgcttgctgaagaccgggggcgtcctcacctactgcaacctcacgtcctggggggagctcatgaagtccaaatacacagacatcaccaccatgtttgaggagacgcaggtgcctgcactgcaggaagctggcttcctgaaagaaaacatctgcacagaggtgatggcactggtgcccccagccgactgccgctactatgccttccctcagatgatcacacccctggtcaccaagcactgagcagccggcccaggtctacaaggagcctgtgtcctcctcagtacctttgtggctggattgtgggctccagctctccactgtccctgcagtgtgacatcctaacctctgcctggcactg

SEQ ID NO: 2328 - DNA, 5135 bp, Mus musculus
cacagacaagtctggcagaaggaaccaaagccaggagctcacagagcaggaaaatgaggttcctgtctttctggcggctcctcctctaccacgctctgtgcctcgccctgccggaggtttcagcccataccgtggagctaaacgaaatgtttggtcagatccagtcacctggctatccagattcctatccaagtgactctgaggtgacatggaatattactgtcccggaggggtttcgaatcaagctttacttcatgcacttcaacttggaatcctcctatctttgtgaatacgactatgtgaaggtagaaacagaagaccaggtgctggcaaccttttgtggcagggagaccaccgatactgagcagacccccggccaggaagtggttctttcgcctggcaccttcatgtctgtcactttccggtcagatttctccaatgaggaacgattcacaggcttcgacgcccactacatggctgtagatgtggatgagtgcaaggagagggaagatgaagagctgtcctgtgaccactactgtcacaactacatcggtggctactactgctcctgccgctttggctacatcctccacacagacaacaggacctgccgagtggaatgcagcggcaatctctttacccagaggacaggcacaatcaccagccccgattaccccaacccttatcccaagagctcagaatgttcctataccattgacctggaggaaggcttcatggtcagcctgcagtttgaggacatttttgacattgaagaccatcctgaggtgccctgtccctatgactacattaagattaaagctggttcaaaagtatggggtcccttctgtggagagaaatccccagaaccaatcagcacccagactcacagtgtccagatcctattccgcagcgacaactcaggagagaaccgaggctggaggctctcctacagagcggcaggaaatgagtgcccaaagctacagcctcctgtgtacgggaaaatcgagccctcgcaggccgtgtattccttcaaagaccaagtgctcgtcagctgtgacacaggctacaaagtgctaaaggataacggggtgatggacacattccaaattgagtgtctgaaggacggtgcatggagtaacaagatccccacctgtaaaattgtagactgtggagctcctgcagggctgaaacatgggctagtaaccttctccaccagaaacaacctcaccacatacaaatctgagataaggtactcctgccaacagccctattacaagatgcttcacaataccacaggtgtatatacgtgttctgctcatgggacctggacgaacaaagtgctcaagagaagcctgcccacctgccttccagtgtgtggtgtccccaagttctcccggaagcagatctccaggatcttcaatggccgcccagcccagaagggtaccatgccatggattgccatgctgtcacacctgaacggacaacccttctgtgggggtagccttttaggttccaactgggttttgacagctgctcactgcctccaccagtcacttgatccagaagaaccaaccctacacagctcatacttgctcagcccttctgacttcaaaattatcatgggaaagcactggagacggcgctcagacgaagacgagcagcacctgcatgtaaagcgcaccacgctccacccactgtacaaccccagcacgtttgagaacgaccttggtctggtggaactgtcagagagcccgaggctgaacgactttgtgatgcctgtctgtctgcctgagcagccttccactgaaggaaccatggtcatcgtcagtggctgggggaagcagttcttacagaggtttccagagaacctgatggagattgaaatcccaattgtaaactctgacacctgccaggaggcctataccccattgaagaagaaagtgaccaaggacatgatctgtgccggagaaaaggaaggggggaaagatgcctgtgctggtgactctggaggccctatggtgaccaaagatgcagagagagaccaatggtacctggtgggcgtggtgtcctggggtgaagattgcgggaagaaagatcgctatggagtctattcttacatctatcccaacaaggactggatccagaggatcactggggtgaggaactgagttcgaatcccagcccaacacctgctgtatggtcagtcaccaacagaagatcagtgaatgcaagcaacctttcctccctggtcctcagtcttcactgctcattcctgggtgatactgggattcgttgaaccacctttccctggtctttatagaggcagagtagcaaagcagccaggctggatccaggctccatcactcaaaatttttgtaatgatggacagctgactgcctctttgggtctgttcttcaaccatgagaagcaagtggtcagaccttatctacctcacaaaaccgtgctgaggagaaagttaatacatacatagtacttagcctagtgtttgacctaaactatgttttctaaaaactgtgacttagcaaaaggcgtctgtgtccacgaggcaggtggatggtcccttataaactcttgatagggtcttagggatgattagtgccacccctccaccaccctcagcccttgctttaatctgtccccaaaagtctaagctttttcactaaatgccatcctcctaagcccagccccattccccataaaaatgcaaacaaaatacaattctcagccctatgacgtgaccccagttacacagccagcaatgtcgttcggcacttgagctaagtaccaaatggtaagagaagcgaggctgagaggaaatgggggttgtgaagtcttatcaacccttgtctctcatgggaccctcactacaagtcttttcttcttgttttgaaggtacttatcagccctgacattctagaatccaagggagtcgtgtcccctgtgatgagttagattcagagtaattcaaaagaaaaatgttcattaggttcaaaagacaaaattttcctgctgtccctaaaattcccacagtgatccaccatactcaagtgcagccaaagatcttccccttgctctaaatagagtggctttcctgagccccatcccccttctcgcctctaagcatgggcagcagaaggcaggccctggcaggctcctctctctctctctctctctctctctctctctctctctctctctctctcacacacacacacactcactctctccttctcgctctccgcatcccgctctctgcatcccagctgagcttaggttgccaattctctgattcctgtcgctttgtctcaccaaactgagaacactgtgtttgcataagtttttagaaaccttatccaagacaagatttttgaacaaacagaagcccaaccctgaatttctgtgtatgagaattgttcttcatagaagactttgaccctcgacctgtattgctgctgctagtttccataaaaatctctggtaagtgaggtagacagtgaggaatgagggcttgtgggtataaagcccaaggctccacactcagggacaacactttgccccactacccctctgagcatgtcactctattcctacacgcttgactactattcgaagagatggccgggacccaacaatcagatacttctcaaggaagctgctactctattttagttcctgatgaagacttttgatgcagttttgaaactgctttggaggcaatgcgccctgccccctccacagctcttgctgagcagtctgttatacaggtcatagtgactgctgctgtggcctgctgcagtgagaaacatatgggtcatggcttccagacattcctggtggaactgtgacacacatgtgacttctatatggggatgacccctgacaagtctattttagagaggcatggagatagaaaaaaagcccaattttgtacataatttaaggaggggaacgccaagaatcagcctagagggtgatgaccttcagaaagtgagcatttctgcaagtgaggccaaggaaactcttctaaaaaaacaggagtctgcatccactcagataccaccagcccctcccatagtaatgatatttccagaaaaccagcattcaacatgagaaccaacatctaaacaggcctttctccaaaaatcttcatccagaactaaaatagcgtatttatccttatcagaacaccagcgctttaaaagcttcaggtttcccatgcagataccaacttctggctgggcacaatttattctatttatcctccaaattatgacttcatcttgagaaaaataactaaatataccatggaacttgaaccttgtcctataaatgcctgtgacatgatgtgtactcaaaccattcttactcatggtttgagtaagaatggcccccacaggctcacatatttgtatgcttggtcactagagagtgttgatatttgaaaagatcagatgtcaccgtacaggagtggagtggccttgtggaggaaatgtgccactggaagtgggctttgaggttttcaaaagcccaaaccaggctcaggggctctcttcctgctgcctgtggataaagatgtaggagttttggccaattctccagcaccatgtttgcctgcatgccaccatgctcttgccatgataaaaatgggcaaaacctctgaaactgtaagccagccccatttaaatgcttttttttttttgtaagagttgtgtggtcacagctgtctcttcacagcaatagaacactaagacagaaatctagtttctattatggtccaagaagcctgatcacctaaaactagagacacagaaggaaggtatagccatagagtctatcttgtctaaattcataaccttatgccaaccgactcactaccttcacatccagccagttcctaagcaactctaaaatgtgctgcccataaaaaagcctgtcttccaggcaactgaaatctacctcccgagaaattaatttgtataatgaaagctgtgattttatactgcgagcactggtattagcagtgatgatcatgcctgggattcattagtcaaagaagttgttattcttatgggaaactacacattcgttcaataaacatctgcattgagtcaaag

SEQ ID NO: 2329 - DNA, 315 bp, Mus musculus
tctgcgtccagtcgtccttggatgacttcattgacaccctcaatgcctaacccttccgcaccgcccttcttcatcgttggactccctccatttctcctcgtccacattgctgttcaagtacctcggaagcaccctcttctcaaccgaactagttcctggtgcttgagcacccagttctgcagctctgagcggaagatccccactgaagctaatgagagactccagctctaaacccctttcttaaggagatcggcttggaaagctaactcacctgtatttattgtttaaatagaaataaacccactgttgcttacc

SEQ ID NO: 2330 - DNA, 1992 bp, Mus musculus
tctgaagacgtggtcgccgaccataccgaggatgatagaagtggctgcccaccctggtctgcctgggaggacgataccaagggctctaccaagtacaccagcctcgccaactcagccagcagctcccgctggagcctccggtcagcgggaaagctggtcagcatcaggcgacagagcaaaggccacctgacagagacctgtgaagagggagaatgaaccgaaggcgcatcacattgctttatggttggcaagcccgccagccgcctactagtgcaccattaattcttgagccctctcatacccggggaaggaacccactgagttgctagtgtttcgtgctcagtgacccacacacaccatggcttccgggtgacatctggttgccttgctgcggaaacatccacccactgggtgcatatatgctgaatggatgtgtgcgctgtagacactgtcctgtgagccagtctcctctaagttcatgccagcctcagtcacttgagattttaggacgtccccatcttgtctctgcatgcaacatgagtgttgtggctatctgaacatggcctctgtggcacctctccccttgtcagaacgcaagaagcatcttccgaaggttacagtaattcagtgtaacaatagattcatttttcctcattcagttacaaacgaagcaaaatctagatgctggaagcaactgaaggtggtttgaggtagggtgtcaggacatcttgaggggcgcatctgctgaggaggagtggcctgcagtgtgggcctgggtagcaagtagttcttttatggaattctatttttacttttgaacgtttaaatacagatctttattttcttcaaataaatgttgattttaaacttaaagatggaagaaacactaggaataagttttagtcacccagtaatcttgactttgcttggaaaacattaacttgcttactgtagcgttaaactgtggataaaacactgaagtgcctcgtttctattctcagatgcttagtttttcaaaatgaaaaacttttatgattgatgtgaagtctataagaagtgtctctaccccctagttctgcctgtctcacactgctgactgtcctcggttgcggtctcagtagggaatgttcacgtggtgcgcatgtttgtcttgttttccagttacagtgcttggacaggggagccgtggttctctttgttttggttaataatgaaaagcctccagtcacactgtcctcgagtctccacagtgtaagcagtgtgcttcgtgtacctgcgtgtcccacgcaatgttctgtggcacagctgagtggcccaggtttactagatctacctgtcattcacagctacctgtctgtctaccacccagcttgccagccacccgtacccatccacctgtccacacatcagtctgtccacccataaaccaagctattaatcttctaacaatagaacaataagtttacttagtgagctttgagaggagggttcaaataaaaaattgttaacacctggaagttgtgaaattatggagattttgattcataatgcaaagcatgtaatttttactataacatgtgagtgtgaaaatctctatcctcaggtaaccggttgagtgcatgagctctgacttcgaaacgaggtaactgtaggatcggaaggaagagcaggctcatgctgtcgcccacagcaggaccccactggtgtgtctggctaaccacctgtggcccaggaatacaaacccagccttgagaatgtagggaaggagctcttgaacacaacacagcctctgtctgtgtctactgggcctgtgctgagtgctaagtgcctgtagctcactgcacccgtgtgcctgagatgcagtgttgcacgttgacacagggacttttaccctgtctcctctcaggaggtgaagatgcactgtaaaccagaaagattaattacaaatgatttttttcttctgttgtatcaaattaaaatatcttgtgttcg

SEQ ID NO: 2331 - DNA, 347 bp, Mus musculus
tcgtcgtagaattcacagagggaggttccctcccaccttgcttccagtgatgcttatgaggccaggaagaagcgtctaacccctcccgacaccattacacctactccaggcaccgtgccctgtgacctgcggcagtcggcctggaaagcagtctctgctgcggttggttctgcattagatgcttccgtgcagctctgcaccggccacccaacagatgactgtttactgtggtgtctatttctgacttgcccataactgtgtatatccaacaaactgcttccagtgaagaattttgtatataatggcaaatttccttgagtgtggtaaccagagagtgacctttaccg

SEQ ID NO: 2332 - DNA, 1815 bp, Mus musculus
gacactctgctctctccgtccagatcaaaaagggagatctcaactgctctggtttcatgatctacaacccttgaaaacaaaacatcaaaaagggagatctcaactgctctggtttcatgatctacaacccttgaaaacaaaacgtaagtccaatgaaatgctttcttttataagttgctttggttgtgatgttttgtatcagcaatacaaagtaaagaataaactgcctgttagggaggtttctgcttatttgggtgagcttcctgtttgttattcccacaataggtagatttccaacataggagaagcaatagtaacttctcttggcaatagttgttctagctggtctcaaggacaaaatgttttgaatagctttaactcttctctatgccttgtctccatttcacaaggataaaagaggggtagtctctcttaggaaagcatcttaaaggacatttgagataaacatgcttgagtctaaagtcaaaggacggggctgaatctcagatttggatatcaatatgtgtaaacagtgcatgtcaatttaccaccagaagcagcaataagatatgacttctgcttatatatccttctcaacctcttactcactatatgagggtgctcacatcaaagcttccatatcttagcataggaaagggcactgcccttataaatgtgttaagtgtcatttatcacatttttgtgtgaaggatatatctatacattgcatctatatccacagagtctgagcaggcaggcagctcctgctgagagaacagaaaagtaaggtacagcataaacagatagtatcaaagacccatcacaggagggaaggtggggcaaaaggtaggatgccttgaatataagtatagatgcaaatttaaagcattatatgatataagcaagttgtatcttcatgattagaatcaagaagcaaaagtcggctgggactctatagtatacaaatttatccatatactataaatgaaaatagggtagaaagggacgaaaagaggaagggaagtagtaagagagagaaacatccatcacttgaaaacaagccatgtatatcatatctcatccaggactggctcttcctgaagcttatcctactccctttaagaagtcttcctaaaacacttccttttgcttctgcctaccctttccagagaatctctagcctgttggggagagttaaattcttgtccaggacacctcttagacttgtctttgattatcccctaaactattgatcctccaagacatctatctagacttcagtaaaaaacctgatgacctaggattaaaaaaatatgtatctaaatgagaatttcatgaacttactgaagacaagaattaacggataatgtgtttttgaaagacgttttgtctccatgttgaatatgcttcaacagggttgggcaggcctaaccttatggcttcgctacttgtagtacacatggcctcctccttctgatgattacacttcttggctgagggtatcctctacaggtgttccaagtttaggcctctctaatatttggggctctgtattgcagctcatattcaccatcatagccctgtgcatcagtattgtcaggtttcccaaagggaatccaatcttactacatattactctcgagttcacggtctttctttaaaatgtagataaaagcttcaaagataccagaactcttgcattgtataagaaattagcattatgtaaaggatgccaagttctgctgtaaaatcaaggagcagctactcactactagaccaacctgcaaaggtagtgtcacacacacagccttttgt

SEQ ID NO: 2333 - DNA, 2191 bp, Mus musculus
ggagtgtcaaggcgctgttggaggtgtcagtggagaggcggcagaatgagcgaagcggacgggctgcggcagcgtcggcccctgcggccgcaggtcgtcacggacgatggccaggtcccggaggtcaaggagggcagttcctttagtggcagagtcttcagaatgaccttcttgatgctggctgtgtcccttgccattcccctacttggagccatgatgctgttggagtcccccatagatcctcagagtttcagcttcaaagaaccccctttcatgtttggtgttctgcatccaaatacgaagttgcggcaagcagaaaggctatttgaaaaccaacttagtggaccagaatccatagtaaatattggggatgtgctgtttactggtacagcagatggccgagttgtaaaacttgaaaatggagaaatagagaccatcgctcggttcggttcaggcccttgcaaaacccgagatgatgaacctacctgtgggagacccctgggcatccgggcagggcccaatgggactctttttgtggttgatgcgtacaagggactgttcgaagtaaatcctcagaaacgttcagtgaaactgctgctatcctctgagacgcccattgagggcaagaagatgtcctttgtgaatgacctcactgttactcgggatggaaggaagatttatttcacggattccagcagcaagtggcagagacgagactacctgcttctggtgatggaggccactgatgatgggcgcctgttagagtatgatactgtgacgaaagaagtgaaggttttgttggaccagttgcagttccctaatggagttcagctctctcctgaggaagactttgtcctagtggcagagacaactatggccaggatacgaagagtctatgtgtctggcctgatgaaaggaggggcagatatgtttgtggagaacatgcctggatttcctgacaatatccggcctagcagctctggcggatactgggttgctgctgcaaccattcgtgctaaccctgggttttccatgttggatttcttatctgacaagccttttattaagagaatgatttttaagatgttcagtcaggagacagtgatgaagtttgtgccacgatatagcctggtcctagaagtcagtgacagtggtgccttccggagaagcctgcatgatcctgatggacaggtggtcacctatgtgagtgaggcgcatgaacatgatggatacctgtacctgggctccttcagatctcccttcatctgcagactcagtctccagtctatttagccagcccagcagctgcccccactgtgcatgccagaaatcatcacactcagtcacataggtctggaaggagccatggacatatagctctgtccctgtgttcctgctagtccttggaagtgtgggagtagctgctgtaacctggagaaggtatgaaccttacccatactttctcccaagacgtgcctctcacctggacttgatgtcatttttagagggaaatagtgtatctgctatggggaagacaaatcatggaaagccatttctctttaaaaaaacatgctaagtacaagaattctctagtacctggaaaatttaatacacctgtgacagggctcagggtttgatgattagagcaggggattagctgtgcagggacctttgtattgccattggctctatctgacacttgtatcttcattctaaagggggtcatgcttttgggggtggtattgcggtatgccatggaagtggtaatgcatgtgttgaggcagggattattcaagctgaaacttgttctcaggggccgtgtgagatgtgtgagaatacctggacttctggtatttctccacagaaaaggtgtgctctcccaccctctacaagcctctttccatgccagagggttttcaagactcctgttttagtggccaggaggatttcattgggtttctttctgactgccttctccactggaattgggtgacccagtgagtttgtacctgcacaggggtgttttagaaatgcccttttatggcttgattccttttagacctacagatgtgattagtgaactgttgatgtaatgtttgtgctaatgtaataagctcaaagttgcttatttcttggcaagtatgtttatacactggtcttaattttgataataataaatcatattaaaccc

SEQ ID NO: 2334 - DNA, 867 bp, Mus musculus
ggcaatccccgacgctggtaccgcccgccggacggacgaatcccctgctgcgggccaggggaggtccccgagcggctcctcgccaaggaaagcaaggaatcttcaaagtcccttgccaacgatttggatcctggtgctgacaatgttgcctaagcctggggtctattactttccctgggaggtcagtgacggccatgtccccgaaggaagcacactgcgaacatttggcaggttgtatctctatgacatggcacgctccctcatgaccctggcagctccgcagaaacctgatcagtgtcaactgcttgtctgcaccaacttggtggagccttttgaggcacatgtgaacttcctgtacatggttcttggggacctggagcgaatggagggtggagcttttgtggtgagggcccgactgctcacctgtgtggaggggatggatttgtccctgttagagaaagccatcttggagcagaggcgtcacctgcagaagaggcagcagccaataggagacgccagcaccttgcaaacccctacacctgctcctcaatcgattcccagtgacagccttagtctggaaccagagaacagggggcagcaggtgccccttccccaaactctggactgagcagaaagcccacccaatctggccgtagtggcccatgctgcaatcccagtgcaggcagggagaggcgggaagaggtggagtttaaagccagtctgagctacataacacatatgccctctctctctcaaagaagaagaagaatgaaaatgaatatgattccctaccccagggccctggcgctgtggcttgtgagggatgtgaagggttcctgaatgcctcatgaataaagagtataagcc

SEQ ID NO: 2335 - DNA, 1391 bp, Mus musculus
tggtgacttctcggagagcgtcggtccggcagcgcgctcaccccgcgcagtccccagcgcattctcgcttcccgggcaggcggcggcgccggcgggagacaggagtcgcggcgtgaggggcgcccccgccggcccctctgggaacatggcgaccggcggctaccggagcggcggcagcaccaccacggacttcctggaggagtggaaggcgaagcgcgagaagatgcgcgccaagcagaaccccgcgggcccggggtcgagcggcggggatccagccgccaagtcccccgcgggatcgctgaccccgaccgcggtcgcgggaacctcggagctcaaccacggccccgcgggcgcggtcgcacctgccgttcccgtgcccgtcgcccttaactgcgctcacggctcgtccacgctgccccgcgcggctcccggctcccggcgggcggaggacgagtgccctagcgccgctgcggcctcgggagcgcctgggtcccggggcgatgaggaggagccggatagcgcccgggagaagggccgcagctcgggacccagcgccaggaaaggcaaggggcagatcgagaagaggaagctgcgggagaagcgccgctccaccggcgtggtcaacatccccgcggcggagtgcttagatgagtacgaagatgatgaagcaggacagaaggaacggaagcgagaggatgccatcacccagcaaaacaccatccagaatgaagctgcgaccctcccagatccaggcacatcctacctgccccaggacccgtcgagaacagttccaggcagatacaaaagcacaaccagtgccccagaagatgaaatctcaaatagatatccccgaacagacagaagtggtttcagtagacacaacagagatgcaaatgcgccggctagtttctcctcaagtagcaccttggaaaagagaattgaagatcttgaaaaggaagttgtaagagaaaggcaagaaacccttcgacttgtgaggctgatgcaagataaagaagaaatgattgggaaactcaaggaagagatcgatttgttaaatagagacctagatgacatggaagatgagaacgagcaactaaaacaggaaaataaaactcttttgaaggttgttgggcagctgacaaggtagaagctgcacgggcggcttcggtgtggaaagcctgcttttacactactgatgaatgtcatggctaaggctgagctgagacgcctgtgattcactgcgttgttgagaggactgtatatttatttctagaaaacacgtggatttttttttcaagattcactctttcattgctagtttctaaaaagtattaagccctgtatttcacatagaagtaacgtttttagttattaaagtcataggtaatgcc

SEQ ID NO: 2336 - DNA, 3480 bp, Mus musculus
cccgaactttattgggaaggcctccatgttatcctgtttgacagttcgagagctagcttgtcgatgaagaaagcctttgctacattcagtctgtagaccctgattggcaagcagccttgagaggggttttcctatacctggcagacagttccagtattggggcgctgaaggccccagaacaagaagagctggaggaagctgggtggtgacacttggaatcactttagtcattcattaaattgttgctgttctcaagttcgacctcccacaagaactattctatcataattccctaacacagctgattgtagctgtccttctccaatactcgaagatagacattggtatgtaggtgagtacagacacacatgcacactcacacaaacacacacccacacaaacatacacacatactctcacatacccccccacagtcacacacatacacacatactctcacatacccacactcacacacacagttcacacacacataaatacacactcacacacacattcacacattcatattcacacacacacacacacacgggggtggggagaagagaactttctggataaccgcatctctcttttgtgaaccaacctctaaatctccttttaaggaccctcccatgtccgtctggaccctgagggtgctgcatacccacccctgcctccttcccatccccagagcccgtgggagggtggagaagacacaggcctggctcctgcgtgctggtcatggcccttaggaaaggccttgggtttggcaggagaacactggaggaacgaaagccaggtgtagagacttctttgggaagaagaggtggctcagtggttaggggtatgcactttcctcccatagatcctagtgtttggttcagggtggaagctgagaaaactcacgtcagatatgaaagcttaaaaatgaaagctttattttctgaccgctcaggatggaggccagttcgggctctgaaccacatccccagagagagagtgtataacatctctaaggaatgagaacacaaagcaagctgtggggagctgcagtgttatccggttgtattttgacattgtgggttaagcaagggaaaacctgttggagactgggctgtgcccagggcacctggcttcagggtacttaattcattctcctagacattagttccggagctccgagtgagaagggggcaaaggagcgggtcagccgcatgtagctaattagagcataacaggcaatgattgtatattttttttacaacatatgcaccttggtttagataatagcagtttctatattcttaaccagttaacagacaagtaagaagacactcggagaagcgaggtaggtgttcgttcctaggcctgggaacgtgaaagtgtttgatcctgctggcaagatggagaagttgtccctgagatgcccggactcagacaactgtttacagcaggagctgttcagctgtaggggggtccccaggtcccctagagcctgggaccttgggtgtcatttctccctgtggttagatggagacttagtacttatggtggtatttagaattcttttgcttgttcccagcgctagggtaagtattggatcctcataacctgtacctaactcccgcaccaggggacccaatgtcctcttctggactctgagcacctgtactcatgtgtgtacactcccacacagacactcttaaaaaaaaaaaaacttggagggaaactttgctgccagcctaggtggcgcagtgagttcaaagcccgctggccttcattgttggacacggccaaggctggtgtgaaggaaaccattctttgcatgttgacttgtgagaaggccagaggtcaaaccccctttcccatggtgtgtccttttgtgctggttcccacctgtaacccagcgctgtcctgaagcttgtgggtcttgttcttcctcttgccactgcagtcctctgacccttttccttgtcagagatgtcactcgtgggctcatttctggatccgacgttccctcaggaaggacacctgatcgcccatgccttcccaagcaggaccctaccatatctgtgctgtgagcttctttgtcctaacccccaagctcccagctttaaaaggtgtctgactgaccttcatcggtggaatcaagaagttcaaatgccaaggatgccagacagcatgccgcaaccacggagcaacacacttgaagtctagcttcctaacgcaagtcttcccgcaactagctggaacactttatgacactgcctgttccagaagttctgtggggcagacatgaaggtagaggactctggcctccattgctgatgtactcccacatacctttgatattctctagaacctcctatcaggtctgctttctcctgaggaacatactctggcttcttgccagcaatctgtctcgatgctatggactaaactgcccgctagcaattagtctggactttagttgtttttgaaagatgaattgagatgtaattttctaattaacagtggttgtcaaataaagggggacaaagtctctgtctgggcctcgacaaggccacggccacggcgtggcaggctggagcctctcgaggacaaatgcgaggaaccagtggctcaggaagcaattagcttgtggcttctgttgctgatgggggaaccatgcagagcagagagggcctgctggggagtggagctcagatggggctagctatggtggttgagctagcagaacggatgcagggacacgctccaaggaccccccgtccacctcccccgtgcacgctcacactgccatcgtactgtgtgatggaacacttctgggtttgcattgttggtgcctgggttaaagatgtaatagctaccaatgtctgttctagataataacccttgaaggcacggggatgggaggtatttgtcatggggcttacaggcacagggggacgtgttttcagaatggttactccccgcaaagctgtcttatctcaagcctggtgatatttctaaggcgtcatttgtattattgtttgtgtgactcctggctccttttccctctccctgcacgggtgactgaacctagctgctcacataagacagacaagcctttcccaccaagctgcttcctaactctcttttaacttttgttttgaaataggaggtcaccggccgtgaactcatggctcctctgcctcagcttcccaggtagcctgggtgacaggcctgtgccaccgggcctggctatgactctgcttccgctttctcaatggtcccctttgctcatgtgttgatgacacagggcaaccaatgtcacagaggacctgggggagggggacgtctcagttttgactcttggctcagggtctggctggcacctcgggcctccagatgtctgctcctttcagatctctgtagggacctgaccagacacagagggcacgggggcatccagaaagggccagtttcttacttaac

SEQ ID NO: 2337 - DNA, 993 bp, Mus musculus
agtcgcagattgacacagagagccaagtcctgtcctggtgaggtccgactggagtggcagtagtgatgtccttggaaaggccagtttcagccatatccaagctgtggtgctccaggcctgctccataccagcctcaaactgttgtgagatactcagctccagttcctgctcatatctacgtgagataccaagttccgtgtcagaccaaaacctacgtgaaatgcccaactccctgccaaacatacgtgaaatgcccagccccatgccagactacttatgtgaagtgcccagcaccatgccagacgacctgtgtgaaatgcccagccccatgccagaagacctatgtgaaatgtcccgccccatgccagacaactaatgtgaagtgcccagctccgtgtcagacgacctctgtcaagtgtccagctccctgccaggctcagacatattatgtccagtatcaggttccttatcagacctactatactcaggcttcttcaagtggctcaggacctcagggctgtgttcctgacccgtgctctgccccttgttccaccagctactgctgtttggctccccggagctttggggtgagtcctctgagacgctggatccagcggcctcaaggatggaatacaggatcttctagctgctgtgaggattctgggtgctgcagttctggaggctgcgggggctgcgggggctgcgggggttgcggcggctgcaacagctgctgtggctctgggtgttgctgtttgggaattattcccatgagatccagaggtcctgcatgctgtgatcatgaggatgattgctgctgttagacacaaaagaacggttatgcttccaaaatgtccctcctgctatgtcttctggtcttacccaaaccggacaactgcttccctagttcttaactttgctcttttatcaaggcatcctgccagagttagcgcaaccccccaaactgtggcaagaataaagctctgaatgcaaggc

SEQ ID NO: 2338 - DNA, 1431 bp, Mus musculus
gatgataattcctgttatctcccaggactgtcacatgcagctgagaacctctctcagtcctctgaggtaataggctcctggctcttggtttttcttctgatgagctgggaagtcatcaattccaagccagatgaaagagccagactgagccagtgcattgcagaatcatggatgaatttcagcatgtttcttcaagaaatgtctctttttaaacagcagagtcctggcaagttttgcctcctggtctgcagtgtgtgcacattttttacaatcttgggaagttacattcctggggtcatactcagctaccttctgttactgtttgcttttttgtgtccactgtttaaatgtaatgatattggacaaaaaatatacagcaaagtcaagtccattctattaaaactagattttggaattggagaatatattaaccagaagaaacgtgagagatctgaagcagataaagaaaaaagtcacaaggatgacagtgaattagacttttcagctctttgtcctaagattagcctcacagttgctgccaaagagttatctgtgtcagacacagatgtgtcagaagtctcttggactgacaatgggaccttcaacctttcagaggggtacactccgcagacagacacttctgacgatcttgaccggcccagtgaggaagttttctctcgagatctttcagattttccatctctggaaaatgggacgggaacaaatgatgaagatgaattaagcctgggcttacccacagagctcaagagaaagaagcagcagttggatagtgctcacagaccaagcaaagaacggcagtcggcagctggcctctcacttcctctcaagagcgaccaagcccttcacttgatgagcaacctggctggggatgtcatcacagccgccatgacggctgccatcaaagaccagctagaaggagcccggcaggcactcactcaggtggcgcccactgcgggagaggacacagacactgaggagggggatgactttgaactacttgaccaggcagagctagatcaaattgagagtgagctgggactaacacaagaccaaggggcagaagcccagcaaagtaagaaatcctcaggcttcctctccaatctgcttggaggccattaaccgggaatcacctggcagccagcgaagcacagataaaccacccaaaaagttcaaacaagcagggggaaaaaatggaaaaaaaatggaattgtaagctttaattactttagtttttttttcttttgttttgttttcttttcccttctatagtgagttggatgtgtatcagttgataatgatagactgacatttctgatagttatttttctgtaataagcatggaaatgaactttatagttacatatatacatactgtggtgtcctaagtgcttaggggctgtttgtaaagtg

SEQ ID NO: 2339 - DNA, 768 bp, Mus musculus
ggccgtccctggggagggaagccagtggttagcagacaggacttctgtctgtccctttacatgggcacacagtaaccaagcaattacaaaggattgttaaactgtgcagcagatggaagaagaggaagctaaggcagcgtctctccttactaagaataaaactggaagcgtgagagaggctcagctaaccaagtttctgcaagaggaggcgttagggcccaagcaggtcagcacgtggtccaggttggtgctcctgtaaggagaaagtcgggatgagtgaggccagagcctgcagggagcccgtctggccaagaatcactatggggtgctctggctgcgggttggcggcaggcatcttgcaggcctgtgatgcaagaccaggaaacaaagggattgggacaccggtggcctccgtcctcactaaagctacttgctctctggaacttgatagaaccaacactggtttggaggatgatgcctgagattccaccagcccttgggagtcgggccaggactgctacgatcttgtctcaaaagaacaacacggagacagtgagatggctcagcaggtacaagcggctgctcttgcatgaggacccgagtttgatctgcagatcccacagtgaaagaagagccaattcaagattgtcctctgaccccaactaaatgtgactgccatacagggagaagacagttcacagatcataataaaacctaaaaggaaacctatctacattaagataaagactataataaagatgatatgtc

SEQ ID NO: 2340 - DNA, 582 bp, Mus musculus
gcggccgctagtcttttttattaaaaaataatttttatttcatccaaagcgaagctaaatccaagtctgcaatgcaaaatgtattgtagaggcaagacaacctaatggcattcgatctgtgcttagacgcaagcgctgggcatgtgcaggtcggtgcctcctggaggctcccacggcccaccactgtattgcctataaagttagataggaaaattgactatgggtactgttatccaagccagaagactaaaccatgcataagatagtcaaaagcactgcacatccagtgggagatgggagagcagggactccaacctgggacaaaataaaatgtagcaagctagaggacttccccacaaatccctcatttgggcatccttgccccagccctccggtggcagtcgtctgtcaccctgacatggagtcacccagtagaatccaggagcatagccgttcatttatgtctattaacccttcttcagtctccagttcaggctactgaagatgcagagccccacccccaaccccttcatcccacatcaaccctcactgtctcatgcgcgggcctacctcgtgccgaat

SEQ ID NO: 2341 - DNA, 2160 bp, Mus musculus
aagcttcactcggagcaagccttagcccgctgtctcagcagggagacttcccgaggtagaggggcaaggtgcggggcggtttagactcagagtctgtatgcacccctaactcccccccccccccccgccacaatttctctgtagtctttctcagcacatcacacctcccctcagcaggggctcccctgccctgcccctccagggtggttataagttcttaacctataggttataggcctctccggagggagggagggaaaggggcggggcggcggcggctcagatataagggaccctggtgttgtttgcgggtccaaacagcccaccatgagtgcccacagcctccgcatccttcttcttcaagcctgttgggctctactccacccgcgcgccccgaccgcggccgctttgcctctgtggacacgggggcagccctcgtcaccgtcccctctggcgtacatgttgagcctctaccgagacccgctgcctcgggcggacatcatccgcagcctccaggcgcaagatgtggacgtgaccggacagaactggactttcacgtttgacttctcctttttgagccaagaagaggatctggtatgggcggacgtccggttgcagctgccgggccccatggacatacccactgagggcccactcaccattgacattttccaccaggccaagggggatccagagcgggaccccgctgactgcctggagcgcatttggatggagacgttcaccgtcattccttctcaggtcacgtttgcctcaggcagcacagtcctggaggtgaccaagccactctccaagtggctaaaggaccccagggcactggaaaagcaggtgtccagtcgagcagaaaagtgttggcatcagccctacaccccacctgtacctgtcgccagcaccaatgtgctcatgctctactccaaccggcctcaggagcagaggcagctagggggcgccactttgctttgggaagctgagagctcctggcgggcccaggagggacagctgtctgtagagaggggcggatggggcagaaggcaacgccgacatcatttgccagacagaagccaactgtgtaggagggtcaagttccaggtggacttcaacctgattggctggggctcctggatcatctaccccaagcagtacaatgcctatcgctgtgagggcgagtgtcctaaccctgtgggggaggagtttcatcctaccaaccatgcctacatccagagcctgctgaaacgataccaaccccaccgggttccttccacgtgctgtgcccccgtgaagaccaagccactgagcatgctttatgtggacaatggcagggtcctcctggaacaccacaaggacatgattgtggaggagtgtgggtgcctctgacagagccagggggagtgctgaaattggcttgcattccacaatgctgatgaactccaaggagactccattgtgtctatccagggagcagaaacgttagaagagttctgcctgctggagctaaagagaaaagccccgccccctgtgcatacagtgctcttagacctgccaagccagagagaggctaccgtggcatggcaggatggggaagccttgcaggggctggctcgctgggctccctggaaatagggtttatgaactgcttgaaattgtgtgcaaaggctggggtgtatatatatatatgtatatatatatatatgtatttatttttgatgccatctgtaactttcttgtattctcaaaagtggtctgtgacctgctgtccctccctcaagattagtatatattttattagattataaacgagccatttggttctccctgcctcaagctgtggtagggaagacccacaaccttctggctggctggcagtgacatcctggccttggtcaggggctctctgatctctaatgacttgcctaaaaaagccactgtccagttctccagggccagttggtgcctttgaccagagaggtgggcacttgtccaagaggggactggccatggtggactttagaagccagagtcctgagatgtatgcttggcagacacaacccaagtctattaaaagtctgtgacaattcaaaaaaaaaaaaaaaaaaaaaaaaaaaaaaaaaaaaaaaaaaaaaaaactaaaaaaaaaaaaaaaaa

SEQ ID NO: 2342 - DNA, 854 bp, Mus musculus
ccggcgtttccgccgcgatcgtaccttgggggcgcgcggcttcgggcagccgggctcctctcccgcgtgtcccgcggcctccctgagacgcgcggagacatgagtgacaccggaggcgaccgcgcgcgactcaggcgctacaccaagctcccggtgtgggtggtggaggatcaccaggaggttctgcctttcatataccgggccataggttcgaagcatcttcctgacagtaatataagtttcttacatttggactcccacccagacctccttatccctgtgaacatgccagcagacactgtgtttgataaggaagcactctttggagaactgagtatcgaaaattggattatgcctgcagtttacgctggccatttttctcaagtaatctggctccaccccacgtgggcccagcaaatcagggagggcaagcactgcttcttagtaggcaaagacatttctaccacaaccatcaggtaatttcctcattttcaatgagtatggaaggatttgaattcttttcattatactttgaattcctgtagtaacttcctactaagccccatcccgtccaaaaaatagttcttgaatcatcaaaaaccaagttttaattctgttgatttccttcatgtggccttctgctcctgatgcagctatagtgtgttgaatttaactcttagaagtgagccaggcaggggtgtggcacacacctataaccccaggccttgagagactgagggtgctcagaattaagagtcagcctgaattctagagtgagaccctgtcttaggtgtcgctcaggagtggatcgctttcctaacatgcctacagccctgtgttcaagtcccagcact

SEQ ID NO: 2343 - DNA, 1983 bp, Mus musculus
gaaacccctcattgttcgcagctgatgtcactcgcagttgtgagcggccgcctttcccggggacaatgtgggactgagcggcccagccgctgccgccgccgcagaacagccccagcgagagctagctgagccacagtgtggacacactcccaggccgctgcggccccagccccgcctgacaggatgagcagttcagatgcggggctggaggaggggcccgagcttagtatcaccctcaccctgcggatgctgatgcacgggaaggaagtgggcagcatcattgggaagaagggagagactgtaaagcgaatccgggaacagagcagtgcccggatcaccatctcggagggctcctgccccgagcgaatcaccaccatcacaggctctacggctgccgtcttccacgcggtctccatgattgccttcaagctggatgaggacctttgtgctgctcctgcaaatggtggcagtgtctccagacctccagtgaccttgcgccttgtcatccctgccagccagtgtggatcactgattgggaaggcaggcaccaaaatcaaggagatccgagagactacaggagcccaggtgcaggtggcaggggacctgctcccaaattccacagagcgtgctgtcactgtgtccggggtgcctgacgccatcatcctgtgtgtgcgccagatctgtgctgttattctggagtccccacccaaaggagccacaatcccgtatcatccgagcctctccctaggtactgtcctcctctcggccaaccagggtttctctgtccagggtcagtatggagcagtgacccctgcagaggtcaccaagctccagcagctctcaggccacgccgttccctttgcatcacccagtgtggtgccaggactggatcccagcacacagaccagctcacaggagtttctggttcccaatgatctgattggctgtgtgatcggacgccagggcagcaagatcagcgagatccggcagatgtcgggggcacatattaagatcgggaaccaagcggagggtgctggggagcggcatgtgaccatcactggctcaccggtctccatcgccctggctcagtacctcatcactgcctgtctagagacggccaactctacctctggggggacgcctggctcagcccccgcagacctgcccacccctttctcgccacccctgacggccctgcccacagctcccccaggcctgctgggcacaccttatgccatctccctctccaacttcatcggcctcaagcctgtgcccttcctggctctaccacctgcttccccagggccaccgccgggcttggcggcctacactgccaagatggcagcggccaatgggagcaagaaagctgaacggcagaaattctccccctactgaggccggccggctgaggcaccggcaggggcaggcaggaccgccggcaggggctgcctccacatccttcctgcccaaggagactccaccatggggtctcaagcgccagtaatgccagacgcatggatgcaccccctaccctgccccatctttggagatcctcctctgagaggggacagtttctggcccagggttctaggagtatggcagccccagggcaggggccccacctctacagacctatgcttggatgcagagaatggccaggggctctctggagccctgctgtgggaggggttactcatgtcccctccatccctttgggcttcatcctgctgtcccagtgggaattggaggagagtgaggggcggccagggccaagcttctcctcatcccctgtagatcctgctgcttctactgatacccttttgactggaatagactggctgggcttgtccgggggagggcaacccaaagagagggctctgcctgcctgtaggtgtggcctggggggcaggggcccagtctcagcagcagacactctgtacagttttttcaatccctgtttttgaataaatattctcagcgacc

SEQ ID NO: 2344 - DNA, 1641 bp, Mus musculus
gcccgaccccgcgtgtgcgtagtcacggcgccatggcggcggacagcagcgagaatgcttcgtggcatctccattgatttgtgagtaatcagaaatgcaaatagctcctcaggaatcaagctacgctcaaagaaaccttacttaccaatttcaaggagtataccatggagtgcaagactaaggggaaacaccagcatagcttgaacttactagataaaattaagaatatgaaagagttagaagaaatgattgatgtagtgctcatagcagaagaggagaaattcccttgccacagactggtgctcgctgcctttagtccttatttcaaggctatgttcacctgtggactactcgagtgcactcagagagaggtcatactctatgacatcacagcagaaagtgtgtgagtgatattaaactacatgtacagtgctgtcctggagatcaataacgccaacgttcagaccgtagccatggctgcctattttatgcagatggaagaagtctttagtgtgtgccaaaactatatgatggaccacatggatgcctccaactgcataggaatttattactttgcaaaacaaatcggagcagaagatttatcggatcagtcgaagaagtatttataccagcacttcgccgaggtaagccttcatggagaaatacttgacatcgaagctcaccagcttctggcacttattaagtctgatgatctgaatatatccagagaagagagcattctggatttggttctgagatgggtaaccataaccaagctttgcgcacagagcatctcgttgagcttttgaagcaagtcagactggaacttataaacgcttcctttctaagacaggccatcagaaggaacacgatgctcctttgtgatggcagttgcattgatataatccagaatgcgttcaaagccatcaagacaccccagcagcacccctccaaccttcgctatggcatggagaccaccagccttctgctttgcattgggaacaattcttctggaatcagatcaaggcacaggagctatggggatgccagtttttgttatgaccctgtgtcacacaagacctattttatctcatcacccaagtatggggagggtttgggaactgtgtgcactggggtagtcatggaaaacaatactgtaattgtggctggagaagcaactgccactaggctctctaggcaaaagagcaagaatattgaaatctataggtatcatgatagaggaaaccagttttgggaaaagttatgcacagctgaatttcgagagctctatgctctgggcagcatccataatgacctctatgtcataggaggacagatgaaaattaaaaaccagtacctcataacaaactgtgttgataagtactcagtagatcaagacaactggaaacgagtatctccccttccactgcagctggcttgtcatgctgtggtaacagtgaacaataaactgtatgtcatcggaggctggacccctcaggttaagaaattccttgcatatctacctggtgtggctggctttgctgaaaaatgtagcagtcattgagtagtaaagatgatggctgacattttgacaacatgcttttaaccccatacactataaacttaattcttgaatatgtc

SEQ ID NO: 2345 - DNA, 2857 bp, Mus musculus
gtccagcggtaccatgggccgtcggagcgcgctagcccttgccgtggtctctgccctgctgtgccaggtctggagctccggcgtatttgagctgaagctgcaggagttcgtcaacaagaaggggctgctggggaaccgcaactgctgccgcgggggctctggcccgccttgcgcctgcaggaccttctttcgcgtatgcctcaagcactaccaggccagcgtgtcaccggagccaccctgcacctacggcagtgctgtcacgccagtgctgggtgtcgactccttcagcctgcctgatggcgcaggcatcgaccccgccttcagcaaccccatccgattccccttcggcttcacctggccaggtaccttctctctgatcattgaagccctccatacagactctcccgatgacctcgcaacagaaaacccagaaagactcatcagccgcctgaccacacagaggcacctcactgtgggagaagaatggtctcaggaccttcacagtagcggccgcacagacctccggtactcttaccggtttgtgtgtgacgagcactactacggagaaggttgctctgtgttctgccgacctcgggatgacgcctttggccacttcacctgcggggacagaggggagaagatgtgcgaccctggctggaaaggccagtactgcactgacccaatctgtctgccagggtgtgatgaccaacatggatactgtgacaaaccaggggagtgcaagtgcagagttggctggcagggccgctactgcgatgagtgcatccgatacccaggttgtctccatggcacctgccagcaaccctggcagtgtaactgccaggaaggctgggggggccttttctgcaaccaagacctgaactactgtactcaccataagccgtgcaggaatggagccacctgcaccaacacgggccaggggagctacacatgttcctgccgacctgggtatacaggtgccaactgtgagctggaagtagatgagtgtgctcctagcccctgcaagaacggagcgagctgcacggaccttgaggacagcttctcttgcacctgccctcccggcttctatggcaaggtctgtgagctgagcgccatgacctgtgcagatggcccttgcttcaatggaggacgatgttcagataaccctgacggaggctacacctgccattgccccttgggcttctctggcttcaactgtgagaagaagatggatctctgcggctcttccccttgttctaacggtgccaagtgtgtggacctcggcaactcttacctgtgccggtgccaggctggcttctccgggaggtactgcgaggacaatgtggatgactgtgcctcctccccgtgtgcaaatgggggcacctgccgggacagtgtgaacgacttctcctgtacctgcccacctggctacacgggcaagaactgcagcgcccctgtcagcaggtgtgagcatgcaccctgccataatggggccacctgccaccagaggggccagcgctacatgtgtgagtgcgcccagggctatggcggccccaactgccagtttctgctccctgagccaccaccagggcccatggtggtggacctcagtgagaggcatatggagagccagggcgggcccttcccctgggtggccgtgtgtgccggggtggtgcttgtcctcctgctgctgctgggctgtgctgctgtggtggtctgcgtccggctgaagctacagaaacaccagcctccacctgaaccctgtgggggagagacagaaaccatgaacaacctagccaattgccagcgcgagaaggacgtttctgttagcatcattggggctacccagatcaagaacaccaacaagaaggcggactttcacggggaccatggagccaagaagagcagctttaaggtccgataccccactgtggactataacctcgttcgagacctcaagggagatgaagccacggtcagggatacacacagcaaacgtgacaccaagtgccagtcacagagctctgcaggagaagagaagatcgccccaacacttaggggtggggagattcctgacagaaaaaggccagagtctgtctactctacttcaaaggacaccaagtaccagtcggtgtatgttctgtctgcagaaaaggatgagtgtgttatagcgactgaggtgtaagatggaagcgatgtggcaaaattcccatttctctcaaataaaattccaaggatatagccccgatgaatgctgctgagagaggaagggagaggaaacccagggactgctgctgagaaccaggttcaggcgaagctggttctctcagagttagcagaggcgcccgacactgccagcctaggctttggctgccgctggactgcctgctggttgttcccattgcactatggacagttgctttgaagagtatatatttaaatggacgagtgacttgattcatataggaagcacgcactgcccacacgtctatcttggattactatgagccagtctttccttgaactagaaacacaactgcctttattgtcctttttgatactgagatgtgtttttttttttcctagacgggaaaaagaaaacgtgtgttatttttttgggatttgtaaaaatatttttcatgatatctgtaaagcttgagtattttgtgacgttcatttttttataatttaaattttggtaaatatgtacaaaggcacttcgggtctatgtgactatatttttttgtatataaatgtatttatggaatattgtgcaaatgttatttgagttttttactgttttgttaatgaagaaattcattttaaaaatatttttccaaaataaatataatgaactaca

SEQ ID NO: 2346 - DNA, 1402 bp, Mus musculus
gaggcggtgcctggagtcagcgctggagcttccgcagcgccatggaaaaggtgctggtcacaggtggggctggctacatcggcagccacacggtattggagctgctggaggcaggctactcacctgtggtcattgacaacttccataacgccattcgtggagaagactccatgcctgagagcctgcgccgggtccaggagttgacaggccgctctgtggagtttgaggagatggacatcttggaccaggcagccctacagcacctctttaagaagcacagctttaaggccgtcatccactttgctggcctcaaggctgtgggcgagtcagtgcagaagcctctggactactatagagttaacttaacagggaccatccagcttctagagatcatgagggcccacggagtgaagaacctggtgttcagcagctcagccaccgtgtacgggaacccccagtacctgcctctggatgaggcccaccccacggggggctgtaccaacccctacggcaagtccaagttcttcatcgaggagatgatccgggacctgtgccgggcagacacggcctggaacgccgtgctgcttcggtacttcaatcccataggcgcccacgccctctgggcgcatcggtgaagatcctcagggtattcccaacaacctcatgccctacgtctcccaggtggcaatcgggcgacgagaggccctgaatgtctttggtgatgactatgctacagaggacgggacaggtgtgagggattacattcacgtggtggacctggcgaagggccatatagcagccttgaagaagctgaaggagcaatgtggttgccggacctacaacctgggcacgggcacaggctactctgtcctgcagatggtccaagccatggagaaagcctcagggaagaagatcccgtacaaggtggtggcacggcgggaaggtgatgtggcggcctgttatgccaaccccagcctggcccatgaggagctgggctggacagcagccctggggctggacaggatgtgtgaagatctgtggcgctggcagaagcagacaccttcgggctttggggcgcaggcctgaggacctcgttaccatggaccagaaaagagcagctgcctgctttccagtctccacaggaccctgtaccctcacactctggggccaccctacctcaaatgccagctgtctgctcagccctccaggcaggagacctctggttccactgaccagaaagaagtccaggtctttccagcctgtctcccccccgagttcagcagctcatgtgatccccagagccttggggatggggaggccagggggtctgggaccatagcctcccccaggcactgatgattaagctttccaaagtatttaaaataaagatgttttcttatct

SEQ ID NO: 2347 - DNA, 599 bp, Mus musculus
cagaacaaagaagaagtttattgagtggatgcagaaccctgaggctcccccacctccagagcccacgtgggaagaacagcagacaagcgtgctacatctggtgggggataacttccgggataccctgaagaagaagaaacacaccttggtcatgttctatgccccttggtgcccacactgtaagaaggtcatcccccacttcactgccacagccgatgccttcaaagaggaccgcaagattgcctgtgctgctgtagactgtgtcaaggacaagaaccaagacctgtgtcagcaggaggccgtgaaggcctaccccaccttccactactaccactacgggaagctcgtagaaaagtatgagagcgaccgcacggagttgggatttaccagtttcatccgaaccctccgggagggagacctcaagagactagagaaaaggagggaagagctgtaatcccgcctcctgcaaggggcccttcctttacactgtgaatgatacctattttgttctttctgaatttccatgtgtgctggagacaaaagttttttatagccatgtatggccttttgtacaattttgaaataaaattaaaccattt

SEQ ID NO: 2348 - DNA, 2778 bp, Mus musculus
atgctccggctcctgcggttgttgcttttgctgctgctgcctcccccggggtcccccgagcctcccgagcccccgggcctggctcagttgtcaccggggtcgcctccccaggcccccgacttgctctacgcggacgggctgcgagcctactcggccggggcttgggcgcccgcagtggcgctgctgcgagaggcgctgcggagccgggcggcgctgggccgcgcgcgccaggagtgcggggcgagctgcgcggccgagccgggcgccgcgctcccctcccagctcctcggagccccacatcctgtctccgggcccggggtctgggaaccgctgctcctgcgcgccacgctccgccgcgccgagtgcctgacccagtgcgcggtgcggaggctgggcccggggggcgcggcgcgctccgcgtggggagcgcgctgcgggatgccttccgccggcgggagccttacaactacctgcagagggcctactaccagttgaagaagctggacctggcagcttctgcagcacacaccttctttgtggcaaacccaacacacctgcagatgcgggaagacatggctaagtacagaaggatgtctgcaatccgaccccagagcttccgggacctggtgacgcccctatactgggcagcttatgacactggcctggagcttctggagcaacgggaggcagcactggctctaccccaactagaggaggccctgcaggggagcctggcccacatggagagctgccgtgctgcctgtgaggggcctgaggagcaccaaggggctgaagaagagggagaagggagccagggaggcctgtatgaagccattgcaggacactggatacgggttctgcagtgcaggcagcactgtgtggcagacacggccacccgtcctggtcgcagcttccctgtccaggacttcctcctcagccagctgagacggctgcacgaggcgtatgctcaggtggggaacatgtctcaggccatggaaaatgtcctgagtgtcctgctcttctacccagaggatgaggctgccaaaaaggctctgaaccagtaccaaactcagttgggagagccaagacctgacctgggaccacgagaggacatccagcggttcatccttcgctccctcggagagaagagacagttatattacgccatggagcatctgggcactagcttcaaggacccggattcttggaccccggaggctctcatccctaaggcactgagagagaggctcagagaggatcaagagaagaagccctgggaccatcagcctccacagcagaagcccttggctcactggaaggatgcccttctgatggagggtgtgaccctcacgcaggacgcccagcagctgaatgggtcggagcgagctgtcttagatgggctgctaacttcagccgagtgtggggttctgctgcagctggccaaggatgcagcacaggctggagccaggtcaggctaccgtggccgccgctctcctcatagtcctcatgaacgctttgaggggctcacggtgctcaaggctgctcagctggcccgggcagggactgtgggcaggccaggcgctaagctgcttctggaggtaagtgagcgagtgcggactttgacccaggcctacttctccccggaacggccactgcatctttccttcacccacctggtgtgccgaagtgccatagaaggtgaacaagagcagcgtatggacctgagtcacccggttcatgcagacaactgtgtcctggaccccgacactggcgaatgctggcgggagcccccagcctacacctatcgagactatagtggactcctctacctcaatgatgacttcaagggaggcgacctgttcttcacgcagcccaacgccctcactgtcacggctcaggtccgtcctcggtgtgggcgccttgtggccttcagctctggtggtgagaatccccatggtgtatgggctgtgactcggggacggcgctgtgccctagcactgtggcacacgtgggcacctgagcacagtgaacaggagtggacagaagccaaagagctgctgcaggaggaagaggaggaagaagaggaggaagacattctcagcagagacccttccccagaacccccaagtcacaagcttcagcgagtccaggagaaagctgggaagccccgccgggtccgggtccgagaggaactgtgaatggctgagcctgcttctcaggatcaggccactcaacttgggaaggaactgatgagaaggctctggaggatatcaggaacatagtagcatgccaagtctaccatctcggggacttacaagggctaccagaccctggactcacaagcttgctacacagacttagcctacagcacatcaggcccgggagccaggtctggccccagctgagggacctgcaaggtccccaggacagacaaaaatcactatgcctccctgaaaggcaggcatgtggaggagtgcagagcaactgcttctaataagaaacacacagaggggctggagagatggctcagcggttaagagcactgactgctcttctgaggtccagagttcaaatcccagcaaccacatggtggctcacaaccatccgtaatgagatctggcgccctcttctggggcgtctgaggacagcaacagtgtacttacatataataaataaataaatctttaaaaaaagaaaaagaaaagaaaagaaacacacagaggagacagtcccatcctctcccaacctgtgcaataaataatgatcatgaggctctcc

SEQ ID NO: 2349 - DNA, 258 bp, Mus musculus
tatagcaagttgactttggatttccattatcagggagacaattagatttttaaatagaataaaaattgctggccttgcccttggcctttggcgagcagcatttgatgggaagtgaaaatatgcattgggatttttgccttaaggagtgtacaattaatccaaatttgctggtttggttttttaggaaaaaaaaaaaaaaagaatgcatgtttcaaataaaattttctattgtaaataaagttttttttttgagtttcg

SEQ ID NO: 2350 - DNA, 811 bp, Mus musculus
cccggatttgggcgctgtttcccgctaagggaggagatggcagagtcctcggggtctccgcaccgcttgttgtacaagcaggtgggctcgccccactggaaagaaactttcaggcagggatgtctggagagaatgagaaacagcaggcacaggctcctgaacaaatatcgccaggctgcaggtagcacgccggggacagcctcagacagacttcttgtgcaagaagtaatggaggaagagtgggcttctttgcagtctgtggagaattgtccggaggccttgcttcagttggaattgccactggacctagctgtgctgcaggacatcgagcaggagctgtgtaatgaagaaaagtccatcataagcgagtatgaagaggacttagagtttgatgaaagttgtctcaggagaatgttggctgagtgggaagcaaactccctcatctgtcctgtgtgtataaagtacaacctgagaataatgaacagtgtggtcacgtgtccatgtggcctgcacatccctgttcactcaacagacctgacagagcagaagcttcgagcctgtttggaagaaaatgtgaatgagcacagtgtacactgtccccacacccctgtgttctcagtcaccggtggaacagaagagaagcccagtcttctgatgaactgcctgacttgtgacacctgggctgtgatcctctagccatcccgacctcacacttcactactgagctgagaacaactcatttcgtgagagggccctgtatgcacaagccttttgtatataacggattttatattaaaacttcagacatccc

SEQ ID NO: 2351 - DNA, 1842 bp, Mus musculus
ggctgcacgaggtcctgactgaggtcgtgcccatccacgggcgaggcaactttccaaccttggagataaccctgaaggacattgtccagactgtccgaggccggctggaggaggcaggcatcaacgtgcaggacgtccggctgaacggctctgcagccggccacgttttggtcaaagacaacggcttgggttgcaaagatctggatctgatctttcacgtggctctccccacagaggcggaatttcagctggtgagagatgtggttctgtgctcccttctgaactttctgccagagggcgtgaataagctcaaaatcagccccgtcaccctgaaggaggcgtacgtgcagaagctggtgaaggtttgcacagacacagaccgctggagcctgatttccctctccaacaagaacgggaggaacgtggagctcaagtttgtcgactccatccggcggcagtttgagttcagcgtggactctttccatatcatcctagattctttgctctttttctatgactgctccggcaatcccatctccgagcatttccaccccacagtgatcggggagagtatgtacggggattttgaggaagcctttgaccatcttcagaacaggctgatcgccaccaagaaccctgaagaaatccgaggtgggggtctccttaagtacagcaacctccttgtgcgggacttcaggcctgccgaccaggaggagatcaagaccctggagcgttacatgtgctccagatttttcatcgacttccccgacatcctggaacagcagaggaagctggagacctaccttcagaaccacttctcggacgaggagagaagcaagtacgactacctcatgattctccgcagggttgtgaacgagagcaccgtgtgcctcatggggcacgaacgcaggcagaccctgaacctcatctctctcctggccttgggtgtgctggcagaacaaaacatcatccccagtgccaccaacgtcacctgttactaccagccagctccttatgtcagtgatggcaacttcaacaactattacattgcgcaccctccaattacctacagccagccttatcctacatggctgccctgtaactaacctgaagacctgagggtttccacagtgggaactcggttagggcaggggctctcaggtaggagagcctctttctagatgtaggtgtttggctttcgaaggggaactcagctccgactctgtttttctttttgtacccattggaataggtccacagactatcgtgagccaaccctaaaaggacccatagttgagtgccactcagggagatgcaataggaggcgtgacttctcaccatctttctaagatagtcactaacatgtcactccccagacattagcacatgggatctgagctcggcacagtctctgagattgggggagtcggacagcgtatgaaaagtgttccaggcgctctcctcagctgagttctcggtagattctacaggctctctcattcaggattctcagcagtcatgtgagagatgcactgatagtctctcactgggtcacttctagtcagctccccaaactgataaaccgtgagggtgctctttgtgactgaattttcactcacgggactaagttgtgtctgtctagtccccatcggcagagctgagaatttcattcatcaataaaccaaagccaatagctggagacttgagatctggttggaagtggtttatggtatatgctgtgctttatcaaggaattatgagatattgtggagaaaaaaaaatgacctttttcttgaaatgtaacttgaaaacaaaataaaatgtggaacataacgttaaagt

SEQ ID NO: 2352 - DNA, 2126 bp, Mus musculus
gtgccacgattggtcgctcctgactccgcctccagcgcatctcattagcatctcattagctgtccgctcgggctcgggaggcagccaccgccgccagtctgaggcaggtgcccgacatggcgagtgctgtgctgccgagcggatcccagtgtgcggcggcacggctgtggcggcggcggcggcgcctccagggctccggctccggctcctgctgttgctcctttcggccgcggcactgatccccacaggtgatggacagaatctgtttactaaagacgtgacagtgattgaaggagaagtggcaaccatcagctgccaggtcaataagagtgacgactcagtgatccagctcctgaaccccaacaggcagaccatttacttcagggacttcaggcctttgaaggacagcaggtttcagctgctgaatttttctagcagtgaactcaaagtgtcactgacgaatgtctcaatctcggatgaagggagatacttctgccagctctacacggaccccccacaggagagttacaccaccatcacagtcctggttcctccacgtaacttgatgatcgatatccagaaagacacggcagttgaaggggaggagattgaagtcaactgtactgccatggccagcaagccagcgacgaccatcaggtggttcaaagggaacaaggaactcaaaggcaaatcagaggtggaggagtggtcggacatgtacactgtgaccagtcagctgatgctgaaggtgcacaaggaggacgacggggtcccggtgatctgccaggtggagcaccctgcggtcactggaaacctgcagacccagcgctatctagaagtgcagtataaaccgcaagtgcatatccagatgacttaccctctgcaaggcctaacccgggaaggggatgcatttgagttaacgtgtgaagccatcgggaagccccagcctgtgatggtaacttgggtgagagtcgatgatgaaatgcctcaacatgccgtactgtctgggccaaacctgttcatcaataacctaaacaaaacagataacggtacttaccgctgtgaggcttccaacatagtgggaaaggctcattcggactatatgctgtatgtatacgatccccccacaactatccctcctcccacaacaaccaccaccactaccaccaccaccaccaccaccatccttaccatcatcacagacaccacggcgacgacagaaccagcagttcacgattctcgagcaggtgaagaggggaccattggggcagtggaccacgcagtgattggtggcgtcgtagccgtggtggtgtttgccatgctatgcttgctcatcattctgggccgctattttgccagacataaaggtacatacttcactcatgaagccaaaggagccaatgacgcagcagacgcagacacagctataatcaatgcagaaggaggacagaacaactccgaagaaaagaaagagtacttcatctagatcagcctttttgttccaatgaggtgtccaactggcctgtttagatgataaagagacagtgatactggaactttcgagaagctcgtgtggttttttgttttgttttgtttttttatgagtgggtggagagatgcgagactgggaaggcttgggatttgcaatgtacaaacaaaaacaaagaatgttctttgaaagtacactctgctgtttgacacctctttttaatctggttttaatttgctttgggttttgggtttttttggtttttttgtttttttcatttatatttcttcctaccaagtcaaacttgggtacttggatttggtttcggtagattgcagaaaattctgtgccttgtttttcattcgtttgttgtgtttcttccctcttgcccatttatttttcccaaaatcaaatttgtttttttccccctcccaaacctcccattttttggaattgacctgctggaattcctaagactttctccctgttgccagtttcttttatttgtgttaacggtgactgctttctgttccaaattcagtttcataaaaggaaaaccagcacaatttagatttcatagttcagaatttagtgtctccatgatgcatccttctctgttgttgtaaagatttgggtg

SEQ ID NO: 2353 - DNA, 233 bp, Mus musculus
  misc_feature 15: n = A,T,C or G
agcgcgtttaattanagaatcagttaatttttcccttcgagcaaagtatagcttgtttttttgtgggaggcccgtgtggggagaatagaatcaccaaacctgggcttcttggttactcccaaccttccccaccccaaccccattgtttttcagcaaagtttttccagggaaacttaaaagctcatcgttctgtgtgtgttccattttaaattcttaataaagcttaaccactc

SEQ ID NO: 2354 - DNA, 574 bp, Mus musculus
tttgacctttgtatatggaaagtatagtttagaaacaacaaaaacagaacgaggctgtggcctctgtggggcagtgccaaggctgagccacacatactcaaatctggggagagagggcctcaggctccaacatgtctggggatggcaggcagggaataaggtctcatgtgtaggccctcatggcaaagaatggagtaccattggggttggagcgttggagggagtataatcaagatggagctgtggcctcagccccctcctcagagtcccacacttcagactgtaggtaatcagcaaagagtgctttggccctacgcaagacacgccctagatggtgtttacgaaccaggcggtcaaaatgcatggctagctcattgtaatccagcccattgcgcatgatgtggtcacgatgctccagcaggatagccaagcagaggaagagcatgaatgggttccctcggccaaactcctggggtgggggaaggcccattggaggtggaggtggtacaggcttcccagggtctctgggagaacctacctcttgcattaagggggatcctacagctatgtcacc

SEQ ID NO: 2355 - DNA, 1953 bp, Mus musculus
taggacttttttttaattagaaaaaaaaatagattttaaaaaatacgagttagtggaaggaggaggcagttctcacactcagaattgcaaggggttttctgcattaaaggcctttgcctactgtctgcatgcaattttagatctaactctgactttaaccattggataagaatgaatcagctaaaatctgagcggtgaaattatttcagttagggcagatctcgaagtccattttcaatgacgtgtatttaaatttgtttagaaagattcccagggatttagatttagaggccttgaattgtcaagtacaataacaccgaaaaatgataattaaatataggaggtcatggtttagcttggctctatccctgagattcctgtttagaatgtaaaaatagaattaaagatccaatatttgatgtaaactttttttttttttaaagtgacccaaaatgtataatgtgggcgaaggagttcattagatttgcttttagggtagcctgatctactgagtagatgcagttgttgtcagcagtgtgaaacatgtctcccttcatctcttcttgaactgttcaagaagtcaagtgtttgctctggagctgatggaagagctctggggctaggaggagcgggtgaaaggagcgggcctggctgctgagtgtgttccttcttttctctttaagctgatgagcgcagttcagaaaggaagggtctctggaagccgacttgccatcctgatgaaaactgccgaggagaacttggaccgcagagttccaatccccgtggaccgtagttgtggaggattgtgagtctgaccagtaaatccgccaccagcaagcataggacagccagcgctatgtacaaccagagatgacttaaactctaaaatagtggatctcgtagctgccttttttaaaacaaacaaacaaggaaaaaaaaaaaaacaaaatcaaagaaaggaaagggataagcaaataaacaacactggaaaacattccaaaacttaagatgttggtgtgtttgccaacttactttgccaatactttatttatatttgccaatcagtctggcttctacaaagcgcttttcttattttttagtgcgcactgatgtactgttttgtatccattttgtaccctgtcagacttgacactctgcctgctcattcattcattcaaactagttttagaggcagaccccgtatagattggaatgatgctagaaagactttgtgagcacccaagagctcaggagctcgagcctggagagagcattctttctttttttttctagaaaatcatttgatctcttgacctgttaatattttgggagacttctcagccccgtcttgctacccacccccttccgattaaaactgcacacttttctgtctggagcaactctggctaatctggagagggaagacaaagtttagatctggttgagatttggttacatttctaaaagagaacctccaaaagcttccagatttgcaggcgtaagataaagacagccctgacatttgccgggaggtacggtgatcgctgcttctcagcagttcattttttttcccccaggcactgctggcttcctttgactattatagttgccagaaaaatccttgctttttttactttacaaccagcatttgagtggcaagttggatataatgggatgagaccaaatctctccattcctcctgggagcaatgatgggacacaatttccagtcccacaagttctgaatcttgtagcgtgtagcactgtcaggcctgttcttgtcggggtgggcagtagtgacggtatttgcaaagagataataaaaaagaactgggcagacttccgttaactttaattatgaaattgaaataaggcatgccactttaatattggaggctggtctgtttgccaaaggcccttctctttgtgtactcactggaaaaactctctttct

SEQ ID NO: 2356 - DNA, 1342 bp, Mus musculus
ggtgtttggggaaaggagcgcgggagatgtaccgctgctggtcgggtctgtgggccgcgggctttccgcgcgatctccggcgcccaccgctcggggagcctcagtccgtggtgtcccccgagcgtgccggctaggagagaagggaagagggatccctgagccgtgtagccgctttgagtgccaactgcgaggtgtaggttcccggttgagaaacgatgacggaggttctggatctccacggacaggactctgatgggggtagtgaggagatggtcctaactcctgcagagctcattgaaaagctggagcaggcctggatgaatgaaaagtttgcccctgagctcctggaaagcaaggctgagattgtcgaatgcgtcatggaacagcttgagcacatggaagaaaatctcagaagagccaagaagggggatctgaaggtcagcatccatcgcatggagatggagaggatccgctatgtcctcagcagctatttgcggtgtcgactcatgaagatagagaagtttttccctcacatcctagaaaaggagaaagtgcgcagtgaggcaggagccttccagcctgtctccagaggagtttgtctttgccaaagagtatatggaccacacggagacccactttaaaaacgttgccttaaagcacatgcctcccaacctgcagaaggtggacctcttgagggcagttcccaaaccagacctagattcatacgtgtttctgcgagtgaaagaacgacaagaaaacatactagtagaaccagaagccgatgagcagagagactacgtgattgacttggaggtgggctcacagcacttgatccgatacaaaaccatcgcacctcttgttgcttctggagcagttcagctaatataaaacaaagcaagcctgaggacatggagtggtcacagacaatattagaaacgccatcttttgtgtctaatagtgaagtcatgttccatacagttcgtcagcaatgtgtggaccacttggacgtagaaaggcgccgatgcagaattcccttcgttgtcacagccttctcctaaattcctgtttaaccagcaccaacagatgggcccgtgctctgaatactcagcaaataaatcaaccgtcaggtgtgtgccttttatttttctactacttactgagctcaggaggggtctcgaagaggcttccctgccctgcccacgacggccagatggactgggcataacttgatgattacagaactcctttagctttcctggtggaagatcataagcagttgtggtctgcttctatacagcgttaatatgtggcctaatgatttggaacctcaaatactaagctt

SEQ ID NO: 2357 - DNA, 1991 bp, Mus musculus
ggtatttctatgagcgcgccggcagctgcggactgcgggaaccggactccgggcgggttggactgctggagtcaatgagagaagcttttaggttaatttgaatataagatcagatctgattggcccacctggacaccccttcaaggaaagcccgtattctccgagagaggaataagcgacatagatcaagatgaatgccatgctagagacccccgagctccccgccgtgtttgatggggtgaagctggctgtcgtagctgccgttctctacgtcatcgtgcggtgtttgaacctgaagagccctactgcccctcctgacctctacttccaggactccgggctctcacgtttcctgctcaaatcctgtcctcttctgaccaaagaatacattccaccactgatctgggggaaaagcggacatatccagacagccttgtatgggaagatggggagggtgaggtcaccacacccttacgggcaccgcaagttcatcaccatgtcggatggtgccacttctaccttcgacctcttcgagcccctggctgagcactgtgttggagatgacatcaccatggtcatctgtcctggaattgccaaccacagcgagaagcagtatatccgaaccttcgttgactatgcccagaaaaatggctaccggtgcgcagtgctaaaccacctgggagccctccccaacattgagctgacctccccacgaatgttcacctatggctgcacgtgggaatttggagccatggtgaactacatcaagaggacatatccccagacccagctggtcgtcgtgggcttcagcctgggtggtaacatcgtgtgcaaatacttgggggagacgcaggcaaaccaggaaaaggtcctgtgctgtgtcagtgtgtgccaggggtacagcgcactgagggcccaggagaccttcatgcagtgggaccagtgccgcaggttctacaacttcctcatggccgacaacatgaagaagatcatcctgtctcacagacaagctctctttggagaccacgttaagaaaccccagagcctggaggacacggacttgagccggctgtacacagcaacatccctgatgcagattgatgacaatgtgatgagaaagttccatggctataattccctgaaggaatactatgaggaagagagctgcatgaggtacctgcacaggatatatgtgcctctcatgctggttaatgcagctgacgaccccttggtgcacgaaagccttctaaccattccaaagtctctctcagagaaacgggagaatgtcatgttcgtgctgcctctgcatgggggccacctgggcttcttcgagggctccgtgctgttccccgagccgctgacatggatggataagctggtagtggagtatgccaatgccatttgccaatgggaaaggaataagtcccagtgctcagacacggagcagatggaggccgagttggaatgaggtctctggactcggcgtgctccagcggccctcctctggaacccacgtccctttgacggctgtttcaggtctcccagtgacctggatctgacctcataccatcagtggggggttacccatcatgcaacctgtctcaagtaggcggctctccctgggagctccaggctatttttgtgcttagttacgggttttctccattgcatcgttagccatggtgacaagctacaagattctcacccttctgtccagtttcagtatctgattgctttcacgctggttaacatctagttttcctagtaaggagcgagtctgaactatagttttgctttgccaatcaaaggccttttcctgagaacagtgaaggatatacgtcactctgtgatggatgtatgcgccgtactagagtccccaccaagaagtcagcatccctcgtgctgaagaaattactcagcttgggagtctgagaacctgggccttcctgggcctgagttttgcctgtgaaacaaaagaaattctctgaatc

SEQ ID NO: 2358 - DNA, 3436 bp, Mus musculus
gaattcggcacgagcagcaaggtagtatcggagtgaccatcaactggcataggtggacagtttgtttgctgttctggaaaaactaaacagtgggcgatccccgtcgacttcattggaaaacagtgttattttgaaacgaggcttggtttcctgtgtcagtgacctgtgtagagggaacacaccgagtccgtgcctggatttgggagtcatagtttggctacagctaagattgtccccacgttagcagagcagctgaggaggaatgacaacatgtctgcaggcaggctgtggtctagcctgctgcttctgctgcctcttttctgctctaaaagctcatcttgtggtctctcaacacatgtagaaataggacacagggctctggagtttcttcggcttcaagatggacgcattaactacaaagagctgatcttagagcaccaggacgcatatcaggctgggaccgtgtttcctgatgccttttatcctagcatctgcaaaagaggaaaatatcatgacgtttctgagaggactcactggactccatttcttaacgccagcatccattatattcgagagaactaccctctgccctgggagaaagacacagaaaagttggtggctttcttgtttggaatcacctcccacatggtcgctgacttgagctggcataacctgggtttcctcaggacaatgggagctatcgatttttacaactcttactctgacgctcactcggctggtgattttggaggagatgtgttgagccagtttgaatttaattttaattacctctcacggcgctggtacgtgcccgtcagggatcttctgagaatttatgataatctctatggtcggaaagtcatcaccaaagacgtccttgttgattgcacctaccttcagttcctggaaatgcacggggagatgtttgctgtttccaagctctattccacgtactctacaaagtccccatttctggtggagcaattccaagactatttcctcggaggtctggatgacatggcattctggtccacgaacatttaccgtttgaccagctttatgctggagaacgggaccagtgactgcaacctgcctgagaaccccctgttcatctcctgtgatggcaggaaccacaccctcagtggctcaaaagtgcagaaaaatgattttcacaggaatttgaccatgttcataagtagagacatcaggaaaaacctcaattacacagaaagaggcgtgttctacagcacaggctcctgggcccggccggaatctgtcacctttatgtaccagactctggagaggaacctgaggctgatgcttgctggcagctctcagaaaaatctgaatcatgtctccagcccctctgcctcctacaccctgtctgtcccctatgccaggctcggctgggtcatgacctcagctgacctcaaccaggatgggcacggagacctcgtggtgggtgcaccaggctacagccaccctggccgcttccagattgggcgggtgtacatcatctatggcaacgatctgggcctgcctcccatcgacctggacttaaacaaggaagggatcctggagggcttccagccttcaggtcgctttggctcagctttggccgtgctggacttcaaccaggatgggctgcctgacctggctgtgggcgctccctccgtgggctcagggcagctcacctacaatggctcggtgtatgtctactatggttcccagcaagggaggctgtcttcttcccctaacgtcaccatctcctgcaaggacacctactgtaacttgggctggaccctcttggcaacagatgcagacggagatggccggcacgatctggtcatcagctcccctttcgcaccaggtggaaggaagcagaaaggaattgtggccaccttttattctcaccccagacggaatgacaaagaattactgactttggaggaagctgactggaaggtgaatggggaggaggacttctcgtggtttggatactcccttcacggggtcacagtggcaaacagaagcctgctgctgattgggagcccgacctggaagaatgtcagcaggatggcacgctcaagccacaaaaagaaccaagaggaaaagagcctgggaaaggtgtacggctactttctcccgaaccgccagagcacaatcactatctcgggagataaggcgatgggaaagctgggtacctccctgtccagtggttatgtgagagtgaatgggaccctaacccaagtcctgctggttggagcccctactcatgatgacgtgtctaaaatggcattcctaaccatgaccctgcaccagggtggagccactcggatgtacgaactagctcccgagaagacacagcctgctctgctcagcacattcagtggagaccgacgcttttctcgatttggtagtgttctgcacctgactgacctggatgatgatggcttagatgaaatcatcatggctgccccactgaggataacagatgtcacttccggactgctagggggagaagatgggcgagtgtacatttataatggcatgtataccaccttaggtgacatgaccggcaaatgcaagtcctggatgactccatgtccggaggagaaggcacagtatgtactaacttctccagaggcaagttcaaggtttgggagctccctggtgtccgtgcggtctaagggaaggaaccaagtggttgttgctgctggaaggagttcttggggagcccggctctctggggcacttcatgtctacagcttcagctcagactaaagacggcactcttctattcagccccgctttcttgagccaagtcatctccaggatggacaaagtagttctccggtggagcgaaacctgggacagccaggctgcctagaaatatggtcagctatgtgtggacgccgtgtgataggagcagcaggctgtgaggtcccctctcaagctctttcttctgcatcctctgagtttgctgccggtgctgggacttatcaacccacctccttttctgtggaatacctggctctcttgcctagaaagggtgtagttagctcttaacactctccatataattgctcctataaaaaatccttggtagtggtggctggtcctatttggatcttaaatgtaccccaaatctcctatgttgaaggcttgatccttagcttaaagaaggtaggaactgtggagtaggactctgttgaggagagttacgtactgggttgtatcaggacccctgggccttccttgcctctctgttgccagctgagctgccatgacctgggcagctcccctctgccacagcaccctgcttcttccccagccccaaagcaacagggccaagcaccctggcgctgacatggccgaaaactgtgagcccaaataaacatttcctctttttaaaaaaaaaaaaaaaaaactcgag

SEQ ID NO: 2359 - DNA, 1198 bp, Mus musculus
acggaggccagaggatttggggcgcaacggctctttccccaggcgaggtcggggagcgctgcacccgcgtcgcaggaccctcgaccccggcccgcaaagccccgccgggacgatcgcacgccgccagccctcggtctcagctcccacctgtgccctgcagcatgttctggcggacaggtccccgctggagaggtgcttcagctcgaagtgtttggtgatgcgtgacgacacggtgcccttgccggagcccggggcccccatgatcacggcgcgcagcagccgccccgacgcccccatggtggctggcggtggtccgagctgcgcagacgctggtctgtggcctggcctgcgcgctcacaggctccgcggccctggagggctggcagctgcaagctgggcggtggccaggacgcccggctctcccggaagtgagcgacggccaccggggccgccccgccggctgctgcaccgcccctccgcgcccctgcaccccactcccttgagctccacccggcgcctcttggcatccccagaccctcgtgccctgtgctgcctggtcccagcctgcaggctgcgcccgtctgcattctccccagtggacaacctctgagcaccccgttctacttctagtctcccgctggcacctctgagtgcctggatttcatttttttcccccctctgtgttcacctttttcacccttagtcttttctaagagccaagttctgtcctgctcagacccaacaggaagcagcatgcccccttgttgtgtcccctcggcccctctggttcaccaggtgttccccaccttttcacaccaatcctcccttgaccttcttccctctgccttttcaccccatttccttctcctccaggggtgacctggaaccctcctcacagaagctttcatcaagtgaagtatgtgtctcatctccctgaatccactttcagaaccaaaagtagctgtcaccgttaacttccgcagaggtcaagcatactagctccttcagaaatgcattcatttcaggaagagctacccagtgcctactgtgtgccactgtacttagaggcctccgagaatgctatgctgaacaaacccaagtttctactgctgtccgtttgttttcttgcttgtttgtccaggggtggaagtaaggctttttgaaacagtactgtgaataaaaacaataacaaaccagc

SEQ ID NO: 2360 - DNA, 939 bp, Mus musculus
gtggccgcctcctccctccagcactagagagaaatttgtctgcgttggtgggagcccgaacagaatgaaggcatttgaacagtttatgcacaaggaactccggttggagggagatggagaagacattgaagacatctgtgcggggacagacagatactgcatgttcaaaacaggccccgtgctctccgtcagtcacgggatgggcatcccctccatttccattatgctccacgaactcatcaaattactccaccatgcacactgctgtgatgttaccatcatcagaattggaacgtcagggggaattgggattgcaccaggctccgttgtaataacagatacagctgtagactccttcttcaagcctcgatttgagcaggtcatcttggataacgtggtcacccgaagcactgagcttgacaaagaactggctaatgatctgttcaactgtagcagagaaatccccaatgttccaaccctcatcggacacacgatgtgtacctatgacttttatgaaggccaaggtcgcctagatggggcgttatgctccttttcgagagagaaaaagctagactacttgaagagagcatacagagctggtgtcaggaacattgaaatggaatcgactgtgttcgcagccatgtgtggcctgtgtggcctgagagctgctgtggtctgtgtgacacttcttgacagactcgagagtgaccaaatcaatttgtcccatgatgtcctggtggagtaccagcaacggccacagcttctaatctcaaatttcatcaaaaaacagcttggactttgtgaccagatgtcataactccgaatcccgccaccctcctgagagttgctacacagagctgcaacgatggagccatgtgttgttcataacattcttatgtaattcccatccttgggctaaaatcataaaagatttttatg

SEQ ID NO: 2361 - DNA, 368 bp, Mus musculus
ggggagaggctattaaaggcagctgggacatttccccccagaggccactccctctcgccccagcaggctgtaatttctaagctgtgaacttttcaaggtaaattaacagagatgggaaaagatggctcagctgtttgttttgttttgttttgttttgtttttctcccacaggtttacatagttgagctaatacaagtttctttaaaaaaaaaaaaaatcaaacacatattcaaatgccagacccatcttgctgcctactggtgatttataaaagactgctgtatataaaacattggatattgcagaccaaattaagtgttttgccttgtaaaatgcatgtttagcgagcgctaatacaatcttactac

SEQ ID NO: 2362 - DNA, 1147 bp, Mus musculus
  misc_feature 662: n = A,T,C or G
tcaaagctagtggcttaccgaccagtgctagcttctaggatcatggggaccagcctgcgtacgcagtcctttagagaaccccggccctcctatgggaggctccatgagtcccaggggaggtctctggatggccgactccacagagcactgagcctcagactgggccgtgagaagtccaggtcgcaggtccccgatggcacggaagggctggaggtctctgtccaggagcggctgccagggaccctgggagacaaagaacagctgatccaaggccagagaggaggaggcagccggcggtggctgagacagtaccagcagcatgtgaaaagaaggtggaggagttttgtcgccagcttccccagtgtgagcctgagtacaccagcctccccagagacccttgttggacacaacaactaaagctgctgtgactgtccctcactccaccggctctgctcctgtgtcttttcatctgcccctgcatggcttttctgaactctgaactgctccagcttttgaactttgtcttgtgacccaaggagtcctctgccaccagatcattcaaagcccccatgtggctgctcttcttggttctggcacctatctcttagcaaagatctccataggcctgaagaggaaatacctggctctctaccttttgggtntaaagactccctggactggcatttatgaaggtcttagggacctacacagaaatgagagtagcaactgtgaccccttggccccacaaagaccagccacccacttccaggtcagagttcagtgaagccaaagaaaggctgagaacttcctgaatatcacctgctcccagggccaagctccacatggctttctgggcagctgccagtgactggccaaggcttgggcctccctcatagactgtgagccttcacaggctaggaccatgtctggactgtcctgggggggttgctatatgcctgagaagcccaaacatgcatatggctgcctttggacttcatgatatcccgatgaagaaagcagggaagtcttctctccctgtgtgacagggggaaactgaggtcaggagtggagaagagaccttcctcctacacatacacactgcctaacactggggttgaacccattaataaagccactgacctgaagc

SEQ ID NO: 2363 - DNA, 1840 bp, Mus musculus
aattcccttccttccaacatgtggctccatgctctggtctgggcttctcttgctgtttgcccaattctgggacactcactcttaccacctgtggtggacaccacacaaggcaaagtcctggggaagtatatcagcttagaaggatttgaacagcctgtggccgtcttcctgggagtcccctttgccaagccccctcttggatctctgaggtttgctccaccacagcctgcagagccctggagcttcgtgaagaatgccacctcctaccctcctatgtgctcccaagatgcaggttgggcaaagatactctcagatatgttcagcaccgaaaaggagatcctgcctctcaagatttcggaagactgtctctacctgaatatttacagtcctgccgatttgacaaaaagcagccaattgcctgtgatggtgtggatccatggaggtggactggtgataggcggacgatcaccctataatggactagctctctctgcccatgagaacgtggtggtagtaaccattcaataccgcctgggtatttggggattatttagcacaggtgatgaacacagcccaggaaactgggctcacctggaccaactggctgcactacgctgggtccaagataacattgcaaactttggagggaacccggattccgtgaccatctttggagagtcatcagggggtatcagtgtctctgtccttgtcttatctcctctgggcaaggacctcttccacagagccatttctgagagtggtgtggtcataaatacaaacgtgggcaagaagaatatacaggctgtgaatgaaataatagctactctttcccagtgtaatgacacctcatcagctgccatggttcagtgcttgcgccagaagacagagagtgagctcttggagatttcagggaaactggtacagtacaatatctccctgtccaccatgattgacggagtggtgctgccaaaggcaccagaagagatcctggctgagaagagtttcaacactgtcccctacatagtgggcttcaacaagcaagagtttggctggataattccaatgatgttgcaaaatctactccctgaaggcaaaatgaatgaggaaacggccagtcttctcttgaggaggttccactctgaacttaacatctctgaaagtatgattccagcagtcattgagcagtacttaagaggggtagatgaccctgccaaaaagagtgagcttatcctggacatgtttggagatatattttttggtatcccggctgtgctcttgtcccgtagcctcagagatgctggagtgtccacctacatgtatgagtttcggtatcgcccaagcttcgtgtctgacaagagaccccagacggttgagggtgatcatggcgatgaaatcttctttgtattcggggctccactattaaaagagggtgcctcagaagaggaaaccaacctcagcaagatggtgatgaaattctgggccaactttgctcgaaatgggaaccctaatggggaggggctgcctcactggccagaatatgatgagcaggaagggtatctacagattggagccactacccagcaagcccagagactgaaagcagaggaagtggctttctggactgagctcctggctaagaatccacctgagacagaccctactgaacacacagaacacaaatgaatgggaggctctgccagtctcaggaccagcggagcgaaaatggagctattccacaaaggatgactattcaccaaagatggatcttacagaggaaactgcacaatagtacagtatcacaatttgaaaataaatttccttttagaaatcaaaagaaaaa

SEQ ID NO: 2364 - DNA, 1610 bp, Mus musculus
acttttgggtctgtctgaagacagctacagtgtacttatatgtaataaataaataaatctttaaaaaaaaaaactacaagtgcagtaatgctggcaatttagatatgttagagagaagccataaattaaatctttcatataaacctcatgtaaaagttcatgacttaatgatgaaggagaaaataccatatgttgaagttgggagggacaagtttcttcatgatattgtgaaaaagaaaaaaaattcatgatagttttgtttttaattcaaactaacagctatagctacatacatgcctttaagtagaagaagctgggaatttgtgtacatatatgtatacatatgtgtacacacacacacacggtttagttatacactgttctcagttgtgtaatggaaaccttggaatgtatccctaaggaatgaggggtgttactaattaaaaagtgaaagtggctttttattttgttctttgcaattttctttattttaaactttttctttgaaataattatgtacactgtaggaagttaccaaaatcgtatgaaccccattcacttttcccctgttttccccagttgtaacacttaatgtaattatggtaaaatgttggaattaggaaattgccaatgacaatataatcttatctaggttttataatctcacgtttaccatgtatgtgtgttatagttttgtgacagtgtatttcatttgtataatgtatgaccacatttaagatacagaactttgtattgtcacaaagaaatccttcacactaaccctttatatcccattcatacagtctcatatctaagcacttgaaaacactaatctcttcccgtccatagtctttccgtttcggaatatattatagaattatatgtcatataatcctctgaaattaactctacattatacatagtgccttttgattcatcaaccagttaatgtagcattggttcctcttttatttacaaatgaaatactattgtatagagtgtgccacactatttaatagtcatccattggagcatatttgggtttctctcaaatttcaattcttattggtacaaggttttgtgtcaatgtcaactctaatttctttaataagaaacacccaaaactgagcattagaatacataacaagtgtacatttagttagtttttagattactggagtgttttcttgagtactaatatgataccaatttacatttcataactaccaagtatctctttatcttcctttgatgacagtgacactttttaattttaggtattttgaataattctaaagtattgtcttgagtttaactggcatttcctcatagataaagatgtaattattttccattctagtgttcatttttttaattgttgttgttttttatctatttggattatattagttctgctgagatttacacatgttaaaaatatgtattcctcattatttacaatggcaggatatatttataatgtctgtttttttaattatcagtcacattgtctttctttgtgtatcatataaatattccttttggagatggcagacagatctcttgtgtgttccaggccagcctggtctacatagcaaaaccctgtttgg

SEQ ID NO: 2365 - DNA, 1326 bp, Mus musculus
accattaagaggaaagcgatggaggagctgagcgctgacgagattcgacggaggcgcctggcacgacttgctggtggacagacctcccagccgaccaccccgcttacatctccccagagggagaaccctccgggacctccaatagctgcatcagccccaggcccctcccagagtcttggtctcaatgtccacaacatgaccccagctacctcccccataggtgcagcagacaacatcgctgtcagagggttgcatgtaggtcaacaccaccaacttctccccatggactcatccaagaagacagaggtggttctcctggcctgtggctcttttaaccccatcaccaacatgcacctcaggctgttcgagctggccaaggactatatgcatgctacaggaaaatacagtgttatcaaaggcattatctcaccggtcggtgatgcgtacaagaagaaagggctcatcccagcccaccaccgaatcatcatggcagaacttgccaccaagaactcacactgggtggaagtggatacgtgggaaagtcttcagaaggagtgggtggagactgtgaaggtgctcagataccatcaggagaagctggcaactggcagctgcagttacccacaaagctcacctgcactggaaaagcctgggcggaagaggaagtgggctgatcaaaagcaagattctagcccacagaagccccaagagcccaaaccaacaggtgtgcccaaggtgaaattgctgtgtggggcagatttactggagtccttcagcgtgcccaacttgtggaagatggaggacatcacgcaaatcgtggccaactttgggctcatctgtatcactcgggctggcagtgacgctcagaaattcatctacgagtccgatgtgctgtggagacatcagagcaacatccacctggtgaacgagtggatcaccaatgacatctcgtccaccaagatccggagggcgctcaggaggggccagagcatccgctacttggtaccggacctggtccaagagtacattgagaagcatgagctgtacaacacggagagcgaaggcaggaatgctggggtcaccctggctcctctgcagaggaacgccgcagaggccaagcacaaccattccactctgtgacacagggcacggcgtccgcagaggctcgtctggagactcgaaactcagggaaggacttgccatcatcctgtttcatcaactgaaagataaaggttcgatttaaaaaaaaaaacaaaccaccagggaattaagatccgtgactgagatgaatgttttaaataagaccattaaaaaaaaggatgtaat

SEQ ID NO: 2366 - DNA, 1625 bp, Mus musculus
gggggcgcggaggccgcgcggtgactggtacggatggttcccacccgcggtctcttctgcacactcacgggtgaccgtgcccctgctggcggtcttgcccccccctgtcgacccacctctgtcctgggctcttccgctcactccccactcagctccgcccgagcctgcgctcggagcgcagacctgctgggcccggcccggcccggcccgagtgccagcgccctagtgtcccccggcttcccggggacgcggggcccgaggccgggctttggggagggacacgcctatactgcctggcctgaacctctgtcgggacagcttggcctgtcactagcctgtcttgtttttgctctctcccagggatactttgcagtggggcaagaatttgcgtccgccttcttcactagaaatggcccatgtgctctgtaacagagccagactggtttcctatctcccaggattttgttctttagtgaaaagagtcatcaatccaagagccttttcaactgcaggatcttcaggttctgatgagtctcatgtggccaccgcacctccagatatatgctctcgaacagtgtggcctgatgaaactatgggaccctttggacctcaggaccagagattccagcttcctgggaatataggcttcgattgtcacctcaatgggactgcctcacagaagaaaagccaggcccataaaactttgcctgatgttctagcagagcctctttcaactgaaagacacgagtttgtgatggcgcagtatgtaaatgagtttcaggatagtgatgcacctgttgaacaagaaattaacagtgcagaaacttactttgaaagtgccaaagttgagtgtgcgatccagacatgtccagagctgctgcggagagattttgagtcactttttccagaagtggctaatagcaaactaatgatcctgactgtaacccagaaaactgaaaatgacatgactgtctggagtgaagaggtggaggttgagagagaggtgctcttggagaagttcatcagtggtgctaaggagatctgctatgcccttcggcgtgaaggatactgggctgacttcattgacccatcatctggtgtggcattttttggaccatataccaacaacacactttttgaaacagatgaacggtaccggcatttaggattctcagttgacgaccttggctgctgtaaagtgatccgtcacagtctctggggcactcatgtggttgtaggaagtatcttcactaacgcaacagcagacagcagtatcatgaggaagctcagtggaaactagcagctggcactgtgatccctgcagcgctgtttgtctgtcatggattgctctatataaacactgtcatggacagcagcttctagaggattcttgtttctaggtatttattgtatcatttatgggtttacatggacaggtgacttggggtttcagaattgcaaatgctagttcctattttggagtgcatgctgaacacatccatattctgcaaagtgaggtcatcagcttgtaaccagggtatgtgtgttctcttagggttgattctcccctttattgggaaaactttaattattttttccaaaaataaatcatacatttgtctatg

SEQ ID NO: 2367 - DNA, 2055 bp, Mus musculus
ctgtctgcacattccagtgggggtggtgtcagccaggctccctgccattccttgttgtctgtttttcacagcagctttacgtctgcagaaatgaaacatccactctgcactcttctttctctcatcacatttatgtgtattgggagcaaaggccttgctgagcagctaactaatgaaaacctgaccacgtccttcctgcctgctaacttccacaaagaaaacacagtcaccaatgactggatcccagagggggaagaggatgaggactacctggacctggagaagctgcttggtgaagatgacgactacatttatatcatcgatgccgtttccccgacagactcagaatcaagtgctggcaacatcctgcagcttttccaaggcaagagccggatccagcgtcttaatatcctcaatgcaaagtttgccttcaacctttaccgagtcctgaaggaccaggctaccacatctgataacctcttcatagcacctgttggcatttctactgccatggggatgatctccttaggtctgaggggagagacccatgaagaagtacactcagttctacacttcagagactttgtcaatgctagcagcaagtacgaggttaccaccattcacaatctctttcgaaagctgacccatcgtctattcaggaggaattttgggtacacacttcggtcagttaatggcctttatattcagaagcagtttcccatacgggaggacttcaaagctgctatgagagagttttactttgctgaggcccaggaggctaacttcccagatcctgccttcatatcaaaggcaaacaaccacattctgaaactcaccaagggccttataaaagaagctctggagaatatagatcctgctactcagatgctgattctgaactgcatctacttcaaaggaacttgggtgaataaattcccagtagaaatgacgcacaaccacaacttccggctgaatgagagagaagtagtcaaagtctccatgatgcaaactaaagggaatttccttgcggcaaatgaccaggagctagactgtgacattctccagctggagtacgtagggggcatcagcatgcttattgtagttccacggaagctatcgggaatgaagactcttgaagcacagcttacaccccaggtggtggagagatggcaaaaaagcatgacaaacagaactcgagaggtacttctgccaaagtttaagcttgagaagaattacaacctggtggaggtccttaagtccatgggaatcacaaagctcttcaacaagaatggcaatatgtcaggcatctcagaccagaggatcgccattgacctgttcaagcaccaaagtaccatcacagtgaatgaagagggtacccaagctgcagctgtaactacagtggggttcatgccgctgtctacccaagtccgattcactgtcgaccgtcccttcctgttcctagtgtatgagcaccgaaccagctgtctgctcttcatgggaaaagtgaccaaccctgccaagtcttaatggcagtggtctgggcacctgatgtagtttggggacactctgtattcctgttttcattctaacaaagaggacagagctattttgctatgataatctctgtggtttatgataataatctgaacagcaaacagtgccattaagtgcacagatgttaatgcaactaatggttgtgccagctattccctagaggtcctagacacacagactgccttagcccccacacctctgtccctaggagaatgaatgggcagagtggagctgacactctctcctcaggcagcctcctcagcctttattcgtcaacggcctctgctcagccaggcccttccagacaaaaggcactgaggaacttgcaccccttccagggagggtgtccaagtagcaccgttcctgcccagtgggaaagcaatcccaacatgtctgagatgttcggacttttaaattcatgtaaatatctcctcttctgctgtgtgtacataggactacatagtctatcctagagataaataaacaaccatatttaccatg

SEQ ID NO: 2368 - DNA, 2721 bp, Mus musculus
tctagacctgaaacttgggaacatggtgctcaacaaaaggacccatcggataactatcaccaacttctgccttgggaagcaccttgtgagtgaaggggacctgctgaaggaccagaggggcagccccgcctacatcagtcctgatgtgctcagcggccggccgtaccggggcaagccgagtgacatgtgggccttgggcgtggtgctcttcactatgctctatggccagttccccttctacgacagcatcccacaggagctcttccgcaagatcaaggctgctgagtacaccatccctgaggatgggagagtctctgagaacacagtgtgtcttatccggaaactgctggtccttgacccccagcaacgcctggctgctgccgatgtcctggaggctctcagtgccatcattgcatcttggcagtccctgtcctctctgagtggccctttgcaagtggttccggacattgatgaccaaatgagcagctctgacagctcccaggaggcaaaggtgacagaggagtgctcccaatacgagtttgagaactacatgcgacagcaactgctgctggctgaagagaagagttccgtccatgaggcccgggcctgggtgcccaagcggcaattcggtagcatgccaccggtccgacggctaggccacgacgcacagccaatgacctccttggacacagccatcctggcacaacgctatctgcggaaatagtgccctcagctagggcactagcccagcacacctcttctcggcccacctgaggcccagccatcgggcctgcctgggcccgggcccagcagtgctggactgattctcccaggctgcagtagggatagggcagggatagggacagcccaggtcacagccagggtcaacagaggtaccacagagctaccttttgggatgattgcttgattgtttttttatctgagaattctagaaagatagctaatctgcttttaatcatgacattttaatctacctctgtctctttaaccacgctgtctctggactgagtgtcaggagggaagaggggagtctacgctcacaacccaggcactggacagctgcagcctggctaggccactgaccccacagtccatataagctgaccatgcagctcgctgctggcccccagtaagcaccccttcccaccgtccactccccgtccccgggggcctgccctcagtctaagctttggaacactctcacctcacctgccgcccaagtcaaatctatttatttttttactgaacccaacttgtatctctaggttcagcccttggccactctggccctgagcctggctgaatagcagggcccgtgtgtgtaggctcccttctcaccccaggcacctaggagccctcttgccagttcctctctcgctctgtttccagacctgtctctctctctgtcctggcagcttctctgaggtgctgctcgtttgcattagtcccgcctcctccatctttcatgtggtacccaggtaaaattggacatagtgtgaagggacctgtggccaccagaggatgctctgggcctactgaggacaggccacttgtgctcagagaacctcacctcaccgcagaagtggtgcctcttccagaagactctggaagattacctacttgggggtaggccttggagggaaatctgtaggggtggggaccttcctaccttcctggcttgagaacagccctgctaccctttttgagccgaaattttgaagtggatgcccgtcttgccagaaacgctgttctctccagaatgcccctccctgcactggacttggcacacccaaaaccaagcaaagacccaactccggaggcctacctcctgtgtaccctcagagagggcaatgtcaccctcctggtaggtagtcctagacccctcctgcctcttgctctccaatggggagaccatgtttcctagagtgtgagctgcccctcaccccctgaaaagctgactcactgtgagtgaccttgggcaagtccccaaacctccttgtgcctcagtttccccatctggaaaaaatggggccacctcttgccagcagtagcagggctgcccatgccccttcctccccatgccccatatccagccctgggctcctgtgcctctgttttgctgggtctgtggagcccacttgagcccagcagttaactcccctggcactcagctctgcctctagttcagccgcccagccactgagagtcagggcatggtgctgcgggggagggctcttttctatatttatttgatagcgataagtctccgaagggagtggaaatgcagtcagcctgggcccttagcccatgactaccctccagtgaggctctgaggcctggctagggccctcctgggcagagcccctgcctagcccttcaggcctgatgcctcaggcctgattccctccttttaaagcaataccttcaggtctgccatgccatcagccagcctggttccttctgagggcaacctgggtctggtggtatttctggtggtgcagatgaggggagggtggggccctcgctgctgtcaggcactgagaagtcctgttgtaaagaaaaacaaaaacaaaaaaacaaaaacaaaaacaaaaaaaacaaaatggaaaaagtcacaaaaaagtttgtataaagacgtatttttgtactacatggggactcttcctgcatgtcagcaataaaacttcctgatctggagct

SEQ ID NO: 2369 - DNA, 1061 bp, Mus musculus
acttggttctgtacctggggcttgtgatctgaaaatcacatgaagactgaaattgaattcaccaacatctgccctaggctttcagacctggggtcatggccctggaccacagccagaaggcaggtctttttgaggcccttaggtccctggggtccatagtagcttgcttactactgtactgtgtggtatgcccttgggaagtggcctcccagggcctggccatcctggggtagccctaggatggatagacccgtgagcaccagagccaaggaacttcacccctgaaccctgtgttgtcaaagctggccccactgacatccttcactcaccttcagggtcttctcccctgggaactttgtaaagatagttgcagtgtctctggcacaagtctgttataaggtcacacagggtctttctttggaaagctggcagctcctgcctttcagttgtccctccaaaagagcggctcttccttccatgaagagatgggctaagtatgttgaatctggaatgagaaatgagagccccctgttctctgccttgggctcagcattctggggagtcaggcactcagcatggtgataaacaagtgcagatggcactttaaacagtagttgctgtctgtgtcgggcagtggtgcagttcttgaagagtactgcagccagcccagggcccagtgggagggccgtccagggactctggccttctcgtcccatctcagacttgctctcagactcactgcagagcatgggttctgtgacctgcttggatggcatcctgtcctcaagcctggccacagcaggctcttcaagaagttaaaactgacccatctggtatagaggtccaagtgacaacgccaggggtgctctggaccgggaagggccattcctaaagttggacccaaggggtgaaaaacactgcacagggtctcaaagacttggtaccaaaaaaggcacgtgcaatctgtccacggctatgcagtctgtccacagctgtgtgctgactacatgctgaaatgatatttttggatatattaggttaaataaaacaatcaaaatttg

SEQ ID NO: 2370 - DNA, 3080 bp, Mus musculus
acagttgctatggagctcgctgaggactggctcgtggagtctttgcgattgtaaattggcccgtgggcgggtctgatgggcaatgggagagggcgcgtgcggttgtgggctcgtgggcagtgcccaggcacggaccgatggaggtcctgacccccggcctctagctctgggactctgggtcctttgtaagcaagtaatgtgaccagatccgcgcatgtgagggctgataaggcacacatggccggttaccctgggccggattctaggttaacttgaacacaggtttctcctgattgttcacctcaacttggggaaatcaactttatgggagttccgcaggtgaggaaccaaggcttggttccttatggccagcccggtctcatacaccagggaggaaaatgcagaagaaaagattcagccccatgtttacctaactccagagcctggttccaccagtccttcagcgatctcccagttcttggttagctgtgcgtcgcgtgatttttgtaaccctatcctgcaggtaccaagacttccatgcatttgacctctcaggagccactcgagtccttgagtggattggtgaaaaaggagtctttgttgctggttatgaaagtttgaaaaaaaatgagattcttcatttgatactacctctcaggctctctgtacaggaaaaccagggtttacacccagagagggacttcaaagtacgccatggaggattttcagacagatctgtctttgacctaaagcatgtgccagataccaggttgctggtgaccagtggacttccagggtgttacatacaaatgtggcaagtcagagaggacaacgatgtcattgaagcagtcagtaccatcgatgtgcaggacaaagaggagagtctctggcctcgggtgtctgtcttctgctctaaggcaccaggaatcctccacggggcgcggctcagcggcctgaggactgtggatgtagaatcccagaagatcacatatagctcaggtacagctgacagtgagtccttgagctgccttcaggtcctagacgcaaatacctttgctttctgtggcaactcaggtcggctggggcttgtggacacccgccagaagtgggcagcgttggagactgtcagccccggctctggctgtagtggagagagatggtgtgcagaagtcaggaacaagggccaaggccctgggccctgcattgccagccttggctcagatgggcagctctgtctccttgactcccggaatctctgtcatcctgtgagctcagcccagtgtccggtgttcaaacccagccctgacccagagctgctgcgggtgacttgggctccgggcctggacaactgcttggctatttcaggtactgttgagaacgtgtcactgcactgctctctcccagaggcggtgggtgcttaggaaggaacctgtagccccatagttagcctggctgcagacgtttaggttgcctctcggaatgctaactgcgatcttccagccatcctgaccactgaacttgcagtaaccgccagtggctcctacaaggctcgcataggttcaggtgtattgagaaacttgtagacagtgaggtgtggaacagccagaggctgcaccagctcagtgagctgcttgctgcttgtgtttttagctatagccatacagcaggctcctgaagcctgggggttctcgctgtgagggtgtgttcagcgggggcacccaggagccagtacaaaggggaagttccaggatccagagagaacaggaggacagcagggtgggatagggacagatggacaagcggacagcactgaagagagacaagagcaagggtggaggagggattgggatttggagaaacttgaaagtttctgctgcgtccatttcctgtggagatgctgttatgaagataaaggtgtcacaggctgaagttgaggatgtagctcagtgaagcttggcatgcaggcaaggacttaagtttgatccccagaacctgtgtggaaaagctggatgttctacacagagaaaccctatcttgaaaacatatatatatagtgtacatatggtgtgggtgtaggggggaaaactggctgtggtggcatgtgtttattataattccagtagggagacagagacaggcagatccctagggcttgtggctgcctagcctcgtcaaattgatgagttccgggccaatgaaaagactctaacagaagacagggtacactgtgcctggacaatggtacctaaggttacctcactgattccacacaagcacctcaggcctgtacaactaccccatacgatgcggacacatccccacaccgctgcagccgcagccttctcggtggctggcctctgagtgtcttgtgatagaggaagtcctccaaggaagagtagggtcacacctctctttgcacgttcttctccaggctttgatgggacagtacaaatctatgatgtcacatcatgggatggaaagaaaacccaagcggagcctctcttcactcacaaaggccacatcttcctggatggaaatgacgtagactctgctcctctggtcaccacccatacctggcaccctcgcaaacccagaactttgttatcagcagcaagtgattcttctctgcatgtgtgggactgggtggacctccaggcctcctgatgacacagcagctgccctcatgggcctctgagaagaggagttgtttgagaggctgacatggactgtgagtgaacacagctctaccacagccgttggcttcaggcaagctagcctgcccttcttgtccctttttcttacctgtaaaatgaaggtgtagtaggtaccacctagtgctgtggggagcatcacaagaaaattacctgagaacagttggtagggcgcacggcataacatggctggaagcgaccattgcctctaggagccctgcgtctccaggtgtatagcagcaggctgtgttcctgtcttcacagcatcatggtgagaatcaggagagctggagtgtgaatgtgggtgtgaactttctcacagaaggaatcgatgtctcagggccaataaacatcaaaaagaatacaagt

SEQ ID NO: 2371 - DNA, 2123 bp, Mus musculus
tccccaatcctgggagaaaagagaagagagactggggtggccaagccagtccagcaaccaggctccagcctcggtggggggaagaagccaagagtggtagggggatctccttgctagagaccgctaggcttcttcatctggaggaaccggggaggcactggggaggaggccggagctgcatggagtttctggggcgcgcaactccggcggggcctcggccactgggctcccgggcgcagcgaggaggcagccgcgcacatgggctaagcccgcgcggccagcgggcgcgggaggggtagaggcgagagcggtgcagggggtgcggggcgcacgttcccccagacgggaggcgaggacaaggacaggggagaaaggagcagcctagatcatcgcgggctctgcaaagcccagctgtgagactcaagggaaaggcaagactcgcgccgcgccgggctcccgggtgccgctgggttgggcaaagcggcctctcaaccagagtgggggcacgccgtgggagccggctacggagaggaaggatgcccgcgcggggacgcgtgtgagcgccagcttgagcgctctgtttcgcgtcgccccctccctgcgggcctcggaggaggtgcctgggctgccgggcagcggagctccggctccaggagagggaaaagatgccgttccaccatgtaaccgctggcttgttgtacaaggggaattacctcaaccgatctctgtctgcaggcagtgacagcgagcagttggctaatatctccgtggaagaactggatgaaatccgagaagccttccgtgttctggacagagatggcaacggcttcatctccaagcaggagctgggcatggccatgcgctccttggggtacatgccgagcgaagtggagctggctatcatcatgcagcgtttggacatggacggagatgggcaggtagattttgatgaattcatgacgattcttgggcccaagctggtgtcatcagaaggtcgggatggttttcttggaaatacgatagacagtatcttctggcagttcgacatgcagagagtcacgctggaagagctgaagcacatcctgtaccacgccttccgggatcacttaacgatgaaggacattgagaacattatcatcaacgaggaggagagtttgaacgagacctcggggaactgccagacagagtttgaaggagttcattcgcagaaacagaaccgacagacctgcgtccgcaagagcctcatatgcgcctttgccatggccttcatcataagcgtcatgctgatcgcagccaaccagatcctgcggagcggcatggagtaggatagcagccttccaccagccacaccgcgttgccagctcactgcgcatgtgcatgccccgcgggcagactctgttcattcacacgggagatctggacctttatggatggatgcattggtacccttcagtaaagaactcaagtttgcagtgcaaccggggtcacggatcaactccatctccttggcagggacacaaaagggctgtcttcaatgctttcatggttttgtttcccaatgcaataaatagccaggagttctcaattattgcttcaaccgccagtagcaactctgaagtgggggggaaaaatactgctttcttttcgtcttggaattccagtagccatccagatagcatggtggcctctgagagcgagaaagaaaagacaggtataagcaacagccacctctatccatgacccaattctttcaacccagggacccacggagactccctgctgaagttgacttctgggttgctacagaaaaggggactttccatctcaccctggcttccttcctccacccagtggagaccccctcccaccaaggcatggagggggaaagccattaagcagggtgcagctccttgcggtccctgctgttctttatcgccttttctacaggacacttgtcggtagagctggggcactctcggttggtttccatggctcttggctttctgtttctgaagtccatcccgcaccagcatcttggaatctgcagagagcctggctcccagctttcttgcctgtgctgccattagagaaaagaaaaaagaaaaaaaaaaaaaaaaaaaaaa

SEQ ID NO: 2372 - DNA, 1381 bp, Mus musculus
  misc_feature 8, 12, 474, 510, 659: n = A,T,C or G
gacggtcnccancgctttttgtagcttgcctggggaagtaagactttaacgaaaacctgatgcgacctctcctgattgcctcgggccgattcatttcgcagttgtgttgcagacgaaagccttctgcctccccacaaagcaagatctgcctcaccatggctcgtccaagttcaaactatggcagatttcggaagtgttttgcgaacgccaagcacatagccaccatctcggggggcggcgtcagtgcggagagtggggttccactttcagaggcgccggaggtctacggagaaaacggcagggctcaggacctggcaacccccaggccctcgcccgaaacccaccacaggtgtgggagtctcaccaccaccggagggaggccacgcggagaacagaacccaaccccgggcacccggccaccgtccagcgcgaagcccgggcccgcgaccagggcagaagggttgtggtcatcanccagaacatcgacgagtcgcatcgcaagggtgggancaagaatctcccggaaatccacggaacaccatttaatactcggtgtatctcgtgtgacactgttgccgagaaccacaggagtccgatctccccagctttagcaggaaaagcgcccccagagccagagactcaaagcgcgagaatcccgntcggcagacttccccggtgcgaggagggaggatgcggaggcttgctgcgacctcacgtggtgtggtttgaagaaaacctggatcctgccattctggaggaggtggacagagagctcgccctctgtgacctgtgtctagtggtgggaacatcctctgtggtctacccggctgccatgtttgcccctcaggtggcttccaggggagtcccggtggccgagtttaacgtggaggccaccccagccaccgacagattcaggtttcattttcccggaccctgtgggaaaactcttcctgaggcccttgctcctcatgaaactgaagggacttcttaaccgccctgtggaaagaggagagggacctgcagtacgtagtcctggagtgctaaagcagggcactaacgggaaaaatggctttatggatgttgagctgaactctggaaaaatatggaaacacccttcaagccccaagcagacaatctgttacgtgatgggtttcaaaataccggcagcaaatgtgtttgatctggaagaggctgtcaagtccttccatattatttgatttgaactgaaatatgagtaattgggatttgatattttttggttagttactggaggggaggattttgtgattaaattgctttagaaggcgattatcttggttgtatgtttgcgtcttggcagaaaacagaaaaagagaattaaaaccctgagggttaaaccctc

SEQ ID NO: 2373 - DNA, 2083 bp, Mus musculus
attcggcacaggacggcgtgtttgacgagccacctaggaagatcccctcagcgcgccgaatcgctgaatcctttctctccacccacctccctcacgcaagctgaggaggagaggtggaaacatgcgggactacgacgaggtgatcgccttcctgggcgagtgggggcccttccagcgcctcatcttctttctgctcagcgccagcatcatccccaatggcttcaatggtatgtcagtcgtgttcctggcggggacccccgagcaccgttgcctggttcctgacactgtgaacctgagcagctcctggcgcaaccacagcatccccttggagacgaaggacggacgacaggtgcctcagagctgccgccgctaccgactggccaccatcgccaacttctctgcgatggggctggagccaggacaggacgtggatctggagcagctggagcaggagagctgcctggatggctgggagtacgacaaggacatcttcctgtccaccatcgtgacagagtggaatctggtgtgtgaggatgactggaagacacccctcaccacctccctgttcttcgtaggcgttctctgcggctccttcgtgtctgggcagctgtcagacaggtttggcaggaagaaagtcctctttgcaaccatggctgtgcagactggattcagcttcgtgcagattttctcaaccaactgggagatgttcactgtgttgtttgccattgtgggcatgggccagatctccaactacgtggtggccttcatactaggaactgaaatcctgagcaagtcggttcgcatcatcttctccacattaggagtctgtacattttttgcaatcggctacatggtcctgccgctgtttgcatacttcatcagagactggaggatgctgctgctggccctgacactgcctggcctgttctgtgttcccctgtggtggtttattccagaatctccccggtggctgatatcccagaggagatttgcagaggccgaacagatcatccagaaagccgcaaagatgaacagcatcgtggcgccagcagggatattcgatcctctagagctacaggagctaaactccttgaagcagcagaaagtcataatcctggacctgttcaggactcggaacattgccaccataaccgtgatggctgtgatgctgtggatgctaacctcagtgggttactttgctctgtctctcaatgttcctaatttacatggagatgtctacctgaactgcttcctctctggcctgattgaagttccagcttacttcacagcctggctgctactgcgaaccctgccacggagatatattatagctggggtgctattctggggaggaggtgtgcttctcttgatccaagtggtacctgaagattataactttgtgtccattggactggtgatgctggggaaatttgggatcacctctgccttctccatgttgtatgtcttcactgcggagctctacccaaccctggtcaggaacatggctgtgggcatcacctccatggcctctcgggtgggcagcatcattgccccctatttcgtttacctgggcgcctataacagactcctaccctacatcctcatgggcagtctgactgtcctcattggaatcatcacgctttttttccctgaaagttttggagtgactctaccagagaacttggagcagatgcagaaagtgagagggttcagatgtgggaaaaaatcaacagtctcagtggacagagaagaaagccccaaggttctaataactgcattctaacgaggtttccaaggcacttggcaaactgaaaagcagatgtatacaatgagcagggtgtgatagagcaagcctgcaatcccagcgctcttggggtggagacagaagatcaggagttcaaggtcatccttggctacagcaggagtgtaagaccagcctgtcttaccacaagcaaccctgtctcaacagaacaaatcaaaagccttttctgctgaaagggattaacagaaacaatgagcaccaaactggacttgtggagaaatgcacactatctcatgaattctgggccactcttccagatgg

SEQ ID NO: 2374 - DNA, 1974 bp, Mus musculus
ggcgcgggcgcattggctgtaccgggcgcgggcgctcggtagcactttgaaccgggcgttgagcagctgggaccggagttgtgctcaccggggtcgggccaggtcgctgctgctctggccatggccgaggcacgcgcatctcgctggtactttggggggctggcttcctgcggagccgcttgctgcacgcacccgctggacctgctcaaggtgcatctacagacccaacaggaggtgaagctgcgcatgactggaatggcactgcaggtggtgcgaaccgatggcttcctggcgctctacaacggcctgagtgcctcgctgtgcaggcagatgacctactctctgactcggttagcaatctacgagaccatgcgggactacatgaccaaggactcccaggggcctctccccttctacaacaaggtgttgctgggcggcatcagtggtttaactggaggcttcgtggggaccccagcagatttggtcaatgtcaggatgcagaacgacatgaagctgcccccgagccaacgacgcaactactctcatgccctggatggtctgtaccgtgtagcccgtgaagaaagcctgaggaagctcttctctggagcaactatggcgtccagccgtggggccctcgtcactgtgggccagctgtcctgctatgaccaggccaagcaactggtcctcagcactgggtacctgagtgacaacatattcacccactttgtctccagtttcattgccggcggatgtgccacgtttctgtgccagcccctcgatgtgctgaagactcgcctgatgaactccaagggcgagtaccagggtgttttccactgtgccatggagacagcaaagcttggaccccaggcctttttcaagggtctctttcccgcgggcatccgtctcatcccccacactgtgctcactttcatgttcctggagcagcttcggaagcactttggcatcaaagtgccaaccacctgacatggccagggacacctgggccaggctcggtcgctgtgctgagctccttggaagagtgggaagggaacgggctctcttccttggcctgggcccatgctggtccccagcaggctcctgctcttccctgccttgggctgctggttatgccttccgaccctgccttggccccactcaagtggcacctctgccctacttactcccaggctctccccactgggtcaccccgtcttcctatcggatgattcactcagaagaggtctggcctggctggtgtcactgtccccacctccctggctgctaccgtgccctgcctggcaagcccagcgaagccgagttcgtttcctgctcccgctggccctctgtgcagggagcagtttccgcccagaacttgggtagtgtggcagggtacggcccgtggcagcttatgcttaccaaatgactagagcacacacacaagcactttgtcacaagagggaccaccgtgctgtgttctggaaggtagtgccttcaggagaggggacaggcaggcagcgcagattaccagcagaagccatgaccgtggagtccagagaaagtgcctggggttcccgagcgcacctcctgtatgcagccttggctgctctaatggtcagttttgctgaaccctcctgctcagcggctactgccgtcaccaggaactgtctgtgtccctcacacgcctgtgccctcccttgcctggcttccccagggccaggtgggcatgctggcagagctggggcagtgatggattcatcgtttgtgccctcccaggacctggcttcctgtatggcaggcatcacccttcaccatccctcaggcttcgaagcagcctgttttccctcaaatggggttgtgtgtatcaaaacgaggttcggccctgtgcctcccacaggtcctcccccaggaagtggcagcagcccaggggcactgcctacacctctcttcaggatctaataaaccaagtggcctggg

SEQ ID NO: 2375 - DNA, 2183 bp, Mus musculus
gagacccttggcggttggacgagcagaaccaccagctccccgccgggtccagcggacacctcgaagcaagagagcaacatggcagctccagctaagggcgagaacctgtccctggtggtgcacggacctggagacatccgcctggagaactacccaatacctgagctcggcccaaatgatgtgttactaaagatgcactcggtggggatttgcggctcagatgttcactactgggagcatggacgaattggggactttgttgtgaaaaagccaatggtgcttgggcatgaggctgctggaacagtcacaaaagtaggagagttggtgaaacatctgaaaccaggagatcgggttgccatcgagcctggcgttccccgagaagtagatgagtactgcaagattggccggtacaacctgacgccgactatcttcttctgtgccacgcccccggatgatggaaacctctgccgattctacaagcacaatgctgacttctgctacaagcttcctgacagtgtcacttttgaagaaggggccctgattgaacctctctctgtggggatctatgcctgccgtcgaggttcagtttccctggggaacaaggtccttgtgtgtggcgctgggccagttgggatggtcactttgcttgtggccaaagcaatgggagctgctcaagttgtggtgactgacctatccgcttctcggttgaccaaagccaaggaagttggagcagactttaccatccaggttggcaaagagacccctcaggaaattgccagtaaggtggaaagcctgctgggaagcaagccggaggttaccattgagtgcacaggagccgagtcctccgtccagacgggcatctatgccactcactctggtgggaccttggtgattgtgggaatgggcgccgagatggtcaatttacccctggtgcacgcagccattcgggaagtggatatcaaaggcgtgtttcgatactgcaacacgtggccgatggcaatttccatgcttgcatcgaagacgttgaatgtaaagcccttagttacccacagattccccctggagaaggcagttgaagcctttgaaacagccaaaaagggagtggggctgaaagttatgatcaagtgtgaccccaatgaccaaaacccctagatgtgaattgatctatgccctcagcccactctctcagcatccgagagctaaatggctagaaggggaggccgtaaatgcagaactttcttttgaatggtaaaaataataaactcataagcggagagcctaagaggagtgggcatgccttaaggacagaagtagggacaccttgagggaccttgtagccagaatgagatgcttatactaaggaaagtctagcacagagagtctggcagataggtcctgggaacgccttttctctagtaccttccttgggtgaggagacacgcatgcctttgtgtgttctactgtgattgccagagagtggggctgacttatgaagaaatggattcattaacatggaagtggccccagggctgaacttttggtcagctgttcagagcacaatgtttctctagttaagtgtcatttatttgaggagaataaaaggaacttgtctggacccagacaaggaactgatctggaagaataagataaatcccagatgaggtaccctagcttacattccccagatgtggaaagtataagggcactcggctctgcccaaagactacctctgtctcagctactaagaattctgtccttacatttgcaaagtggaggcccaccttcccaacactgctcattcatgagcaggagcagtattggttgctaggcaaccagattttttttttcccaaccaaagatcttaaatcctgcctagagggccacaggagggcttgccccactcagaggattagactcctctcccagagtcactcacaggcaattatttcccattccactcagttctggctaccagaagatgctcccctctcagctgggtgaggctgctgatatctgtcggatgggtatcacagcgtaatttcatcatagggcttttctttataagatttgggtccaaatcacaccctttgtgatcttaagataatcaagaaatgcacagtaactgatgtaacttgggctgcagtctgtaatccacctcttcagctataagtaggggacatgtt

SEQ ID NO: 2376 - DNA, 2741 bp, Mus musculus
gcgctctacagcagcggcggcggcagctccggcttgagccgcgcgcgctgcgacctcactcagagcccgcgcattgcccccggctgggccctgggccccgcgcggctccccaccagcccctgagcctacccggtcgctggtccccatggagctgctggctgcagccttcagcgccgcctgcgccgtggaccacgacagctccacctcggagagcgacacgcgcgactcggcggcgggacacctgccgggcagcgagtcatcctccacccctggaaatggaaccacacccgaggagtgcccagccctcaccgacagccccaccactctcacggagccctgcagatgatccatcccattcccgccgactcctggagaaacctcattgaacaaatagggctcctgtatcaagagtatagagacaaatcgactctccaagaaattgaaacacggaggcagcaggatgcagaaatccaaggcaactccgatgggtcccaggttggggaagacgctggagaggaggaggaggaggaggaggagggagaggaggaggagctggccagccctcctgagaggagagctctgcctcagatctgcctgctcagcaacccccactccaggttcaacctctggcaagaccttcctgagatccagagcagtggcgtgctggacattctccagccggaggagatcaggctgcaggaggccatgtttgagttggttacctctgaggcctcctactataagagcctgaacctgctggtgtcgcacttcatggagaacgagcgtctgaagaagatcctgcatccatctgaggcccacatcctcttttccaatgtcctggatgtcatggctgtcagtgagcggtttttgctggagctagagcaccgcatggaggagaacattgttatctcggatgtgtgcgacatcgtgtaccgttacgcagctgatcacttctcggtctatatcacttacgtcagtaaccagacctaccaggaaaggacatacaagcagctcctacaggagaaggccgctttccgggaactgatcgcacagttggagctggaccccaaatgcaagggcctgcctttctcctccttcctcatcttgcctttccagaggatcacgagactcaagctgctggtccagaatatcctgaagagagtggaggagaggtctgaacgtgaaggcaccgccttggatgcccacaaggagctagaaatggtggtaaaggcatgcaatgagggtgtccggaagatgagccgcacagaacagatgatcagcattcagaagaagatggagttcaagatcaagtcggtacccatcatctcacactcccggtggctgctgaagcagggtgagctgcagcagatgtccggccccaagacctcccgcaccctgcggaccaagaagctcttcagagaaatttacctcttcctcttcaatgacctgctggtgatctgccggcagatccctggagacaagtaccaggtgtttgattcggccccaaggggcctgcttcgagtggaggagctggaggaccagggtcaaacactggctaatgtgttcatcctgcggctgctggaaaatgcagatgaccgagaggccacctatatgctgaaggcatcctcccagagcgagatgaagcgctggatgacctcactggcccccaacaggaggaccaagtttgtatccttcacatctcggctgttggactgtccccaggtccagtgtgtgcacccgtatgtggcccagcagcctgatgaactgacgctggaactggcagatatcctgaacatcctggagaagacagaggatgggtggatctttggtgagcggctgcatgaccaggagagaggctggttccccagttccatgacagaggagatcctgaaccccaagatccgctcccagaacctcaaggaatgtttccgggtacataagatggaagaccctcagcgcagccagaataaggaccgcaggaagctgggcagccggaatcgtcaatgaacctccccagctcaggcacctgaagggaagggtgtgggcagggatggggagcaggcccggcagagacgcccgacagattcagagggccttagggaagaatgtcagtgccttctcaggcagcaggagtggcttcggcctgctctgtccctgcccatgctgtggaagctctagtgtcctggccacttgtttgcttgcacactggtgaaaagctaagtacttaggcagtattacaccacctcccttcagtctctcagaggtagaagaaggcaggcatgctccagagaccttccggtgactggaagaggcccacacaagggtccctggcagcaggcaggtggaaggtaaccactgtcaggatcccctgaactgcacgtgtccttccctactttggaagctgttaagagtctaccaggcacacagatggccgcccctgcccgagggagtttgatgagcagtggtgaccctgcctgcccgtccccgtgcctctgccagcctctcttgcacgccaagccctgccctcagcaggcttcccaaagcttagctgagggttcatgccacctctagctccttgaagggcttgatatcacttgtgtctcctgggcccctgatggagcccaggcgttttgcagaatgaattggtcactgcatcctttatggtcatggttttgagaaaagcaaatatcatttttggctgcattaaaagaagcatcctatataaaaaaaaaaaaaaaaaa

SEQ ID NO: 2377 - DNA, 271 bp, Mus musculus
tggcaacatggagggccttctctggaaccaaggacaaatgcatgggctcaaagctggcctgcagctcttctgatggctgtcctgatgccagtgtccatgtagctctgccattggcacagctcagtccagaatccacccatggtacagactggacaacctgagagacagatcagccttattaattcagctttttaccacaatggaaatctgaatgatttttcccccgttttctgttgtgttttgaaaaataataaacagatttttgtcatgg

SEQ ID NO: 2378 - DNA, 1042 bp, Mus musculus
aggcgccggtcaggatggtggacagcgtgtaccgtacccgctccctgggggtggcggccgaagggctcccggaccagtatgcagatggggaggccgcacgtgtgtggcagctgtacatcggggacacccgcagccgtaccgcagagtacaaggcgtggttgcttgggctgttgcgccagcacgggtgccacagggtgctggacgtagcctgtggcacaggagtggactccatcatgctggtggaagagggcttcagcgtgatgagcgtggacgccagcgacaagatgctgaaatatgcgcttaaggagcgctggaaccggaggaaagagccatcctttgacaattgggtcattgaagaagccaactggttgacgctggacaaagatgtgctttcaggagatggctttgatgctgtcatctgccttgggaacagttttgctcacttgccagactgcaaaggtgaccagagcgagcaccggctggcactaaagaacattgcaagcatggtgcggcccgggggcctgctggtgatcgaccaccgcaactacgactatatcctcagcacaggctgtgcgcccccggggaagaacatctactataagagtgacctgaccaaggacattacgacgtcagtactgacagtcaacaacaaagcccacatggtaaccctggactacacagtgcaggtgccaggcactggcagagatggctctcctggcttcagtaagttccggctctcttactacccacactgtttggcgtctttcacggagttggtgcgagcagcctttgggggcaggtgccagcacagcgtcctgggtgacttcaagccctacaagcctggccaggcctacgttccctgctacttcatccatgtgctcaagaagacagactgagtttctccggctcccagaagcccatgctcaggcaatggcccctaccctaagaccatcccctaatgcagatattgcatttgggtgcagatgtgggggtcgggcaaacggagtaaacaatacagtctgcattctccaaaaaaaaaaaa

SEQ ID NO: 2379 - DNA, 2383 bp, Mus musculus
ttgatcgtgggcatcactacgggcttctggatctggtcgggcaagaccctgcagtcatggcgtcgcttctaccacagactcagccacagcagcaagggggaaactgcggtatgagccccggtccttacccacccttgcctcttctacccttttacaggaggagaggcatggtagggagagaactgctgggtgggggcttgtttccgtaagctacctgccccctccactgagctttaacctggaagtagaagttatttggaggtgagaagagatttggggcgagagatggttttgagaggaggcccagatgaaaaaaggcaaaggcagtggccgaaaagacttctggctaagacttgcaggacgatgctaactgtgaaagatatggaccggctagggcctaagggaaaggttgagaccagcagagagagagactggtgaggttttcaggcgccagagatgagccagggctgtgagtccaatcccctgctgcaaggcaagtggttgttctcactctagtgaaggggggctgggaggggagggtgataccgctctgtctgtagcctaggctttgtggccaagatgggggggacctcctgcggtgcccttgtcaagtggtggtcaaaccataatctcttttcactggggccaaactggagcccagatgggttaatttccagggtcagaccttacagtcctcctcccgggccccctcccgcctgcttttccttccctactcctttcaagtctagtaaaataagcatttggaaggccgggccctgcctgctagagtcctagcgtgaagttggttttcaagaggaggccaagaaggcgagtgggagatacagtctgctactttttaatttgttgctactttttcattttctagggaaggcagagagaaaaagaatgttttatttggtttcataccctgaaaaaaagtcatgacttgttgcttttcaaaacaggaacgcattcacacacacacacaccccatcccaccccccttgtctttgttgtaagagacaaagcgggaaacaaaagtgtctccctgaggaaaggcctaactgtgaagccagcagcttttacaggcaaagccacagaaatccgaggttttcctttggttgttaatttggttgagataaacattcctttttaaggaagagtgaagagcagctttcatacccattcaggcacacgttctgacttggataaagggaaatgctaggagttttgttatttgttttaaacagatttaattcagaacacatgatctaatagactcgtttgcttaatgaaatctcctcccattctacgcccccataacccaaattttgatttttctgcccccttccttccgtccaatttgggatttttgctgtttttgttttgttgtgttttgtttttcctccagacagggtatctctgtgtagccctgactatccaggaactggctctgtagagcaggctggctttgaactcacagacatccacctgcctctgcctctcaattgctgggattaaaggcatggtccaccaggcctggctccccttcctaatttgtatctttcaagacataacgctcacattagtaaagataaaagacaaaaattttaacttaaaggtttaaaagcattttgccctcattttcttgttctagagatgtaaacatctatctatcagacacatgagctgaccctttctctctctggttgcatgaggcgagggcaagaggaatgatagcgaaggaagaggagagtttgagtcaggtttcaagaaagtcattaagggaaggtgaacttcaaagtgattctggagttctttgaaatgtgctagaagacttacatttattaatcttaaatcgtgtacttctctttttttccctgcaatagaagtctggttctttggcataatgtaaagctgagcagagcatcatgggagttgacctttaccctacctttgacactgactgtcctccaattttgcaatgttcttcagtttctcagagcagtttttaatgccagccagggggggattgtcgggaggacagattacttcatatgtgtcctgttcagttgaatggagctgcttttacaattaaagtgatcttgtattttttaaactttcaaagtgatctcacctgtcagaatttttttaagctgccactacacaggtttggcatcttttgtgttttatctctttaagtgcatgtgaaatttgtaaaatagagacagtgcagtatgtatattttgtaaatctcccatttttgtaagaaaatatatattgtatttatacatttttactttggatttttgttttgtttacctttaaagatctacaatgaagccccactttatcacatgtacagatcacgaataaatttttt

SEQ ID NO: 2380 - DNA, 1937 bp, Mus musculus
gaggagcccagaatcgaatcaagtcagccagccacacctcttgccgatccacgccggctgcctgaagttagctgtcatccagtctggtttagccgcgccaagacttggtcctccgcaagcatcaaggactggctctttcgctcatcttcctccccggaaccatgctttaagccagcttctcgctcccccgcttgccagtcttgtacagaagggtcccggtgcaggctccatgaatagttagagaagctttggatctacgtgggaaaagggcggactgttaccttcgctttgtcctggagggcccgctttgacctttgacctaatggcagcacctccgctgggccgactggtgctgacccatctgctggtggcccttttcggcatgggctcctgggctgctgtcaacgggatctgggtagagctgccggtagtggtgaaagagctcccggagggttggagcctcccttcctacctctctgtgcttgtggcgctgggaaacctgggtctgctgctggtgactctgtggaggcgtctggctcgcggcaagggcgagcaagtccccatccgagtggttcaggggctaggcatagtgggcacaggcctactggcctctctgtggaaccacgtggccccagtggcaggaaagccgtactcagtggccttcctaacgctggcgtttgtgctggcattggcctgctgtgcttctaatgtcactttcctgcccttcttgagccacctcccacccccctttttacggtctttcttcctgggtcagggcctgagtgccctcctgccctgtgtgctagccctgggtcaaggggtgggccgccttgagtgcctgcatgtgcctgccaacaggaccactgggcctccgatcgaggtgtctcccattaatttccctgaacggttttctgccaccacgttcttctgggtgttgactgcccttctgggcacttcagcagctgccttccaaggcctcctgttactactgccatccccgacatctgaacccacaacaggtacagggcttcgggtagaaacaccaggaacagaggaggaagaggaagaggaagaggcctcacctttgcaggagccaccaggccaggtggcaggcattgtttccagcccagaccctaaggcccatcagctgttctcttcccgaagtgcctgtctactgggcctgctggccatcaccaatgctctgaccaatggcgtgctgcccgctgtacagagcttttcctgcctgccctatgggcgcctggcctaccacttggctgtcgtactgggtagctgtgccaacccccttgcctgctttctggccatggcagtgctgtgcaggtctctggcagggctgtgtggtctgtctctgctgggcatgctcttgggctcctacctgatgacactggcagccttaagtccctgtcctcctctggtgggcacctctgcaggtgtggtcctcgtggtactctcatgggtcctgtgcgcaggcacgttctcgtatatcaaggtggcgatcagttccatgttacacagcggaggccggccagcactgctcgctgctggcgtggctattcaggtgggctctctgctgggtgcggtcgccatgttccctcctaccagcatctaccgagtatttcgcagcggaaaggactgtgtggaccagtgtggcctctgaacccagacgtgtaggagttacttcacacttgtctccacctggagggtaggagggatggtcacagtgcctgggtcctgtggcccaaggtggccaccctacacacagataatatggatatttcacactccacaagagacctggctttggagaaaagaccagtgtgaggaccaaagagcaggcccagacccagggatagattggagctgcgcggccttcacccctgggacctctgtgggatttgcacaataaaacatcttcatcc

SEQ ID NO: 2381 - DNA, 1382 bp, Mus musculus
ggagcctgcgggggcgccgaaggtgcctgaggaacgcctcggggagacagcagcggcctcaactctgagctgcggcgggggcgcgcgagcgcagcgtacaaagcgagtcgctggccacttctaggggggtggccctgaggggcgagcggcccgtgtggcccgatcccggggctccgtgacccggccctgagcatctcggggtgtcaaggagcgtcttcggaggccgcccggggcccagcgctgccgccaccgagccccggggcgccccctggatggctgagctgccccctcgccggccgcccgggcgccgcagcggctgaggtcgctgggatcgcccggccgccgcccccatcgccggcccctgcatgcccggcgcccgggtcgcagcccacctggacgctctgggccccctggtctcctacgtgcagccaccgctgctgccctctatgttctacgtgggcctgttcttcgtcaatgtgctgatcctttactacgccttccttatggaatacatcgttctcaatgtgggcctcgtcttcctgcccgaggacttggaccaggcgctggtggacctcggcgtactttcagaccctggctctggcctttacgatgccgactcagagcttgacgtcttcgatggatatttggaataatgtcgtgattactgttccccacttgccttccaccatccgcaactcttggcctggaccagccgcccgtaccatgccgctgccactggttgggggcaccatctggacagggatgggaccccaggaagaggcccgcctgctcatgccaacaacagggttcctgccccaacccaggtgtctgccaggagaaatgaggactcggcgcagggacagggagtgtccaggccctccgaaggccccgctcgcctgccacccggctctccactgtcctgggtctggttgtgactcgccacctttgtgatggatgtttacaggcacccaaccagacgtcacctctctgcacttcatccccagctgcacctgcctcccccacttaacctctgggaaggacatggagagctgaagtgacaaatgggctcattctcaggccactctgtcggcattgcttgatgccggttgaccttaagctgggaagactgcagacccaagactgttgatcgtagtttcagggagtcactctgaggagggctatgccagggccaggcaggggttaacctctccaggttgacagaactgagatactgcactgggaaggccatgcttccctggctagaaatctatttttggaagtgtgagtggtgcgcatagtgtgaatggtgtagatccttgatttccataaacctgtaaaagcaatacttagaggctgacttatttcattaaaaaaatgtaagc

SEQ ID NO: 2382 - DNA, 1247 bp, Mus musculus
gtgattctcaacatctcctcagccagtggcatgctcccagttccattgttgacaatctactctgcaaccaaggcctttgtagatttcttctctcagtgcctccatgaggagtataagagcaagggcatctttgtgcagagtgtcatgccataccttgtagctacaaaactggcaaaaatacagaagccgactttggataagccctctgcagagacatttgtgaagtctgcaattaaaacagtaggtttgcagacccgaaccactggatatgtgatccactctctcatgggctcaataaactcaatcatgcctcgttggatgtattttaaaataatcatgggtttcagcaagtctttgcggaatcgctacctgaagaaaaggaagaagaactaagtgctgctgagttattgggccccttggccaggtgtttgacctgtgcctatacactgggcacctgcctgtccccagagtcttcactgttgtctcagtaattactaacatggcatagttggcagaaaacaaattccttttagaggctcctaacatatattctggatacaaccaggagtaatttgaagtttaatgtaaatgttcttggcagatgtatgttcctttgacaaaaaggaacaaatcccagaatgacagcggtagacacagacccatctggcccacagtgccaatgaccacattatatttggtctggaagctactataaagtgcattttttattttagcattagagggaacagggctcgattaatttgttatgggcagattcagtgtagtttacatcgagttctgtgagcttttctaagtgtatgtcccagcttcgtatttatgtggcactggtcttctcaaaggtggctaagacataaaaagagaattgaaacatggagttctttctaacacgtaagtccacaaaatgttattcttggaccacacatcatgtctgctctgttcaaatgtatgtaaatactgaatgctatatagtgtgcccggaatgtagaggtaagtgggccaaagtgtacatcaagaccaacaacatcctgtggtaccgcaggatccaggaaagcagcctgtgtggacacacagcattcgttgtgtctgcactgcacccggatacttgcctaggatggcagactccttctggggtgggtggtggggtcatggaaacatgttctttctaagatggtgtctcatatttagaattcatatatctgcttttaataaaagatgatgtaactgcg

SEQ ID NO: 2383 - DNA, 1219 bp, Mus musculus
  misc_feature 696: n = A,T,C or G
tgtaatcctgctgcctcagccttgagtgctggaattgagtgtgtgccaacttgaccagccttttgtttcccttttaatactaaaccttacagtcaggatttggagttcttacatcatatataatatgtaataaaccagggtgaatattggcatattcaatatctccagttttaatagtggcattgaagtggttctgggccaaaagaagtcagtttgtgaatgttgtctgttaagtattacaaaataacaagggaaaaaaaacaaaataacaagggttagaagttcaaagtaaaaaacagacatctttgatttctgattaagaagaagcactctacatctttttttttttaagttttctaagtttgttccttctgagagattaagtagaaaacacctttaaaatcatgtcagcctgcttagaatgtacatgttaaaaagcgatttaagatgaagacactagctttacagtgtgtacaccttttctctaaaataaacttttgtggctttagtgtcttagaaggagagtcctagcatgaaatggtcatctcttagatttgggaggaaggaaccactgttacctgtgtagtgttacagcatattgcctcaaaagtttttgtttttgggctggtgtagctttggctgtcctgaaatgaaacactcactatataacccacacttgcctcacagagaccctcntgcctttgtctcttgaatgttgggacaaaagtatgtgccacccctacccagcgagaacagtttttaatgaaaactgagctagattgtccagttctggtaaacagtcttccagtcatctcacaaccattattacaaccatgtacaaagggactccactccactgtccctgtacaaggacttttgacagtttagtgcttagtaactagtcttagttttctcccttttagaaaaactgtacatttgatctctcaattctgtttgcaaagcagtgcagaaaactataatcaaatgtgacatgtctataaaataatttttgacataacagacatgaacagacataagaacggcttccaatgttaattgataatctataaatatcattttggaatttgactggttcacaaatatatccacaaaatgtttgcatatggaataatagaagcatataaaccattgtatgtaaattgcatcttcatactagcaaacaagttaacaaatgataataaatgcaattcagttttgg

SEQ ID NO: 2384 - DNA, 1872 bp, Mus musculus
gcacagtgccttgaccttcaactccaacaacatgactgtgtccttcacctcaggacttgccctaacgcagcctcaggatgcatctccactgaaggactgtgcccacgaaactctcgctgtgtcctggaacacagggcatccagagactggaccttccacgtgctcttccgacccaggcttttcctgccagcgcaggctggggaaccctgcagatggtgccagagacatcagccaacctgcttcaaccttgaggggctgccagcgaggctccccgcattcagaagtggtcggttactctgtgccagggcaaaatgaccaaggcagtgactctataaaaggctctgcaagagtctgtcaggctccagaagacagagacagaggggtcgggagcagcgagacagagggcaaccaggtctattttgccatttatactttcaaggcacgaaacccaaatgaactgagtgtgttagccaatcagagactcaggatccatgagtttaaagacgtcacaggcaatacagagtggtggttggctgaagttaacggaaggaagggctacgtcccatccaactatatccggaaaaccgagtacacctgagccaagttgcctcccgccctgccttgctgccgctttcagtccgacggaaggtcctggagggcttcgggctcctgctcccgagcagggacccaccacactgcctatccataactcggagcgcaagataagctttgttctgattgggttgtacactttgatgctcgctagaatttgaagtgggtggaccccaaatgtttgccagtgattccgtgtccacaagaagcaggccaagtgccggtgtcagctttgggaaatgagacgttcccaatcagagaagcagtattgtacgcgggaagctgtgccagcatcagcggatgctggcattggttgccgcactccatggtcgactgagcagtcacggggtgaggaggagtgggctccgagagctcctcctttatgcccccatccacggtcttgtcacaatcacaccaaacctggtgtgtcagagtgttcgagacaccccggtgcccggcagccttctctctgacacttgcccctcttagttcttaacatgctaacctttcactgcttccccgttgaatgtttacagtctaacttttattctgaccgtgtgtctgaaaggttcccttaccttgtcgaacacggtcagctgcctcttccctgacactcatttcaactttatttgatctctatgatgtctcctaacctttctcccagtacgcgataactaacggacttccctagactaggggggctcggggctcggcactccgcccagccactgaacgtagtcattcattctgccggtggaaacgggacgcctgcccctcccctttccacccttgcacttggctgcctctagtcacctccacgcgtgctcaagacaaccacgtggcttattcaaagtaggtaggatcagtggccccagaagcttgtcttagagtcggagataagtattttccttctcaccacctactgccatacttcagagacaatattcaaagtcagacagatgctaaagtgcctaatgagacctcaaacccaaggctggaaggtggccgctaaaccctcatgtgaggaaatggcccgagagacttgtctcagcgtgggtcttagactccaggtcttccccatccttccagccgctgctcttctagctgcacatttggccttaaagtcctgatgagtcaggacttgcctgtggacacccatccacggctgcaccactggtcagagcctcgtatgaagtgtttatatttagaaatgtttatatttaagtagctattttataaataaaagcatttctattgacc

SEQ ID NO: 2385 - DNA, 2240 bp, Mus musculus
agcgcgtcttcttgctgcggtcggtggcaccacgcgtcgctgccctctcaaccaaaccgcaagcccaggaacagcctcccgcgagccctgaggctcttcggggatgtggggcggccaaggctgtgcggccgcctgtgccagccgtggacttcaccaacacgcaggaggcgtatcgcagccggcggagttgggagttggtgcgcaacctgctagtgctgcggctgtgtgcgtcgccggtgctgctagcgcaccacgagcagttgttccaagttgccaggaagcttctggggcaaaggatgttcgagagattgatgaagatgaccttctatggccattttgtggctggcgaagaccaggagtctatcaggcctctgatccggcacaacaaagcctttggtgttggctttatcctggactatggagtggaggaagatctgagccctgaggaggcggagcgcaaagagatggagtcatgcacttctgaagcagagagagatggcagtggagcaaataagagggagaagcagtatcaggtgcaccccgcctttggagaccgcagagatggtgtcatcagtgcccgcacctacttctatgccaatgaagccaagtgtgacaactacatggagaacttactgcagtgcatcaaggcctcaggtggagccagtgatggtggtttctcagccattaagctcactgcactggggagaccacagtttctgctgcagttctcagacgtgctgaccaggtggagacggttcttccatcaaatggctgcagagcagggacaggctgggcgtgctgctgtagacacaaagctggaggtggcggtgctccaggacagcatcgcaaagatgggcatcgcatccagggctgagattgaagggtggttcacgccagagacgctgggagtgtctggcaccgtggacttgctggactggaacagcctcattgacagcaggacccggctctccaggcacttggtggtccccaatgtgcagactggccagctggagcccctgctgtcacggttcactgaggaggaagagcagcagatgaaaaggatgctgcagaggatggatgtactggccaagaaagcaaaagaagcaggtgtgcgcctgatgattgatgctgagcagagctacttccaaccagccatcagccgcctgaccctggagatgcagcgcaggttcaatgtggataagccgttcatcttcaacacattccagtgctacctcaaggatgcctatgacaatgtgaccttggatatggaactggctcgccgtgagggctggtgttccggggccaagctggtacgtcgtgcatacatggcccaagagcgtgtcagggcagcagagatcggttatgaagaccccatcaaccctacatatgaagccaccaatgctatgtaccacaggtgccttaactatgttctggaggagctgaagcacagcaccaaggcagaagtgatggtggcttcccacaacgaggacaccgtgcacttcackttgtgcaggatgaaggagataggcctgcatcctgctgatggtcaggtgtgcttcggacagctgctggggatgtgtgaccaaatcagcttcccactaggccaggcaggctttcctgtgtacaagtatgtgccctatggccctgtgatggaggtactcccttacctgtcccgccgtgccctggagaacagcagcatcatgaagggtgctcagcgagagaggcagctgctatggcaggagctccgcaggcggctgcgcactggcagcctcttccaccatccggcctagtcaccgcaggagccttgcccacccgctcgtactccactcaaccccttacctctggggcttcaggcggggcacagcttgggattgggctggggttccttaacccaacctgcccagacacagttcacctttttatgcccaaggctttttatgcccaaggcgggatttcatcagtggacagttcctgaggaacagtgcccaagatggtcgtctggtcacagaggctgccttctgggacttcctgtaccccaaggaacagacactcaggagtggggtcagttagagcccctgggagctgccccactaatttgagtaagcactgaccacttctgcaggttacagagccctagtccaggattaaccttctgccagggtctaacccattttccctgcactgggcagaggacagactaggaagcctgtttagtcaataaatcatcctgtaacagagtc

SEQ ID NO: 2386 - DNA, 1909 bp, Mus musculus
  misc_feature 8: n = A,T,C or G
tcctactngagagtcttcggagagtcttacccaaagtcagaggtgtgtgcacatgagtgaggttaccttcagagggaagaaggacccattggatccttggagctggagtcacgggaagtcctgcatgtcgcaagcgtggagatgcagctaacggctgcagtgtcctttttgaccatccttcaggaagaatcaatgtcagtccacacctgtgcacactccttcctgcaagtcattctcctgcacctggagcacagggacacaggtgtcagcaatgcatggctggagacacttctctccgcagtagaattattgccaaaagaaaccctgaggcatgagattctcaatccacttgtttccaaggcacagctttcccaaaccgtccagtcgcgtttagttagctgtaaaattttaggaaaaataaccaacaaatttgatgcccatagcattaagagagaaatacttcccctggtaaaatcactctgtcaagatgtggaatatgaagttcgatcttgtatgtgtcgccagttagaaaacatagctcagggcattggggcagaactgacaaagaatgtggtgcttcccgaactaatagaactctctagggacgagagtggcagtgtgcggcttgctgcttttgaaaccttggttaacatgcttgacatgttcgatacagatgacagaagtcaaactatacttcccttagtgaaatcgttctgtgaaaagtctttcaaagcagatgaatccattctgatttctttatcatttcatttaggaaagctatgccatggactctatggaattttcactccagatcagcacttgagatttttggagttttataagaaactttgtacactgggtttgcaacaagaaaatggccacaatgaaagccagattccatcccaaatcgtagagcaggagaagaaatatacttcagtacgaaagaactgtgcttacaactttccggccatgattgtttttgttgatcctaaaaacttccacatggaactctactctacattcttctgcctttgtcatgaccctgaagtgccagtcagacacactattgctatttgcttttatgaagtatctaaacttctgaattctggagtacatttaattcacaaagagctgataacattgttacaagatgagtcactggaggttctagatgctcttataaatcaccttccagaaatcttggaacttatgtctactggtggagaaaacagtgttcaagaaaataagttttcctcagtgccagacttgattccagcactcacagctgctgagcagcgagctgcagcctccctgaagtggaggacccacgagaagctgctgcagaagtacacctgtctgcctcatatcatatcgagtgaccagatttattaccgtttcttacaaagaatgttcaccatcatgatgacaaataatgtcttacctgtccaaagggcagctgcacgaactctatgcatttttctacgatataatcgtaaacaagagcagaggcatgaagtcattcaaaaactaattgaacagttgggccaaggaaaaagttattggaatagacttcgctttttggatacctgtgaatttatcatagagatattttccagatcatttttctgcaaatatttctttctacctgttattgaactaacccatgacccagtggcaaatgtgagaatgaaactttgctacctgctgcccaaggtgaagtctgcgctgaagattcctgcagacatgcatctcctccagcagctagaaatgtgtgtgagaaagctcctgtgtcaagaaaaagataaagacgtcctggctattgtgaagaaaacggtactagagttggacagaatggagatgtctatggatatgttccagaaaaaaaactatgagaaagatttgttggatc

SEQ ID NO: 2387 - DNA, 1545 bp, Mus musculus
gactctgtgcgcctgctcctcccgaagtgctcctcttctacagctgttccgcagtcgccgccgccatgagggagatcgtgcacctgcaggctgggcagtgcggcaaccagattggcgccaagttctgggaggtaatcagcgacgagcatggcattgatcccactggcacttaccacggagatagcgacctccagctggagcgcatcaacgtgtactacaacgaagccaccggtggcaagtatgtgccccgcgccgtgctcgtggacttggagcccggcaccatggactcggtgcgttcagggcccttcgggcagatcttcagacctgataacttcgtctttggtcagagtggggctgggaacaactgggccaaggggcactacacagaaggtgcagagctggttgactcggtgttggacgttgtgagaaaggaagctgagagctgtgactgcctgcagggcttccagctgacccactccctgggtggggggactgggtctgggatgggtaccctccttatcagcaagatccgggaggagtacccagacagaatcatgaacaccttcagtgtggtaccttcctccaaggtgtcggacacagtggttgagccctacaatgccaccctttcagtccaccagctggttgaagacacagatgagagctattgtattgataatgaagcactttatgacatctgcttcagaaccctaaagctgtacacacccacttacggtgacctaaccatctagtgtccgccacaatgaggtgggtaaccacttgtctgccgattcctggccagctaaatgctgacctgcggaaatggctgtaaatatgtgcccttccctcgcctgcacttcttcatgcctggctttgcccccttgaccagccggggcacgcagcagtaccgtgccctgacagttcctgagctcacccagcagatgtttgatgccaagaacatgatggctgcctgtgatccaagacatgagcgctacttgactgtggctgccgtgttcaggggccgcatgtctatgaaggaggtggacgaacagatgcttaatgtccaaaacaagaacagcagctactttgttgagtggatccccaacaatgtgaagacagctgtctgtgacattccacctcggggcctgaaaatgtcggccaccttcattggcaacagcaccgctattcaggagctgttcaaacgcatctcagagcagttcacagccatgttccgacgcaaggccttcctacactggtacacgggtgaaggcatggatgagatggagttcactgaggctgagagcaacatgaacgacctggtgtccgagtaccagcagtaccaggacgctacagctgaggaagagggagagtttgaggaggaggctgaggaggaggtggcttagagctgtcttagtcactaaagcatgggagcagtgtgaactctttattcattcacagcctgtctgctagccatgtccactgtgcatttgctgtcctgtgtcctgacatcacttgtacagataccaccattaaagcaattcatagtgg

SEQ ID NO: 2388 - DNA, 1731 bp, Mus musculus
tccagctccacgatgcgtcctggcctctgggagacatgcttctggttgtggggaccacttttatggctcagcattggaagttcagggaacgtaccccctaccacccaacccaagtgcacggactttcagagtgccaacctcctccgaggcaccaacctcaaggtgcagtttctcctctttaccccctcggaccccagctgtgggcagctagtagaagaaggcagtgacatccggagctctgagttcaacgccagtctgagaaccaaagtaattattcatggattcagggcgctcggaacaaagccttcttggatcgacaagtttatcagcgctgtcctgcgggctgcggatgctaatgtaatcgcggtggactgggtttatggttctacgggcgtgtactactcagcagtggagaatgtggtcaagctgagcctggagatctcccgtttcctcagcaaacttttggagctgggcgtgtcagagtcctcaatccacatcattggtgtcagtctgggggctcatgttggaggcatggtgggacatttctacaaaggccagttgggacagatcacaggtctggatcctgctggaccagagtacaccagagccagcctggaggaacgcttggatgctggagacgccctgtttgtagaagccatccacacagacacggacaatttgggtatccggattcctgttggacatgtggactactttgtcaatggaggccaagaccagcctggatgccctgccttctttcacgcaggttacaattacttgatctgtgatcacatgagggcagtacacctctacatcagtgccctggagaacacctgcccactgatggccttcccctgtgccagctacaaggccttcctcgcaggagactgtctggattgctttaaccctttcctgctctcctgtccgaggattggactggtggaacgaggtggtgtcatgattgagccgctccccaaggaagtgaaggtttatctcctgactacatccagtgccccgtactgtgtgcaccacagccttgtggagttttatttgaaggagaagagaaaaaaggataccagcatcgaggtcacgtttcttagcaacaacgtaacgtcctcggtcaagatcaccatacctaaacagcaactggaagggagaggggtcatggctcatcctaacccacagtgccagataaaccaagtgaagctcaagttccaagtttctagccgggtttggagaaaagacagaactcctgttgttgggactttctgtactgcccctctgccggtcaatgacagcaagaagacggtctgcatacctgagccagtgcgtctgcaagcaggcgtgcctgctttccaggacctgaaaatagcctgcgtgtagcccgagcctatgcaggaggcagtggccgcagttttccgagggcagtgtgccaagagctgtttgtgagagccgtatttcaccccatttctactaaaggggaaggccaaattcttggtggttttccctgtaagcagttactgtggaggggacagatgactcatgttacagaccttgatctccgtcaccaacatctaacgctttacataaatgcccttttagcttctctatttcgacacaactgtgattacctcacacccttaagcatctatacttaggatttaatagaaatgtacgcagagaaattttttaaataaactgccatggaatatctgaaaaaaaaaaaaaaaa

SEQ ID NO: 2389 - DNA, 3282 bp, Mus musculus
ttttgacacagagtatctctctctctgcttgacttctacaagccatgtggctctacctggtggcactggtgggcctgtggacgcttctgcgcttcttcagggtgaggcaggtggtgagccatctccaagacaaatatgtcttcatcacgggctgtgactctggctttgggaccctgctggccagacagctggacaggagaggcatgagggtgctggctgcatgtctgacggagaagggagccgaggagctgaggaacaagacatctgacaggctggagacagtgatcctggatgtcaccaagacagagagtattgtgacagccactcagtgggtgaaggagcatgttgggaacagaggactctggggcctggtcaacaacgctggcatctccaccccctcgggtcccaacgagtggatgaaaaagcaggactttgcacatgtactggatgtgaacctgttgggcatgatcgaggtgactctgagcatgctgcctttagtgaggaaggcgaggggtcgtgtggtcaacgtctccagtgtcatgggtcgagtgtctctctttggtggtggttactgcatctctaagtatggtgtagaggccttctcagactccctcaggagggagctctcctactttggggtgaaggtggctattatagagcctggcttcttcctgaccggtgtgaccagtagtgccagattatgctcaaatacccagatgctgtgggaccagaccagctcagaaatcagggagatctatggcgagaagtacctggcatcctatctgaaaaggctaaacaaattggacaagaggtgcaacaaggacctgtctggggtgactgactgcatggagcatgctctgactgcctgtcaccctcgtacccgatactcagctggctgggatgctaagctcttctacctccccttgagctacctgcccacctttcttgtggatgcccttctctactggacttccctgaagcctgaaaaagccctctgaagtattcacctatgtgcatacctggggagatgtaggtagagtttgagagagagaatatttaggggaaattaggagagttgggggggggattttattactctggggttctagtcaatacacttcatcttgttaattctcctatgacactactcaagactgatgatgaccaaagaaataggcaaagaattctgccaagggattcagttacaaaagagctggctgatgcccagattatgagcatcatggctaccatgaaggtccacacagatgaggaggctgggacaagtttgtgccaagcactctcctgtgtcctcctctgcaggaaatgtacatgccctggctagtttaaacccctatgcaagatggaattatccctgttctgaaatcacctctgtccaaggtactaggtctgagggagttactaataatgccagcacccattccctggtgtcaggttgccaggctctgggtggaaggttcagttcctggtggtgaaacctagcagagtacggagacaccaatttttcatttgtattgaaattatgggtttctttctttttcttttctttcctttttttttgacacttcttatttttaaaggtaatatgaggtgatctctgttgctctgcgttttgaagtatggctttatcctttagtgaagtttggaacacagagctaaggggaatgtcctgagaaggattggcacaggccagcaggctttctttgactgtctcatcccttccagctaccgaggtgggaacaactgctctccattcaaaacttaataataacacataaggcagaagactgtgcatgcaagtccatggacagaatttacctgtaggcctcagcttcacaagtctttttcctgtagaatcactatgtgaccatgtagagagtatccttctcaacactagtctttcatattggacatttttcaaaagaataagggtcttgaacttctcatggcctctgagagctggctctgcctgctgctaggttggtgaggtttaagagtaggctgtgcagtgaaatcatgtgtggaagagacagaatcctgggctaagtacagacttgccctgggaaggggttcccataaatgcctgactcctcttctctcagtagaaatgtgggggaagaggggacgcaggagaaacttgtaaatatacaataatttctggattaatgaaaatagaaattcctctaccctatcagttgcctggttcattcattttacctatgttattttgagttttttaggaccattgagcatatgtgtgtttaacctgtgtgttccatgtgtgggagcacctcagagatgagaagaaagatggagggttgctggttacaagaaacttttagctggctgcagagatggctcagcagttaagggcactgactgctcttccagagctcctgagttcaaatcccagcaaccacgtggtggctcacaaccacctgcaatgggttttgatgccctcttctggtgtctgaagatagcgactgtgtactcacatatataaaataaataaatttttaaaaagaaaagaaaagaaaaatggaaagaagctttcagccatacaatatggctgtcaggaaatgaatttgggttatactgaacagcaggaagcattcttgattttggactcatttcttcgaaccatgtactgatactgcatcttgtttcattttattttgagatgtctcactgcatggcaggtttaccatgaccttgtaagctctagccttactgtcttcatcactacataaatcatgctgtagtacatcaacagcatctctgcatgttgtgccctgtgagaaggtcaggaggctggacctttctcagtatactctggagcatcgtgatggtttcacaggggaaggggcagcacccaggacagatctacagccccaagtatgggtagagactcaagaacatcatgatgagacagaaccatgtgtaattagcaggaagtactctgtaaggtgatcccaggatgcctgcaacatttcccctttcctcctcacccagttttttgttgttgttcttagaagccagtgtactcagagggacatagaatgactcaggctggcacaagaggatgtttcactcaatcatgcatgagaattgcactgtacccaaccaagacccatccctccaacctgagatcttcaactattagaatacaataaaattctggttattagttccaaaaaaaaaaaaaaaaaaaaaaaaaaaaaaaaaaaaaaaaaaaaaaaaaaaaaaaaaaaaaaaaaaaaaaaa

SEQ ID NO: 2390 - DNA, 1486 bp, Mus musculus
atggggagcccggtgcaactcagcctgctctgtgttgtcctggccagcctcctgctccctgggaaaggtgtgtttattaaccgggaacgtgccaacaatgtcctggcgaggactcggagggcaaactcattttttgaagagttcaagaaaggaaatctggaaagagagtgtatggaagaaatttgttcttatgaagaggtccgtgaaatcttcgaggacgacgagaagacgaaagaatactggaccaaatataaagacggcgaccagtgtgaaagcagcccttgccagaaccaaggagcgtgtcgagatggcatcgggggttacacgtgcacctgctcggagggatttgaaggcaaaaactgtgagctctttgttcggaaactctgccgcctagacaacggagactgtgaccagttctgcagagaagagcagaactcagtggtgtgctcctgcgccagcggttacttcctgggtaatgatggcaagtcttgcatctccacagctcccttcccctgtggaaaaatcactacaggacgtaggaagaggtctgtggccctaaacaccagcgacagtgagcttgaccttgaagacgccctgcttgatgaggatttcctgtcccctacggagaatcctattgaactgctcaacctcaacgagacacagcctgagaggagcagcgatgaccttgttcggattgtgggtggccgggaatgcaaggatggagaatgtccctggcaggctctgctcattaacgaagacaatgaagggttctgtgggggcaccatcttgaatgagttctacatcctcactgctgcccactgtctccatcaggccaggcgattcaaggtgagggtaggtgatcggaacacagagaaggaagaaggcaacgagatggtgcacgaggtggacgtggtcattaagcacaacaagtttcagagggacacctacgactatgatatcgccgtgctgaggctgaagactcccatcacgttccggatgaacgtggcccctgcctgcctgcctcagaaagactgggccgagtccacactgatgacacagaagacgggcatcgtgagcggttttggacgcacgcatgagaagggccgccagtcgaacatcctgaagatgctggaggtaccctacgtggatcgcaacacctgcaagctctccaccagcttcagcatcacacagaatatgttctgtgcgggctatgaggccaagttagaggatgcctgccagggggacagtggtggcccccatgtcacacggttcaaaaatacctactatgtgaccggcattgtcagctggggagaggggtgtgcaaggaaagggaaatatggcatctacacaaaggtcacgaccttcctcaagtggattgacaggtccatgaaagccagggtgggacccacagccgagaccccaaggacagcaggtccgcccaattaaagcagtccttctccagtcaaaaaaaaaaaaaaaaaaaaaa

SEQ ID NO: 2391 - DNA, 903 bp, Mus musculus
  misc_feature 13: n = A,T,C or G
gtgtggtgtgtgnttattacctgcttcgcaggaagacaagaaaacaactcccaataattatagaaatgcatgatgctgattgcctggacagtccccagtattctctatagtgttggagcatctctcttcagccttctgacccagaatgttttacagaccttttatgaagcaagaattttgaaggacttgcttactctgtcttggtagagcttggcagttgacttcctgcattcgttgtcctttctggacagcattctgtctgcagataaagttagagcattttctttgtccagcagctaatttgccacattaaatttaatgcttatcatctttttgaagtggaatggggataactgtcaggaacagacctgtctcatagtcaaaaaaatcataaattaataaaattatatttaaatgctatattctgtaagtctctgagatttttgaagaacaattatttatttatactatatgtgaattgtcaaacatagtttatccttagctatctactttttgaataaccttgaatacatcttattataattatctaaactagtatctaatataaccatgagtttgactatctgactattgattttatttaactatccctaatagttcataatttgtattattatcatctaatatattgtaataacaattttcaaaaggactagaactttatattgtaactttaaaaattatatgagtatgatacctcaaataaatgttaaacacatatattatatgtataaaaataatttaaatttgtataaatatacaataacctataccaatgtatcaaaaataactttatttctgtatcaatacacaaaaattctgtaccagtgtaacaaaatatgaccttgattttacatcaatatataaagattttaccaatgt

SEQ ID NO: 2392 - DNA, 2265 bp, Mus musculus
gctctttcgggcaagggtcatgagagtaatgccactgccatgtgactctggctttatcctgctccctctgcttctgtcttagccctattctgaaaagtccattgtgtaccttgtcaccagctcgtctgatccttctctgagccctcctgagctggaagatttcatcctgatggctgactcaaaaccactcaggaccctggatggggaccccgtggctgtggaggccttgctccaggacgtgtttgggattgttgtagatgaggccattctgaaggggaccagtgcctctgagaaggtctgcgaatggaaggagcctgaagaactcaagcagctgctggacttggagctgcagagccagggcgagtcccgggagcagatcctggagcgctgccggactgtgattcactacagtgtcaagactggtcacccccggttcttcaaccagctcttctcagggttagatccccatgctctggctgggcgcatcatcacggagagcctcaacactagccagtacacatatgagattgcccccgtgtttgtgctcatggaagaggaggtgctgaagaaactccgtgccctggtgggctggaactctggggatggggtcttctgtcctggtggctccatctccaacatgtacgccatgaacctggcccgctttcagcgctacccagactgcaagcagaggggcctccgggccctgccgcccttggctctcttcacttcaaaggagtgtcactactccatcaccaagggagctgcttttctgggacttggcaccgacagtgtccgagtggtcaaggctgatgagagagggaggatgatccctgaggacctggagaggcagatcattctggcagaggctgagggctctgtgccatttctggtcagtgccacctctggtaccaccgtgctaggggcctttgaccccctggatgcaattgccgatgtttgccagcgacacggactgtggttccatgtggatgctgcctggggtgggagcgtcctgctgtctcggacacacaggcatctcctggatgggatccagagggctgactctgtggcctggaaccctcacaagcttctcgccgcagggctgcagtgctccgctcttcttctccgggacacctcgaacctgctcaagcgctgccatggatcccaggccagctacctcttccagcaagacaagttctacgatgtggctctggacaccggagacaaagtggtgcagtgtggccgccgcgtggactgtctgaagctatggctcatgtggaaggcacagggtgggcaggggttggagcggcgcatcgaccaggcctttgctctcacccggtacttggtggaggagattaaaaagcgggaaggatttgagttggtaatggagcccgagttcgtcaacgtgtgcttctggtttgtgcctccaagccttcgggggaagaaggagagtccagattacagccaaaggctgtctcaggtggcccctgtgctcaaggagcgcatggtgaagaaggggaccatgatgattggctaccagccccatgggacccgggccaacttcttccgaatggtggtggccaaccccatactggcccaggccgatatagatttccttctgggcgagctggagctcctgggccaggacctgtgagctgcttctgctctctgccccacccaagctctgcgtagtctcctgggttctcaaaatcgacctttctaggaaacagtggccttgactgtgtgtgctcccacacactcactctcccagctaagtattggctgtcaggaaggtgtctaaacacactacagtatgttcttacgaaatatgcttttattaagttgggcacaggggcacacacctttactaccagcattggggggacagaagcagccagtttgaggccagcctggactacaaagttgggctacccaaaaaaactgtttcaaaaagaaaaaaagaaaagaaaaaagaaatttttttcattaaaattatgtttataaagaattttttttaatatgaaaaaaatggtccaatgtattgaaaagctggatatgagtttatgaatcccagtatttgagttaggctaaaaatcccataggaaaaggctgtcggtggaattgtgccaaaggtcaccagttttccctggaacgggatattaggttattcccaaatcaccctttcagcccttttgggcttcccccttttattgtgtaacaacatcccaaacttttgaaataggccaataaagctgcggtttcccttat

SEQ ID NO: 2393 - DNA, 820 bp, Mus musculus
gctttgggagcagccttggcccaggttacaggtattcaaactcgagtccttgatgtcacaaagaagagacagattgatcagtttgcctcagaaatcgagagaattgatgttctctttaatgttgctggttttgtccaccacggaaccatcctggattgcgaggaaaaagactgggacttctcaatgaatctcaacgtccgcagcatgttcctgatgatcaaagcattccttcccaaaatgcttgctcagaagtcaggcaacattatcaacatgtcgtctgtggcctccagcatcaaaggggtggagaacagatgtgtgtacagtgctaccaaggcggctgtgatcggtctcaccaagtccgtggctgcagacttcatccaacagggcatcagatgcaactgtgtgtgtccaggaacggttgacaccccatctctgcaagaaagaatacaagccagagacaatcccaaagaggcactgaaaactttcctaaacagacaaaagacgggaaggtttgcgtcggccgaagaggtcgctctgctctgcgtatacctggcctcggacgagtcagcctatgtaactggcaaccctgtcatcattgatgggggctggagcctgtgaccgcgaggatccctgctgggaagacaggcccttcctagccacggagcaaagcaagctgcctgggtgatcatctcttctgagagtgacattcatgaaaataagccctttagtgattgttcccgagagtgtgactctttaatagtctctcgtctcttctgaagctgtggtaaataaatcaaataaaatgtattgattttgtggc

SEQ ID NO: 2394 - DNA, 1323 bp, Mus musculus
  misc_feature 509, 544: n = A,T,C or G
ggcatgcagtcccggaccaaggagaggcgtgtgtttctctttgagcagattgtcatcttcagtgaactgctccgaaaggggtccctcaccccaggctacatgttcaaaagaagcatcaagatgaattacttggtcctggaagacaatgtggatggtgacccctgcaaatttgcactcatgaacagggagacttcagaaagggtcattctacaggctgccaactcagacatccagcaggcctgggtgcaggacatcaaccaagtcctagaaacacagagggacttcttaaatgcactacagtcacccattgagtatcagcggaaggagagaagcacagctgtgatccggtcccagcccccgagggttccacaagccagccccaggccctactcttctggcccggtgggctcagagaagccccccaagggctccagctataacccgcctctgccacccctgaagatatctacctctaatggcagtccagggttcgactaccatcagcctgnggacaagtttgacgctagcaagcagaacgacctgngaggctgcaatgggacatcaaccatgactgtaatcaaagattactatgcactgaaggagaatgaaatctgcgtgagccaaagtgaggtggtacaggtcctcgccgtcaaccagcagaacatgtgtctggtgtaccagcctgccagcgaccattccccggcagcaaagggctgggtcccaggcagcatcctggcgcccttcgccaaagccacagcagcggccgaaagtagtgacgggagcatcaaaaccctactgaaaccctaggggagaaaaggcatgccttccgttgctacatttggcccaccacgggactcactggactggacttctatttatattgtatgaagttactgatatatatatatttttttttttgattggcacctagaaatgaccttagcacaaatgccaggcctggacaggtcagagcctgcttcttctcccaaaagagaggggactttttttttttttttttttttggctgtccacggcaattccactgtacagattgtaactttttatttttatttctctcctcccctgtcactttaatatatgttcatggtaatttgtaagatattccttttccttattttgattgcaaaaactcttctgaacacattcctgtataaagcattttgcactatttaaagaaacccttgtggatgaagtcaggttgtgcaatatggggagccgcaatgtttagcattgtacctgtaatgtaactaataattttaaatgtactattttaaatatgtaaaataaattttcaccatgagc

SEQ ID NO: 2395 - DNA, 1592 bp, Mus musculus
ggggttcccttcttggatctggatctaaagctcttggaaaccacaaggaacactttatatcacatctatatcctcaactatctgattcctgtgttgaacatgcctggatggagctgcctggtgacaggagcaggagggtttcttggccagaggattgtccgaatgttggtgcaggaggaagagttgcaggagatcagagccctgttcaggaccttcggtcgaaaacatgaagaggaattgtccaagctgcagacaaaggccaaggtgagagtactgaagggagacattctggatgcccaatgcctgaagagagcctgccagggcatgtctgctgtcatccacaccgctgctgctattgacccccgtggtgccgcttccagacagaccatcctagatgtcaatctgaaaggtactcagctcctactggatgcttgtgtggaagccagtgtgccaacattcatctacagcagctcagtgcttgtggctggaccaaattcctacaaggagatcatcctgaatgcccatgaggaagagcatcatgaaagcacatggcctaacccatacccatacagcaaaaggatggctgagaaggcagtgctggcaacaaatgggagactcctgaaaaatggtggcactttgcatacttgtgccttaagactccctttcatctatggggaagaatgccaagtcacttcaaccactgtgaaaacagcactgaagaacaacagcataattaagaaaaatgccacattctccatcgccaacccagtgtatgtgggcaatgcagcctgggctcacattctggctgccaggagcctacaggaccccaagaagtccccaagcatccaaggacagttctattacatctctgataacacccctcaccaaagctatgatgatttaaattacaccctgagcaaggagtggggcctctgccttgattctggctggaggcttcctctgtccctgctttactggcttgccttcctgctggaaactgtgagcttcctgctacgtccagtttacaactataggccaccctttacccgcctcttgatcacagtgctaaatagcgtgtttaccatttcctataagaaagctcagcgcgatctaggctatcagccacttgtcagctgggaggaagccaagcaaaaaacctcagagtggattggaacactagtgaagcagcacagggagacactacacaaaaagtcacagtgatatgtggagggcgaggacatggccctgggtgttatcaggtcctccagagagggacttagaaacaactcaactcttatcaattccattttatgcactgtccaacttgtctttgggtcactagcaaccttgcaagtcactggcccagtcacacaccatcagtcctaagcacttgcccagtaatgcacaggctgttgtgactcagctgctgtgacccaagaatctgtggctggtactgaattgcctggaacctcttgtaggtagaatttcctcaggacttccacatctcccttccatgtgccaaagcatttcttgtcttggaacattttgatacctttatgaagctcaaagaacaataaaatcttttaatgctt

SEQ ID NO: 2396 - DNA, 1055 bp, Mus musculus
ttttagtactggaaggagccgtctccttggctgcaagtcctcggcactgatccaggcacggattccagattggtgagcaaacccattttctgaccagtcgttgctgtcccactggtgtgtagagtctgtgctgccttactatttgtgttggggctcacgcgtgcaagaagagttgcgggactgcctctttgagtttccttgagtttgggaagcattggagaggcatgttcgcggctaggaataggcagtattcctatagccctaagcgggaaacgggcgttgaacctggattttggaggcaaaggcacactgctctgggagattcccgttcggagtcccgagtggattcagaggtcaacatctcctcccccagctccaggaagtaggtttattccccccaacccccaaccccctcccaagcaggcccggcttcttccaggaagagttgggagatgagctactctacctgccccgacccggtctacaccggctgcaaccagtcggagctaggagccctagggcctctccagaggaagccgaggcaagctgggcggagttaggaacagaccccagccaggatttctggccctcggaattaggcttccggacgtgctctggagaagtttgcctaccgggtactcttcatctgcggaccttctctgggggtgcctaccgccccgttactctgctgagtcacttctgacggaggcaggccgagacagtgaggtgatttattgtgaataacttggctgagatagggagcattgaatttatgtattctaaaagtatgtatgtaaactcaattttttttcagatatatccttctataacccaagctaccctatcgctaaccatcttcttgattccaaccctcttctctggtgttacgattacaggcctgagctaccgacacagcaaagggacatttattttatcagtcatttgagaaaaataggtgttacagctagttatgttgcgtgtgtttcagtacaggacctgaaaattggatgccgtatgtccccagtctgtttatttagcctctgagctttaacatc

SEQ ID NO: 2397 - DNA, 1252 bp, Mus musculus
tgaccgacccctccccggcaggctgctggatgtggtccacagagagaagaagctgtatatggtgttcgagttcctcactcaggacctgaagaggcacatggattcctcccccacctcagagctccctctgcccgttgtcaagagctaccttgcccagctgctggaaggggtgagtttctgccactcccaccgggtcattcaccgagacctgaagccgcagaacctgctccttgatgggctcggggccatcaaactggccgactttggactggctcgggcctttggggttcccctgcgcacctacacccacgaggtggtgaccctgtggtaccgtgcccctgagatcctcttgggcagcaagttttattcaacagctgtggacatctgaagcattggctgcatctttgcagagatggtgactggcaaagctctgtttccgggtgactcagagattgaccagctctttcggatctttcgcaccctggggacccccagtgaagccacatggcccggagtctcccagatgcctgactatcagagtagcttccccaaatggagcaggaaggggctggaggaaatcgtgcctagtctgggaccagaaggcaaggacctgctcctgcgactcctgcagtatgaccccagccagcggatctcagccaagactgccctggcccatccctacttctctcctggacactccctagcaccccaacaatgtacagcagggcgttcctcccgctgagaacacgtatgtggggcccaccacctcacaccctcgccagctgcctccctccctttctgcctttctggggaagaacagaccctgaggggcttgggttcatgtcgtctacaggttggcaagttcctgtattgtttgttggatttaatggagcactttcgaaaggcatgcaggtgctccctgcccaattgggggcagggcacagaactcctctgaatgaccagacagtaggtgtcaggttagataagagaccctagcccttcgccttcactgcacagctgcagagcatggcccctgagagagggtgccctctgctggtcttttggtttaggctgttgggagagttgaattccagttcagaggacctagttaaacaggaggaggggcagggcagttctctgatcctaagagtggttacaacacctgagggtgttctaagtagtcgcgtcatcaaaaataggcagttgatgtccttctgtgtgacacatggaaaataaatgtaacttcttcctc

SEQ ID NO: 2398 - DNA, 1202 bp, Mus musculus
gaggagctgagaagagctggggccctggcagccatagcgctttgcacagccggcttggagcgtgtaggacgggcacggagcagggttgcgttctctgaagtcgcagacctgtaagatctggatatgtccttcatatttgactggatttacagtggtttcagcagtgtgctgcagtttctaggattgtataaaaagtctggtaaactggtattccttggattggataatgccgggaaaacaactttgctacacatgctgaaagatgacaggctcgggcagcacgtcccaacgctacatcccacttcagaagagcttactattgctggcatgacgtttacaacttttgatctgggtgggcacgtgcaagcccgaagagtatggaaaaactaccttcctgctatcaatggcattgtatttcttgtggattgtgcagaccatgaaaggctgttagaatcaaaagaagaacttgattcactaatgacagatgaaaccattgccaacgtgcctattctaattcttggaaataagatcgacagacctgaagccatcagtgaagagaggttacgagagatgtttggtttatatggtcagacaacaggaaagggtagtgtgtcactgaaggagctgaacgcccggcctctggaagtgttcatgtgcagtgtgctaaaaaggcagggctatggagaaggcttccgctggatggcgcagtacatcgattagcagcggccggcccacacacttccagccctcagagatccatcccccaacatgcataacttgaattcaatagacttttgttggtttcagaataggtgtttttagattattaatatatctacctgagtgggaattgcaaactgattcaagtttgaatatcacaatgttagctttctaattccacacagatagtttttacagtttctaaccccacatcaatccatcaccgtttataaagatcagcttcccatcagtacatttgaagcactttttaacgatgtgaaactacaaatataaaccatatttaaaagctcatcatgtgaaactttaatgtactttttggaaatagtttttcaattttagattgtctgcctatcttgtgtacagttaaaatccgcttatcagtgattgcatgatgccttacggtttccaagactactttctcttatgcaaacgtcatgcaataaaacaaactccaacatttg

SEQ ID NO: 2399 - DNA, 1312 bp, Mus musculus
ggcagccttggacaatggggccccggcgcttgctgatcgtcgccctcggcctcagcctgtgcggtcccttgctgtcttcccgcgtccctatgagccagccagaatcagagaggacagatgctacggtgaacccccgctcattctttctaaggaatcccagtgaaaatacatttgaactggtccccctgggggatgaggaggaggaggagaaaaatgaaagcgtcctgctggagggtagggcagtctacttaaatataagcctccctcctcacacgccgcctcctcccttcatctccgaggacgcctccggatatctgaccagcccctggctgacgctcttcatgccctccgtgtacacgattgtgttcattgtcagccttcctctgaacgtcctggccatcgcagtgttcgtcttgaggatgaaggtcaagaagccggccgtggtgtacatgctgcacctggccatggccgacgtgctcttcgtgtcggtgctcccttccaagatcagctactacttctccggcactgattggcagttcgggtctggaatgtgccgtttcgccaccgcagcgttttactataacatgtacgcctccatcatgctcatgacggtcataagcattgaccggttcctggcggtggtgtatccgatccagtccctgtcctggcgcactctgggcggagccaacttcacttgcgtggtcatttgggtgatggccatcatgggggtggtgccccttctcctcaaggagcagaccacccgagttccgggactcaacatcaccacctgccacgatctcctcagtgagaacctgatgcaaggcttttactcgtactacttctcggccttctccgccatcttctttcttgtgccgttgatcgtttccacggtctgctacacgtccatcatccggtgcctgagctcctccgcggttgccaaccggagcaagaagtcgcgggctttgttcctgtctgccgcggtgttctgcatcttcatcgtctgctttgggcccaccaacgtcctcctgattgtgcactaccttttcctctccgacagtcctggtacggaggcagcctactttgcttacctcctctgcgtctgtgtgacgagcgtgagctgctgcatcgatccgttgatttactactacgcctcctccgagtgccagaggcacctctacagcatcttgtgctgcaaagaaagctctgatcccaacagttgcaacagcaccggccagctgatgccgagtaaaatggatacctgctctagtcacctgaataacagcatatacaaaaagctattagcttagggaaa

SEQ ID NO: 2400 - DNA, 662 bp, Mus musculus
tccacaaacagtctgagagtgcactgtggaaggggaagaagatggtttccaggaaggggaccaactgagtttgaagaaagcaaaaatgttggggtcttggttttctcttccacatttacccttcctgcattccatcgtcatcccacaccaccctgaccccaacagccaaggattcaggtcacaggatgctctgggttgattgctgttcatagctgaccaaactccttgtttcgaagttccttccttttgattttgcctgtgacagttttgggcaattctgaaacaaactccaccttcctggggtacttgtatggtgccgtcactgacttcacatgatgctgtagctctttgataagctgttcctgatcgtgtgacaggaactctgggttgaggacaataaacgccttcaccacctctcctcgatccttgtccgggctgctcaccaccgcagactctgccactgctgggtgctccgccaaggcgttctccacctctacaggcccgatgcgatacccggaagcattgatgacatcatcgcccatgcccaagaaccagatgtagccctcttcatcaatggtcgctctatccccactattgtaaaagtccccacactccacttgagatgtgctctctgggctattctcatataccatgagaaggcc

SEQ ID NO: 2401 - DNA, 1740 bp, Mus musculus
gaacattattcattattcccaagctagcagccctatctgcttgtcgtgagcctccagatacactctatcgtttagaaagctaacagcccctggtctgtagactgtgtttcttagactatgcagaagggtaaagggggggctagagaagctgtatctgtgaaaacagcctgtgcaagacgctacccactctgcttttatgggaaagcagggaactcataattgtcagagcagggacgtgtgttccagaaggaaatcctcagaaaacatacttactacgtgacagagcttctagccaaatggcagtttcagaaattaaagccacgatgaagctaaagcccttaaaagcacctgtctttcacaagagagataaagatttgcgaggatctttctcagaccatttaaagcacaaagaatcaaagctgagtcctgcacaacttgaagccttccgtaatgcttacaacttcttcaccaaggatagaactggctgtattgattcacacggattgataagcaccatagcaaaactgggaatgaatctaaacacgtacgatatctacaatgaattaaaatgtgctgatctcgacagggacggtaagatcaacttctcagattttataaatgtgttgacagataagaaactcttcctcaaggctgtggttccagaaaagaaaatatgcttagatttagctaacaacccaggaatcttgttgtttgagatcctatcaaaatttgtagaaacctcgtccctgcacagagaggatataatagagctagtaagctatttccgagagagagttcaggagagacactcagaaataatgtggagttcgtatgggagaaggggactaaagtcaagagatctgctctccccctcgctcgagcactgctgcctttgccaactctgctagtatctccataatgaaagaagggtatctgtataagtttctcgaagccctcaaacggtgtaatctccgtacagatagcccatactcaaaaatacctgtgtttccgttgtttcctgatgtggatgggacggtgatgggaaaaccatttaaagacacacaaaaaatagagatgctaaggagaaaggagcctctgactttctttgaggactattttctcaataaaagagattggaaaacacaggccatgaatgtgaaacctctcaagtctgcctcaggctattcagatgacatcttagccattgaccacctgttcaagaaaaagcaacattggactgtgactgatgcggctgctatcaaacagcatgtaaagaaagccacggagagttataacttaggaattgcccttgaccaccggaaagaaatgctgaacctctggaagaagattcgaggggatttggttgggatcgaaagcaacaatgagtccttttacaacaccttttcgacctacacctggtcctggaacgtctgccaagagctgctctccgctaaggacctccgcttgcacgacgccagcatgaacaagagttccccctccaactctgggttatcttccccatcggacttcagtgagtctgacccggagacggggaggaagaggaaacggaaaagttccagagggtttcggcaatgaaaagcctacgttttctaaacagctcttcgaaaaccgctttccatagtaatcaaaagtatggtttcttgcgtttatctattacatgcctaggtggaaattttgacatcttatggattccgaccagtaaaaacctttaaatccggc

SEQ ID NO: 2402 - DNA, 1929 bp, Mus musculus
gcgggcgcgatgggggccggctcctcaagctaccggcccaaggccatctacctagacatcgatggacgcatccagaaggtggttttcagcaagtactgcaactccagtgacatcatggacctgttctgtatcgccaccggcctgcctcggaacaccaccatctcccttttaaccacagacgacgccatggtctccatcgatcccaccatgcctgcgaattcagagcgcactccctacaaggtgagacctgtggctgtgaagcaagtgtctgaacgagaagaacttatccagggcgtgctggcccaggtggcggaacaattttccagagcgtttaagatcaacgagctgaaagccgaagttgcaaatcacctggccgtgctggagaaacgggtggaattggaaggacttaaagtggtggagatcgaaaaatgcaagagtgacattaaaaagatgcgggaggagttggcagctaggaacagcaggaccaactgtccatgtaaatacagttttttggataacaagaagttgacacctcgacgtgatgtccccacttaccccaagtacctgctctccccagagaccatcgaagccctacggaagcccacctttgatgtctggctttgggaacccaacgagatgctgagctgtttagaacatatgtaccacgaccttggtctggtcagggacttcagcatcaacccaatcacgctccgcaggtggctgctctgtgtgcatgacaactacaggaacaaccccttccacaacttccggcactgcttctgtgtgacacagatgatgtacagtatggtctggctctgtggcctccaggagaagttttcccagatggacatcttggtcctgatgactgcagccatctgccatgacctggaccacccagggtacaacaatacataccagatcaatgcccgcacggaactcgctgtgcgctacaacgacatctcaccgctggagaaccaccactgcgccattgccttccagatcctggcaagacctgagtgcaacatcttcgccagtgtgccacccgagggcttcaggcagatcaggcaggggatgatcacattgatcctggctaccgacatggcaaggcatgctgaaattatggattctttcaaagaaaagatggagaattttgactacagcaacgaggagcacctgaccctgctgaagatgattctcataaaatgctgtgatatctccaatgaagtccgtcccatggaggtggcagaaccgtgggtggactgtttactggaagaatattttatgcagagtgaccgtgagaagtccgaaggccttcctgtggccccattcatggaccgagacaaagtgaccaaagcaacagcccaaattgggttcatcaagtttgtcctgatcccaatgtttgaaacagtgaccaagctcttccccgttgttgaggagaccatgctgcggccgctctgggagtcccgagaacactacgaggagctgaagcagctggacgatgccatgaaggagttgcagaagaagacagagagcttaacatctggggccccggaaaacaccacagagaagaacagagatgcaaaagacagtgaaggccattctcctccaaactgatggacatctcaatgtgtgcacagactgtaccagttagagcagatgaattgtggcctgtgagtggacagagccaagcgaggcttcccaggatcttccacacaaggatggtcacgcccagacaaccctgatgacctgctacagaccatgttttctaagaaccattttgttccctgatataaaaacaggaatcccgatgctgttcagaatttttatttttaaactgttttttaaataatatatttttacacagaaaaaaaaaaaaaaaaaaaaaaaaaaaaaaaaaaaaaaaaaaaaaaaaaaaaaaaaaaaaaaaaa

SEQ ID NO: 2403 - DNA, 299 bp, Mus musculus
aaaatttttcccgtcctccccgcccctactgtcttttccctttcgctccgaccctttcggtgcagactccagttttcctatcggcattaagcacaaacccaaattagaggccagcttgaggattttggaggacagagggataagaaaaataagtggcacaggaaaggcattacccaaagcagaaaagtatgaacactaaagtgaagtgaagacttacgatccctctggtgactccacacttccaacttgttctaaaaaacccaaaatagaagaggtagataaagaggatgaaattactg

SEQ ID NO: 2404 - DNA, 332 bp, Mus musculus
aggccccccagatgtctgctaccccacacatgacaccacattggacccccttacatcccttcttccatacctgccccccacacctattttgataaccctatcctcctcggaggggaccctagggctcatgccatggcccaggtggacacctgccagcggctccagacttttttccataaacatttgagtggggacaagagcccaagcccagcaaaactatgattttctttgagtagtgacatagctggtgacatcgctggtcctgttcccctgagaattaggatatatatgcattgttttcttcttttaataaaatcttgaagttttcctcc

SEQ ID NO: 2405 - DNA, 649 bp, Mus musculus
gaggaaaaggaaacttctgagaaaccgaaactgccgcagaaagggcagacccgcagcgcgctccatcctttgcccttcagtgctgcctttgctccgcaccatgaaccacacttctcaagccttcatcaccgctgccagtggaggacagcccccaaactacgaaagaatcaaggaagaatatgaggtggctgagatgggggcaccgcacggatcggcttctgtcagaactactgtgatcaacatgcccagagaggtgtcggtgcctgaccatgtggtctggtccctgttcaatacactcttcatgaacttctgctgcctgggcttcatagcctatgcctactccgtgaagtctagggatcggaagatggtgggtgatgtgactggagcccaggcctacgcctccactgctaagtgcctgaacatcagcaccttggtcctcagcatcctgatggttgttatcaccattgttagtgtcatcatcattgttcttaacgctcaaaaccttcacacttaatagaggattccgacttccggtcctgaagtgcttcaccctccgcagctgcgtccctccttgcccctccctacacgcaggtgtaacactcatttatctatccacagtggattcaataaagtgcacttgataaccacc

SEQ ID NO: 2406 - DNA, 625 bp, Mus musculus
ctttggtcagaaacatttggactaagtcatgtcacctgggtcaggatttctttcagtgccatttagcaaactgtctttagtctatgcaaatagcaaagatttacagaatgcaactgaatgcagcttcactgttaaatttcacctgagggctcctcattattcttctggaacccagaacttgaaagatctaaaggaaattgaatctagtagagctcatgtctaccagcccagccgcctgcagcggggagactgctgtttgtgcttatttgtgcaggcgctgaataaaacggggcagctaaattctccagttccatgtgcctcctaatgtttaaaagaaaaaagcaaagtaacttgttaaaaattgacttgcaaaaaagtagaaactgttgggtggtggtgtaaagaaatggcattttcccaccaaggacaagccatccagttgtcagtcacaccgtatgaagcagcaaaggtgaaggagagaaaagggtatgtgtacaagagttgctttgcatggtctcatctgagatggttgcattcgaactgttgtaagaattgtaagaatcttgacttttttacgtttggaaacatcaaataaaaatggaaacaacaaaaaaaaaaaaaaaaa

SEQ ID NO: 2407 - DNA, 1474 bp, Mus musculus
tcaagactccgcaggcttctttgacgatcaccgaaccgtagttggggccgtgttcctgtgtccgctgctgggtcaggttctcgaggcgccggagctatgtttcgaaaccagtatgacaatgatgtcactgtttggagccctcagggcaggattcatcaaattgaatatgcaatggaagctgttaagcaaggttcagcaacagttggtctaaaatcaaaaacgcacgcagtgctggttgcactgaagagagcacagtcagagcttgccgctcaccagaagaaaattctccatgttgacaaccatattggtatctcaattgcgggtctaactgctgatgccagactgttatgcaactttatgcgccaggagtgtttggattccagatttgtgtttgacagaccacttcctgtgtctcgtcttgtgtctctaattggaagcaaaacccagatcccaacacagcgatatggccggaggccgtatggtgttgggctgctcattgctggttatgatgatatgggccctcatattttccaaacctgtccatctgctaactattttgactgcagagctatgtctattggagcccgttctcaatcagctcgtacttacctggagagacatatgtctgaatttatggagtgcaatttggatgaactggttaaacatggtctgcgtgccttaagagaaacactccctgcagagcaggacctgaccacaaagaatgtttccattggaatcgttggtaaagacttggaatttacaatctacgatgatgatgatgtatctccattcctggatggtcttgaagaaagaccacagagaaaagcacagccttcacaggctgctgaggaacctgcagaaaaagccgatgaaccaatggaacattaagtgataaaggttacaaggacataagaatgcagggacatacactggcgacaataatctgtattttaaaccaacagctgcagtgtattgggtggtatgttttagaaatcagtccagatgtaagttttctctaagcaacttcacagaaaccatataatggggtgcattttctttgaaagggtatacataatcattttctaggaagtataggtatctataccaatgtttttatactgaagaaaataagtgtctttgcagttttaaagacaactgtgaaataaaattgtttcaccaccgtgataaaggttacaaggacataagaatgcagggacatacactggcgacaataatctgtattttaaaccaacagctgcagtgtattgggtggtatgttttagaaatcagtccagatgtaagttttctctaagcaacttcacagaaaccatataatggggtgcattttctttgaaagggtatacataatcattttctaggaagtataggtatctataccaatgtttttatactgaagaaaataagtgtctttgcagttttaaagacaactgtgaaataaaattgtttcaccacc

SEQ ID NO: 2408 - DNA, 2849 bp, Mus musculus
gcattgggataagacctcaaaggggaatgtgtgagtgagccaggaaatgagtcgaaccaggtccccccagaacatttgattgtagtcctgggcatccatccaaatcccaggggcctttgccccagaagagatcatggcttactggtgacgctgaatagaggtcatgagcacagtgtgacgaagaagccaggccaggaggaaaccctgcattcatgaagtcacccacagttccatctactccagccaacaccaggatgcttcacacccatggacgtgaagaaccaggaacaatcaccgagcttgcctctgggaaatctgaaccaagacatccaggaacctggacatggattgaactatctcttcattgtcagttaccacttgctaagcacatcacccccagatctgtgtgagggggtcaggtgtgctggggtggagaagacaacacagagcagcctgggatgggaagtcagtctcctggtggtgggagtggtagatgcttgtggttgtgctgtctcctttgagtaaaaactccagctgccaagtgctgcctagcctctgatagttggcagaggctcctcctggcaccatgtgggatgtgaacttccccctcaattcctggatttattttgggataatgggctgtggaaaggttacagaaggctgagtctggcctgaaaatgaagctccagccatggccagaggaacatggggctgaggctgacttagagtctgcctcctctgaagaacaatgctatttgaggatccatgcagtggccactgtcaaagtggtgggggatatgatgtcctccttgctcccacttcatccctgtggcaggagtacctgtttaggggggcaccctctctctctctctctctcctctgtagtgggtgctttggaacaagttgcagactatcgaggagtcggagtcgtcggagtcgacctggggctgtgttctcagggctgctcagttagcacaagaggtcctgcggaggaagcactagcatcccccaggctcccagaagcagagtctgggagcagtgcgtcacttcaaagggctccccctccctcagtctgctttctctgtagcagaggagccttccaggctcccaggcagctaagctggaggggccatggcagagtcagtagttaatagctccttgtcctttctgcacaggatattgtggaactcatgcttgattgacagcaagctatttgtttcattgtagctgtagctgcagtctactaggatatcaggagagctcccccgcctcccgccaaaagccctaccagttacctttctgtggtgatcaaataccgggccagagttagctcaaggcaggaaaggttgattttggggcagtgcggggtacagatggctgtgacggaaaggatacagcagtaagggctcttggggtcgcaggagtgtgagcttgcttgcttgcttgctcacatgcccgagaggattagtctgcagagagcagacaggaagtgggactggtcccctcctgagaagcaacaattcaacccccactttctctgtcccacctgtgccgggagcaatcacaggagcttgccagcagggaccagatggggtagcgggtcctgggggagtgactcaccacagtcttctacatcgttagactttaaatcagagcctttcaggccagagggccagagaaccggatctaaacaccccatccgtttccagtggggagttagttttccctggcaacttgaagccggtttgaaaaagaaaaaaaaattcaaaagaatagaagaagaaaggttaagttttcaaccaggcaaagaggctcaggtgacctcctccagtgtcaaacaagcctcctgtgcagcccacctaggggctccctttccttgaaggccagttatcaaaggagcctttgcttttgtttttaaaccccgttctcggtgaagaaagtgactgtgcaaggcgtcccccttcccctgcctctgggtgggaaacaattttattttgactggctgaatttagcccccccccccaccctttagaagctgctcctttatccccaaatgtaaaatccaagcttcaaagcaaatcctgctccagtcagtgccaaataaggcaagaaccctcacaaagccggggtttgtcaggccctctggtcaggtttcagccaggcttcggaggggcattcctgaaatagtgcaggccgcccatacctccaggcacttagcaacacgacgccttttgaatttgcttaaaactattaagaagtaattaagcagttaaagggtctttttcagcccgagcagaggttggggagggagtcgggttcagtgagaggaagcgaggccattcgctttcctctgagctgaccttgcagcgtaacacgttcatcctgtatttttctgccactgccaatttatggcctacaggaaactaatcttgtacaataactaccttcctgtacttagttcctaagtagagccaaatggatttggtggcggatgggctccgcagcggttcccgggaaacagtgctgagcccagcaagatctgataggggctgccgctcttaactgactctctgtataattaggttcctgttttggctgccctgcacttaagaagagaaaataaaaagcagtccccccagccccgcctaccacagcggtttcaattccaagcctgagagggaggcgggcttagaaacgtgctggagagacacagtcaccctgagtttagggagggagataggggccacccaccaacatcatgtcaccaaagtctttgatgagaaacgggaacctgctttgtgattaagtaaaaaaaaatattcacataggactaaattctgtgatgagcc

SEQ ID NO: 2409 - DNA, 4107 bp, Mus musculus
cgcagcgcgcggggctctgggggcatccgcagctcggctccgtctgccggcttcttcccctgtcttgtcccccttctgcggccgcgctgccgggctcccgcgcgttggcgaggtcgacaagcagcatggcggtggaggaagagggactgcgggtcttccagagcgtgaggatcaagattggtgaagccaagaatcttccttcctacccggggccaaacaagatgagggactgctactgcactgtgaacctggaccaggaggaggttttccggaccaaaattgtcgagaagtcactctgccccttttacggagaggacttttactgtgaaatccctcggagtttccgccacctgtccttttacatttttgatagagacgttttccgaagggattccatcataggcaaggtggccatccagaaggaagacttgcaaaggtaccacaacagggacacatggttccagctccagcatgtggatgctgactcagaggtgcagggcaaggtccacctggagctgagactgagtgaggtcattactcacactggtgtcgtctgccacaaactcgctgcacgcatcttcgagtgccagggtctccccattgtgaacgggcagtgtgacccttacgccacagtgacgctggccggacccttcaggtctgaagcaaagaaaacgaaggtgaagaagaaaaccaacaacccccagtttgacgaggtgttttattttgaggtgaccagaccctgcagctacagcaaaaagtcccactttgactttgaggaagaggacgtggacaaacttgaaatccgagttgacctctggaacgccagcaacctgaagtttggggatgagtttctcggggaactgaggcttcctctcaagattctgcgacactcgagctcttatgaagcctggtacttcctccagccccgagacaacggcaataagagcctgaagccagatgacttggggtctctgaggttaaatgtcgtttatacagaagaccatgtcttctcctctgagtactacagcccactgcgtgacctgttactgaagtctgcagatgtggagcctgtctcagcctcagcagctcacatcctgggtgaggtgtgcagagacaagcaagaggcagccatcccgctggtacggctcctgctgcactatggcagggtagtgcccttcatcagtgccatcgctagcgcagaggtgaagaggacccaggaccccaataccatcttccgaggaaactcactgacatccaagtgcatagatgagacgatgaagctggcaggcatgcactatctccatgtgaccctgaagcccaccattgaggagatctgccagagccacaagtcctgtgagatcgaccctgtgaaactgaaagacggcgaaaacctcgagaacaacatggagagcctgaggcagtatgtggatcgcatcttcactgtcatcaccaagtccggggtgagctgccccaccgtcatgtgtgacatctttttctccttgcgggaggcggctgccaagcgcttccaagatgacttggatgtgaggtacacggccgtgagcagcttcatcttcctcaggttcttcgcccctgccatcctgtccccaaaccttttccagctgacaccccaccacacggatccacagacttctagaaccctgacacttatctcaaagacgatccagaccctcggcagcttgtccaagtccaagtctgccagttttaaggagtcgtacatggcgacattctatgaattcttcaatgagcagaagtatgcagatgctgtaaaaaattttctggatttgatctcatcctcggggagaagggaccccaagagcatagagcagcccatcctgcttaaagaagggttcatgatcaagcgggcccagggaaggaaacggtttggaatgaagaatttcaagaagaggtggtttcgcctgacgaaccacgagttcacctaccagaaaagcaaaggtgatcagccactctgcaacatccccatcgagaacatcttggctgtggagaggctagaggaggagtccttccgaatgaaaaacatgttccaggtcatccagccagagcgtgccctgtacatccaggccaacaactgtgtggaggccaaggactggatcgacatcctcaccaaagtgagccagtgcaaccagaagcggctcaccgtcttccacccgtcggcctacctgaacggccactggctctgctgcagggcctcctcagacacggctgctggctgcactccctgcactggtgggctcccggccaacatccagctggacattgatggggaccgtgaaacagagcgcatctactctctctttaacctgtacatgggcaagctggaaaagatgcaggaggcctgcggcagcaagtctgtgtatgacggccctgagcaggaggagtactcaacgttcgtcatcgacgacccccaggagacgtacaagacgctgaagcaggtcatcgctggggtggggacccttgagcaggagcacgcacagtacaggagagacaagttcaagaagacgagatacgggagccaggagcaccctattggagacaagagcttccagaactacatccggcagcagtctgagatctccacccattccatttaaggtcacagcacctcccagatcagcgctgttgacccacaccagggggaaaaagcagataaaagaaggcagaaggcatacatggagaggaaacatgttcacccgttcacacgggtcctaccaagctggtggggccaccacgagtcaagcatgctcttccccggcaggaactgttgcctgggctgtgcactccccttagctgccagcacaggtggtctgagccatcctggaatgcatgctcatctgtctttctactccttcagttgtatggggatccagggatctgttaaatattagggaagtatggactttgtctaaacctgttcccgtcgcacgcccggtcccccttcacaaaggcacgcctggttcgttcatgccagggcgcaccttcttcagtgtgcactcttgtcccttgcctgctggtctctgtggctccgtacacatgtagcagtctggccctagccttagacgtacacgcaatcctgccgttcgttccacggaatccctgtctgaaacgtgagaagcagtattccctggcagccagcaggcaggcagcctttctcctgagcttatgttggtttgttcctggctaaagggtcattttttgtggctgggatggacaggatggtacagaaactcctttatcttagaggacatgggggtccttttcttagagtccctggagagggagggctgtgagcccagtcttctctgggtgaccatcacccctcagttcaaacacaggtctggatgttggataaggtttcaaactagaatccacaggcttgctgcctcgatgaaagtctgggaaagatttttaaaggctgtgcatttttcaagctgtctttcttaatgtttttaaaggactgtttttaaatagcattttgatataaggcagtgtggaataccagcatctatgtgcattaggggggtgacccagggaaatcccaaagggaacagtatttgatttctcacaaagccaaagggtcctcggggacatagctctgagatggagcctgcaccggcagcaataaaggccaaacgtggtattccacatgcctgtgtctctgtgagcccaacaggccacacatgccaatgtctggaaccacttttgattggggtgggagggtcctgaaacagacaagacagactgtaccagcttagcccccacagtactgctggagccttatgccaaactgcatttccagaggctgagagaggggcactctatgggcagatgttgctgaaggacacaaccacacattctggtacccttttctcttcattcttgttgggaggtttaatctgtatctagaacccatagtagcagaggatggaaacaaaagtcagtttggacacagcaggccccttgtactgaacttctttttaacttggatttgtaacttaatgtttctgtttataagatactaacgatttgcaatgtattttaatgggcaattaaagcagatgttttattctt

SEQ ID NO: 2410 - DNA, 2573 bp, Mus musculus
gacaaatatcaaaaacattctctttcagcaagatgtctatgaaacaggcttcagtttttctgttgatacagttcatatgctatattagacctggagcctgtgggaaagtgctggtgtggcctacagaatacagccattggataaatatgaaaataatcctggatgaacttgtccagagaggtcatgacgtcaccgttctcatatcttctgcttccatcctcattgggccgagcaatgaatcttctattaattttgaaatttattctgcacctttgagtaaagatgatcttgaatatgcttttgaaaaatgggtaggaaactggacatacgaattaaaaaaacttccattttggacatcttattcaaaactgcaaaaaatctccagtgaatattcagacatgattgaaagtttctgcaaagcagtagtttggaacaagagcctcatgaaaaaactccaaggatctaagtttgatgtcgttctagcagatgccttggttccctgtggtgagctgctatcagaactgctttagacaccttttgtatacagtctccgcttctgtcccggatactaatgtgaaaagtacagtgggggccttccactccccccttcccatgtgcctgtgcttctgtcagaactaagtgaccacatgacatttgcagaaagggtgaagaatatgttgcaggtgttgctttttgacttttggtttcaaacatttaacgagaaatcctggaatcagttttacagtgatgttctagggagacctacaacattaactgagatgatggggaaggcagacatatggctcgttcgaaccttctgggacttgaaatttcctcaccctttcttgcctaattttgactttgttggaggactccattgtaaaccagccaaaccactgcctaaggaaatggaagaatttgttcagagctctggagaacatggtgtggtggtgttttctctgggatcaatggttaaaaacattaaagaagaaaaggccaatgtagttgcttctgctcttgcccagattccacagaaggttctgtggagatttgatggtaagaaaccagacaccttaggatccaacactcggctctacaagtggatcccccagaatgaccttcttggtcatccaaaaaccaaagcttttatagctcatggtggaaccaatggcatctatgaggcgatctaccatggcattcctattgttggtattcccttgtttggggatcaacctgataatattaaccacatagtagccaagggagcagctgttagagtggactttgatacaatgtcaactacagaccttctcactgccttgaagactgtcattaatgacccttcctataaagagaacgccatgagattatccagaatccaccatgaccagccaatgaagcccttggaccgagctgtcttctggatcgagtatgtcatgcgcaacaagggagccaagcaccttcgcccagctctgcatgaccttacctggttccagtaccactctctggatgtgattgggttcctattggtctgtgtggtagctgtggtattcatcattgcaaaatgttgcctcttttgttgccataagactgctaacatgggaaagaagaaaaaagagtagcttcatgaaggctgaagcagagagtcctgagagatgagcctctgccagctgcttccagcagaaacctgttgtctgtcccaggtgccttccctctgaaacaagacagggtcaggacttcattaaagatagctctcatagatgcactatatgttgaatgcacgtaaggatttatgcaagctatacactcagagctctagaagcaaaattgtgtgttcagtttagaatgttttaatgtaaatgaggaactatacccaacaacaatcactgaggttactgtagttcacaaaatttgcataggcataaagcctttgaaaaacctctctaaatattagttaattttttatgctctgtcttcatttaatgaacttatttttcttcccttccttttttcttctctttcatttttttttgtattgctcataaataatagcgttcaggtacagaacatttgaaatagactcacttttccatcaatataaggaaagccattgtttctggttattaattgggtacagcaaacttccaacaaatatttcctaaagggcctgtggtggaggctactctccttcaatcagaagcctttttcagacactaatcttcaagcatttactcttactgctcctgacataaattccagtacttgggagttcttaggcttggcaagattattgatttattttccttcttatctcttactcacaactgacctgaacactgtcattctcattctgccttttgaagtagatttaagctgccaaatgtcccattctctctcgctttgaaagtacacatccaagagaagattatctttttaagtcataccatcacctagctcatgttatatttcgtatctgaaatatcccccacagacacacaatgtactttgctgattttgtttaactcattcatacagaatttcttaccttgattcaataaaatgttaaaatcttt

SEQ ID NO: 2411 - DNA, 668 bp, Mus musculus
acaaaagaaaacaaggaaatatgcgactatgaagcgaatgctcagtctgagagacgagcgacttaaagaaaaggataggttgaagcctaagaagaaagagaagaaagatccgagcgcgctgaaggaaagagaagtcccccagcatccttcctgcttgttcttccagtataatacacagctgggtccaccttaccacatccttgtcgataccaacttcatcaacttttccattaaggccaaactggacttagtgcagtcaatgatggactgtctgtatgccaagtgtatcccttgtataactgattgtgtaatggctgaaattgagaaattgggacagaagtttcgtgtggcactaagaatcgctaaggatccacggtttgaccgattgccgtgcacacacaaaggaacctacgctgacgactgcttggtacagagagtaactcagcacaagtgttacattgtggccacagttgaccgtgacctcaaacgaagaatccggaagatccctggcgtccctatcatgtacttatctaaccacagatacaacatcgagcggatgccagatgattatggagcccctcgcttctaattctcactccacagattctgcctgccattcttggaccatctctctcttgtcagttaattaaacacattttctgattttt

SEQ ID NO: 2412 - DNA, 725 bp, Mus musculus
ggacgagaccttgataggttcaatctacttggtcctccgactcttctttcttttactcccatttccttccaggtttgcggtccccctcgcacccacgaataactgagtcccgcgggacgggataagtggcgcccgacgtgagggcgaggtccagatcgtaattcctaatcagtggaggttccagagaagttcgtcgcgaccccaagaatttaaaagtagtgaaggacaccttccgctgctcacggaagagcgagaagtccttggtgagttgagtcatctccacttcaggttatgggacataagctatctaaagaggcagccttcatcaaaggtttaaagatagctctcagagaaagaagagtacgagttaaaaaaaaaaaagattaaatagactttttattttcatagaccagatatgtccatggtttattatagatgaagcagagatacgttgtaaaaaatggtgaaaggtaggtagagatctaaatgataaactagctaatgagggtcccgatgtggtccctgcaactgtctgttctgtcccgatgcagtccctacaactgttttttcttattgaaaagtaaatatcaaaagcagccattgtacctcctctcccttctctggaagtattcccagaagaaggagataaggaagtagactctgaacatgagagaaagaaaataagttttagaaaagcagttatcccctgtttgagatcttttagc

SEQ ID NO: 2413 - DNA, 1981 bp, Mus musculus
tgaagtcaggctcagtcaaaggactagctagagggtgaattcctcctcaagggactttcaggtaataactggggacaactgaactgtcttctaagggaagctcctggggtggatggccgcggaacccttctaaacaccactggctgggtttgcaagtcttcaaggcagtctggagatttctgccttggcatctcaaccacttgggaataaacacagcaaccatgagttctgaaacaccttgattgggagcccctggcctagcaagactgccttgtaccatggaccccaatcctttcatctactgtacctgctgtgactgctgcaaattgggacaaccaaagctaatcaagaccccttatccacttccaaagcaccccacggggaagtttaagccagttttacctccaccaatttcaaaagaacacaactcactcctgtcccaaccaggaaaatctactgtttccccaagggacaaggtccagtcaggaaacacagagagcagcaaagcaccttctgaagtgattcaagtgtcacctggctatacactcattcgaaatcgagaacagatatcagtcaccttgggagatgagatgttcaacaggaaaaagcacttggaatcagatgtcttgagcaaagtcaaattttccaggactgatatcatttctgaccttcaggagcaaattgctgagttgatggcaataatagaacagatgaacagagaccagcagtctgccctgaaactgctctccaaagatctggatctccgctgttccaacatgaagcagaagtttgaaaccgagagcagggaactcaaagagactcacagagaggagctcgagaggttagagaacaactacaaggaggccctgaaggcagaaaaggccttggccgaagagaaactaggtactgtcgggccctggggggatgctgggaggaaggtggacagccttccctggcatccctatagccatggcttggcacagccagatgtccaacatttcccttctgaggcttaaggcatgagaatgactgagaacggaactacttcatcactgaagcaagaacgtgaaatttttttaagtgcattctaaagttctaaaactacaatattactatgatgccttcaggttttcttgcatggagaatggcagtgatctcttgaatgctcactgggctactgtgattgcaaggctctgtagtgcatagtgctatgctgacagaatctcactgtttacactgctcttggggaaagcagagtgtgcacccttcagatttggggtttatagactaatgtccacagagagaacgagacactctacaaccttcttcctctgtttgaagttagtgtcttatttacactttgcttgttttctagtttcctgaagagaatgtgtggttttcataaccactgtaaaggaggaaatgatacaaaaaggagaagcagatgcattgtgggaggttctgttcctccttcccatagatacagatgaccctcgggggtggggggaggttgtcttactaaaacagctgaacagagtgtgggaactctgagatcttggagaagcatgtttagaaagtacctggcctctctcccagaagctcttcatccatcggttcaggtgggatacaataactgataagatttttgataagcttccagagcgacttgggaatcccaagacggtttcatcacctcagggagagcttgggtgtggagctgaagagttcatgtgagttttggaaagtgtgcccaccgaaggaataatgacatccttgttttcttttcctccagataagatgagcaaggaatataagtatctgaagagtatgttccatgtgtttcaggatagcatttacgaggaaatggaagacaagtggctgagacgaaaggccgaatgggagaaagatgagaagatggagcgggaaaagatcctgctacaacaaaaatgtagaataataaaaaagtttgagttacagtcgg

SEQ ID NO: 2414 - DNA, 1305 bp, Mus musculus
ggtctgcgttcatctctgtcttcttggattaatttcgagggggattttgcaatcttctttttacccctacttttttcttgggaagggaagtcccaccgcctccggaaggcctccgacacttctggtcgcacgggaaggtttttttgcctcttgggttcgtatctggacttgtactttgctcttggggatcttccgtgggggtccgctgtggagtgtgactgcatcatgaccctggaagagctggtggcgagcgacaacgcggttcagaagatgcaggcggtgactgccgcggtggagcagctgctggtggccgcgcagcgtcaggatcgcctcaccgtgggggtgtacgaggcggccaaactgatgaatgtggaccccgacagcgtggtcttgtgcctcctggccatagacgaagaagaggaggatgatatcgctctgcagattcacttcaccctgatccagtcgttctgctgcgacaatgacattgacatcgtccgggtatcaggcatgcagaggctggcgcagctcctgggggagccggcggagacattgggcacaaccgaagcccgagacctgcactgcctcctggtcacgaactgtcatacagattcctggaaaagccaaggcttggtggaggtggccagttactgtgaagagagcagaggcaataaccaatgggtcccctatatctctctagaggaacgctgagacccactccaaacatctaaagcaactgtcgagttgctgtcccctaaaaaaagtaaataaaatacatatttgacagccccctcatcccccagaacaatccctcaaaggctaccctacccgtgataccttctgggaggggcggagtcaccgagactgagatgaggagaggggcacgtgcgcccgcccgccctctgggctgtggagccaggagcagcaccacaggtggtcgccgaggtcggaaggagggcacctcaggcaagaggagactgagactttagagccaaggcctggcagtcctgcagccagcctctgctcgcagccgcagacggtctggacaccgccgcaggggtggggtgaggcgtcccccaccctgcgggacagtgaactgtgcataagtcagcggagggcgacgaccctcgccgcgggacccgggactcgagcccgggacttcgcagctacagcacatctatttttaatattgtgctgagcaagacagatcgcttgcatatttttaaaaatttctactacagagacattccaataaactcgttaagccttaaaaaaaaaaaaaaaaaaaaaaaaaaaaaaaaaaaaaaa

SEQ ID NO: 2415 - DNA, 258 bp, Mus musculus; identical to SEQ ID NO: 2349

SEQ ID NO: 2416 - DNA, 1567 bp, Mus musculus
ttgtgactctcagtggtgacctagtgagaaatctgactcactcagaacagtttattctcttaatgggttaggttctgaaatctgctaagtctgctaatgatatacagatgtgagtgtgtatgtgtgtgtatgttctcttataacataaaccactttttagttttgtaaacattaataataaacattagattttggtttcttcattgtatggaaatatgagacatgtattttatagatgaactatatgatgtctgctgtaaacaaaggtgctgcctgtgtcatgggtggacttgttggctgtcctttgttcactgatgttcatctgttatttgtatgatccagttcggtttctgatttgtcttgtttgtcatcactgtgacaaatcatctgagataattaagttacaaagacaaaaggtttattttggctcaaagtgttggagattctattccacaatcaactgaagtctgtggttgggcctgtcatgaagtagcaagtagtgtcatgacagaggaagagagcaggacacaactcctttgctcattagccacatcacaaagtaagagacatttggccccacagtctttcaaaggcagccttcaacagacacagaaccacccattggcctccatctttcagatgctttaccacctcccaatagcactattctggagatcaagcccttaatacagggacctttgggagacacaccagggtccaaactaaatcactatccagtcaatctcaaatctgcttttctggtttaccattaagaattagcttacagtggacataattgctgaatttttaaatgattgttactagaaatactggtaataacagaaataacaaagattgggaaattaattttaggcacagacaatgataactattatccattcatataatcagcaaatgtttttaaattcacttaataagactcaaccagaattgagtatattggatagatttaaataaaaaagattgtcatagggtctctgtattcctatatatacaaaggtaacttgtatcttttacttaaaaattatattattaacaaggtaaatatatcctaatactatgtgtttattatatactatatagtcaagaatactaagttgtagaaatatttagaaagcatacctttgaatttaagtatctaatgcctcaagcaaatctgctagtttcagaagaatatatatttttgtaactgcaagaatatgagtagatcatagcttttgcttaaaatatttttgtaagcattcatttacacatactcattttaatagtaaaatattaaactgattctgtaaaagaacctgttttgactatgtctatatttaatattatgtaatatccaaaattcaataaatttcatctgaatgtattattagcctttttttcctttgtaaagtagccatgttacatagtttcaatcattccatagtttgtgtatggttaaattatctaaagttcattatgtattttatgtcatttgtttttccccacataaaagattgtaaaagatctgataaatgtcaataataataaagtgaattatagaatg

SEQ ID NO: 2417 - DNA, 3434 bp, Mus musculus
tggtggacgatggcggccgcagcctacgagcatctgaagctgcatattacacctgaaaagttttatgtggaggcttgtgatgatggagcagatgatgtactcatcattgaccgagtgtccacagaggtcacccttgcagtcaaaaaagatgttcccccctctgctgttacaagaccaatatttgggatactgggcacaatccatctggtggcaggtaattatcttgttgtcatcaccaaaaagatgaaagtaggtgaatgttttaatcatgcggtctggagagccacagattttgatgttctttcttataagaagacaatgttgcacttgactgatattcagttacaagataataaaactttcctagcaatgctaaaccatgtcttgagtatggatggattttacttttcaacaacatatgacttgactcatactttgcagcgactatctaacacgagtccagaattccaagaaatgagtctcttagaaagggcagatcagcggtttgtatggaacgggcatctgctcagggaactgtctgctcagccagaggtccatcggtttgctcttccagtgttgcatggctttattactatgcactcatgttctattaatggaaaatattttgattggattctcatctcccgaaggagttgtttcagagctggtgttcgttattatgtgagaggaattgattctgaaggccacgcagctaactttgtagaaacagagcagattgtgcactacagcgggaacagggcttcgtttgtccagactcgaggatcaatacctattttctggtcacagagaccaaatctaaagtacaaaccacatccacagatcagcaaagtagcaaatcacatggatggtttccagaggcattttgattcacaagtaattatttatggaaagcaagtaataattaatctggtgaaccacaagggatcagagaaaccacttgagcaaacattcgcaaacatggtgtcctccttgggaagtgggatgatcagatatattgcctttgacttccataaggagtgtaaaaatatgagatgggatcgactgagtattttattggatcaagtagcagaaatgcaggatgaattaagttattttttagtagactctgccggcaaggtggtgacaaaccaggacggagttttccgcagcaactgcatggattgtctagacagaacgaatgtgatacagagtttattagctcgacgttcccttcaggcacagctgcagaggctaggagttttgcatgtgggacagaagcttgaagagcaagatgaatttgagaagacttacaaaaatgcctgggccgataatgctaatgcttgtgccaaacagtatgcgggaaccggtgccttgaagactgactttacaagaactggaaaaagaactcagttgggactattaatggatggcttcaactcattattacggtattacaagaacaacttttctgatggatttagacaagattccatagacttatttcttggaaattattcagtggatgaattagaatctcatagccctttaagtgttccaagggactggaaattcctggcgttgcctatcatcatggttgttgccttttcaatgtgcatcatctgtttgcttatggctggtgacacttggacagaaacactggcatatgtcctcttctggggagttgcaagcattggaacattttttattattctttacaatggcaaagattttgttgatgctcccagactggtccagaaagaaaagatagactgaatttgtgtttgtggaaagcggcttggcttggaagactccatgatgcagaactggagtctttactgacctgctttccacgtgagcccaaggtcttcttaaagcctttatccaaaagtacctcctgtggttttgggctgggtgatgtcttagaattgatctgatattaccgctttgatgatctcgttaccgttgggatggttatatttatgatttgaagctatagtataattaaaatgtagcttaaattcagctcacagaacagaagaaatctattcactgtcaagtcagaattcacagataagtaatatattttaaaaaatttaacttctttcacattatttaaaacaaattatttttctagctctgtttcattattgccattgtaaagcagtcactgttagcaagcatattttccatgtatctttgggcttttcttaagagtttaataatatgcaaattctactatgcttataagagtgtctcttaaaggtcaagcagtttgctaaattgtaatttcacaattgtaaggaagaggagaatgggatctagagtcatttgaagtttctagtagctgcctcttggcttcagccagcttgagctgctgtagtgcccgagcagcttatatgtcatgaaaagttcagatatagtttatcttttttaaaaggtataaatgaaatcaaagaatgtaaagtctgtctcttatgctaaaggtccaaagtcgcctctttttaagaactgctccattgtgggaaatacactagactggccagctgcttcctctcctagcttgtaggattttttattattggttcctcattgagacatgcaggcctcagagaaggtcttgtactagatttgattctcacttggggtagcagttgcttttccatgcatggcactctggctctatcaccctgtcaaggtttatgttggctgtcaataagtgtctgaaatttagtgcttccaggtagccatagttctccaaatcaaggaccaactttaatttatgcataaaacagactgaaaactacgcttcagaagctgtgcatagttgtaagacaggttctagaataaaatgtaattatgaggtttagatattagaacagtatataaggtagtatcattgcactatcttaaaacaattcagttaaacactgctatggtacatcagtgttttgctttaaaatatgtaggttttctaatagtaccttaagttatccataaatatttctaaaagcgcctttaacattaccttttttcaacattatcttttataaacaataagggttattgcttttaggaactctggggaaattctgtgtagcttaaaatcagtcattaaaactcacaatagagtaagtaaatagagccacctgttctgacatgtaaataagcatagtttgttccaaagatggaacattgaagcccagctgtgtctactgtaatatattactcaaaagctactgggcgttttacagtaagcacttcatgtcaacagctacagcaaacaccaaatctgaaccactagtgtggctgcttcgcaaggactaatgtcagagggttaggctgcaagtgatcagtgtttgacagccctgcagtgatcttctttaactcatttactgtacatccatatgcaaaaataaaatgccatattcttttct

SEQ ID NO: 2418 - DNA, 2961 bp, Mus musculus
agccgggctccgcggatccgctccccaagctccgggtctcggagcagagaaacgctccgagtttcggggtcctccctgcgcctggcgcccagaacttcccggagcgcggcccagaccggggtagagggggaggggaccaagcgtcctggccgcgggaaggcgggatgccagagctgcgaagtgctacgcgccgctgagccgggaaccgaggagccgccggccgcacgactgtctgcaggcgcctagcaccatgcacccccggcgccgcgcgctcctgcagcttcgccgcgtccccccggaacggcactgagcgcctccaaccgtctaccggacccggacctgcgtcgccgcgcttctcagggagccccggccgcggtgccggagcgaacacccgcctttaccagccgcggggccgccggcatggatggatgaggacgcccatgccagaagtgcgcggaactcggacaaacttttccagcggccccgcggccgccacccgagcctcgtctccgctccgcaccgcgtccggcggccgctgctgcccgcgatgctagccgcgctgctgggcggcgccggggcccgcacggggaccttgccgggcgccttgctgtgcctgatggcgctgctgcagctgctgtgctcggcaccgcggggctcggggctagcgcacggccgccgcctcatctgctggcaggcgctgctgcagtgtcagggcgagcccgactgcagctacgcctacagccagtacgccgaggcttgtgcgccggtgctagcgcagcgcggcggggctgatgctccggggcccgccggcgccttccccgcctcggccgcgtcctcgccgcgctggcgctgcccgagccactgcatctcggcgcttatccagctcaaccacacgcgccgcgggcccgcgctggaggactgcgactgcgcgcaggacgaacactgcaggtccaccaagcgcgccatcgagccctgtctgccgcgcaccagcagcgtgggcccgggcgcgggagcgggctcggtcatgggctgcactgaggcccggcggcgctgcgaccgggacagccgctgcaacctggcgctcagccgctacctggcctactgcggcaagcttttcaacgggctgcgctgcacagacgagtgccgcgcggtcatcgaggacatgctggccgtgcccaaggcggcgctgctcaacgactgcgtgtgcgatgggctggagcggcccatctgcgaatcggtcaaagagaacatggcccgcctgtgcttcggcccagatgcgagcaacggtccgggcagcagcggctcggacgggggcctggacgactactacgacgaagaatatgacgacgagcagcgcgctggggccgcgggcggcgagcaacccctggacgacgacgacggccttgcgcgcccgggcggcggcgctgctgcggcgggcggccgcggagacttgccccacggtcccgggcgcaggagcagcagcagcggcagtggaggccactgggcgaatcgaagcgcctggaccccgtttgcctgtttgctgctgctgttgctcctgctgctcgggtcacacttgtagctcctgcgcccctgctgcaggctgctccaggccggtatgcacgacccagctggttcccgagcagggcacctgtggctcggagaccggagatggtcgggaacactgacccacactcttcctgggtggacagggcccagctcgtaccgcagccaacatgttcggccctcttctgtgcggttttccaggctgcagagataaccggctgatctatactgccagctctaatctgcagaattcgggacaccctgcaaaagcaaaggaggcctagactcagagtgctgaacggtgggggtctttcaagttccaatggacttggagaagggatgttgagggaattaggtttgcaaaggggccgggtttttatttgtctgtttgttttgtttttaaactgttttccggtgagggaacacatagtactggtaacgacttaaattgcttgtgaccactgagaaacacagcaatcgtaagtaaatagaaaagttccccttaccgattcattcctgtgctcttggtgtatctatccatcggtaatgctcagtgtggagctggcgattgcctttgggggggggaggggcttccccgaaattacaactgcattatattcctaacccttcacctttaattttcctgccaccattctgatccctctgcaccacgtgtcttagaattaaggatccaaaagaagaaaaaaagttaccatggtgttgaacaatgcatgttttttatcctaaagctcggtactgccatctaggaaaacctctatgatgtttgttctgttgtcctttttttttttttccctccaccaagaaattctaaatttgaatatgcagagattgaatattacctctgcccctatcagggtcttccaccctggtacgtcgtatataaactgtattaaaactggggtttcttaccagttgctgtactttgtatatagaattttttataaattgtatgcttcagaaaataatttatttttaaaaaaagaaattaaaagttttaaatctgcatcattgttgtatctcccctatccaagaaatgtatagaatacattggtcatgaggaatccactcctgcagcccatccaagaaatgtatagaatacattgctcaccaggaacccgctcccgcagcccattttgaaatgtgccctgtgtagaagaatgtacagtgtattttacagatttgaagtaacgttcttattttcaagagaatttatggacattgtagaaatgtataaatgcatttccaaactgccttaaacattgtatttttatagacatcatttttttaaatcccgtgtttaaaaaaaaaactatgactttgtgtatttttggttgttttattaaaaatgcacacaccagtaaagagtttaaacagtga

SEQ ID NO: 2419 - DNA, 754 bp, Mus musculus
tgggagatgggagcgcctagggacccgaaccaagtgcacctgctgcagcctggcactagggatttgaaaatccatggagatggaaacctatgccgaggttagaagacctggatccactttgcaggattttaaatatccttcaagcctcagtgcctggcagactggactttggacttcggacttccagctccgatgctgaaaaaggagggtttttttgtttgtttgtttttccactttgcttccttgcttgtcgaggctgagaacatacggtgtttttgagggccaccatcaaagggtactcgcttctccaaaccttggaacccgaggtctagccttggaaagagttgccgccttaccatctctcctcgcctagggaagccccagctgtgtgcgctactgcagggtcacagtgccgcggtgccgagcttctttcgtggtccctgtcgccgtccgtttcttgagatttcagactctgggcttggaaaccagttgactgcctttcttagcgaggtgccctcggaaacctgtggaggaatgtttggattatgaatgctcaccgtgccgagtcctcgaagctatgtgacagaggtggagcacctggaatgcatagagaaccaggttccctttggaaaatattcactcgcttccaccagcccaaacccgaaggtaccatcagtacgtgaggcctacaacagggttctctgttttcctgtagccagcctctctgatgctcccaacaatgtatttgaaaagc

SEQ ID NO: 2420 - DNA, 1747 bp, Mus musculus
tacccaggagacaatcttctgtgaggcaatgaggtgaactcaagtcttaactctacttagagtgtgtatgtctgtctgacagaacaaaaattaaaaaaaaaaaaaaaaaaaaaaaaaaaaagaggctctgtgtaagtttcccctgcaggacacaaggcagggtttccttcaaacctgtgtggagaggagaagcggagggcctgctgcagtagccacagtgcacacaggggcaggcagcaaagtcagcactctgacgaggaggcaggacatcctgaggtggtggttcaggagcttggtggtgaggtggcctcaggtttctcccatttcatggcagcatttggctcagctgtgaagagcggctggtaagaaactgctcaggaaagggtagtgcttggagccgtcagtggcacactgctgccttcctgccacgtgctgagcgcggagcgctagcttgccctctcccgcaccgacgactccggactgatagctatctcctgaggcaggcctcctccctgatcttgggaagcccagatgctgggttttcacacggtgcccaagggattgaaagcagtgtttaagcggcctgtggggtaggtgcggctggcccagggtcctttcctcactcttcagctgctgccctgttctgagggacaacagtgcagctgagcatgtgtctcagagcgggcagggcacaggccaccacttccttcagtgctcagtgactgctgctttaggttagtgtatattactcagaacttcacagtgtaacctgactttactaagtaaaatgatacttaagctacttcctagagctagctaactgcttgtgctttaagctgcagtcccattcagtgtgacattcacatagttgagagctgtgaggggagacgtgggtgaagccatagagcacatttgcttgaaattcttaagcagggatcttccaagggccagaaaccagcgtggttctcagagacggagccacgtctgtgtgagccaggagagatgtctataggggaattgcaataaactgtcgcagctgtttcccaagtaatgtacatactcttctgtggtcacggccagcctctgagcggcgcctctgcactcacccgtctgcgtttggtctccagtggttttctattcaggtgtatatacggtgctcactttagatcagcagagtcggccatttatgctgcagagctgtgtcatagccttattagttgtgtgtggttggtgaccctctgggtacacaatgtctgttgagtgctgtcttacccatttgttgacaagtggatgtctgtgcatgtgttgtgtgtcacggggtgtcgtcacagtgtcacgggtgtcgtcacagagggaaggagcagaaccaccacacccatagtggaccaaactacgtccttgctgtagccagggactcgtcccctagccgagttacagtagtgtataattaaatattgtgggaaagttagtcttgtatttttctgtgtgtatatatatataattatgtacttctggaattctatctgtatttaaagatgtgacaatcttgacaccaattttaatagtcatgagcctgaacaaagatgtcctagagccagagttggtatgtgctgagaacacaaacttgtcagctaattggtcagatgcctctagttctgaccagtctttttccttgtgtgaacattgacaggtatgtgacagatgggaaataatccaataataaagtgacatactgatgttcagcaat

SEQ ID NO: 2421 - DNA, 4980 bp, Mus musculus
ccgcgtcgacgatgaacagcgggcgctccatggccacgcctggagagcagtgcgccggcctgagggtctggaaccagacagagcaggagcctgcggcctatcacttgctcagcctgtgcttcgtgagagccgccagcagctgggtgccccccatgtacctctgggtcctcggccccatctaccttctctacatccatcgccatggccggtgctacctccggatgtcccacctcttcaaaaccaaaatggtgctgggcttggccctcatccttctgtataccttcaacgtggccgtgcctctgtggaggatccaccagggcgtgccccaggccccagagcttctaattcaccctactgtgtggctcaccaccatgagctttgccacctttctgatccacatggagagaaggaagggagtccggtcatccggggtgttgttcgggtactggctgctctgctgcatcttgccaggaatcaacactgtgcagcaggcctctgcagggaacttacgtcaggagcccctccaccacctggccacctacctgtgcttgtccctggtggtggctgagctggtgctgtcctgtctggtggaccagccacccttcttctcggaagactcccagccattgaatccgtgtccagaggctgaggcctcctttccctccaaggccatgttctggtgggcctctggactgctatggaggggctacaaaaagctgctgggaccaaaagacctctggtcacttgggagagaaaactcttcagaagaactcgtttcccagctggaaagagaatggaggagaagctgcaatgggctgccagggcacaaagggcacagtagtgtgggggcccctgagacagaggccttcctgcagccagagaggagtcagaggggcccactactcagggctatctggcgcgtgttccggtccaccttcctgctggggaccctcagcctggtcattagcgatgccttcaggtttgctgttcccaagctcctcagtctgtttctggagttcatgggtgaccgcaactcctcggcgtggacaggctggctcctagctgtgctgatgttcgcggcagcctgcctacagacgttgtttgaacagcagcacatgtacagagccaaggtcctgcagatgaggctgcgaacagccatcactggcctggtgtacagaaaggtcctggtcctgtccagtggttccagaaagtccagcgcagcaggagacgtggtcaacctggtgtcggtggacatccagcggctggccgagagcatcatctacctcaacgggctgtggctgctcttcctgtggatctttgtgtgctttgtctacctgtggcagctccttggaccctctgctctcacagccgttgctgtcttcctgagcctcctccctctgaacttcttcatcaccaagaagaggggcttccatcaggaagaacagatgaggcagaaggcctccagagcacggctcaccagctccatgctcagaactgtgagaaccatcaagtcccacggctgggagcatgccttcctggagcgactccttcacatccggggccaggagctcagcgccctgaagacctccaccctcctcttctctgtgtctctcgtgtccttccaagtgtctacatttctggtggcgctggtcgtgtttgctgtccacaccctggtggcagaggacaatgccatggatgcagagaaggcctttgtgacgctcacagtgctcagcatccttaacaaagcccaggccttcctccccttctctgtgcactgcatcgttcaggctcgagtgtcctttgaccggctggctgccttcctgtgcctggaagaagtagaccccaatggcatgatcgcgagtaactccaggcgctcctcgaaggatcgaatttctgtacacaatggcaccttcgcttggtcccaggagagcccaccctgcctgcacgggatcaacctcaccgtgccccagggctgtctgctggctgttgtgggtccagtgggggctgggaagtcctccctgctgtctgccctgcttggggagctgttgaaggtagaagggtctgtgagcattgagggttccgtggcttacgtgcctcaggaggcctgggtccagaatacctctgtggcggagaatgtgtgcttcaggcaagagctggacctgccctggttgcagaaagttctagacgcctgtgccttggggtctgatgtggccagcttccctgcaggagttcacaccccaataggggagcagggcatgaatctttctgggggccagaagcagcggctgagcttggctcgggctgtgtacaaaaaggctgccatctacttgctggatgaccccctggcagcgctggatgcccacgtcagccagcaggtcttcaaacaggtcatcgggcccagtggattgctccagggtacgactcggatccttgtaacacacacgctgcacgtcctgccccaggctgaccggatcctggtgctggccaatgggaccatcgcagagatgggctcctaccaggaccttctgcaaaggaacggagccctggtgggtcttctggatggagccagacagcctgcaggaacacacgatgcagctaccagtgacgacctcggaggctttcctggaggtgggaggcccacatgcagaccagacaggcccaggcccacggaggcagcccctgtgaagggcaggagcacatctgaggtacagatggaggcttctctggatgaccctgaggccacaggattgacagcagaagaggatagtgtgcgatatggccgggtgaagatcaccatatacctgagctacctgcgggcggtgggcacacccctctgtacctacaccctgttcctcttcctctgccagcaagtggcatccttctcccaaggctactggctgagcctttgggccgatgacccggttgtggatgggcggcagatgcatgcagccctgcgtggctgggtctttgggctccttggctgtctgcaagccatcggactgtttgcctccatggctgcggtgttcctgggtggagcccgggcctcaggcctccttttccggagtctcctgtgggacgtggctcgctctcccatcggcttctttgagcgcacgccagtcgggaacctgctgaaccgcttttccaaggagacagacacagtggatgtggacatcccggacaagctgaggtcccttctgacctatgcctttgggctcctggaggtcggcctggcagtgacgatggccacgcctctggccattgtggccatcctacctctcatggtcctctatgctgggtttcagagcctctatgtggccacatcttgccagctgagacgtctagagtcagcccgctactcatctgtgtgttcccatatggctgagaccttccagggaagtctggtggtcagggccttccgggcccaggcgtccttcacggctcagcacgatgctctcatggatgagaaccagagggtcagtttcccgaaactggtggctgacaggtggctggctactaacctggagcttctagggaatggcttggtattcgtggctgctacatgtgctgtgctgagcaaggctcacctaagtgctggcctcgtgggcttctcggtctccgctgccctccaggtgacacagactctgcagtgggtggtccgcagctggacagatctggagaacagcatggtagccgtggagcgcgtgcaggactacgctcgcatccccaaagaggctccctggaggctgcccacctgcgcagcccagcctctctggccttgtgggggacagattgagttccgggactttgggctcagacaccgaccagagctgcccttggctgtgcagggagtgtccctgaagatccatgcaggagagaaggtgggcatcgtgggcagaacaggggccgggaagtcctccctggcttggggcctgctgcggcttcaggaggctgccgagggtaatatctggatcgatggggtccctatcacccatgtggggctgcacacactgaggtcccgaatcaccatcatccctcaggaccctgtcctgttcccaggctctctgcggatgaacctggacctgcttcaggagcacacagatgaaggcatctgggcagcgctggagacagtgcagctcaaggccttcgtgaccagcctgcctggccagctgcaatatgagtgtgcaggccagggagatgacctgagcgtgggtcataaacagctcctgtgcctggcacgagcccttctccggaaaacccagatcctcatcctggacgaggcgactgcctctgtggacccagggacggagatgcagatgcaggcggccctggagcgctggtttacacagtgtaccttactgcttatcgctcaccgcctgcgctccgtgatggactgtgccagagtcctagtcatggatgaggggcaggtggcagaaagtggcaatcctgctcagctgctggcccagaaaggcctgttttacaggctagcccatgagtcgggcctcgcttgaatgaggattcttaccaacccccgtggagccagccatagagcctgcagtggctggagatgccagagactccaatctaaactcctctttgggagggagatggcagagaaagtgatggagtattgggataccagacccagaagaacccagcacgcccaggttggcctgagcaaggccatgcccaccccaggccaaagagaatggtaactctcagcccaagctgtctacttcaaggccacgcccactccaggccaatcagattggatgccctggacccaggtgatggtgtgcacatattccctaactccttattttgaagtcattgtagatttcagtcacagttttaagaaataacacggagagaaactgtgacccctctgccctgtttattccaagggtgacaccttgtccaactctagagcatcacaccgactctgaccgactcgtctttacaactccaaaaaaaaaaaaaaaa

SEQ ID NO: 2422 - DNA, 3357 bp, Mus musculus
agggccctggactttggctgtttgcagactttgctctgcctgggccagccaggctctgggttagcatggctggctgcatcttgctgctccggggcttcatccttaccctcatcctgcaccaggtggagctttccgtgtttcttccagccccgaaggcaaacaacgttctgcggaggtggaggcggggtagttcgtacttcctggaagaaatcttccagggaaacttggagaaggagtgttatgaggaagtctgcaactacgaggaggcaagagaagtgtttgaaaatgacgtcatcacggatgagttctggagacagtatgggggtggctctccgtgcgtctcccagccctgcctcaacaacgggacatgcgaggaccacatccgcagctacagctgcacgtgctctccgggctatgagggcaagacctgtgcaatggctaaaaatgaatgtcacctagagaggacggatggatgccagcatttctgccacccggggcagtcatcttacatgtgcagttgtgcaaagggctacaagctgggcaaggaccagaaatcatgtggtccaagtgacaaatgcgcatgcggggccctgacttccgaacacatcagaatgacaaaaagcagccagagtcagcctagcttcccttggcaggtcagattaacaaattcggaaggagaagacttctgtgccggcgtgttactacaggaagacttcgtgttgacaacagcaaagtgttcgttattgcacagcaacatcagtgtaaaagcaaatgttgaccagaggatcaggatcaagagcactcacgtgcacatgcgttatgacgaggagtcgggggagaacgacgtgtcactgttgcagttggaggagcccttgcagtgccccagttctggtctcccggtctgcgtcccagagagggactttgcagagcatgtcctcatccctggaacggagggtctcctcagtggctggatgcttaatggcacacacctggctaccacaccgatgctgctgtcggtcacacaagcagatggcgaggaatgcggacagaccctgaatgtaacggtcactacgaggacaagctgtgagaagggcagtgtggtgatggggccttgggtggaaggaagtgtggtgacccgagaacacaagggcacctggttcctcacggggatcctaggctcgccaccaccaccagggcaatcgcaaatgctcctcctcaccgcagtcccgagatactccatgtggtttaaacagatcatgaagtagctgaaatccaacaacatggctgccagagggtcgaatccggtcacagttagcactggaagatgacctcttattccttggaactttacatttttctttactcttgagaatttcatacacacatataatgaaatgtgactacacccacatcccatttcccttctccaactccacttatatttcctgagactccactaagttcagttagcactacctctgtgtgtatggtgtggggccatccactagagcaccctcaggactacacaattttccctccctcagcagctatcaactgccaacagctcctcagtggggagtgtggcagggaccaccccccatctatgtcagaatctggcttgatcttgtgcagtcttgaccaggtcaccccagctgctgagtctgttcccactagaaggcactcttctcgacatccctcccacctctcagctgtatgtttttccccattctcttggacgattttccctaagccttgatggaggtggaggtgtaggtgcaagagaaagggagttggggcctgttgattaagatgtcccccataggcctgagccctcagcccctactctaacgctttgactaattatacatctttgcattaactgcggcccattatgaaaagagggttctttgaccaaagctgccaacagcccagctctatggtatgagcatatatatttagaaggtaatttttaacatgaccttttagcaaagtaacactagcagcttctaccccaggcctgtgacctccccagtcacaagcttttggccgagattatagcttcaggcatggaatccctgtgaagcaggcctcacaatcagccagaaagcagttctgtacccacaattgcaccaatgtgcacatcttgcctggcatgtcagtgttgtggacgagggcccagcactgggtaagaccattgttgcctccgctgttcctgtagctagcacaggcttctggccttatgaaagctagccagcaaggcgtttctttggtaatttttatccaaacagaggccttaagggaaaaaaaaataggatttgtgaaataaaagcagtgtcagtcgtaaactggccgagttactgagtggaagctgagtggagagaggctgtgaacacccgtggttgtgtcacagttggtgtgtcgaacactggaacaggaggtgcaagggcagcctcattctggttctgctagggagaggagagcaagcttagtactgaagagggccctggacctcctgacaaggctgtagctagacacgctgggcgaagccctcagcggattccaggagtgcggcagcctctcaactcagccctgtggttggggaagctgtgcttacgcaagaccttagtttcctgtgcctcagcaccttcatctctaagaggaatagctcaactgtggctatgatgacatttaaaaggggaggaaaaggtaaactgagccccaagtctgaagatagactgggctgtgaaataaggcactgtctcaaacgaacaaatataaggggccaaagcagtgtgcccttaggcaagagataagtgtgagtatttaatgttgatgcaaactagttacaataatgtatgggtctgtgtgcccacgaactaggacaccagagacagcacacagcacagtgtggagacagcacacagacacacactgtggagacatcacacagcacacactgtggagacatcacacagacacacagtgtggagacagcacacagacacacactgtggagacatcacacagacacacactgtggagacagcacacagtgtgaagacagcacacagtgtggagacagcacacagcacacactgtggagacatcacacagacagacagtgtggagacagcacacagacacacactgtggacacagcacacagtgtggagacagcacacagacacacactgtggacacagcacacagtgtggagacagcacacagacacatactgtggacacagcacacactgtagagaggttgcttctttaatttctaaattcaactattcgtcacttcaatcaggttctgacttacgacgtcactgtttaataaattacctggagcagcctg

SEQ ID NO: 2423 - DNA, 1805 bp, Mus musculus
tgaaccgagcaggggccatcgtggaaagcatggctgcagtcatcacttgggccctcgccctcctcgcagtgttcgcaagcactcaggcacggaagagcctctgggactacttcagccaaaacagttggagcaaaggcgtgatgggccagccacagaagctggcacaggagaacctgaaaggcagcttcgagcaagacctctacaatatgaacaattacctagaaaagctgggacccttgagagggcctgggaaggagcctcctctgctggcccaggacccagaaggcattcggaaacagctgcagcaggagctgggggaagtgagctcgcgcctggagccctacatggctgcgaacaccagcaggtaggctggaacttggagggcctgaggcagcagttgaaaccctacacggcggagctgatggagcaggtgggcctgagtgtgcaggagctgcaggagcagctgcgcgtggtgggagaagacaccaaggctcagctcctggggggcgtggacgaggcgctgaacctgctgcaggacatgcagagtcgagtgctgcaccataccgaccgagtcaaagagctcttccacccttacgcagaacgcttggtgactggaattgggcacacgtgcaggagctgcaccgcagtgtcgctcctcacgcagctgccagccccgcgcgactcagtcgctgcgtgcagactctgtcccacaaactcacacgtaaggcgaaggacctgcacaccagcatccaacgcaacctggaccagctgcgcgatgagctcagtgacttcatccgcgtcagcacagatggggcggaagatgagagatccctggaccctcaagctctctccgaggaggtccgccagagactgcagtctcttcggcatgacacatctgcagattgctgcatctactcaggccattgaccaggagacagagataattcagcaccagctagccccacccccgcctagccacagcgccttgctcctgagctggacactcagacagtaataaggccctgagcagactgcagagccgactggacgacctgtgggaagatattgcctatggccttcaagaccagggtcatagtcatttgagtgaccctgagggtcactccggttaaccctccagctcattgtctggaccctgagccgctagcatggtctattaggcagagggtggagggtcctgcacaccaccaaaggtgctgctgtcccaacctacccagcctcctcaactcccctactcaggggcattacactcagtaggctttgcaaacccagcttctggtactcatttggcaatcctaagtagcaagagtgaggtgacaggagtgggagatggtgtgtggggtgactgaccgcaagccagtgcttgaccgtgctggaaacccatgccactacaacctggagttgggctcctgttaattctcgcagcctggtgctggctgttacagttggtccatggagaggaactcctgtctccccagggttgtcatgagagcttttgttggaagggagcaggaggagagcatgatgcagagaacatgtgatggagtgtgtacgtccctgccagtggtcctgctggtgggtccagtgatgggaccgggcagagcccctatttccttagagaactctgaatccagataaggaactgagccatccacacgatgaaggagggcttctaaaaaaatcctgtacagaacaaactgtgtgccttcctcatcatacagtccctacctcctgactctcagggtggaactgacttttggttggaatgaaatagatgctcgtgatgg

SEQ ID NO: 2424 - DNA, 879 bp, Mus musculus
ggcgacgtcccaggggacccacgagggagcgggcgcaacgcgtggctgtgggtgggagccatggacgccttcatccgagtcgccaaccaaagccagggccgggaccgacttttcagagccactcagcacgcatgcatgttgcttagatatttgttagagtctaaagctgacaaagaggccgtggtactgaagctcaagaggctggagaccagtgtgagcactggccgtaaatggttcagactgggcaacgtgttccatgccatccaggcaactgagcagagcatccaagccgctgacctcgcgccccgcttatgcctgacattagccaacctcaaccgcgtggtttattacatctgtgacactgtcctctgggcgaagagtgtgggtcttacctctggagtcaacagagagaaatggcaaaggtgggcggctcgccattactactacttcctcttgctgagcctggtccgggatctgtatgagatcttgctgcagatgggacaagttgcacgtgacagagcaaagagagagaaatcctctcgggaccctcctaagtacagcgtggctaatgaagagactgaatggctccagtccttcctcctcctcctattccagtctctaaagcgacatcctcccttgctcctggacaccgtgaagaacttctgtgacatcctgatccctctgaaccagcttgggatctacaagtccaatctcggcgtggtaggacttggaggtctcatatcctctttggctggtctcctcacggtagtgtatcctcagctgaaactgaaggcccgctagggtgtttggaggctttaaggctagcagttcagtggaacaaacatttggttttgtcccaatgtttactgtgcttaattt

SEQ ID NO: 2425 - DNA, 1966 bp, Mus musculus
gagcaggctttgcatggctacctctacatactgctattgctggctattggaagaccttagtgtcagaatcttcttgtgtacaagccctgaatggtgtgaccaacccaagttcctacagcatctttgcagctgttgatctcactctttcgttcctattggagaaactaccggcccagcaatgtctttgctgtgtttggcagactttaaggcacaagcacaaaagcagctgtctaagacctcctgggattttattgaaggagaagctgatgatggcataacctacaatgacaacttggcagcatttagaagaatccgcctccgccccagatacctgagagatgtgtcaaagatagacaccaggaccacaatccaagggcaggagatcaatgcccccatttgcatctcacccacagcctttcattcaattgcctgggcagatggagaaaagagcacagctaaagctgctcagaaggccaacatctgctatgtcatcagcagttatgccagctatactgtggaagacattgttgctgctgcccctggaggcctccattggttccaactttatgtgcagccagactgggacatcaacaagcagatggttcagaggatagaagccttgggtttcaaagctttggtggtcactgtagatgcacctgtacttggcaataggcgagggaacaagagaagcctgctggatttggaggcaaacataaagctgaaggatctccgatcccctggagagagcaagtctggacttcctactcccctgtctatgccaagttcatcttcctgctggaatgatctccccttgcttcagagtatgactcggttgcccattatcctcaaagggattttgacaaaagaggatgcagaattagcagtgaagcacaacatccgaggcatcattgtttccaaccatggcgggaggcagcttgatgaggttcctgcatctattgatgctctgagaaaagtggtggctgccgtcaatgggaaaattgaagtgtacatggatggtggggttcgaaccggcaatgatgtgttgaaggcactagcccttggagctaggtgcatttttcttgggagaccaatcatttggggccttgcctgcaagggtgaagatggtgttaaggaagttttagatattctaaaagaagaactccacacttgtatggccctttcaggctgccggtcagttgctgagatcagtccagacctgattcagttctccagattataaggacctactgagattgcctacaagagaaagacaagctttcaacatagtgtgtgatgctgttcttcttgggtcccattcataatagaagtttaagccctctaccctcaaaaattgagacagatggagaaaagataggctaaagctaccagagggtgcatttggatgaagaaataacatctaatgttctacaggaaactagagttaacaattaattgactatatcaaaaagccatgttctagcaagaaaggaaatagttagatctgatgtgacataccagttaccttcatttgatcagtagtgcattatacataattgaaatgtcatactgtgccataattatgtgtaattactatgtatcaattaaaatatcaatatatgttcaaaaagaaatggggacagggttatcctgattttattcattccctcctgcaagaaatatttttaaaacatcaatatatgtagtcaaattctgaagcatagtacagcatgtgaattattcaagtttctgtcacagcatgttacagaaatattatgatctattgcctaatgtccattgttaacagaagctgacctcaataaaaaaacaagaggaagattttgaaactcatatttaaaactttatgactaaattaaaattaaatattccagtcatttactgatacatgaaaaagaagatatctttattctggtcataatcattttgtcaaataaatctaagccttttc

SEQ ID NO: 2426 - DNA, 1185 bp, Mus musculus
gactttttccccctaaatgtcaggacttgagacttgcaaccagcctgttttcttgagtgtctcaaggaggctgtctgagtcctgagaggcagggcctggttgactacaaaaggaaaggctgatagaagtttcaggaaaaatccgttacagctgtaggaaagaggatttcccacgaagaactacagggaacttggctccgaactggcggccctttggatgagagaacagttctctcatggaacggcttgcctgaggcagactacctggttgcagttacttcggcggccacgtgaatgcgctgttgtgcagcgagtgagcgaggcgagtgggggaggcgtatgcagttgggactgcggaccctctttctgcctaacagtccaggtctggtgcaaaagttgtgactgctagcatcgcccccagagaagccagatgctgggggccctgggagggtggggagggtctgtggggaccctacccgacccaggctgagacccctcccccaacctgtcagtcctggtgactgcccagtgttcttgggggtactgaactgagtgaatctgagcctaggtgcattgcagtggaagggagatgggcggtgggagagtccccgttccctttgcgcagtggcatctagcatggagggatccttagggtaccatgaccctgtgggtctgcttggtacagaccagttcccccccccttaacccccccccaagtccagaactgtgagggggtatgtagccagggccccaaagagatgtgctacagtctccttgtgctaggaaggtcactgcttaccgtgtactgtagcacaggctttgggcctggacaatgacgcagtatatttttcagctggaaagaaaaagatgtgcgtgagaaagagacatgaaaatacacatagactctgtgtgtgtgtgtgtgtgtgacaagagagacaacggagaaacagaacggtgaacatttttttcccctcatttagaaaacattacctttctggtttcttgtttgttttttgtttattttttcagctagtgggagacagattcggaatgatatgttttggttaaaaacacacatgagcacatataccagatttgtgtgctcacagctcatgtgtgttatttggggaaaggggaggtattttgtcccagtgatgaaagctttagagggagatttttctgaggt

SEQ ID NO: 2427 - DNA, 2069 bp, Mus musculus
cgatctgcgactccagcgcgggggacgcagcagacagctcctagctctgctctgaccacagttttcctgacttctcttccgggccctccggcatggcgatggcagtagcccagaagttcaaccaccttctgtccagcctgtggcacgtgggccagaagcctccgcaaccagaacctgtgtttacagtggaccgggcccaggtgccgccacttttctggaagccgtacatctatgctggctaccggccgctgcatcagaactggtgtttctacttccgcacactgtttcagcggcacaacgaggctgtgaacgtgtggacccacctcctggcggccctggctctgctgctgcggctgatcggcttggcggcaagtgtggacttccgggaagaccctcacgcgctgcccctcttcttcatcgtcttggcctccttcacctacctctcgttcagtgctgtggctcacctcctgcaggccaagtcggagttctggcattacagcttcttcttcttggactatgtgggtgtggccgtgtaccagtttggcagtgccctggcacacttctactatgccatagagccgtcctggcatgacaaggtgcaggctattttcctgcccacggccgccttcctggcctggctttcctgcgctggctcctgctacaacaagtacagccagaagccgggtctgctggggcgcattttccaggaggcgccatcggcgctggcctatgtgctggacatcagtcccgtgttgcaccgcatcatagtgtctcccctccctgccgaggaggatcccgctcttctctatcacaaatgccaagtggttttcttccttctagctgctgcctttttctccacggttatgcctgagagttggttccccggcagctgtcacatctttgggcagggacaccaagttttccatgtctttttggtgctgtgcactctggcccagctagaggcggtgacactggattatcaggcccggaggggcatatacgagcctctgcacgcccgttggccccacaacttctctggcctcttcctgctcaccgtggccagcagcagcctcactgcgctcctcctcagccagctggtgcggcgcaaactacatcagaagaccaagtgaaagcgggtgggtgggagctggcagggtgagagaaggtgctagggacaaaagcctggacttggctccagatcggaacaaggcctggtaaagctggttctatctggcaggccatgactccctgcatacaagctcaatggccaaagtgatgctgctagccaatccttgggcctgcagattggctgggagctgtagagccttgctcagttccctgggaggggcagagatgaaggactcctgactgcccctcccttgccgcctatcagggctaagggttggagttcagctttggtcaccacactggtttggggttttcaggttgctgggcgagaagactcaggccagtgtcaaatttgagcagagagggagtggaagtcttagcagccaccacctaccagagctcactggtggagggaaaagaaacaggcccaacgatgggtagtgttttaacttcactgtcccctgcaccacagcctggatcgctgggttccagagagtctccaaagataagagatcccctctcctgcccacatccctgcatcacagcccagccagaaagcctcacagctagcattggcctgtatctcttgcacactgtttccagcttctccccacaactcatttatgattttgagatatgactccttagctcactgtttcctggggctccaggctttagaaccgttaggaattgtcaaggaaaactcaaagtgctgactagtcagcactgcagggcacgcagagccttggcttaggaagggtgaggagtttgcaggctgagcttagaagggcgttgcaggcaaaagggaagcctgtaccgagattcgagatgcagagatgcagggagttcaggggggctaaaggcaagtttggtccctggggctgagagccaaggctggtccctgatatgccctagattcaataaaatgactatgatattgc

SEQ ID NO: 2428 - DNA, 1622 bp, Mus musculus
ttaacctcctgtatgctttgaacaggaaagagctctactgtctctgagtgcaacttctagtatgagaggtcctaaaggctggagtagtgtttagggtataattttgaaaataaagaggttcctgttgctatacatggggccactcttctcacaggagtgtgattggtagattgtagggttacaatgatgccaagatcatgaaaaagaggaaataacaagaacagggaaacatgataccaacgtgtgtgagcccaaaggggagaaatatcgtcattagggatttctgctggattctgtatgatgtggctaaaggcacatttgctgtaatgatggtaattctctcggtaaggaggatataaaaatatcataaagcggaggcaaggagaggtacaaaatgaagccaagacacctttgaagaagttcttgttgaacttggctatcatcagtaaattcaatgaagtgaaaaatggcatcattcggcgggacagtttgtgggacaagctcgtgttttcaaagattcaaggaagcctgggggggaaggttcgcctcatgatcactggagccgcccccatctccactccagtcttgacattcttcagggctgcaatgggatgttgggtgtttgaagcttatggccaaacagaatgcacaggtggatgttcaattacatcacctggggactggacagcaggtcatgttgggactccagtggcttgcaattttgtaaagctggaagatgtggctgacatgaactacttttcagtaaacaacgaaggcgagatctgcatcaaaggtaacaatgtgttcaaaggctacctaaaggacccagagaaaacacaggaagtactggacaaggatggatggcttcacactggggacattggtcgctggcttccaaatggaactctgaaaattgttgaccggaagaagaatattttcaagttggcacaaggagaatacattgccccagagaagattgaaaatgtttattccaggagcagaccagtattgcaagtttttgtccatggggagagcttacggtcattcctgatcggagtggtggttcccgacccagattcacttccctcatttgcagccaagatcggggtaaagggatcatttgaagaactgtgcaaaaaccaatgtgtaaaggaagccattttagaagacttgcagaaaattgggaaagagggtggcctgaaatcctttgagcaggtcaaaagtatctttgtgcatccagagcccttcactattgaaaacggacttctgacaccgacactgaaagccaaacgagtagagcttgccaagttcttccagacacaaatcaagagcctctatgagagcatcgaggagtagtagcttaagtttgctgagctggaagctgtgggggaagaagtggaaactatgtccagtgaacttttccagtaaatgaagcaagcactaaagtactgtcctgagttgggaacaaagcactgtgggcaaggtcgatgcaatgcctgcactacaggcctgtcttctgtggatctctctccttggccttcagtccctgcagtattttactgtcagatagcatgtggtgcctctacttgtaaatgtcaaatctttgaaataaactattacag

SEQ ID NO: 2429 - DNA, 1850 bp, Mus musculus
ccccacagtctcatcatggttccacaggcgcatgggctgctgcttctctgctttctgctccagctccagggacctctagggactgcagttttcataacccaggaggaagcacatggtgtcctacacaggcaaaggcgtgccaactcactcctggaggagctttggcccggctctctggagagagagtgcaatgaggaacagtgctcctttgaggaggcccgggagatcttcaagagccctgagaggaccaagcagttctggattgtttacagtgatggggaccagtgtgcctcgaatccatgtcagaacgtaggtacctgccaggatcatctcaagtcttacgtctgcttctgcctcctagactttgagggtcggaactgtgagaaaagcaagaatgagcagctgatctgtgcaaatgaaaatggtgactgtgaccagtactgcagggaccatgtagggaccaagcgtacctgtagctgtcatgaggactacacgctacagccagatgaggtgtcctgcaaaccaaaagttgagtacccgtgtgggagaatacctgttgtagaaaaaagaaactccagcagccgccaaggccgcattgtgggaggcaacgtgtgccccaaaggggagtgtccatggcaggctgtgctgaaaatcaatgggttattgctgtgtggggccgtcctgctggacgccagatggatagtgaccgcagcccactgcttcgataatatccgctactggggaaacatcacagtggtgatgggtgaacatgacttcagtgagaaggatggggatgagcaagtacgacgggtgacacaggtcatcatgcccgacaagtacatccgcggcaagatcaaccacgacattgccctgctccgccttcaccggcctgtgaccttcactgactacgtggtgcccctgtgtctgcctgaaaagtccttctccgagaacaccctagccagaatccgcttctcaagggtcagtggctggggccagctactggaccgtggtgccacagccctggaactcatgtccatcgaggtgccccggctgatgacccaggactgtctggagcacgccaagcacagctctaacacccccaaaatcacagagaacatgttctgcgctggctacatggatggtaccaaggacgcctgcaagggtgacagcggtggcccacatgccacgcactaccatggcacatggtatctgacaggtgtggtcagctggggggagggctgtgcagctattggtcacattggggtgtacaccagggtctcccagtacatagactggctggtcagacacatggactccaagctccaggttggggttttccgactcccactactgtagctccttggatagcccaacccgtcccaagaaggaagctacggcctgtgaagctgttctatggactttcctgctattcttgtgtaagggaagagaatgagataaagagagagtgaagaaagcagagggggaggtaaatgagagaggctgggaaaggggaaacagaaagcagggccgggggaagagtctaagttagagactcacaaagaaactcaagaggggctgggcagtgcagtcacagtcaggcagctgaggggcagggtgtccctgagggaggcgaggctcaggccttgctcccgtctccccgtagctgcctcctgtctgcatgcattcggtctgcagtactacacagtaggtatgcacatgagcacgtaggacacgtgaattgtgccgcatgcatgtgcgtgcctgtgtgtccatcattggcactgttgctcacttgtgcttcctgtgagcaccctgtcttggtttcaattaaatgagaaacatggtctcca

SEQ ID NO: 2430 - DNA, 1101 bp, Mus musculus
gggcagtccagctttccaattacagacaactagagcttgaagggactggaccttccttcctgagacatcatggccttgaccccagaactgagcagacaaaccaaactgaaagaggtagcagggatcccactgcaggctccaactgtggacaactggaggcagattcagaccttcgaggccaagccagacgacctcctcatttgtacttaccctaaatcagggacaacatggattcaagaaattgtggacatgattgagcagaatggtgatgtagagaagtgccggcgaaccatcattcaacaccgacacccttttattgagtgggcacggccaccccaaccatcaggtgtggacaaagccaatgagatgccagctccaaggatattaaggacccatcttcccactcagctgctgccaccatctttctggacaaacaactgtaagttcctttatgtagctcgaaatgctaaagactgcatggtttcctactaccacttctacaggatgagccaggtgctcccagagccaggcacctgggatgagtattttgaaaccttcatcaatggaaaagtaagttggggatcctggtttgaccatgtgaaaggatggtgggaaattcgagacaaatatcagattctcttcctcttctatgaagatatgaagaggaacccaaagcatgaaatccagaaggtgatgcagtttatgggcaagaatttggatgaagatgtggtggataaaatagtcctggagacatcatttgagaaaatgaaagagaatcctatgacaaatcgttctacggcccccaaatctatcctggaccagtccatttcccctttcatgagaaaaggaactgtgggtgattggaaaaaccactttactgtggctcaaaatgagaggtttgatgaaatctataagcaaaagatgggcagaacctctctgaacttctccatggaactctgatcaagatgttgatcaccaagaacaggagtctgtctgcaagcctcaatccagccaaaggaagccctgaaagcaaactgtaaaggccaaagattgtgtctctgactctgtgattactaacatcacattacaactcataaaggc

SEQ ID NO: 2431 - DNA, 1191 bp, Mus musculus
ggcccgggcggccttggcaggacccatggcggatctctcgcctgcgccggccctgcgggaaggcggcccccgtgcgcaccggccctcggcgccctcccctccgccgcgctctcgctccacctcggagcccgaggaggccgagctgtcgctgagcctggcccgcaccaagacccgctcgtacggcagcacggccagcgtgcgggcgcctctgggcgcgcgcgtcatcgagcgccatgtggagcaccgggtccgcgccggggacacgcttcaaggcatcgcgctcaagtacggagtcacgatggaacagatcaaaagggccaacaaactgtttaacaatgaacgtatatttctgaagaagacgctgagcatcccaatcctgtcggagaagcccttgctgtttaatggacttaactccattgattctccggaaagtgaaactgtcgacagcagcctttgtcaggaagaggatcccgtagtgtctgaggaagaactgccccctcccagtcctcaggacccggagcccaagcctgcgcaactcgaggaagtgtctgccagagatttcctgcacagactggacttacagattaaactctcaacacaggcagccagggaactcaaagaagagagcagggatgaagagagcccctatgctgcctctctttatcatagttagtgactgaccagcgaactgatccagatcacagaatggctggaccctaagaatcccgccggctctggttcaggggcagcgctgcccctggactcccgtagcgcaccttcgagctgcagttaagtagccctactgcagcttgcctgaagtgatcagctcccggctctctatagttaagtcttattacggcatgatagcaaaactgtatttattctaacgcctttcacttttgtagatggtggtagttttagaccggcttttgtagatacagaaagcatcagagactctatatatttaagccaaaagctatgtttatttcctgatgagatcctaaatgtgtggaagacatgatgactgtggagtgataatgcatttgctgtgtgtttataactcaagtgctatagtatatatttcaatatcacatattctgtactaatgtaaagaaccaaattttgtctgctattttgtaaaagtaaactacagatgtctggatgagaaaataaactatgttttcacacagc

SEQ ID NO: 2432 - DNA, 786 bp, Mus musculus
  misc_feature 189, 195, 196, 199, 200, 203, 204, 205, 206, 207, 209, 211,213, 214, 215, 216, 217, 220: n = A,T,C or G
gcgcctgccccccgcttgtggtcctcgccgcgcgttggttgcggtgctttcctacgtgcctgtctccctgggtcccttgcttcgctgccctcctgccctcctgcgctcttgccgtctttctctccttcctggggccctgccgccccttgcctcctttctgctctccccccctccccttgttcttttttncctttnnttnnttnnnnntntntnnnnnccnccccccccccctcatggtgcctacccgctttcctccatgggctggcctgacaccatatttgacactcatgtgcatatgggaaaccggggcactgcggcttttccttgagtcacagatgcctgccccagaactgaaaggtgactcaagaactttgcctctgtgtctccttcaggtgttaacgtgggcacgagagacaagagagctaacatggcatgggtctctccccacttccgtgctcagtccttatgtggaacatgaagcccaggctgcttgtctgtaatgtcccaaccccccctggttctggtgatgaatagcgctgcctctgtgtagtctggatctactgacactgggtaccagggtttccttctgttgactgtgattgcagctttttctctgacgggaagtcagcaagccagtttgtgactcagttccttcgtatggagaaaagtttctctgcctacagtgccatgggactcggatagaaatgcctaagctctcctcacctttagtgtgggtttatttaaaataaagtttgatgctcctaataaaagcaaatgtacaacttg

SEQ ID NO: 2433 - DNA, 3360 bp, Mus musculus
gggcggtgttgtcagtgtcagttctgcgcacgcagccctcccggagccggtgccggcccgcgagccccggtatctctgcaggctggtccctgcccgggtccggcggggccccacgccgtgggaggaatcgggtgatagctggaacctagctggggtcacaccgccggtgttagggatccagatctctggctacggagacagagctcgagcgtcgcgaccccggaggacctcttctccatccgtggcacccactggtcctggaatctcggcggcgccggagagccccggagcccgcgcgctcagccccgggggagctcgcccacgccccacggtccatccgggccatgctcccccggggcagcggctgaacccgagccgggacccgagcccgcgggagcatggatccggactgggggcagcgggatgtgggctgggcggccctgctggttctcttcgccgcctcgctgatcacggtattgggctggatgctgcagtatgcccggggtttgtggctgtcgcgagccgatgggggccgagactcccgacctgcctcagctgctgagcccgggggttcactgcgcgagctgggtgtgtggcgttcgctgctgcgtttgcgggcgacccggaccagcacccccgatggaagccggcgtacggggcctcctggcttcgctctttgccttcaagtctttccgggagaactggcaacgggcttgggtgcgagccttgaatgagcaggcctgcagggacgggagctccatccaaatcgcctttgaagagataccccaactcccaccaagagccagcatcagtcatgtgacctgcgttgaccaatcagagcgcaccatggtgctgcattgccagctctctgctgaggaggtgcgcttccccatctctgtgacccagcagtcccccgctgccgtctccatggagacctaccacgtcactctgacactgccaccaacacagttggaagtcagcctggaggaaatccctgatgaggggctcctggtgtcctgggccttcactgaccgcccagaactcagcctaaaggtgcttcccaagttgcagactagggagagagatgaggaacaaccagagctctcaacagttgaggaactgatcaaggacgctatagtcagcactcagcccgccatgatggtcaacctcagggcctgctctgccccaggaggcctggtacccagtgagaagccacccacgatgtcccaggcccagccatccatccccagacctacccgattattcttacggcagcttcgagcatctcacctgggaagtgagctaggaggtactgaggaactgtgctgtgccgctgagcttgacaaccccatgcaacaaaagtggaccaaacccatgagggcgggccccgaggtggaatggaccgaggacctagctctggatctgggtccccagagccgggagctgaccctcaaagtgctccggagcagcagctgtggagatgctgaactccttggccaagccacactgcctgtgggctcaccctctagaccgatgtcacgaagacaggtgtgcccactgactccagggcccgggaaatccctgagcccggcagccaccgtgacagcggagctacattatgagcagggttcccctcggaatctgggcacgcccacctcctccacccctcgccccagcatcacacccaccaagaagattgagttggaccggaccatcatgcccgacggcacagtcgtcaccactgtcactaccgtccagtcccgcccccgtgtagatggcaaactagactccccctcccgctccccgtccaaggtggaggtgactgagaagatgacaaccgtgctgagtgagagcagcggccccagcaatgcctcccacagcagcagccgggagagccacctttccaatggcttggatccagtagcagagacagccattcgccagctgactgagcccagtgggcgggcagccaagaagacacccaccaagaggagcacgctcatcatctctggtgtttccaaggtgcccatcgcccaggacgagttggctctctccttgggttacgcggcatctctggaagcctcgatgcaagatgatgcaggaaccagtggtggtccttcgtcacctccctcagacccctcagccacatccccaggacctgttgatgccctctccagtcccacaagtgtccaggaggcagatgagacaacacgttcagacatctctgagaggccgtctgtggatgatgttgagtcagaaacagggtccactggtgccctggagaccagaagcctcaaggatcacaaagtgagtttcctgcgcagtggcacaaagctcatcttccgccggaggccccgacagaaggaagctggtctgagccagtcacacgatgacctgtccaacacgacggccacacctagcgtccggaagaaggctggcagcttttcccgtcgccttatcaagcgtttttccttcaaatccaaacccaaggccaatggcaaccctagcccccagctctgaaagcccccgagctaggagagatcaagagttctcttagtctgtcccccacatccccttctgtaccccttcctggatccccactgctggggccaggaaagccctcgggttatagggagccccagcacactgggctgtggggtgagcgggaagggtgtctgacatgggaggcatctgggaggcaacagttgttgcgtgagcgtagaggagagtttggcagctgagagtcaggggcaagctctgtcttgggcgtgtggacactcatcagaagcctctgctggtactgccgccagaggggagcccagagtactctctcatcagcaggtccttctcccttatttattctcgtttctatttatatgtgtggtctagaacccttggcaaacagatgatagagggcatctctcccaggtgacccttttctgtcccaggagggtaaggcaattcccaggacgggtttctacccctcccttgggagtcctctcttagaccagcaccaatgtctgccttcagaagacattggcagatcacaggaagccgggctagggcccgggatggggggcaggcactccccacctccctacctcccacatcgctccttgtctctccttcccctttattaccattttgtacttgatgccttctccatgagcagtggctcagttggaaggagggagccaggaagctgggaggaagccttccctagagagccagctttaggagttttaaagacagtacgatcatagagcaaggttgcacctctgtatgttgggagatgatgatgtccattgctgtgtgatggcctggaatttaatttatttaattaaaatcaaattggagttt

SEQ ID NO: 2434 - DNA, 1580 bp, Mus musculus
gcggagtggcaagatggcggcgcccaggatgccaccctcccggctgtcgggcatcatggtgcccgcacccatccaggacctggaggccttgcgcgcgctcacggcgctcttcaaggagcagcgtaaccggtaactgcgcgggggctgccacctaggaaggaggaagaggaaccatggagggctctgggctgggctgggcttgactgggctgggctgggcagcggcgagcgaggcggggcggcgggctccatcagctcggcccacgctcaggttgtggctctgtggcgctcgcctaggcctgctctgggacgagggtttggccaggctctaagaggggcagacgatggcgacactggtccccaagccggcggcggggaagctgttggttcggctcctctggcggggccctgagggcggtggccagggaagggaggcgtgttcgggctcgcttctccctctgggttagagggcgttctgtccaggagcctgcagagctggcctggcttcgtgacatctgctcagcatcgcctctaacccttctgtttctagccttacaaaatgggagctgtggtgcgttgttttcagtgctgagatgaaataaacgtgtttaaacagaagtgtgcgaggctgtcagttcctgatggatttttgtggtatggtttgcgctgcagtttccttgtctgtttaatggaaacaaggttcgctgggacctccttggttgagttgacagtgagggttagatgagacgatgcgtgttacatccttaggccatgcctgacacttagtactaaacaccattggtgttttctcttaacagtaatggtctcccctggaccaagtcttgggagaggacccggagcccttggtctctcctgtagagagataacaagcaggcctagagtgtggacaaagggcagagaacgcggtgggggtgggggtgggggaagcacgtaggctcagtggtcacaggaacgttttctaaaaataggtagccgccagacatgtcacgtggctcagccctgcagttccagcattcaggaagcagaggcaggtggatctcttgagtttgaggctggaccagtcagcattgtgacatcctctgtatctcaaaaacaaataaacccgggctggagagatggctcagcaggtaagagcaccgactgctcttccaaaggtcatgagttcaaatcccagcaaccgtatggtggctcacaaccatccgtaacgagatctgacacccttttctggagtgtctgaagacagctacagtgtacttacatataataataaataaatctttaaaaaaaaaaaacaacaaataaacccaacaacagcaacaaaaatatcctggtggagctctttccccaccaggcgacacagtgtgcgtctaaaaggtgctggggagcccgagcactacttggccttgtggttagcatgctaatcagtgtgacagatactgctgggaaataatgttggttgattggatgcttgggcctgtctgtaccatttcggacctataccttaatcattaaccatctattgagtactgtcagacagcctttgcagggagctgaggcgac

SEQ ID NO: 2435 - DNA, 1538 bp, Mus musculus
gaagaagaggggcacggacgccatccggaccagaaaaagccaggagagacagaaattcgtaagcagaagctccaggaggaggaggacacgcccacatggcatcagagagcgggaagctatggggtggccggtttgtgggtgctgtcgaccccatcatggagaagttcaactcatctatctcctatgaccggcatctgtggaatgtggatgtgcaggggagcaaggcctacagcaggggcctggagaaggcggggcttctcaccaaagccgagatgcagcagatactgcaagggttggacaaggttgctgaagagtgggcccaaggcaccttcaaattacatcctaatgatgaagacatccacacagccaacgagcggcgcctgaaggaactcatcggtgaagctgcagggaagctacacacaggacgaatcgcaacgaccaggtggtcacggacctcaggctgtggatgaggcagacctgctcaaaactctccgccctcctccgggtgctcattggaaccatggtcgaccgggcagaggcgtaacgtgatgtcctcttcccagggtacacacacttgcagagagctcagcccattcgctggagccactggatcctgagccacgctgttgcgctgacacgagattcagagagactcttggaggtgcagaagcggatcaatgtcttgccactgggggagtggggccattgcaggcaaccctctggggtgtggaccaggagctactcgtgcagaactgaactttgggccatcactctcaacagcatgatgccaccagtgagagagactttgtggctgagttcctgttttgggcttctctgtgtatgacccacctcagcaggatggcagaggacctaattctctatggtaccaaggaattcagctttgtgcaactctcagatgcctacagcaccggaagcagcttgatgccccagaagaaaaacccagacagcctggagctgatccggagcaaggcgggccgagtgtttggacggtgtgccggactcctgatgaccctcaagggacttccaagcacctacaacaaggacttacaggaagacaaggaggctgtgtttgaagtgtctgacaccatgatagctgtcctccaagtggccactggagtcatctctacattgcagattcatcgtgagaacatgaaacaggcgctcagccctgacatgctggccacggacctcgcctactacctggtccgcaaagggatgccattccgccaggcccacgaggcctcagggaaagctgtgttcatggcagagactaaaggagtggctctcaacctgctgtcgctacaggagctgcagaccatcagtcccctgttctcaggtgatgtgagtcacgtgtgggactacagtcacagcgtggaacagtacagtgccttgggtggcacagcgaaatccagtgtcgaatggcagatcaggcaggtgcgggccctactgcaagcccaggagccctagatcccgcccacccaaagctggccccaataaagtggagccctgagaaaccg

SEQ ID NO: 2436 - DNA, 530 bp, Mus musculus
ggggtgacggtacgatggctgcgcagcggctgggcaagcgcgtgctgagcaagctgcagtccccgtcgcgggcccgcggcccggggggcagccccagcgggctgcagaagcggcacgcgcgagtcacggtcaagtacgaccgacgggagctgcagcgacggctggacgtggagaagtggatcgacggatgcttggaggagctgtaccgcggcagggagtcagacatgccggacgaggtcaacatcgatgagctattgaattggacagtgaagaggaaagatgccggaaaatccagggacttctggaggcttgtgcaaatcccacagaggacttcgtccaggagctactggccaagcttcggggcctgcacaaacagccgggcttcccgcagcccagcccctcagatgaccccagcctgagcccccgccaggaccgggcccacactgccccaccctgactgcgcccgcctctgcgctccacccccaaagcccagattgtttctaagttgtatttaatggttctgtaactgc

SEQ ID NO: 2437 - DNA, 1104 bp, Mus musculus
  misc_feature 17, 18, 79, 169, 170, 195, 265, 328, 329, 353, 354, 361,362, 363, 374, 375: n = A,T,C or G
ggatctccggcagccanncgcactcggggagcctcagtccgtgtgtgtccctccgagcgtgccgtgctaggagagaagnggaagagaggatccctgagaccgtgtagcttcgctttgagtgctcaactgcgagggtgtagggttcccgcgttgtagaaacgaatgacgnngaggttctgggtctaccacggacanggactctgtaatggggggtagtgaggagatgtgtcctaatactcctgcagaagctcattgaagaagctgngagcacggccgtggatgaagtgaaagaagttttcctccttagctctctcggaaagcaagggcnntgagattgtgctgaatgctgtcanntggaacnnngcttgagcacnnatggaagaaatatctacagaagagccaagaaggggggatctgaaggtcagcatccatcgcatggagatggagaggatccgctatgtcctcagcagctatttgcggtgtcgactcatgaagatagagaagtttttccctcacatcctagaaaaggagaaagtgcgcagtgagggggagccttccagcctgtctccagaggagtttgtctttgccaaagagtatatggaccacacggagacccactttaaaaacgttgccttaaagcacatgcctcccaacctgcagaaggtggacctcttgagggcagttcccaaaccagacctagattcatacgtgtttctgcgagtgaaagaacgacaagaaaacatactagtagaaccagaagccgatgagcagagagactacgtgattgacttggaggtgggctcacagcacttgatccgatacaaaaccatcgcacctcttgttgcttctggagcagttcagctaatataaaacaaagcaagcctgaggacatggagtggtcacagacaatattagaaacgccatcttttgtgtctaatagtgaagtcatgtccatacagttcgtcagcaatgtgtggaccacttggacgtagaaaggcgccgatgcagaattcccttcgttgtcacagccttctcctaaattcctgtttaaccagcaccaacagatgggcccgtgctctgaatactcagcaaataaatcaaccg

SEQ ID NO: 2438 - DNA, 831 bp, Mus musculus
tacagctctggtctcatcctcaactcaaccacaatcatggctcagatgatgactctgagcctccttagcctggtcctggctctctgcatcccctggacccaaggcagtgatggagggggacaggactgctgccttaagtacagccagaagaaaattccctacagtattgtccgaggctataggaagcaagaaccaagtttaggctgtcccatcccggcaatcctgttcttaccccggaagcactctaagcctgagctatgtgcaaaccctgaggaaggctgggtgcagaacctgatgcgccgcctggaccagcctccagccccagggaaacaaagccccggctgcaggaagaaccggggaacctctaagtctggaaagaaaggaaagggctccaagggctgcaagagaactgaacagacacagccctcaagaggatagcccagtagcccgcctggagcccaggagatcccccacgaacttcaagctgggtggttcacggtccaactcacaggcaaagagggagctagaaaacagactcaggagcccaaagcagccacctcatgctggcttccgtccacacccttgccctgcttcaaccattagatctgcacggccatccctttcttacctggcggagctgccttccctggggtagaccaagagagtcagaagaaagagtgtctcccagggaatgaggaaggagacagcaggactgtcccctctaggaggtcactcaggtcccaagacctgaacctgctctccatggcgccctccccttgtccttgcacctatgatttatacctaactgaataaaaaagtgatccagcctca

SEQ ID NO: 2439 - DNA, 1205 bp, Mus musculus
aacgatgtagtagatagaccccatgctcccacctgcttatgtgttgctcacactgtgtgtgatttgtctcttatgttaagcagcacctatgtcaacagtacatattcagatgtgttgagcactccaggtgtagtcagtaggaagttcttttactgagtaccgttttaatttatagactgccacggccttaagaacattctggacagataactgcaccatgttgcacaggcactacttgttctctccattctcattcttactgagtaggacctgggctggaaagttctcttcttattcacggaggcaggttgcactcttcctgaattggatgggtggtttgaataaagggatatttaaactttgctcctgtagcccgacatgactaatggtcactgtgaaccatttcaaagaatgtggcaacttgcttatgcctaaaaggagggattggaaccagaatgtttaactaagcggggactgcataagttcttgttaattgacctatggaaaccttaatttgtttatgtgtctttccattgctttccagcatttcaggacatctaaaagctactaccaacattttcctgtgcataacctctgcatgtgaaaacctaacagttactgaactttgtaaatacgtaaattttttatttaggtgtggatgcattttttgtctgtttactgctcctctcagctttattcaataaacttgcattttgagggttgcattgacaattttaccttaaaatgtatcatgatgaaaagacgcagacctttggactcgagtgggaagataatcactctggaaagggctccacagactgtgctggaaggtggctgcctcagctggccgaggtgttgatgggatgaactagaaataaacttttacagtgtctacagagttggtatcatggtcccctcccttctctcttgctcggagaggattctgttacatatacattgagtggcacttggtgggccggtcctgaggagtgagtctagtcttcaccaatgctggccaggcactctaatgtcaccgaacacacactctcttcttagccccaagtctaggactttttaaaatggtggaggcaagtaaagagttttatcatccagtttctttaaaaaaagttacactgccagaaactgaacctaggctcttgcgtagtctagagaagccctctaccactgagctacatcccagcctc

SEQ ID NO: 2440 - DNA, 2227 bp, Mus musculus
gaatcgcgcttccgccatctttccagctccagtcggacaggcgcggagactcttctggaaggatccgccgcgatggccgcccaggggagagccgcaggtccagttcaagctcgtcctggtgggcgacggcggcaccgggaagacaaccttcgtgaagcgccacttgacgggcgagtttgagaagaagtatgtagccaccctgggcgtggaggtgcacccgctcgtcttccataccaacagaggacccatcaagttcaacgtgtgggacacggccggccaggagaagttcgggggcctgcgcgatggctactacatccaagcccagtgtgccattataatgtttgatgtaacctcaagagttacttacaagaatgtacctaactggcatagagatctggtacgagtgtgtgaaaacatccccattgtattgtgtggcaacaaagtggatattaaagacaggaaagtgaaggcaaaatctattgtcttccaccggaagaagaatcttcagtactatgacatttctgccaaaagtaactacaactttgaaaagcctttcctctggcttgccagaaagctcattggagatcctaacttggagtttgttgccatgcctgctcttgccccacctgaggtggtcatggacccagctttggcagcacagtacgagcatgatttagaggttgctcagacgactgctctcccagatgaggatgatgacctgtgagaaagtgaagctggagccctgcgtcagaagtctagttttataggcaactgtcctgtgatgtcagcggtgcagcgcgtgtgccaccttatttagctaagcagatcgtgtacttcattgggatgctgaaggagatgaatgggcttcgagtgaatgtggcagttaaacataccttcattttttggacttgcatatttagctgtttggaacagagttgtttcctttctgaatttcaaagataagactgctgcagtcccatcgcaatatccagtggggaaatcttgtttgttactgtcattcccattcttttcgtttagaatcagaataaagttgtatttcaaataatctaaacaagtgaatcatcccttgcttattaaagccactaacacgagggagcttgtgccatattatagtttaaaatgcttctgctattacctgaggtctattcagttatgttctccttgtgcctaccttcataaacatttagattgtctgtgattcagctaggatgatatctgccctacctgcatttagccaggtagtttaacctaagagaagaccttgtgtaaaactaaagatttaagtatgtacgcatcagatgtttaaggattgcagttgacaatttctgtaacctaggccttcagaagttagaactgcagttgacggacggaagcttgagggttttctgagatggactacatttcttcatttccatgtctaatgttggttctctaagatgtcctctgctttcaaatattggctcctatattgagtggtagtctcaggaggtagaggcaggaggatctcttgagtttgcccccaaccttagtctacagagcaagttccaggactgagagacctgtctcaaaaaattcatggtaggctgttacagtattacagcagctgatcttttttttctcccacggggtttatataggttgtgcaggagaggaaatgctagggctactgccactgaggagtagggtgggcttctctgatgtgatagtgttagttgagacttaggtgtgtgatcccggcacaactgtgttgctcagatgtatttacagcaagccattccgtgtgctctgctggtccagtctaccaaagttcctagaagggtggataccttcacatagttgttggtgtttgttttgttttgtttttttctccccaaagaaggtagatgacttaaatacagtggggaaggtggaaggaactcatactgtgcattctagcttcagcagactgattgcaagactcaaatttgatgtatgtgctatgctatgatcaggtgaagaccctctcccctgactgggatgaaacctcatttagatgtcttgaattaatacattgtgtgtaaacctggtatagaatgtagaacctttatgactttctgatttttgtaacagttaaatgtgggagctgcttacgtgtgtttaaccagagtgcagagatttacattatttattggaagaacttaaatatatatcatttctgctttgcccc

SEQ ID NO: 2441 - DNA, 1869 bp, Mus musculus
cgagactcctggcggcgccgccctgagcgcgcgggccacacgtagccgccccagagtgagcgcagagctgcggcgtattcgcggggcaccaacttctcccccacggggactcttaaccgccgttgcgggaatcgagcgcgtcccacggagaacccctgatcgcccctgccaggactcactctgcccaggcggaccccaggcgggggccgagggcgcccccggcggcaggggcatgcgccgcccgcggcatggcctcggcggtgtttgagggcacgtcgctcgtgaacatgttcgtgcgcggttgctgggtgaacgggatccgcaggctcatcgtcagcaggcgcggcgatgaggaggagttcttcgaaatccgcaccgagtggtcggaccgcagcgtgctctacctgcaccgcagcttcgccgacctgggccgcctgtgcaagcgcctccgcgatgccttccccgaggaccggtctgagctggcgcgcacgccgctgcggcaaggactgctcgccatcaagggtgcacatgacatagagaccaggctcaatgaggtcgagaagctgctggagacggtcatcagcatgccgttattccaggtctgaggttgttctcaccttctttgaaagatcgcctttggatcaggtgttaaaaaatgataatgtccataagatccaacccagctttcaaagtcctgttaaaatatcagaaatcatgaggtccaatggattttgtttggcaaacacagagaccatagtcattgaccacagcatacccaacgggaaggaccagctcctggatgcggattccacagagcatttgtttgagaatggtggtgagttcacctcagagctggaagatggtgacgacccagaggcttatgtcaccaacttgtcctattaccatttggttccgtttgagacggacattttggactgagcctctccatcgggccttctctgcctccaacctcgactgcatgtcctcatgctgtctactgtgctcctccaagggccaaagctactgctcagcctggacctcctagggtcctgaggttcagcaggcctgggtatttagaaagcagaggcacacgggatcccgatgaccataggcagcaccgaggggccttcttcctgctctcagcccctccagcccgcctcttctgggatgccaggccatgcttcttcttgtctcactgccgacttagggaacattcctcttggtcacatggccctgactccccacttttctcttgtgtgtcaaaggcacacacaaagtatttcaagaggatttttgctaagttaccaagttctggacctcgtggacgggggatattaagtgattcaggacctccctaagaaggatgtgtggctcttttttttttctttacatctgctccctggaatctgggtttgggatgagccggaaggagcgtttacacaacatcaagcctggagaagattgctagcttcggcgaggggaaagcattcatggtcctgtgcatatgaacctgatataaagttttcttccagggaagagagcgtcctcctcactgccagcacctgtcagctcttctgccaggcggtgatgcggtcaccactgcctagggtgctcgaagtccttcccctgctgacctcaatggcacaagtgccaggatggatcagaaaggaagggatgggaaggaaggaagggatgcttacagcttagaccacagaaggtctgggtcctgcaagctcatgtcctcactgtgtctactaacgaccagcacttgctaatgtaaataatagtaaattattgagaattctaattcttttacacagtctgtttttaatctattttaattaaataaaaatctattgttctactttg

SEQ ID NO: 2442 - DNA, 1571 bp, Mus musculus
  misc_feature 44: n = A,T,C or G
ggtttggtgggcggggccgtggcgggctcaaatggcggcggcgntgggcgcctagcgcggcgggggccatgagcgccgcccggccccagtttagcatcgatgatgccttcgagctgaccctggaggacgcggggcctgagcccgagtccagcggggtcgcccgcttcgggccgctgcacttcgaacgccgggctcggttcgaggtggctgatgaagacaagcagtcccggctacgctaccagaacctggaaaatgatgaggacggagcccaggcctctccggagccggatgggggagtcagcaccagggattctgggcacatgtctgtccgcagctcgcagtggtccttcagcaccatcagcagcagcacacagcgctcctacaacgcctgctgcaggtgagagcctcctcacttggggttcagcttccaagtaccttctgcttctgcctgccagccagccccagctccctgcctgcttcacctccttgacctccgtcttgctctcctgccacccagctggacccaacatcctttgatccagaaaaaccgccgggtagtgctggcctcctctctgcttctgctgttggggctaggtgtctccagtgccatcttctttgagccgggcatcctgctgttagtcccaggagtctaccatgtgatcttcatctactgcgctgtcaagggccgccgggcttccaattcttctacctgccctactttgagaagtgagctgcaactggccagtggctcaccagtgatccaaggcctcaggtcacctccacgtgtccacacggtattcctccaacctacacctggttctgttcctttcacctggaaggcagaggcccctggcaccctcacaaccaccaggcccctttgaatttgctcaggaagtttagagcatgccagcctgggaatattgcctcttacctgatgtgtgccttaacttattcctgggttctggactcctgggttggtgtaattttgtgctaataaaagggtaattatttccaacaaggacagttgcactttcctgggccagcaagcctggcccagcacactaacgaccacagtcccctcctacagagggactgtgtgtaaaggacccacctagagctctagaggaccaccaacttcccaaggacaacctggatggcctcaggtgtgcccatggtcaccattatgcccagggcagagctggatgaagtagtcccaccctgtctgccttcatccctgaggagattcaacactgccccctagccaagggcaccaagaagtgatgcaggcaccaggcctagaggctggtaccctggttcctgcctggctctgtagcactaggcagtcatgactgtcactaaatgtgggtcatgtgcccctctacacacccactgccctattttctagacccagaggttgggagaagcagggagaggagggggtaggatcacggcttctcagccgagcagcacagtaacaaggcgatgcttagagccaccaactgtttgaaacagttcaagttcttagaaaattggggccgctaataatgtctgaaacttaaataaacaaaaat

SEQ ID NO: 2443 - DNA, 517 bp, Mus musculus
ggtctcagctcaagatcccgagtagagaacacgaacaccgctgagccctcctgcgaggccggctgaacgaggaaataattgctaataaggcctctgtagccatggctacttctgacgtgaaaccaaaatcaataagtcgtgccaagaaatggtcagaggaaatagaaaatctgtacagatttcaacaagcaggatatcgggatgaaattgaatataaacaagtgaaacaagttgccatggtcgaccgatggccagagacagggtacgtgaagaaacttcagcggagggacaatactttcttctactacaacaaagagagggagtgcgaggacaaggaggtccacaaagtgaaggtttacgtctaatgaccttttcctttcttcggcttggcaatgctcctttaagaattggttgtttacattcttccatcgtgtaaatgtcattttacaaaacaattcacaattctgtctttaattcatggtgtcttacacaacataaacacccaccttgaaacctt

SEQ ID NO: 2444 - DNA, 1576 bp, Mus musculus
tggcactctgtttgcaagatataaaagggcagtcagagggagaagctgccatcatcctttgcagctccatcgggaacacctggagaggatccctccaatttgttaattaacaaacaagcaccttgtttatacaccagttgctcctgtgagttggtctcctggccgaagcgactctgggtcctcaggaaagcctgtctgtcagagctgcaggactgggccccaccttccgtgttcctccctgtcttagatcaacgggactgtgaaatgggcctgctccgacttctggtgctctgcaccctggctgcatgctgcatggcccgctctcccccagccccacccctgccacaacgccccctctcacctctgcatcctctgggctgtaacgactctgaagtgctggcagttgcaggatttgccctgcagaacatcaacagagaccaaaaggatggctatatgttgagccttaacagagtgcatgatgttcgggagcactaccaggaagacatgggatctctgttctacctcacattggatgtcttagagactgactgccacgtgctcagcaggaaggcacagaaggactgcaaaccgaggatgttctatgagtcggtttatggccagtgcaaagcaatgtttcacattaacaagccaagaagagttctctacttacctgcttataactgtacacttcgcccagtttccaaaagaaagactcatacaacgtgccctgactgccctagccccattgacttgtcaaacccccagtgctctggaagctgccacggagtcgcttgcaaagttcaacagtaagagcccctcaaaaaagtatgaactcgtcaaagtcaccaaggctatgaaccagtgggtgtctggccctgcttactatgtggaatatttgatcaaagaggcaccatgtaccaaatcccaggccagctgttcgctccagcactctgactctgagcccgttggtatttgccaaggttctacggtccaaagttctctgaggcacgttcctctgatccaacccgtagaaaagtctgtcactgtgacttgtgagttcttcgaatctcaggctcaggtccctggagatgagaaccctgctgttacccagggccctcagaaactccctcagaaaaacacggcccctaccagctccccctccgtaactgcaccaagaggatccgtccagcacctccccgaactggatgatgagaagcccgaggagtccaagggagggagccctgaggaagcctttcctgtgcagctggatctaaccaccaatccccagggggacacactagatgtctccttcctgtacctggagcctggggacaagaagctggtggtgctgcctttccctggaaaggaacagcgctccgccgagtgcccagggcccgagaaggagaacaaccctctggttctcccaccctgagactccctagcagggtttcatagggctatggtccccagcactaaatgggaggtggtggggattgggaaggacacagacaatgaaatgtagacaggctaataaagtgtgtccttttgatgcttcttggcttcaacctgttgactt

SEQ ID NO: 2445 - DNA, 2938 bp, Mus musculus
tgccttcgggaccctactgtgttccaggtcccgtctgtccctcagtcacatagctgtggtcattccaggacatggggacaaaccactctttcccagccaggtgcctttgagccttcccttccaagacctgcacttttcccgctgtgttctcttgtttccagagtccatccatcttactagctggggtcgtcttcattatgagctattccttcctggagttctccactgtggtggagagtgtgggatgctcagagggacctgcgtgcatggttttggtgtgcagagagccatgtcacatcatgtttctcactggggtcttggaacctgtggatcccagtccctatgtgatatgctcaaatgccctgtcaacaagctagaaccagactcagggttaggtcagtgtgcatgcccttagccacacttcccacctgtcagtgaggatggctcctatattctgaaagctactctgagaccctgtgagagctgagttagatggttggagtggcctttagatagcatgcagctctgttagtctctgcttctggtctccattgaaagcaagcaggtttgagaccctggcagagcaggggagtggttctctctggtccatttccctctaagaccctggaaactgctgctgtgtccctttcagtgctgggcctagaggctgccacaagttgcagatgtggggtcttgggaagtagatacgttcatcttagtatctctcaatgacaatgtccactgattgactggaaacgtttggaaaaacacaaaaacaagttggaaggaaattacttctgttgttcaggccacaccctgtcccttcttcagtctctaccaacagcgtttgccttatgggtgcagctcaccggcagctgcctcatccattccaggttctagagctttctatggggcgggtacctcggtgcgcatagggaatgaggacgaagctaaaatggacctttcaaaccccgatgtatgagcaatgggtgcttgtgagtctgctcatttccagaggagaagtcctggcctgccccaccctagagccccccaggtgtgtgagtggcaagagcaagctcagaaccgtctcagcgctgggctgtgactgccagccacccttcatctagactgaaggaggttagcatttgccagtgtgttttctctcgatattcatgtacgtgtattttaaaagtaagttgcagtatcatgagactatttatccctagtgttgccctaagaggtagggccttttaccagaccagccagtgccacagccaagacagtagtcctgtcccactaacagccattgtctagtctgtacctaaagttgtctcccagcccccattctaccccattattttagtattggtattggatccaatcagggcaagaacattgtatgttattaaaaagtttctttgaaagctaaaaagttttccctctgcccaactcattaaaaaaaaaaaaaaagtttggtttttgtttgtttgagacaaggtctcattatatagccctggctagcctggaatttgttatgtagaccaggttagccctggaactcatagagatccacttaactctcaaaagctgagattaaatgtctgcacttaccaggcccagttcaaaatggtattttgtttgtgtttttgagacatggtctcatcatgtaaatctggctgtcctggagaatgttatgtgaaccaggctggctttgaactcagagatccatctgcctctgcctcctgagttctgtgattaaatgtgtgtgccacttctcccatcccccaaatggtattctttttaaggccagagggtatgtcgtcgtctagaagtcccacattccagatctgattgtttcctcctgtagctagcccacaggctttcaagggtcattttccttcttgtgtggatgtggcatttcctcttgcctgtagtgagcctcctcccacagccccccaagtgagggccaaaccagcttgggggaggggaaggggctccccaaagaggcaacatcacatgggtaggggttgagggctctgtgggatgggatggtcctgctggactgaccctggagggccaggctaggcacagcttagaggagcccggctgccccatgctaagcacagcattggtctttctccatctcttccctcttctgtctgtgttttggtttccctgcttctgttctgtggtcctggggtcttcattctctagatggtcagtgtgcactggaacagagatgagacctcaagctatgacagggaaggcctaggagaaaggcgtcctctaggcggaggcctgagaagagcaccgggtgcagcaggcggtcacgtgacggtcttcctccataaatgagatggaggcttcagcaggggtttcacatccacgcaagaggcagctgtgctctgtgtgatctgaggctaggagtctgcctcctccccttccacccccaggccttccatgcagtgctggggttagggttgtctggctgtgggcttgatatccttgccagctctgagtagcccggcaatgtctgagggccagcgggaaggccaggggagactccctgaaatggttcacctaagaagcttccctcaacctctccctggcctggaggaggatcccagaggaaagggttttctatgactgagctagcttttcttacgggcaagagggctctttttgtaatttgtgcatgaaattcatgttatttcctggggagagaagagggccaactgagtgggtggggggcacgtgtgggaagcaggcagaggtttccttccctggaggggtggggagggctcgcagagggcatgctacctagctcacctgaagagggctcttgaaccagccgttttgggttgtgttaaatgtgggaactttcctccattaatgtacaatcttgaactaactgctaataaaatgggattctgtttgt

SEQ ID NO: 2446 - DNA, 1441 bp, Mus musculus
ggactaaacgtaggatgggacttaagttgaacggcagatatatttcactgatcctcgcggtgcaaatagcttacctggtgcaggccgtgagagcagcgggcaagtgtgatgcagtctttaagggcttttcagactgtttgctcaagctgggcgacagcatggccaactacccgcaggcgctggacgacaagacgaacatcaagaccgtgtgcacatactgggaggatttccacagctgcacggtcacagctcttacggattgccaggaaggggcgaaagatatgtgggataaactgagaaaagaatcgaaaaacctcaacatccaaggcagcttattcgaactctgcggcagcacaacggggcggcggggtccctgctcccggcgctttccgtgctcctggtgtctctctcggcagctttagcgacctggttttccttctgagcgcgggaccgggtccccccctccccctccgctcactcacccacactcacaccatgctcccggaaatcgagaggaatagccattcgttctctgaggacgttgtgattctctgtgatgttgaaaacactcatatgggattgtgggaaatcctgtttctctctttttcttcttctttttttttcttctttttaattgtgtttgattccttgtgttttatttgccaaatgttaccgatcagtgagcgagcgagcacagccaaaatcggacctcaccttttagtccgtcttcacagaaaaataagaaaacggcaaactcacccccatttttaaatttttattttattttattttattttggcaaaagaatctcaggaatggccctgggccacctactatattaatcatgttgataacatgaagaatgatgggctcctcctaatgggaaagcgagagggaaaaggagaaggccaggggaatgacttcaagagtggtgtccacgtgggaatcagccggtgaataatcatgctcacgtctttcttccacagtaccttgttttgatcatttccactgcacatttctcctccagaaaagcgaaaacacaagagtgtgggcttagcatttttttaaggataagacagagagagagaaagaggttgggtatagtgggataggttgtcataagagatgctgctatggtcatgaggggccggtttcacctgctattgtcgatgcccctcgttcaggtccactgcctttattttccttcctctcttgttttagctgttacacatacagtaatacctgaatatccaacggtatagatcacaagggggtaatcaatgttaaatctaaaatagattttaaaaaaaaagattttgacataaaagagccttgattttaaaaaaagagagagatgtaatttaaaaagtctattataaattaaattcagcaaaaatctgctacaaagtttagagaagtataaaataaaagttattttttg

SEQ ID NO: 2447 - DNA, 1198 bp, Mus musculus
ttggtcttcagtgagaggagggcagctgctctgacaggtgaggtgtattttagacaacccaaacatactctgaggacggcagttcagagatggagaggaaagctttggggcacagaaagagaaacggtggctcaactgtcgagtatatagtttctcaccagcatctgtgaacctgatggcccctaagtggctccttctggaacattccctcactggataccatgtaccctctgactctcttgaatcttttgttccaaagcacttttaaatgaaggtgccttcaagctcctgtggatcgtaaagatctgaacaagctgggacaaagatattaagctgataccctcaggcctgagggaatggcttacgtgtatgggaacctttttctcctttgggacattgaacataagtggtgtggaataatgttaagctctctgatgggtcctaaatggttgaagaacacccctcaagagatgggaagattctaagagccagagagaatggattactccaaggcaacacaatgggactgatgaccacatgaactcttagagactgtagcagcttgcaccaggcctgtacaggttcaagccagatggggttccagcactgagaggggaattggacatggacgtctactccttactaagaagctctctgcaactgataccgacttgcaaaggaaaatagttttctccaatgaagtaccactgagtatattaaccatacttcaaggtatgtggagcctgactgtgaaactcacataagacctatgcaaccatgagtaactccacttctggataatccagtgccttctttctgaccgccacaggcatgaggtagtgtgcattttctcctgaactgccacctaatgtgcacacatggctcagccttctgcaaacttttggccaagggagaaagctcagagcttggctgatatgctggactccccaaagtctccaggtctccagggacggtgcctgtaacttacctgaagaggaactggtagacaagtcatctgaaaacaactgaggaatcctgccctgacctatcagctgtctgctgcctcccaactcttgcagccttgggagaggcacattcacttggaaatgtgatgaacaggtgtccatttactttggattcaggccaaagagtcaagccaatgtcatttgtaaggcacaatcattttaagttcagaccc

SEQ ID NO: 2448 - DNA, 834 bp, Mus musculus
cgactcatcttgctttctgtgtctcttactagatctcggagagacataaattaccagagaagattcactcattccgggggtgaccctgtgtgcatggagcaggtctaactagaggaagaaacaagaagcagaacctagatgattcccacaacaatcctcatttcagctgctttgctttcctctgccctagcaggaccatgggctaacatatgtgccagcaaatcttccaacgagatccggacgtgtgacagctatggctgtggacagtactctgctcaaagaacccaaaggcatcacccaggtgtggacgtcctgtgctcggatggatctgtggtgtatgcaccattcactgggaagatagtgggccaggagaaaccctatagaaacaaaaatgccatcaatgatggcattcgactgtctggaagaggtttttgtgtcaaaattttctacattaagccaattaagtataaaggttctatcaaaaagggggagaagctgggcaccttgctgcccctgcagaaaatttacccgggcatccagtcgcatgtacacgttgaaaactgtgactccagtgaccccacagcatacctgtaagcagagacaaaggccagatcttctaaattcaaagccatctcagaaactgggacatgccctgctcccgaagaaacgtgcattctaacagaaacataaatctgtgtaaacactcacaaccctgattccaagtcatcaccgctctgacgggtgggctctggtcggcctgccacctcaagggccagggagtttgacattttcgatttttaggttctggtgactgagataaatgaatgacctccc

SEQ ID NO: 2449 - DNA, 889 bp, Mus musculus
gtacagtcggtttgctgggtattttagattgggagtgacccctgtgattccagccatgggtgcctcagcatcttctcctgctactgcagaaaacgcctcgaatgcttcagatggtcagccagcttcaccaccttcaggatgcccgatgcataaagggcaaaggaaaggctgtccagtgactgcagcaacatctgacctgaccagtgagagcaaagcacacactgtgcctgctcaccaagaccgggcctatgattatgtggaatgccctgttactggtgctagagctaaggataaggagagcctcgatccttcaaacctgatgccaccacctaatcagacaccatccccagatcagccatttactttgtctacctcaagagaggagtcatcaattccaagagctgactctgagaaaaagtgggtttacccttctgaacagatgttctggaatgccatgttacggaaagggtggaagtggaaagatgatgatattagtcagaaagatatgtacaatatcattagaattcacaatcagaataatgagcaagcgtggaaggagattttaaaatgggaagcccttcatgctcatgagtgtccttgtggcccatcgttggtccgatttggaggtaaagcaagagagtattcaccaagagcaagaattcgttcctggatggggtatgaattgccttttgaccgccatgactggatcatcaatcgttgtggcacagaagttagatatgtgattgattactatgatggtggtgaggtgaacaaggagtaccagttcactatcctggatgtgcgtcctgcctttgattcattctctgcagtatgggacagaatgaaggttgcttggtggcgctggacttcgtaactgttattttggttg

SEQ ID NO: 2450 - DNA, 1236 bp, Mus musculus
tgaggactccctatagggtcctgctgatcggtaccttccctggcttcttccccagtacctggcccctcacccagctcaaggatggttggaaatgctgtcattgttaatcacttggcctgagctacatctgtcttgcctccaagagttgaagacagcaggttggtgagagggcttctggagcaacagctgctggaggatcgatgctctcagcttctccctctccctgccatctgctgcccctggccttgttctggagcccagaccactcggcctggtggtaggtgtgcccccaacctaccacacccattggtgagctactggttccaagcaagccccgtgtctcttacactgaggacagttcgacttgctgcaagagtgtgtttacactgtcagctcaaaagtcacaggcagctccccttgggccctcttgaagctgggagatgaattcattttgttccttggaaactgaagggtaaaactcaaacgcgagattcaactgcctcgaatcctgcctgcaatttcgtggttgggacattactgttgggttttccgtctatttctttacaaaagtcaacccaccatcctgaaaatggcttacaattgccagccgagaggcaggtaggtaaggatttgaatcttttctttgcaggtttaacagtttcaaggtctttaacccggtcaaatgggcaaaaaatgtttgtccccaatcacttttaagtgtgtgtacaatccctgctatgggccaatgactaaggcactggcattgcaatgaatgaacaagtggataggaaccctgttttccttctatcaggaaggccctgactgcaagcgtgaggagaagctgtccgagaggaatgaacaggttcattcatacagttcccaaatgcagaatggactgagcctgtgtgtgtgcaccggcagaccagagacctagctagccacggtggctcacacctgcaattctagcacttggaaagaagcagaggcaggggcattgtgatgttaaagctagcatggcctacatagactttaaaaaaaaacctcaaaaagcagggcatggtggcgcatgcctatgattccagcactgggcaggcagaggccgagagaggcaggcagaggctgagagaggcaggcagatcttttaggaattcgaggcctgtctattttgcatagtgagttacaggccaggcaaggctatacaacaaagatcttgtctcacaaataaaatacaaaacc

SEQ ID NO: 2451 - DNA, 1115 bp, Mus musculus
ggtttacgttacctggcaagatggcggcgcccagagcggtaggtgaccgcagcgtccgcgtcccggaactatggttcactttgtagctcggttctcgagacctctctcagcctcctgggaaacaaaagtctgcggaaacagagcgtctcctgccggacctcgctcgggagacgccgtctggggctgccgagggccacagagagtctcgagtcgcttgatagagaaaccaatgggatgagggtggcttagccaatcagcggagtaggacagctcttcctggggggaaaggacgggataagggtttggaggtgatgtagaactaatgatgcttttgcgcgaaattcctggggggaatttaaggatcttgtaatcccagtatttgggaggtggaggcagcaggatcaggagttcaaggttatccttttgtgtatcaagttggagggcaggcagggcaacgtaaaatcctgcctgtaaataaataactaaaccttaataggaaacaaacaaaaatcaaagaacagggtgcaggcgggagccaggaagttaatttggaggtccgaggaagaacctgagggggattcctagagcttcgttaacctggagaatgtatttagtagtagagtattttgttggtactcattgccgtgggttccatttccagcgctacctgtaaaggtgaaggttacgtggacaggatggcaaagaaatcagccatttggcaaaatcctagggagaactgggtaaaatttgggctggggaaatggttcattattgaagcacatgtgcttgaggcatgaaggccagagttggtagaagcggggcatgtctgctcacctggaatcccagcactctggaggtaaagacagttgattcctcaagcaaacccactggctgggctacctgagttggggtgctgcaggtacaagtgagagaccctgctttgatctataaagccaggggcaattgaggaagacagctggcctccatacatgggcacattcgtgcaaggacacctacacatttgaatgcacactatgcacgtacgtattccaccaccaccaccccaacccccaggagtgaactggtgagaaatgaaagtataatggtagtttggg

SEQ ID NO: 2452 - DNA, 1882 bp, Mus musculus
tggcgctctctgccttgcagcaccacgggatctgggtgacgcgggctgcggaagccagagccgtgcagaccgcgtctccatctcctcgcctgtcgtctgtctcccccacttctcttcgctctgctctccgcctggtcaggctcggccccagagcgagtggcaagatggcggcgcccaggatgccaccctcccggctgtcgggcatcatggtgcccgcacccatccaggacctggaggccttgcgcgcgctcacggcgctcttcaaggagcagcgtaaccgggaaacagcacccagaacgatcttccagagagtcctggatatcttaaagaagtctactcatgctgttgagctggcctgcagggatccctcccaagtggaacatctggcttccagtctgcagctaatcactgaatgcttcagatgtcttcggaatgcttgtatagagtgttctgtgaatcagaattccatcaggaacctggatacgatcggagttgctgttgatttggttcttctctttcgtgaacttcgggtggaacaagactccttgttgacagcttttcgatgtggcctgcagtttttaatgcaacgtttgctcaccaaaatggagaatcccagtccaatggttggggtccacgccttcccagaactcctcaaggcctgcctggaccaaccaggccaaaaggatggtggccaacggtcccatgatccggtccacatctctaaatgctgaaaggatgaaagacctggaagagaacctcaatattgcaattaacgtcatagaagctcaccaaaagcacccggcgtcagagtggccgttcttgattatttcagaccactttctgaaaagcccggaactggtggaagctatgtatggcaaactcagcaaccaggaaaggatcacactgttagacatagtgatagccaagctagtgggtgaggagcagctgacaaaggatgacatctctatctttgtgcgccatgccgagttgattgcaaactcatttatggatcagtgcaggaacgtgctgaagttgacctcagagcctcacaccgaggataaggaagccctggttacgattcggctcctggatgtcttgtgtgaaatgacgtccaacactgagcttctcggctacctgcaggttttccctggcctgatggaacgcgtgattgatgttttacgagtgattcatgaagttggaaaagaaagcacgaacatcttcagtccctcagactctctaaaagcagagggtgacatcgaacacatgactgaaggctttaagtctcatctcatccgtctgattggaaatctgtgctacaagaataaagaaaaccaagacaaagtgaatgagctggatggcattcctctgatcctggacagcagcaacatcgatgacaacaacccctttatgatgcagtgggtggtgtatgctgtgcgaaatctcactgaagacaacagccaaaaccaagatgtcattgccaagatggaggagcagggcttggcagacgcatccctactgaagaaaatgggctttgaaattgaaaagagtggggataaactgattctgaagtctaataatgacatccccccgccttgaatgccatcttcatatgaacacattcagattccatctcacggacctctcatctctgcagtgtatgaaatcacaagtattggacatgtagggtacagatgagggagcctcctaatcctttagagtaaatgagtgtaagctacaagtggacgttttctttatttctttgcagtaagtgttactgtctgcctcacctttgtccctctgggtagaactcgctttcccgtcatatacattgtgcttactgttgtagtaataaacgtctctgtgggcacagccctcactcgcc

SEQ ID NO: 2453 - DNA, 2710 bp, Mus musculus
gctgagatcgacgctgtctaccaccagttcctcctcaatttcgaaccgcccttgtcccatggcgctggagcctcccgggtcaatgtgaagtgacttctgctcctgatcccaagcctgtgctggcacctctgggtgaacagggtcagatccccgctcgtgacgttaatgaagccctggtcctttaggggctctgtggagttacaccccaggccacccccttccgagttctgacagattcgctggagcttcagagagtggacctacagacagaaggattatttgggtctggcggctcaggggaggaggagggctcgggactggggcctcaggtaggggctggcctgggcgctcaaggaacgagcctgctggaatcgctctgccttccctaccaagggactgaggacacaggcccatctgtatctctgtcatggccctggggaccctctttttggcattggctgcaggcctgagcactgccagcccacctaacatcctgctgatctttgcggatgacctgggctatggggacctcggctcctatgggcaccccagttctaccacccctaacctggatcagttggctgaaggtggactacggttcacagatttctatgtgcctgtgtctctgtgcacgccatctcgggccgccctcctgactggccggctcccagttcgatcaggcatgtaccctggagttctggggcccagttcccaagggggcttgcccttggaggaggtgactttagccgaagtcctggctgctcgaggctaccttacagggatggctggcaagtggcatcttggagtggggccagagggggccttcctgcccccgcatcagggcttccaccgattcctgggcatcccatattcccatgaccagggtccctgtcagaacctaacgtgcttcccaccagacatcccctgcaaaggtggctgtgaccaaggccttgttcccatcccactactggccaacctgacagtggaggcccagcccccttggctgcctggactggaggcccggtatgtgtctttctcccgagacctcatggctgatgcccagcgccagggccgaccgttcttcctgtactacgcttcccaccacactcactaccctcagttcagtggacaaagcttcaccaagcgctcaggccgtgggccatttggggactccttgatggagctggatggagctgtaggggccttgatgacaactgtgggggacctcggtctgctggaagagacactagtcatcttcactgcagataacggtcctgagttgatgcgcatgtccaatggcggctgctctggcctcttgagatgtggaaaaggaacaacttttgaaggtggcgtccgagagcctgccttggtctactggccaggtcacattactcctggtgtaacccatgagctggccagctctctggacctgctgcccaccctggcagccctgaccggggctccgctgcccaacgtcaccttggatggtgttgacatcagccccttgctgctaggcacaggcaagagcccacggaagtctgtcttcttctacccgccctacccagacgagatccatggggtctttgctgttcggaatgggaaatacaaggctcatttcttcacccagggctccgcccacagtgacaccacttcagatcctgcctgtcatgctgccaaccgtctgacggctcatgagcccccactgctctacgacttatctcaggaccctggggagaactacaatgttttggaaagtatagagggggtctccccagaagccctccaggctttgaaacacatccaactcctcaaggcccagtacgatgcagccatgacctttggccccagccagatagccaagggcgaggaccctgccctacagatctgctgtcagccgagctgcactccccaccctgtctgctgccactgcccaggctcccagtcctgaggggactggagaaatcacgggggtccttcaagggtagcccaggacccctagccctgtcctgagtgtgtgatggttcaccagagggacagggacaagtgtgtagtttgtatctggtaatgtaataacaccagctgagacttgagacgtgctaattcatctagtccttgtggtaactctgaggtcagtactattctgctgtgctacaagacaaggacattgacgcatagggaatctcgtggacctttccaagtccgatgccaccttaccagaaagagcttgagctaggatttgaacccaggcaccctgggtttaaaatttgtcccaccctggtgatctgcgtgtgtccatggacacaccgctgaagcgaagacatgtcccttcacagaaaccggtaatgagttcaagtgccaggaactgggggtggggggagtggtgagggcagaggaaccctaaagatgcaaagcacctggaagacaggctttcctcaagaagcaatgccagaggccctggaactggtcagcttggttctttaaagaaatcagctgtctggagttaggtgataaactgatcattccgggtagagttaaaggaccgggggaccctgctagatcccaggaaggaccatcagcagcttctgagactgcctcatggggctcacttgtctctcaagctctgaatttctcctttgtgcatacttcaagtaattttctacaaaaaaaaataataaaaataaataaaataaaataaagttgtctacaaagt

SEQ ID NO: 2454 - DNA, 1550 bp, Mus musculus
gagatttggtcttgaccagccagggcttcaagctggtctccggtgactcctagtccttagttttgatacccacccattgtcgagagcgtttgcagctgtggcgggctccccggcgatttggggtccggggtgtgtgtggttgtctagcctgcagccggggtcctcggcggcgctcgcgtcctccgccgctggccagaagagacgcgccccagccctgctggggatggaacggaccgagctgctgaagccccggaccctggcggacctcatccgcatcttacatgagctcttcgcggggggacgaagctaacgtggaggaggtgcaggctgtactggaagcctacgagagcaatcccgccgagtgggctttgtatgccaaattcgatcaataccggtattcttcgaaatcttgtggatcaaggaaatggggaagtttaatctgatgattctgtgctggggtgaagggcacggcagcagtattcatgatcacacggactcccactgctttctgaagctgctgccaagaaaatctaaaggagacattgtttgactggcctgacaaaaaatccaacgagatgatcaagaagtctgaaagaaccctgagggaaaaccagtgtgcctacattaatgattccattggcttacaccgagtagagaacgtcagccacacagagcctgccgtgagcctccacttgtacagtccacccttcgatacatgccacgcctttgaccagagaacagggcataaaaacaaagtcaccatgacattccacagcaagtttggaatcaggactccatttacaacttcagggtcactggagaacaactagggcccaccaagcccttggaagtttcgctttctgatcctctgaatgttttcccttggacagagaggccacccaccatttgctgtccagttacacagttaaacaaaggctatgctcagttctactgcaaagggtgtgtcctaaggaagcaaacaataccctgagctatgcaggtggaaaatcctactaaagaaaaagtcacttgatttttttaaattaggtatttacttcatttacatttcaaatgctatcctgaaaagtttaagtttttaaggaccaggttcttttgtcctctaactctattgggggtgggggagaggttgtccatggaaactctacttgggcttctggtgggtttttttcagccttaggaaacactctggtctctgaactctaataatcaataagtaaaaataagaaacctcaaactatcacgtgtctgttttcatacctggaagtctcaatgtggaaatccttaatatactttgtatgttcttaatatttgacaagaattttttttttcaaccctatttgacaaattcctatgctgtggagactagggacgcatagagcagtttggtgcttggtagtgaccagcagggggttagagatgtgcgtgaacccagacctcccgcaaacaaaaactgagactcgtgtgtaatgtgtgccaccaccttgagctgccaccaaaattgccaaacaactttaataaaactggatttg

SEQ ID NO: 2455 - DNA, 241 bp, Mus musculus
ttcgcttcctgatcctcccaaccacctatgatttcttttcccttgacctgtttcacgagttacagggatgattgagaccagacaattaggctttgcacttagatcaagtcaagtacagaagagacagaggacacagagtagacttccagaggatttttcaaagttacccaaagaagagggagatttatactatgttgtcaataggtataataaaataataaaagtagattttatttatggc

SEQ ID NO: 2456 - DNA, 1225 bp, Mus musculus
gaggcagactccattctttgtgccgtgagggtctctggcttcgttgggaggcagcgagtaaacactgcttcggtgctccaggagcctaagggctttcgtcacagcgatgccaaagcggggaaagaaagcggcggccgacgacggggaagaacccaagtcggagccagagaccaagaagagtaagggggcagcaaagaaaaccgagaaggaggccgcgggagagggccctgtcctgtacgaggaccctccagatcagaaaacctcacccagtggcaaatctgccacactcaagatatgctcctggaatgtggatgggcttcgagcctggattaaaaagaaaggtttggattgggtaaaggaagaagcaccagatatcttgtgcctccaagagaccaagtgctcggagaacaaactcccggctgaactgcaagagctgcctggactcacccatcagtactggtcagctccgtcagacaaagaaggatacagtggtgtgggcctactttcccgccagtgcccgctaaaagtctcttatggcattggcgaggaagaacatgatcaagaaggccgggtgattgtggctgaatttgagtcctttgtcctggtaacagcctatgttcccaatgcaggcaggggtctggtaagactggaataccgacagcgttgggatgaagccttccgaaagtttctaaaggacttggcttccagaaagcctcttgtgctatgtggggatctcaatgtggctcatgaagaaattgacctccgtaaccccaaaggaaacaaaaagaatgctggctttactccccaggagcgccaaggttttggggaactgctacaagctgtaccattggctgacagcttccggcatctctaccccaacactgcttacgcttacactttctggacttacatgatgaatgcccgctctaagaatgttggttggcgccttgattactttttgctttcccactctcttttacctgcattgtgtgacagcaagatccggtccaaggctcttggcagtgaccactgtcccatcaccctttacctagcactgtgataccctcctgcagtagcttcctgcctgggagatggctctctctgcagaagtctggtgttttagccttcaggtgtttggttttgtatgtgctccctcattttaaacattaaaccaaacttctggtttcctttagacaatccaagagaaataaaaggccctacttcc

SEQ ID NO: 2457 - DNA, 609 bp, Mus musculus
tttttttttgtaagaaaacttgtttttatttttaaatactttggaaagctctttcagagcaatataaatgagtgcctgggaggaggaggttttgtgccagagccttgccccctcactcactcttgggggtcctgatgaactcttggaccctgtggaagataagagttagagacctcggcctcctggtcagtggagcccttggcctcatgcctggtgggctaagcgggcccagctggggtttgaggtaggggaggccttggcttggccccagcagctccagggccctgagttcctgccagaggctggagagcaggcagctgctgcttttcctggtccttggtaggggagggtcctcaggcttgcgtgccaaagcctgaaggattctgcttctgccagcgccagagatcctcacacatgctgtccagccctaaggctgctgtccaccccagctcctcttgggccaagctggaggttggcgtacaggctgccacatcaccttcccgccgtgccactcaccttgtacgggatctttgtgtcagagggcttctgcataagcctggacactttgcagcatctaattgacctgtggcctgccccggtttgtaaatc

SEQ ID NO: 2458 - DNA, 256 bp, Mus musculus
ccgcaaactaatctccgatgtgctttctacccccactgccaccccacaaccagcactcacttctcactacttctgaatcttgagaagaaccatccgaactcttttcttattcttaagtccttcaaaactactttattcttgataaaaaatatctactgatagcatttccagaaggttggtgtaccacttaagattttcccagggaaaacttctgtagcaaacccccacccttaacattaaagctcccttcatttcc

SEQ ID NO: 2459 - DNA, 312 bp, Mus musculus
ttccctgcttgcaccagttcaccccttttccccagttcacaccttccatttgcagtaccccaaaatctcccaatgtgccctttctaatcacatctccgtgtaaccatatcggcttcccggaaaggctgatcccccggcaaaactgttacatgaaccgcgtactaaatctgtattcccgacccatcttccagcactcattggggccacctgacctgggagtactcactcctgaagatggaaagagctgacaagaggactgctgggctctccgttcaattgttctctctttattaaatatcaactcttcctccc

SEQ ID NO: 2460 - DNA, 1029 bp, Mus musculus
gaattccaccaaacagctaaaccacatcttctatcgtcggttacatccttggacttggcgacggcacgtacagaatatcttgataaacgagcagtgggcgaggcttgtgcaagatggctgcggcagttcggagcgtgaagggcttggtcgcggtagtaactggaggagcctcgggcccttggctagctacggccaaaagactggtgggacaaggggccacagctgtacttctggatgtacctgactcagagggtgaaagccaagccaagaagttaggagaaagctgcatatttgccccagcaaatgtgacctctgagaaggagatacaagcagctttgactctagcaaaagaaaagtttggccgtatagatgtggctgtcaactgtgcaggtattgcagtggccattaagacataccaccaaaagaagaacaagatccatactttggaggacttccagcgggttatcaatgtgaatcttataggcactttcaatgtgatccgcctggttgctggggagatgggccagaatgaaccagaccagggaggccaacgtggagttatcattaacactgccagtgtggctgcctttgagggccaggttggacaagctgcatactctgcatccaaagggggcatagatggcatgacactgcccattgctcgagatctggctcctacaggcatccgtgtggtaacaattgcgccaggtttgtttgccaccccactgcttaccacccttccagagaaagtgcgaaacttcttggccagccaggtacccttcccaagccgactaggtgaccccgctgaatatgctcatctggtacagaccataatcgagaacccattcttgaatggagaggtcatccggctggatggggccattcgaatgcagccttaaagggccaaggcaggagaaacaccagctccttttcaatttgaaggaaagctaacagccactttgtaactctgctccactcaccctcggtgcctaataaattctcaaacttcaaaaaaaaaaaaaaaaaaaa

SEQ ID NO: 2461 - DNA, 1959 bp, Mus musculus
aattcaaccctgtgctaagctagacacctcacttactgagagccagcatggcagctgttgtcctggagaacggagtcctgagcagaaaactctcagactttgggcaggaaacaagttacatcgaagacaactccaatcaaaatggtgctgtatctctgatattctcactcaaagaggaagttggtgccctggccaaggtcctgcgcttatttgaggagaatgagatcaacctgacacacattgaatccagaccttcccgtttaaacaaagatgagtatgagtttttcacctatctggataagcgtagcaagcccgtcctgggcagcatcatcaagagcctgaggaacgacattggtgccactgtccatgagctttcccgagacaaggaaaagaacacagtgccctggttcccaaggaccattcaggagctggacagattcgccaatcagattctcagctatggagccgaactggatgcagaccacccaggctttaaagatcctgtgtaccgggcgagacgaaagcagtttgctgacattgcctacaactaccgccatgggcagcccattcctcgggtggaatacacagaggaggagaggaagacctggggaacggtgttcaggactctgaaggccttgtataaaacacatgcctgctacgagcacaaccacatcttccctcttctggaaaagtactgcggtttccgtgaagacaacatcccgcagctggaagatgtttctcagtttctgcagacttgtactggtttccgcctccgtcctgttgctggcttactgtcgtctcgagatttcttgggtggcctggccttccgagtcttccactgcacacagtacattaggcatggatctaagcccatgtacacacctgaacctgatatctgtcatgaactcttgggacatgtgcccttgttttcagatagaagctttgcccagttttctcaggaaattgggcttgcatcgctgggggcacctgatgagtacattgagaaactggccacaatttactggtttactgtggagtttgggctttgcaaggaaggagattctataaaggcatatggtgctgggctcttgtcatcctttggagaattacagtactgtttatcagacaagccaaagctcctgcccctggagctagagaagacagcctgccaggagtatactgtcacagagttccgacctctgtactatgtggccgagagtttcaatgatgccaaggagaaagtgaggacttttgctgccacaatcccccggcccttctccgttcgctatgacccctacactcaaagggttgaggtcctggataatactcagcagttgaagaatttagctgactccattaatagtgaggttggaatcctttgccatgccctgcagaaaataaagtcatgaacagaaagtgacgtcatagacagaacttaggaggtcaaccaaaaaaatctgctgatagaagtatagtaactgcttcttttccctgaagaagaaaagttttatttgcaatgtcagcttttaatatattttcctaacatagtggaggatcaccaaataaatcaatttctctgaatgaaagtatattaaaacccatcagtggtagatccttcagagtcacatttgatttagatatctcagaccttcaatttggtttaaaatgtaatttctcagttctcatcaacattcatcaaatttgggactcatatcatttgggctctgtctgttcatttttacctctcaggtaagctctgatggaatacatattgcttagtgtaaaatgtgagactgtcatcgggaacaaattattccattcagtacagattgtaatctacaaagcttagtttctacattcattcattatggctctgagaactactttgttagcctgcttacataaatgtcctctgatctaagactctattaagatagttacaagcataaagcattatat

SEQ ID NO: 2462 - DNA, 345 bp, Mus musculus
tgctcctgaactcactctgcagctcaagcttaaacttccaatcctcctgcctcggtctctcaagtagctgacattatacgctagcaaccagcaggcccagctcttatctcattctttacaacaataatgaccacgacaataacaagtctcgatactattggtattgctatttacttagtatactattcccgagtgaccccatgtagtccttaatgcgttatccctcgttaatttcccatagttgctgaggaagatagagtggcatcgatggaaaatcaaaatagcaacacttgcagaatgggctcaggcaaatccacctccgtaactcccgtctcatgcgcgggc

SEQ ID NO: 2463 - DNA, 2121 bp, Mus musculus
aattgctcctggcaattcgttgaagaattgagttggaattttgatggggattgcattgaatctgtagattgcttttggcaagatagccatttttacaatgttgatcctgccaatccatgagcatgggagatctttccatcttctgagatcttccttaatttctttcttcagagatttgaagtttttatcatacagatctttcacttccttagttagagtcacgccaagatattttatattatttgtgactattgagaagggtgttgtttccctaatttctttctcagcctgtttattctttgtatagagaaaggccattgacttgtttgagtttattttatatccagctacttcaccgaagctgtttatcaggtttaggagttctctggtaagtgatgctttttaagagctcattttcctagataccttggagaagaggtgacaggaaatacaaaagaaaaagtgaaatcctaggtggaatgccccatattccagcagagtccatcctgcttactgccagtagtccagaatagctagagctgcttttcataaaccaagaaaccatgatttttgatgaatctttaaaattctgatcaggtaagcaagcatgcctaaaaactagtgttctttcccatcagcctgtgacctctgtgcacttgagctgttccaagtcctcagcactatgtagggagagtgagaaggatcctgaagctgctttatctgtagcttctgcaagatgggttctgattttcagccaatggaacaggagctaacatggaaactggaaaagagagactttgaccttgaggagcctatcaaagcagactagaactggcatcaagtatatggcaggtgatgtgtagcctggactatcaagcaaaggatttagacaggagagatcccagtttctaggaccctgtcaaacttttttttttttttttatgttaagccagtaaggtagcatcctccatgggacaaggtggttccttattcttaaaagcgtaaatttttttctgtgtctactttatatattggtctgtgattcctgtgacaaatgtccctttcagagtaaggagtaacaacatttatgatcaaaggtacagaattactgatgctgtccctaagttctcatagagcaggttggcagctcacagtacagtggggtccacttctaatccttcagctccttttcttagccatacagaggaacatcctcacctagaatcagaactctaccattgccttgtcaaacatgtctatgatatgtatatatatatatatgtgtatgtatgtatataaaaactccttttctaacacacatacactcatgcatgcacgcatgcacacctttggacaaaaataatatataaaaaggaaaaatgttaatgtatgaataggtctgcttttatgtttcagtggttggcattgtataatgtttcaccaggatgggaattcatgagcttctcatgtgtttgccatcctagataagagatttgttccctcctcattagtacaacattttgtttatgggatagtggatggaggtcagaggatggtttgcagttctctctttctatcatgtgggtcctaaggattaaatgcagatcctcacacttgctgtgcatttacccactgagcaatcctaccagtccctggatctcttttatatactacagttttaagttctgactacacactgattctgtagtctgcctatatgtacatgaccagtgaagatgctctttctgaattagctgatgtaacaagcactaggggagagtgtcctactaaatcccacatcccctgagtatcaccatttacaccagggcctcaagatgcctgtccttataacatgaagatcctgccataacctttgactgctctgatagctgacctcttgactaccaggaggggatgctacagacaattttgagatcattgagtgtgaacatatgtacatctttctacatatccacagtttctgttgatgactggtttggtacataaagcaatgcttggttactttattgtaatttgcagttatttattctgctagattggagaataccaaattgtactcaatataagcctgtagggcttcagttttatattcagacaagt

SEQ ID NO: 2464 - DNA, 882 bp, Mus musculus
tggcgcgcgggccacggcaaagaggtgggcgccaggccccggtgccggcgaggccgactagaggagacgctgcgcctggcgagtcccgcatttgcgggaccgggcggctggcgtcatgaccctgttccacttcgggaactgcttcgccctcgcctactttccctatttcatcacgtacaaatgcagcggcctgtctgaatacaacgccttctggaaatgcgtccaggccggggtcacctacctctttgtgcagctatgcaagatgttgttcttggccactttcttccccacctgggaaggtggcatctatgacttcattggggaattcatgaaggccagtgtggatgtggcagacctgataggcctaaaccttgtcatgtctcggaatgcaggcaagggggagtacaagattatggttgctgccctgggctgggccactgctgaactcattatgtcccgatgcatccccctctgggtgggagcccgaggcattgaatttgactggaaatatatccagatgagcattgactccaacatcagtctgtcccttcctgcctccctgcaggtccactacatcgttgcatcagctcaggtctggatgataacacgctatgacctgtaccacaccttccggcctgctgttctcctcctgatgttccttagtgtctacaaggcctttgtcatggagaccttcgtccacctcttctccttgggtagttggacagcactgctcgcccgggcagtagtaacaggactgctggccctcagcaccttggccctgtatgttgctgttgtcaatgtacactcctagcttgacatctcaggtgttggcgaaccttttcatttcctctctccagatttcagtgaagtaaacagtgtttg

SEQ ID NO: 2465 - DNA, 1988 bp, Mus musculus
agaaaacgaaagccaggcggccccggcactcgcgatcgcaccggctctgctgctcattccggtatctactccagggctgtgcgcactgcgcgggcagcggctgaacacgcacggagaaggtgcgggagccgcaggggccccgggctttgggcggctgctgctcggccttggcggaggcttgttccagctcgccgttcggtcccaggcctggccggtgagctgcgcgcagtatgggcagatgctgcttctacacggcggggacgctgtctctgctgctgctggtgaccagcgtcacgctgctagtggctcgagtctttcagaaggcggtagaccagacgatcgagaagaatatggtattacaaaatggcaccaaggtctttaattcctgggagaagccccctctacctgtgtacatccagttttatttcttcaatgtcaccaatcctgaggagatcctccaaggagaaatccccctactagaagaagtggggccatacacctacagggagctccggaacaaggcaaatattcagtttggagaaaatggaacaactatatctgctgtcaccaataaggcatatgtttttgaacgaaaccaatctgttggagatcctaacgttgacttgattagaacaataaatattcctctgttgactgtcgtggatctggcccagctgaccctgctcagggagcttatcgaagccatgctgaaagcctatcagcagaagttgtttgtgattcacaccgtgcacgaactgctctggggctacaaagatgagatcttgtccctcgtccatattttcaaacctgacgtctccccgaatttcggcctgttctatgagagaaatggaacgaatgacggggagtacgtgtttctgactggagaggacaattaccttaacttttcaaaaatcgtggagtggaatggaaaaacgtcgctggactggtggaccacagacacatgcaatatgattaacgggacagacggagactcttttcatccgctgataagcaaggatgaggtcctgtacctcttcccgtcagacttgtgcaggtcagtacatatcactttcagcagctttgagaacgtagaaggactgcctgcttttcggtataaggtgcctgcagaaatactagccaacacctccgaaaacgctggcttctgtatacccgagggaaactgcatggactcaggggtgttgaacatcagcatctgcaagaatggtgcacccattatcatgtctttcccacacttttaccaagccgacgagaagttcgtttctgccataaaaggcatgcatcccaacaaggaagagcatgagtcgtttgtggacattaatcccttgactggaattattttgagaggggccaagagattccagatcaacacttacgttaggaaactggatgactttgttgaaacgggagacatcaggactatggttttcccagtgatgtatctcaatgagagtgtcctcattgacaaagagaccgcaaatcaactgaagtctgtgattaacacgactttggttgtcaccaacataccctacatcattatggcactgggtgtgttctttggcttggttttcacgtggctggcgtgtcgaggacaggggtctatggatgagggaactgcagatgaaagagcacccctcatacgaacctaatgggacttacctgttgcctgagcttggtgagagaatgtgagagctgccctgacctggaccaggacagggggaaccctgcatcctcatgggctcctggcctgtcaagaaggaaacatagcactggcaagcgagaagcccctcctggtcagagggaaatgagcagggtgacatggctggcaattctgctttataaaatcgtgtctctaaaactgtgttcatgtgtctaggaagtatttaataaacttgtgtagaaactttttgtggttgggccctgggagctgaggggacttcgtgaccccctgttgtagatacaatgtctgg

SEQ ID NO: 2466 - DNA, 316 bp, Mus musculus
gatttttgggatgtagtacatatttcacatagatcttaatcttattagtgtgcctccaagatggttcttcaccaggtcaaaatacttgctcctaaacgtgaagacctgtgttcaaatccttacaggatgtaagaagagtcctatttcctgcaagttgacctctgacttctctaggcatacagagacatactttcctgtacacactcacacaattgaatgtgaggaagtatttttaagtatctttattgtatttagaaagctgtcctttttataatcatctttccttcaatacaataaacattcttgttttataagt

SEQ ID NO: 2467 - DNA, 2619 bp, Mus musculus
ggcctgctctggcccgggccctgtgctgaccgacccccggtgtggcccactccggccctgcccagttgcgtggctcccgcctggcacgccagcggcctcggagcagctcaagcccatgaggccggcgcgccctgccgccggtgcaaaagagacggagctcccggcccccgcggtggagcggtggatcaatgcggttcaggaatcgattccagcgtttcatgaaccatcgggccccagctaatggccgctacaaaccaacgtgctacgaacatgctgccaattgctacacacacgcattcctcattgttccggccattgtgggcagtgccctcctccatcggctgtctgatgactgctgggagaagataacagcatggatctacgggatgggcctttgcgccctcttcatagtctccacagtgtttcacatagtatcatggaagaagagccacttgagaacagtggagcattgtttccacatgtgcgatcggatggtcatctacttcttcattgctgcttcctacgccccatggttaaatctccgtgaacttggacccctggcatctcatatgcgttggtttatctggctcatggcagctggaggaaccatttatgtatttctctaccatgaaaagtataaagtggttgaacttttcttctatctcacgatgggattttctccagccttggtggtgacatcaatgaataacactgacggacttcaggagctcgcctgtgggggattgatttactgcttgggagttgtgttcttcaagagcgatggcatcattccgttcgcccatgccatctggcacctgtttgtggccacggcagctgccgtacactactatgccatttggaaatacctgtaccgaagtcccacagactttattcggcatttatgaccagtctgtgctaggttttcaaatcagtattatcacgatggaggcacttgggtggggggaggggcggggggagaactgaatgtcgcacacagaagaagagtgagcaaacttgcactgacttcgttttaatttttttttaatataattactgtgaaagtataaaagctgtgtctcggagttttcctcttcacaggcaacagatgaggtagtgaatcaattcttcattccattccactatcatgaaggactcgggagagacttggccaactgatgtttacaaaccagaaatttttgtatttttcttttacagattttaactacgatgatttttttctaaattaagtaggtcaggttgtcaaagtcagtgcaatagtaatacaacttcctttttaagaaaacccaaagttgtttctatcacgtttcccgttcactgtgtaaaagaatcatggaaactgaacactactttttaccatgtttcatcttgacataacatggttattttttaaaaaggaggctttagttcttttgtaaatttttaaagaaacgattccattgacgcacacccccactggctcctcatccatgcgaggtttttgcagcaaacggtcaacattccacgaacaaacattatacctcttctggcagttttattaagtgtggagaacttgccaattttttagaaacactgcagttttttccaaccttttctgccaatctctaaccctgaactcagtgctgctttgggctgacatccatgactggtgtgggccaccaggagtaagacagtagtgttttgataccatccactttttcagaagacataacttcgctacatgcctttgccccagtttttctccagggtctctctccacagtcggggaggatcctgtccggattatgatagtattattgggttgcccatctgccatgagctttctgaatcatggcgaattgtatttgccactttggtgcccaacggttcaagtcattgtggttaagccacttaactttattgtatgagtttgatattcattttaattgtgggactagacacataaactcacatttctgccttttcctctgcatttctcaatatattatgtttttctcacgccataaataaaacattgattggcaggttgaagcttgtgtcagttgttgatgggttttatgctgactctgtggagtgatatttatatattatttttagtttcctctcaatgtcttatattaagattgatgtattagttgctttgttggttaatctttcttggtgtttaagagaaatgaagtcaccttgcctttagatcagatgctattataacctgtctgtctaggaacaagctgtcagactaaagatatggtttattcattgaaattctggacagctgtacgtttaaaagaaagtttattttgtatgtgtgtctaggctctgatttttggtaaattgtaaaggaacaactgaagaactggttgctggggatgtcttcagtagtcaggagtacccaaggataacaccagccacaccgctgtatatgcatgattctgaacagttagccgcctgttattttactgtgtatatttgactttaaatatattaactttttgtggattcatttaaagtctgctcatatgcagcactgtcaaaaccactaaactgtatttgagaacttgtgctgtaggttagaataaagttgttacttgggttgactcc

SEQ ID NO: 2468 - DNA, 2086 bp, Mus musculus
caggccggggctccaggctccccgcgggcgcacagcaaacagagccctttgccatgaaccactcagccccagggattcccccaccaccccgccgtgtgaggctgaagccctggttggtggcccaggtgaacagctgccagtacccagggcttcagtgggtcaacggggaaaagaaactcttctatataccctggcgccatgccacgaggcatggtcccagccaggatggggacaacaccatcttcaaggcctgggctaaagagacagggaagtacactgaaggggtggatgaggctgacccagccaagtggaaggccaacctgcgctgtgcccttaacaaaagccgtgacttccagctgttctatgatggccctcgagacatgccacctcagccgtacaagatctacgaggtctgctccaacggccctgctcccacagagagccaacccactgatgattacgttctgggagaagaggaggaggaggaagaggaagagctccagagaatgctaccaggcctgagcatcacagagcctgcgctacctgggcctcccaacgcaccctattccttacccaaagaagacaccaagtggccacctgctctccagccacctgtagggctgggtccccctgtcccagacccaaatctcctggcccctccctctggaaatcctgctggcttcaggcagcttctccctgaggtcctggagcctggacctctggcttccagccagccccctacagaaccactcttgcctgacctgctgatcagcccccacatgttgcctttgacggacctagagatcaagttccagtaccggggacgcgcaccccggaccctcaccatcagcaacccacaaggctgcaggctcttctacagccagctagaggctacccaggagcaagtggaactctttggccctgtgaccctggagcaagtgcgcttccctagcccagaggacatccccagtgacaagcagcgtttctatacgaaccagctgctagatgtcctggaccgtgggctcatcctgcagctgcagggccaggacctgtacgccatccgtctgtgccagtgtaaggtgttctggagtgggccctgcgccttggcccatggctcctgccccaaccccattcagcgggaagtcaagacgaagctctttagcctagagcagtttctcaatgagctcatcctgttccagaagggccagactaataccccaccaccttttgagatcttcttttgctttggagaagaatggcctgatgtcaaaccccgagagaagaagctcattactgtacaggtggtacctgttgcagcccggttgctgctggagatgttctcaggggagctttcttggtcggcagacagcatccgactgcagatctcaaacccggatctcaaagaccacatggtagagcagtttaaagagcttcatcacctctggcagtcccagcagcaattgcagcccatggtccaggcccctcctgtggcaggcctcgatgcaagccaggggccctggcccatgcacccagttggcatgcaataatgaggctacagatagtggctgccttggacctcctgggacagccacgtagactgatatagcaatgtggtggccccagcaggcctggctggctacagggttctgagtctcttggaagcagagtcggggtaacaagaacatagaagagaggcctgaggtttcatttcccctaaacattttctatttgagcaccaccttctggtgatttctctaatatgcctggctgggaagaaatgaagccagcagccccagtgggagggagggaacatcactagcctgaggcctttagtaccacggagtccaattaccccagggtagccaacttttaaggttgccccaattcttctagcaaaacctgccaaggagtgttgtgggggctttctgcagagaataaccctgatttaggggtcccctagtttgaacctttcccctcatccttatgacaaggatttctccaggcaccctccttcagagtctgagatgctgggacagaaagtagaatttaatatatttttggattaataaatgttaaaaacccaaaa

SEQ ID NO: 2469 - DNA, 1756 bp, Mus musculus
acggatcaaggttcaggctaagagaaccccggtgcagttctacttcggtgcagggcgtggaagatgcggaaggtggttttgatcaccggggcgagcagtggcattgggctagccctttgcggtcgactgctggcagaagacgatgacctccacctgtgtttggcgtgtaggaacctgagcaaagcaagagctgttcgagataccctgctggcctctcacccctccgccgaagtcagcatcgtgcagatggatgtcagcagcctgcagtcggtggtccggggtgcagaggaagtcaagcaaaagtttcaaagattagactacttatatctgaatgctggaatcctgcctaatccacaattcaacctcaaggcatttttctgcggcatcttttcaagaaatgtgattcatatgttcaccacagcggaaggaattttgacccagaatgactcggtcactgccgacgggttgcaggaggtgtttgaaaccaatctctttggccactttattctgattcgggaactggaaccacttctctgccatgcggacaacccctctcagctcatctggacgtcctctcgcaatgcaaagaaggctaacttcagcctggaggacatccagcactccaaaggcccggaaccctacagctcttccaaatatgctaccgacctcctgaatgtggctttgaacaggaatttcaaccagaagggtctgtattccagtgtgatgtgcccaggcgtcgtgatgaccaatatgacgtatggaattttgcctccctttatctggacgttgctcctacccataatgtggctccttcgcttttttgtaaatgcgctcactgtgacaccgtacaacggagcagaggccctggtgtggctcttccaccaaaaaccggagtctcttaatcctctgaccaaatacgcgagcgccacctcgggatttgggactaattacgtcacgggccaaaagatggacatagatgaagacactgctgaaaaattctatgaggtcttactggagctggaaaagcgtgtcaggaccaccgttcagaaatcggatcacccgagctgatgtaggcgttcctcagggcaccccgtgggcacctcctgtacgccatggcacacgtggctttccatctcgctgggtgatacacatttgcagtaaaccataagccatgacgatctctcctcctacctttcacagtgatctccaagactgtgtgtgtgcacatttttgcaggcgtgcacacacatgtgagaaaggactggcaaagtagagggaccaactacttacccctccagagcagtgtcctgttggaactgctagaggtttcctgcggtgcatccttggatcgctttctgcctcctagagcccagtagttttgacttgtgtgatggggacacagtacagcctgaagcttcttttagtctcagcacggaggggcaatgccactgggtaggacttctacttcttgtttttcctccacgatcccctcttttactctctttacattctccttcatatgctgctttggctaatcttattcattcatggtccgtccatgtagtcattttcaagagaaaggtattcaagagaaaggtgtgaatgtgtttgggccacaagcattattttcggtctttaataacatctatactatagatgtattcattatgaacagcttattgtcatgatcatatttcactggaattaaacttagagcaaaagaaaatattcatgtttcaaaaaaaaaaaaaaaaaa

SEQ ID NO: 2470 - DNA, 2151 bp, Mus musculus
tggaaacacattcaaataatgtgtgactgaatttactttatgtctaagagtatattgttttctaagtatgccagggtcagataatagaccttccttcccgaagtaaagatgtctgccaaacataggtggttttgggtgactggacgttagcgtcaacaccggcaacaaggaaccaatcagaaaggaggaaaggctaagaattattggctgctggcgtggaccaatcagaagagctgtgatttggcgggagtcttgacgacctccggggctgtccgtgtctcagcgccagttctaggtatccgccgctgtggctatgttcgtgaccgatttccgcaaggagttctacgagacggtccacaaccagagggtccttctctttgtggcctcggacgtggatgccttgtgtgcttgcaagatcctccaggccctgtttcagtgtgaccacgtccagtatacgctggttccggtttctgggtggcaagaacttgaaactgcatatcttgaacataaagagcagttctcctatttcatcctcataaactgtggagccaacgtggacctgttggatatccttcagcctgatgaagacagtatattttttgtgtgtgatacccacaggccagtgaacgttgtgaatgtgtacaatgacactcagatcaaattgcttattaaacaagaggatgaccttgaggttcctgcctacgacgacatctttagagatgaagcagaggatgaagatctttcagacagtgacggtgatgggtcagagccttcagagaagcgcacacggttagaagaggagatagtggagcgaaacaggaagaggaggcagcgcaaggagtgggaggcccgaaggaaagacattctctttgactacgagcagtatgaatattatgggacatcgtcggccatggtgatgtttgacctggcgtggatgatgtccaaggacctgaatgacatgctgtggtgggccattgttggactgacagaccagtgggtgcatgacaagatcactcaaatgaagtacgtgactgatgttggcatcctgcagcgtcatgtgtcccgtcataaccaccgaaacgaggcggaggagaacatgctctctgtagactgcacccggatctccttcgagtatgacctctgcctggtactgtatcagcactggtccctccatgaaagcctgtacaacaccagctacacagcagccaggtttaagctctggtctgtgcatgggcagaaacgactccaggagttccttgcagacatggggcttcccctgaagcaagtcaagcagaaatttcagtccatggacgtttccttgaaggggaatctgcgagaaatgattgaagaatctgcaaataaatttgggatgaaggacatgcgtgtacagactttcagcattcagtttgggttcaagcataaattcctggccagtgatgtcgtctttgccaccatgtctctaatggagagtcctgagaaggatggctcagggacagaccacttcatccaggctctcgatagcctctccaggagtaacctggacaagctataccttggtctagagctcgccaagaagcacctccaagccacacaacagaccatcgccagctgtctctgtaccaacctcgtcacttcccagggcccttttctctactgctcactcatggagggcactccagatgtcaccctgttttccaagccagcatccttgagtctgctcagcagacatctgctcaagtcctttgtgtactcgacaaagaatcgacgatgcaagctgctgcccctggtgatggctgccccgctgagcgtggaacagggcacagtgaccgtggtgggcatccccccagagactgatagctcggatagaaagaacttttttggtcgggcttttgagaaggcagcagaaagcaccagctctcggactctacacaattactttgacctctcagtaattgagctgaaggctgaggaccggagcaagttcctggacgctcttgtgtcactgctgtcctgaggaattcaacttctccagaagtgacctccttttccttatttatatttcctggccactattcagttgtaagataacatttgaaatgtgagactatatggtttttaataaaatgtttgatgttttaaaaaaaaaaaaaa

SEQ ID NO: 2471 - DNA, 1330 bp, Mus musculus
gactgtctgtccaccggtcactgcagtgcctccctcctccgcagcgtcacgaaagcctttgatcatgagcggtgtcaccttctctcgttccttttcactcatgctctggctcacactgagtaacatcaacatgttgtcacactcagtgatacccatggcatagaggtcactgagcacattggcacaagctatgcgccccatcatatagggatcttccaccaaggggtaaaagaagtcggtggtctgcaccagcgacaggcctccgtgcctcagggggatgacgcaggagtccatgccaatgctcagcgaggggaaggctgagccggggccgggcctggtggacaggcccccttcctgcaccgtctcttcctggcccccgaccagacccgaggtaagcgggggctgcagcgcgggccgcgtcagtccctccaggagtttgagcagggtctcctgggggaccttgcagcctcagcccttcatgccggagaagctcgtcagccgccagctcgggctgaagcccagtgtctggggctcgaacggccggtagttggagaaactccggccggcagaccagcccgccgggcccaaggaaccttctgcggccactagcgccgccatggtttctccgctggcgcccgccgccgccgcttccgctatcgcgccgctcgctcgggaggccgtgcggaccagaaggcccagatacctgcagatgagtctcccagccacagcgggccaaggttacgccaggagatgatcaaccacgcgagccggaccggaggactcgagccacgctgcctgtcggagcgccgcgcggcctctatttatatacagcgtgattgacagctgctctatccaatgacgattcccgtaccgagaggcgggcttcctttactcaaaaaggtgtattacaaattaaccgtctgcttgcacaaccggtccccgcgagatcatcacgtgaaccccttgtaaccggcctggaacgcagatcaggatggactcgaactcgagtccatcgatctgtctcagctttccaagtgctgttattacaggtgggagccacgttacccgtgcgtgtcttgtcccctccgcccccctccgccctgggaacctggtcttggagttggctggcagaagtctgctgtttttggaatcattttaccaaagaataaattacttacggaaggaagctctggcactgggctagccccaaggtcagaacagtcctagggtcatttgacaggacacaaagctaatctaggctaagaaaatactttaaggggaggtttaggggaagaaaggggacatcacaaagtaaatactatgattgcat

SEQ ID NO: 2472 - DNA, 1571 bp, Mus musculus
gttcctggctccggccgtcgctgccgccagcctctgtctgcccgcgtcgcgccaggggccccgccgaagagccgttggcgggttcggggccgatacccgctcgtgggaaagagtgtccgctgtcgtccgcgcccgtccacgctcgcagccggccgccgccatgctggcgctcatctcccgcctgctggactggttccgttcgctcttctggaaggaggagatggaactgacgctcgtggggctgcagtactccggcaagaccaccttcgtcaatgtcatcgcgtccggtcaattcagtgaagatatgatacccacagtgggcttcaacatgaggaaagtaactaaaggcaacgtcacaataaagatctgggacataggcggacagccccggttccggagcatgtgggagcggtactgccgaggagtcaatgcaattgtttacatgatagatgctgcagatcgagaaaagatagaagcctctcgaaatgaactgcataatcttctagataaaccacagttacaagggattccagtactagtacttggaaacaagagagatcttccaaatgccttggatgagaaacagctaattgagaaaatgaacctgtctgctattcaggatagagaaatttgctgctattcaatttcttgcaaagaaaaggataatatagatatcacacttcagtggcttattcaacactcaaaatctcggagaagctgagacctcttcttcgtcttcagccccttggctctaacttagactcctgtcgttcctctgaagtactcccaggacatgtcctccataacccaagaaatgcctttttcagagttagtttctcatgtgcactgctgaagatgtgtattcctatccttcatagcaaatcagctggagttgtcatgataaaagtcagcacacactaaaaggcttcatatacgtgtctagtgtgttgaggcctctttcctttctattttaaacacccacatttttgaccatcttaattaagaaaattgcatattaccattctggtctttctgggccagatttttgtattggttttcagtaaatgtctacctatttcattacagagtccagtagcttctactactggtatggacttgatgcagcatggaatttccagtgccacccacagtatttagaaaacctttaagcctgactgatgtgggatacggacatactgtttatcccatctcacacatgcatgtgaaatgtagacttacactgtaggaataattggtctgtcagagttaacagaggcaccaggtcagaatagtagcttccttacactggagatttcctacctggtgaatttttaaaaaccttctgctttctgaaactcctttgtcagcagatagcgtctggggaggtgggaggagtcacagcatgctcttttctatctgtccagatcattaggttttttttttcccccttttaacacacttttttaaagggatgggaattgaagtttttttttttttctcaaaagctttcatgaatttagagcattctagctaatgtaataaaaccctttaagaatgtccgacttcatctg

SEQ ID NO: 2473 - DNA, 1763 bp, Mus musculus
ggcgggatgcagcgccccgggcccttcagcaccctctacgggcgggtcctggccccactgcccgggcgggccgggggcgcggcctcgggcgggggcgggaacaactggggcctctcgggttcccacgtgcagttgccggggcgtgcacattcggagacccgcggcgacaagggaggctcgagcgcgggcggcccggccccctccacgatgtccaaggccgaggaggctaagaagctggcgagccacacggcggtggagaaccacgtgaagaataaccaagtgctgggaattggaagtggttctacaattgtccacgctgtgcagcgaatagctgaaagagtgaagcaagagaatctggacctcatctgcatccccacatctttccaggccaggcagcttatcttgcagtatggcttaaccctcagtgacctggatcaacacccagagattgaccttgccatcgatggtgctgacgaagtggatgctgagctcaatctcatcaagggtggaggaggctgcctgacccaggagaagatcgtggctggttatgcaagtcgtttcattgtgattgctgatttcaggaaagattcaaagaacctcggggatcggtggcacaaggggattcccattgaagtcatcccaatggcctacgtcccagtgagccgggctgtggcccagaagtttgggggtgaggtggaacttcgaatggctgtcaacaaggcagggccagtggtgacggataacgggaattttatcctggactggaagtttgaccgggtgcataaatggagtgaagtgaacacagctatcaaaatgactccaggcgtggtggacacaggccttttcatcaacatggcagagagagtctactttgggatgcaggatggctcagtgaacgtgcgggagaagcccttctagccctgagaggagcagggtcctcaccttgagtctccagcccaggcacagtggacacgcctcaccaggagcctttgccttaatgtaccttcatgtagctgtccacagtgccagagtggacggctggcatgggtgggtgggtgggggtagtcaaatccagtcttatgaagtattgctatgtgtctttttaaaaagaaatttaaatatatatatatttttactattaaaatatttagtttttttataaaatagaacttgattttatgttttatatgaaaccttaccaaaaacaaaaaaaacgtataaataaaaataagagatcaggactgtctctgaaagcttgctggacctgctggttaaccttctgaagttttgggtttgctgagaaagaacgtttttctaagctggtgcaggtctcctgatgccttatgggaaaccttgtttactgtttactttcttgtgacactcttgtgttttcattgttaccactcccaaatcttagttacattttaagatcaggtgtagggaattgtgaatggagcagcggggctgtagtgacgtgggtacaaactccaggtgagcgagaatgcaccttctcttggatcctggcttggctttgctcctgctgctgttggaagcccccggtggaagcggaagcgcctgctggcaggcacagcactgtctgagatgtgaagcacttactttttgttgtttgaatgttttctttatgtgaatatcgttcctccgatgacccttgtatgatttggttatcagaagctgtcacttgtgctgttcgaaggttgaaataaacgttactgtgccatttggatcctttgtcttctctgccg

SEQ ID NO: 2474 - DNA, 322 bp, Mus musculus
ttatgtctgtcttaacttactcttttccccttcttttgtcagatctcaatcattcttctcgcctcgttgacctccacccaccttttgctgggcttccatttccttgccactcatcttattcaactttttctaagatccccacttgcttttctttcaacctctccccaaccagacagcatgtttgacctttgactctaatgatctccctaacttccaccctccctttcttttctgtgtatttccttctattttactgcttgtctatccttaaattgggcttattttgatttcataataaattaaaagataagtgtgtgctcct

SEQ ID NO: 2475 - DNA, 1854 bp, Mus musculus
aggagggtcagtcacatcaaaaactcactactgtatcttagatacccactagagatctggagaccgagtaagctacagtgttaacagtgaacagcaagatcaagcagcacctctgggaacgtagatgggatcttcgtactataccccaggactctcacccccaagccgatgctgccacattcccatctccagttggagccagcctgctgtgtggcgctgtcgggcaatcattccaactggagtggagaaagacttgcctgtgctgaggaattagtatacatcattccaaacatgctgtctctgctttcttacacagaataattaaatccctcaaaacagtcagcgtccacttgggaaatgtcatagtggaatcagcaaacagacaaggtggagatttatttttgtgtccaactgaagtaattatgagttgttgggctcaccatttgctaatcaaaactgaagatgagtagattacctaattgagctcacagttaggattctattccgttctgatgagtccaaggccaaacaccctacattcagggaggagagtgtcgatcacaaaaagaccacaaaatgggaagagtaagcagcaaagaatggatcattgttctcaaacagctttgtccacagccaagaacaggcagaaggcattcgttcccctctactgcctatgggatgtggggtagagaagatggcttgctacgtcctgctttctgtggagagtccaacaggcaaggacacgcccttgccaggaatgagcttgcctcacatacctgccatagtgagaactgtgtgtgtggagggtaggggtggggggaggaatcttggaatgattgcttttctttgtaaacaccctcctctttgcagtcaggttccaggtaagtcaagagccgcctcaccttggtgctgattcctcacaaagggacgctcagatccagcagtatctctgctttagacagaaatgatacatcaggtccatttacaacacacattagctgtagtcacagtacttttgtgggccaggtctttgagcagtttctcagctttggcattgctttgtgggcctaattattccttatgcggtgcaatgtacaatattttacagcatccctggctctgaccacaagatcctgaggccatgacacacacacacacacacacacacacacacacacacaaatccccaaagattgtcagatgtctggaggattaaggtcatcctcacgtaagcactggattcagtctaaacacaaggcccacattgggtttcgtgtgactgttaaatgtcaccaaatgggggaaaaatactaccaagcactcctgactttgatcctataaccaaaaagctttctgcatcaccctgtgcagtttcctgaggaagaggcacagacaactttccaagaggcctcagttctctgaccctctaagcctgagctccaccaaatcaggcctctcctccagctcacctcatcctagtcccagtacatcacatggctccactgcacacactccacactgcccagtgctccccagtgctggtctctgagcagctcactcttagcacagtctacagagccagaaagataggaggccttgaagtggcaaccagccaggaaccaacatgaaggccaacttgcccaagcaggaagggtcagcaactgacagagaagcattttgctagtctgacaaccgtgtgactaaaggacatgttactaacgtaaccaactgcctctcactctgctgtacactcaacacgtcagaaggctgggaaatggtgtcagatttagaagctgcctattgtgtgggaaacctgctacttgttttcattaaataaagtgctatgacatactg

SEQ ID NO: 2476 - DNA, 508 bp, Mus musculus
ttttttttttcaatataagtagcacatggtttaaatatgaatgactgaacttgtgatctagtccttgtctggtaattgtggattaatgtcagcgttaatcagcccctcaaagggagagaaaactgggcttttcccttgctgtacctcattcagcttttgatttccatggccccaccatttatgtgcaagatttgcaatggttgtcagcttcctctgaagaccgagcttgacgcctccatgccagctgccgttggagacgcaaagccaagcaagggtcaggaaggaagctggcccggctgactggagaatgggaaccccaggactctccactcatctcgaagggttgtggtccccccaggaaagtctcgagacaatggggacattgttggtagctgttcggtagatgctctttgctatttataagtgactttaaaccttctcttggctgttaagaaatgtgttctagatttagctatttattgtttgcggccggtctcatgcgcgggcc

SEQ ID NO: 2477 - DNA, 1071 bp, Mus musculus
tttgagcttcagtcatatgtgggactttgacacttggttaaatacgaattacttactagttgcttagctaaaaaatgtttaagtattgcaggacaataatgcaggacaattttatttgaaaaattaatactttttgtctcaatattagagttacactgtgaatgaatttgtttttttctttttggcccttctaagtaggcttagggttccaagagatttgtgagtgatattaatgtgctgcatttcattttttcatatttaaggctgatttgttagaatggctgagaagtgtgtggagtgggcacattcatctgtagggatgaagctagttaagccacagtgtggacggacgaggatccttccgctctggctgctctgtccacccacaaagacgggcttatcgtcgtctactttgttatgagcattgcttttagagcgccaagccatctctcatgaatgtcctcgagtcttcgggaataaaaataacttgattattctttcttaactacttttcttttgcagtggaataataagcagaagtgtggctttattcaaggaatcattttttaagtttgtagcagctactccattggtaaaccatgcaagcgatgggtggatggcatgcgcacaccacacgttctgtgtagtggttcacagcttgggcaacgctaaagctcttctgtagtgtgaatcaattttaactaaaacttacaagcttttttttttctttcaagctttttttttctttttttttttagtaccctaattacttcttgtttaagatagaatcattgctataaacaatatctttgtactgttccatttttcccttgtagttcagctttttaaagaccagtatttctatttcatcaagaattgaagaaaaattatttattttattttttcccattagtgtagggtaacaattcctaagttttgccaagaaaatagagcatgttctaaagccccttttgatttttatatattaaaatctttgaaaagatccttggtaaagatgtttgatagctttgtttaatccagatttccccaaatttactcacctccaccatc

SEQ ID NO: 2478 - DNA, 3506 bp, Mus musculus
ggatcttctcttttatgtttacacacacacacacactatcctttcttaaattcttgaaaagcacttctttttttttttttttgatggtaaaaaaagatagacaaattgcaaattggtcaaatttcgtttctctgaggaccgtcctgtttccttcacattgtgactgttcttgggcactgaatgtccccagttggcatctcctgcatagtgtctgaggcttaaagactacagctgaaaagctgatgccatccctactgtaggtgccttagatatcagccaatcaagggagggagtgtggtgtaaaagcatccccgcccagacccattcattccctccatgcacaggcagtgccaacgctgcccagagaggtggtttaaaggaacatacgcatgctcggtgcatgccacggactctgctttgctgctggctcttctcggcattttatgtgtagcgcgagcccgtactgagtatttgtgtttgctcgatatcagactgtatggttgggaaggaagtgtgcttcttttcagcttcagagttagtcactggtgagacaaatgctcgtggggagggtggtgaggacagacacagacagacagaccgaccagctatgcagaaatgcttggcaaaagacagtaagagcagatacagtgataagatccaagcatgaagtgagtgtgaagattggcaaagagcagagacccaacctcagccagctatgatgagactgagaacacatgattaacacccattcagggacaggatgcgggtatagagcagctccagggcctccaaacattgctgagccacagtgtgcttctttcttagtgcacatagcatccatcccgttgccatggcaactccaatacgatcctatcagtggtcctcctcctagtcctcccatgactgctgactaccccgaggtggtttggtttttgactcctctttgaggcaggaaactaagaggtgactagccaaatgttgatacctggctctagtcaattttgacgttttttcaggaaagcaatattctggaaagttcaaaccatggctgtagacacagatccatttcccttaaaactcgagtggggctagttgcaaggttgacatacctcgctcaatggataatcaggcctctctagatgcctgagttggtggatcctaacttgcagtgtttacagttgtggaccaaggatagcttcagcaggccgttgggagcccagattcacaggcctcaggaagtttgaaaaattactccgtgcgtgtccactttttcctccttaggacattctatcccagttttcttctataaataagggaagtgcagactcggagagagtgttgggtacagctggttcactgactgaaggttgtgttttaaagggacctgccattttgacgacagcagtgaggctgatgtggaagccgcttctgacccgtttctttgcccattcgtgggctccacaggccctgtgtatctacaggggaatctgtacagcccagatccatttgaagtttatcttccagattgcagctctgacccgaggaccgctttaatggatcactgtgagtccagctacgtgaagcaggaccgcttctcctgtgctcgtccctcagaggaaccctgtgaacggagcctcaagagcatcccatggccacattccagaaagctcaccgactccacatatcctccgaatgagggacacacagttcagactctgtgtctaaacaagtcctccgtggatttcagtacagggccggaaccaggatcggctacttcaagtaactcattcatgggtacgtttgtcaacctgacttctcagactcaaagcattggtcagtagtttcattcctgatgtcgccgtgagatcctgtgagttctaaatcctctgcgcttctgaaatacacttgggtgggaattgtgtgtggttatggttttcatctgtacctaagcccaggagctttctggatggtgctgtgtgtggtgtgtaggagacgagagtttggagagatgacttagtagctgagcttgtcagccgtgtggaaaaagtggttttgggtcccggcagcctgacgggtggagctgtatactctgcgtggttgtggttttcagatgtctcgtggcttctgactgaactcacagtggaggccggggaaagcaacatcctacctagcctagcttcagacaagcaagacaaccttcagctgaggaggcctgtggtgcccgcggcacaagccagcgcattcagacagcagctagcactgtgggtagagtgtgaattttttggtctcatgtgtggaaaccgttggagggaagaacagagaatggatgctctttttatggagtgaagcaatcaggggagaaaaaaaaacaagcctcaacctgccgtggcgtgtttttgtgttcttggtttgtttttaaaggagaattccaaacgattctacttgagtgtttaccctttgtcccagtatgattgtttatatacctccctgaaggcaagaaaatggaagtatgttttgtataactagggaagaaattctagttaattgaatgatttttttgctgcagttgaagaaaaggcaggacccaaatcttgaaagaaggcctgctgtattcaggcagaacggcttccctaccgtgcagtcctccttcagggagaatcatgggctatgggctcacacatcctcaagccaaggccttggcagacttcaggaacttcgttgttcggtgatgagtgttcctaagagttgtgagcaaagattaaaatggacgcatttatttgatggtctaaataagcgggtgtgcagtgctgtgttctgtaaatagtctgttctcagggaggaccgacactgcacaggcatttacagacaagcttcccgtgtccctttcagggttcgttcgggtgctagcaggagtacccaggcgctcatggggtctcttttctttcaggaaccttcggaaaacctctgaggagaccacacctggatgccttttcaagctccgcacaaccgccagactgtcagccaaggccctgtcacgggaaatcgctttcctcgccagagctggactctgaatcagaagaaaatgacaaagaaaggacagattttcgggaagagaatcacaggtgtacttatcaacagatattccacacttacaggactccagattgccagccttgtgattcagacacatagaccagaagggaccaagaaaaagcttccacacgctacctcagctgggcttctatttaaaggagacagaatcctaggtttttaaacagacttacaaagtttaaaaaggaaaaaaaaaaagatgctttatttatatagatgaaccaaaattacaaaacgttataaaaattttataccgggaataactttcatataaaaaaatacgtctttaaaagtattttataactttgttttatatgaaaatagcttatgtaaattaatggtatgagtccatgactattttatgtatttttataaaaccagatttctttttatgg

SEQ ID NO: 2479 - DNA, 951 bp, Mus musculus
tttaagtctggccaagcaaaatgatagcaaaacctcacattgttatatgaattgaacatatatttttaagaagaaatgaaagacaacatatttttagtacccattcagaatccatgctgtatccctgggggcggggcagagctgggagttagaggcatactgagattatttagcataaactcaaatactttatcctcaggtaggcaacaaacttatgtaaccttcccacaaggtaaaccagtagccacggaaaacacaaggtgtcttttctccaccgaacacacactctgcaatggtgggaggactggtattttactgtgtttgaaagaatagcctgttacatagatgacatagtaggatgtattcaaacccgctcctcattaagcgaacagattagctgtgccctcaactggctacgattgtatctgttttcaccgctagctatcagagcatgagtttcttgtgtgtacacgctgatacttggttcacgcatgaagacagtgcctatgcactttgtgtagctatcatgtaggtatttgtgtgtaatttcagtgaaacaatgtatagacgtaatttaatgtaactgtttttcttggctgtttatctaaatgcagtagatatgtcggttgccgtttggaaaccttcctttgcagtcttaggtgtcgtctaagagttatttctcgttctcaatgtgacctgagtgaagaacttaacctatgaaacccctgtactcatgattgtttgcaaatctctgagtccagcacctttgtaaatacagccccgaggaggaatgggggtgaatgtgtttcctgttactcagtgaaatatcagcctacgcctgcatcattcccactcagtgcaccagtggaacttgtggttaccaagtctgagggaggtttagaatgaagacactcgtctctcctccctcactggtggactgggcttaaagag

SEQ ID NO: 2480 - DNA, 1022 bp, Mus musculus
ggcttcccagcccagagctcgcccagacttccacacgcgcacggaccatgtcggcgcagaccgcgagcggccccacggaggaccaggtggagatcctggagtacaacttcaacaaggtcaacaagcacccggaccccaccacgctgtgcctcatcgcagccgaggcgggtctcacggaggagcagacgcagaaatggtttaagcagcgcctggcagagtggcggcggtcagaaggcttgccttcggaatgcagatctgttacggactagggagccaggcccttgagcttgctcttggaactccatctcttcttccttccctcggcttacccaggctgttttgatgtttcagtgcagtgttgaatgtctcattgttttgctgtcctgctatttaacacaatgtgtttttttttttatgtatataactaaaaaaaaaaaaatccaaaataacagggagctaaatgcagttctgtgtaaagtgatggcttggctgggggcaggggtgtggcttgcctttggattttaatgaaagatgatgtgggaaccgtcttcgtttgcccttggccatcaccttccagtagtaattcatatggaccatccccttcagagctgcctggcttctattgaaaagataacagaacaggcaggggaacacctcctgagttcccccccccggcccccccccccccccccccccaaacacccgggggggggggggggggcgggggggggggggggggggggggggtttatatttttttttttatatttttatttatttttatttatgaatgaatgaacagttccttcccttacagctgtgttcccttggaaagcaacctagttttgcagttttggattccaaggggcagaaaaacaagtagttaaggaaaaaaaaagttaaagagtttaaaattttccttttttaaatgaattttttaaatttttttttttaaataaaataaaattttttttttttaaaaatttttttttaaattaaaaaaaacgttaattttaaaattt

SEQ ID NO: 2481 - DNA, 4972 bp, Mus musculus
  misc_feature 4102, 4129, 4227, 4228, 4404, 4785, 4786, 4787: n = A,T,C or G
caccaggagagatcggtggagagccggtgctgacagcggctagaggctggactgagggaggtggggacactgagaaaggtggggaaggcggctcgaggctcctccgcggagtgggtactcctggtaaggatacggggccaggggatgctgagagctctggctgcccggctagcgccgtggagttgagctgcgcgcctctgacgtggagcccaagcctgggcaagaggaggaggaccgagagaagacagctgctgcagaggaaggcgccgccctggaagttgcgggactggcgcggagaggatttcccgggtcccgcgcgctgcaccgcagcacaataaagtagcaaggcgacaacagcccagctcgcccgaggaaggaggcggctgagcaggcttagagaagaaacccaggagaaataatgtggggaagcaaaagatgacattggcacaggccggaccaagcatccttcctgtgagaacagactgagggcgagagagaagccattcggcaaagatgacagaaggcaggcactgcagggttcacctgctggatgacagaagactggagctgctggttcagcccaagcttttatcaagagagctgctggacctcgtggcgtcgcatttcaacctgaaagagaaggagtactttggaataacgtttatagacgacacgggtcaagagaactggttgcagctggaccacagagttctggaacatgatttacctaagaagcccggcccaactcttctgcacttcgctgtcaggttctacatcgagagcatatccttcctaaaggataagaacaccgtggagctgtttttcctgaacgcaaaggcctgtgtacacaaggggcaaattgaagtagacagtgagaccatcttcaagttggcagccctggttttgcaggaaagcaagggagattataccagcgatgagaatgccaggaaagacttgaagacactgccagtctttccaaccaaaacccttcaggaacatccatccctcgcttactgtgaggacagagtgattgagcattatttgaaaatcaaaggtctcactcggggtcaagctgtggtccagtatatgaaaatagtagaagccctaccaacgtatggagtccattactatgcagtgaaggataagcagggacttccatggtggcttggtatcagctacaaaggaatcggccagtatgacttacaagacaaggtgaagcctcgcaaactatttcaatggaagcagctggaaaatttgtatttccgtgagaagaaatttgctgtggaggtgcacgatccccgaaggatttcagtgtctagaagaacctttggacagagtggcctgtttgtacaaacctggtatgcaaactcttctctcatcaagtccatctgggtaatggccattagccagcatcagttctacctggaccggaagcagagcaaagcaaaaattccttcagccagaagcttagacgacatcgccatggacttaacagagactggaacacagaggggctccaaactggtgactctggaagcaaagagtcagttcatcatggcaagcaatggcagcctgatatcctcaggttctcaggactcggaaggcatggaggagcaaaagcgggagaagattctggaactcaagaagaaggagaagctgttgcaagaaaagctcctgcagaaagtggaggagctgaagaagatctgtctgcgggaggccgagctcacaggcagaatgccaaaggagtatccactgaacataggcgagaagccccctcaggtcaggaggcgagtggggaccacgttcaagttagatgacaacttactgcctactgaggaggatccggctttacaagaactggagagcaatttcctgatacagcagaagctggttgaggctgcaaagaagctcgccagtgagcccgacctttgtaaaaccgtgaagaaaaagcgaaagcaagattacacagacgctgtgaaaagactgcaggagattgaaaattccatcaacgaataccgaatccgatgtggcaagaagcccagccagaaggctgccgttgtcccaccagaagacatcattccatcggaaagcagttctttgtccgacaccaccacctatgacgaccccaatgactccttcactcttgctgggcagcgaccaagttcagtacctcattctccaagaattctaccccccaagtctctcggaattgagcgaatccacttcagaaaatcctccatcaacgaacagttcatggacaccaggcattccagagaaatgctgtccacacacagcagcccttacaagactctggagaggcggccacagggaggacggagcatgcccactacgcccgtcctgactcggaatgcctacagcagcagccacctggaacctgactcctcatctcaacactgccgccagcggagcggaagcctggagtcccagtcccacctgctctccgagatggacagtgacaagccatttttcaccctctccaaatcccaaagaagcagcagcacggagatccttgacgacgggtcttcgtataccagccagtcaagctccgagtattactgtgtgacgcctgctgccagcccttactacaccacccagaccctagacacccgtgccagggggagaagaaggtccaagaaacacagtgtttctacttccaattcaggaagcatgcccaacctagcacaaaaggatcctttgaggaacggtgtctactccaaaggtcaggacccaccctcttccggttactatatcgctggatatccaccgtatgcagagtgtgacctgtattacagtggtggctacgtctacgagaatgacactgagggacagtacagtgtcaatccttcttaccgatcctcagctcactatggatatgaccgccagagggactacagcaggtctttccatgaagatgaagtagaccgcgtgccacataacccatacgcaactctccggctgccaaggaaggcggccgtgaaatctgagcacatcaccaaaaacatccacaaggccttagttgctgagcacctgcgtggctggtaccagagggcttctggacaaaaggatcaggggcacagcacgaagacgagctttgactcagacaggggatcgcagaggtgcctgggatttgcagggctgcaggtcccctgttctccaagcagtcgagcatcttcctactcttcagtgtcttccacaaatgcttctgggaactggaggacccagttaaccattgggctatctgaatatgaaaatccagtgcattctccctacaccagctactatggcaacatctacaatcccttgtcctctccgagcagacagtatgcagagaccactccactggacggtacagacggaagccagctggaagacaacctggagggtagtgaacagaggctcttttggcacgaagactccaagcctggaacattagtctgaatgcagctggacctcctgaccaagcactgcgcgtgctcacactagtgtgccttgcagagtccgttcatcttctagaaggcatcaaaggctgaagacaagacttaaatgtggtttgaaagcaaagaatcacacagtaaaccccacaaaaccctgggggaggacttgccttccaaactccaggcactaacctatcactaagtcagatcccgttcgttgtgtgactcttgtcaagaggacctgcacgaagcccggatccacagcgagctttttggaagggaataacagttgtcgaaggcaaacctcgaagctgggaaggtggtcagggagtttgtcccgttggagaggaggatgggagatttcagagcacagttgagatgctgagagagagagcccagaagctcctgaatcgtggcttatctccacagggtttgaacttgtgagctgacagaaactcaccgtttctacaaagagatgaggacagtttagacagtattggaaacttacttgaagagaagttagattttcatgaagttctgaatgagtgtagatgttttaggctattgcaaagcaatgttcttcataagagccctaatatggattctagtcttctgattgctatagcatcctgtaactataacttaanagtagccgactagaggaaatgaagtcnctggccagctctgcttggagaatgttcttaaggtacatgccaccaattcctgttttgcttcccaacactgactgttcagactggtgaccttgcctgtnncctgaacggtgggctcgaggtggcaagtttatccagaaaaagtgtctggagatgctaacagaaaggaccccagaggacaaagccaacccacatcaccgtagatgaattgtgtgccttaaagtggtgaaccgtagaaaatgaagcctacgacctgaactccagaagcaaatccggantcacaaagtgacaagccgagattgacaggaaagaatttactccgagctgcaggagattgaattatgaggattaaactacctcatacccccactggaggagctcatttgcgtaggtttgtggttcataggattttgcttgcttctagaacagccttgatctttgtctctttatttggcttccaagtcccacaaaaggtgctcccttcccctcccttttatacgagtttcttgttcatattgtgaatagagacatttctcaacaacttttctggaacattttttctacctgtattccaaagcatgtaatatatacataaaaatgatttgataactgctcctttgtcatttgtatcactagaaatgaagttcggggaaattttnnnggaaaaaaaaaagacacaagttaaaaaaaaataacttattcctttttgcatatttgtatagcctcctggaattggaaatcgccttttgcatattctttcaccgttttgactttttgagacctattatttttttatgtaggtcaataaacttatggtgtgctactgaaaaaaaaaaaaaaaaaaaa

SEQ ID NO: 2482 - DNA, 620 bp, Mus musculus
gacatacttgcttctgacactcctgtgatcaccagcaacctcccagacttgccatcatggtgaactttactgctgaggaaaagaccctcatcaatggcctgtggagtaaggtcaatgttgaagaggttggtggtgaagccttgggaaggcttcttgttgtgtacccatggacccatagattttttgacagctttgggaacttgtcctctgcttctgccataatgggcaacccaagggtcaaagcccatggcaagaaggtgctgactgcttttggagagtccattaagaatctagacaacctcaagtctgccttggccaagctcagtgaactgcactgtgacaagctacatgtggatcctgagaacttcaaactcttgggtaatgtgctggtgattgttttggctagtcacttcggcaatgaattcacagctgagatgcaggctgcctggcagaagctggtggctggggtggccactgcgctgtcccacaagtaccactgagccctctctctagctgtccagcaatcctgtgtgtccgctatgcctcctttctgcacatgaatactggactgttccttgaaagcacatcatgtttaataaagatcatccttcctggtaacc

SEQ ID NO: 2483 - DNA, 1437 bp, Mus musculus
tcttcttactgtgtcattgggatttgtcagccactgggctctttcctgctaagcccaaagacagtgtggtccctcagaggggtgatgcagtgttcacatccagagatggggtcctcctagggagggatggggctcctcctagggagggatggggtcctcctagggagggatgggggtcctcctagggagggccttctctggctcttccttccctgcccctcctcctcctcctttccatttgggggtcctgggtctggttttcattctgacttgtacccacttacctggtagttttactctgttcataatttaacttggttttgttgttggtgtgtctgtttttccccctctcgttcccagttttaagtgactttgagtattttaagcatttccagtctgattctgatctcaggaactcggttaggttttagagagaagtaggcggagtgttagccctgggaaactcgctactcccctggaagcctgcgctgggcattctaaccgctccagcacctctgcgccccaggagcccctccagggtagatcagctgtcactcccgtcacctggcactcgtcctgttctaggggttttttcttcatgttcaatgaatgtacttcctgacagctttatcgcataagctattggaaatgaaggaagagttgtagatactcactccttagcagaacatgggctgagaagctggccaggagtgtgaagcaagtggtgggactggggagaaagcttgcaggctttccacctgtgcggcatccttgtgaaggaagcggcgctctcggctctctaacgggagagatttaatcacagggagctgaggcccacctttttcttgggactttgtgatgatgcgtctgaacaactctttttgttttgtattttatgtcccccgtggaatgatttttgcctaatctgtgagtgaactttcagtgtcacccccccaggtgttttttgcaggggtgtgtgtgtataaagcacttgacctttgacacagcccctcacctactctcctattctgaaatctttttctttggccttccattctttgttaatctggatggtttccttgctgtttctatttagttctgttctagttcttgttttgttctggcttttaacatttgatatgtgattccccccctcctccaaacttactgtggagtaaacgctttaggtgacccatgtgacctcttcacggatgggaggtgtagtctttaagttccctcctccgccatgtggcaggtgtttgctctcttgccaccgcacttcaggttcagcatctctaaggctgctgccccgggcctcctgaggcaggcccgaattcactgcagcactaagggtgaaagccaaagggtttagaaagatgaatgaagccgggtctcctgctgcagactttgtctcagaatcctaaaaaaagaaaaagg

SEQ ID NO: 2484 - DNA, 3125 bp, Mus musculus
gacaacgccgtgtggtgctcctgtttcattgccctgtcgcgcagtgtcgctgccgctgcggagtgggcgttcagttttcgggtcgtcatggctggctacgaatacgtgagcccagagcagctgtcgggctttgacaagtacaagtacagcgctttggataccaacccactctctctgtatatcatgcatccattttggaacactatagtgaaggtgtttcctacttggctggctcccaatcttataaccttttctggctttatgctgcttgtgttcaatttcctactcctgacatacttcgaccctgacttctatgcttcagatggagtggatggaaagcaagcacggagaaccaattccagcaccccgttaggggagctgtttgaccatggcctggacagttggtcgtgtgtttactttgttgtgactgtgtactccatctttggacgaggaccgactggcgtcagtgtttttgttctttatctcctgctatgggtagttttgttttcttttatcctgtctcactgggagaagtataacacaggcgttcttttcctgccatggggatatgacattagccaagtgactatttcttttgtctacatagtgactgcggttgtgggagttgaggcctgggtgtgcattatgtgtgactcttccaatgagtttattaaacttttttagaagctataaaagcaacacgctgaagcacaagtccgtctatgaagccatggtccccttcttctctccgtgtttgctcttcactttgtgtacagtgtggatcctctggtcaccttcagatatcttagaaatacaccctagaatattctacttcatggttggaacagcttttgccaatatcacatgtcagctaattgtttgccaaatgagcagcacgcggtgcccgactttgaactggttactgcttcctctcctcttggttgtggcagcggtgatcgtaggtgcagccacctcccgccttgagagcgccctcctttacacactcacggctgccttcactctggctcacatccattatggcgtacaagtggtgaagcagctgagccgacattttcagatttatcctttttcattgaggaaaccaaactcagattgactaggaatggaagaacagaatatcggcctgtaatcttgacaaagtactgtaaatagatgcgtgtaaatacttcatccatcaccagtgaactgaacggatctgctcggcagacatgggatctcagtgtgtgctatatggacagcaagaatgaaacctgggctcagcttgtggaattgtggactttctaactcccagcttactctattttattttattttttttatagagccatgagacatttggttaagcacagtgtacattaaaccagctaaatgttcctagcttcctgagtccatggcgttttgactcacaaagttaaagatgatttactttcatgtttcaggtccccgggttgagtcaggaacactaatgacattcagatagccacagcatgtcttaatatttgatacgttatggtcggtctttagctgtggatcattcccacagccaaaatgtaatgcagaaaagcatcaaaaaagtctcttcagccagagatgccagtgactccagaacagggtacagttgccaaatcccggttgccctccagtgaactgccttccccacctgctgtggaggttgtccagtatcccggctcttactgtatctgataaatggtttaattttcttttagagtggagtgttctgccgttacttagtagggaatgggttgtaattacagtcggccgttgtggcatagctcattgtctaattgtggcggttcctctctcagcagtgcattgctaggattgggtgcctgtgagctgtgatttttaagaatacgtgtgacagtcccaatcttgtggtacttacttgtgaggatatgcagtagctcgtgagaggaaatttaaactggagttaggagtctcagagctccacatcggccacagttagcaccctggcactgtctgtccagttgctgcttgctttccttctccctgggggtgagctgttgtggtttttattctcacacaggataacgaacgagattgtctctctcccctaatttgcccacctccctatttgaagaaaacttttgatatatatgccttactgagtatttacttcccttaatatgactcaaaataatttttaaggtttactgacaacataaaataattcctttcactatattgtggttattttataaatcacacctttttatgaatgtggagattttttttttcctttggactttgtctttatttagttttgtggtggtgaaatttacttgctgattttattttccactgaatgaagtttgtgcttaaatgaagagtgtgtcttaaacccttttttttggacaggttgcacttggataaaataggcaccactgtgttgatatgtaattaaattcataactattattatctatgaatggaaccattcttaaatattgtagctcattcctttgttgaatatctgtctgctgctttgtaaaaacaaaacaaaaaacaaaaacaaaaccattggtacgtcacgtaaacattttaaaattctaatcattgtcgtccaggctgtcgaagataagcccaggggcttacgtgtatctggagacattctctgagacaaaaaatgaaagcaaaaattggtgagaagttgatgtgaaaatgggtagtgattctgtgcttgttaataaattgccatcatggaggctggaaggtgagccggttgtgtgaggataactgttccgtccaccttgtgctctgtgtgagtttgttagaaggtccttgttttcttgaccttgtacacagtaatattcatttgtataaaggaaaataactgataaatatttataaaataatgaatttggaccacaggctttcttcaccttgtacagtagactgaaaaatcatgtcctataattttagggcttttttttttttttctttctgtttttcaaaatgtatgttctctttattgcatcaagtggatttaaaagaaaatgctttgtgccttttgtttgtttgtttttaaacttgcctctgtgatagtaaagaaatgtgtttct

SEQ ID NO: 2485 - DNA, 2141 bp, Mus musculus
attatctcatatggctggaaaatcctatttgaggactcacaaccaaacaccaacagaaaagttttcatttgactgggtacaagcgttgtagatagaaaattccaatacctgcaaagaagaggactgtcatttcaaatggggaaacagaggcagctgagccactttccccaagtcacacataggacttagagcaggagtacagttgaacctgaaggattcacatgttagacctggcattcttttgttacctggtgaagcatttcttttcctcgagcatttagtaaaagatggggtgtgaggtcaccaaataaacaattggctgggctgaagacaaatgtggaagttaaatgggataaatcaagttgttattgcagtacttaattatgaagagtcggtgaactgagttgttgagcagaattgtggctttggcttccagtaccaccccctcccccaatgaagaaaggaatagaaatgggtcattttaaagagacttctcactaaagtttcatatacagtgatctcactacctcctatccatccatccatgtgttgctgtatcttctcccattccacctttccatgatctaccacttctagctggaggctggggatgtttggcaagatgaagtatagagataccacttctgggccccaaagtcaccctgaggatgtggaaatctggaaaccagagactgcagccaatggttttttttttaatcaggaatcacagtcaatatttacctgaccttcaggaggcagagacaggcagatctctgattctgaggccaacctggtctacatagtgagttccaggacagccagggatatgtagggagaactatgctgagaacctgtttctgaaaatccaaagtgtgtgtgtgtgtgtgtgtgtgtgtgtgtgtgtgtgtgtttctgtctgtctgtctgttcttctgtctgtctttgtgtgtgttataacctgaactgcatgttctcacagacaaattaagaacagggttctttgaataaataaatgctgtggactaaaagcatcctttcaaaacacacatccttaagcctaaatctgctctgtaacggtccctccaagtggagtctttcagaaggggtcaagtcctgagaacagagctcttacacactggtttagagtgttcatgagaagaaatttacatgggagaatctgatgggagggagtatggaaatgctttagatagagaattcatatgtgaaattttcaaaaatgtttagttaataataatcagggaggctggttggtaaagcattctcttgcaagcacaagaaactgagttgagccaccagaactcaaaaaagtcaggtgtgggtgatgcgctttccattcccagtactgaggaggctgaggcaggctgatccctggcgctcgctggccagtcagtttagtgtccttagtgaatctcaggccagtgaaacaatctgttcaaaaacaaaaagaggatgtcatctgaggaatggaaaccaaggttatcttctggcctccacatgtgcatgaacacgtggacatatatgtgtacctacacgtatgaacacacatacacacaaacacaaaaaagatataagagacacaaagttgctcctctttgtcatataagagcattaaaaaaggtggctgtgtagaagccaggagccacacaccagatctgtgccttgatccagatcatctcagtctctgaaactgtaagtaataagtgcattttggttaaactgcccagtttaaaatattcttcataaagcaacccagccttgctgaaataaagagagtctccacaacatgagtttccacctttattcgggctacccagaatatacaaaagcaatgctgttgtaagatctgaaagagtcctacaagcctaaggacgtggtccagctaaaataaacagcaaatacaataacacagctaaccaaatacttagagatgcaatgttaatatttattttagcctgtttcaagtaagtaggtacagattgttcacatcccaagagactctgtttcttaaaagtttgtaagaaaaaaaaatgatgtctaaaaacaaacagtacagtgtgtttattttttaggggaaactgaaatcagggctactgaaaataaaacttgatcattctaaccgc

SEQ ID NO: 2486 - DNA, 335 bp, Mus musculus
gtaaaaagaacgtgaatttctttattaaaacaacagataacacaacgttcgtaagaatgatgtcctatcgagtaagatcataaggagcatacatggacacagctaattcaagcccacaggtagataatgctgtgtcttcactgtgcctcagtttacccaacataaaataaggcaactgcatcaacagtgcagttgggattcaccgtggtaagatgtgtgaaacactgcagcacagagcaacaaagcaatggtaataaaaagggaggcaatgatgttactgccactggagtccaaaacacatttcctatcttttcaaataattcatggtaagaatg

SEQ ID NO: 2487 - DNA, 3311 bp, Mus musculus
gtgagatcgagggggaggacccaggaggaggcggcgcgtagaaggaggggcgctgcagccaagccaccagtctagctgtagagtgctgtactccagatactcctggagctccagcccctcagaccgcgcgtccccgccgccgttcgcctttcggcatcctaaacttgagcggcagctcggtttcaacccatcgactgcttgcttcaaatcagacagcattgcgacccagacaccggagtccgccgagtgaaagcacaacgctgccctgtaggaccagaccaagaaaacagcctcgcgaagcagcaactctgggttgggagtacagaagccaacaagtgagaaggcgccgggtttccggggcgcagggagaacgctagagcaggcgccagagaagacagctagagctcggaatcggagcccaaacctctctcctggaggcggctcagcttcttttttttctaggccctcttaggcttgctctgggcttccttttatccgggtaggagccacatccctggggaatatgcagcgcgcgtggatcctgctcaccttgggcttgatggcctgtgtgtccgcagagacgagaacagagctgacatccgataaggatatgtaccttgacaatagctccattgaggaagcttcaggagtatatcctattgatgatgatgactattcttctgcctcaggctcaggagctgatgaagacatagagagtccagttctgacaacatcccaactgattccaagaatcccactcactagtgctgcttcccccaaagtggaaaccatgacgttgaagacacaaagcattacacctgctcagactgagtcacctgaagaaactgacaaggaggaagttgacatttctgaggcagaagagaagctgggccctgctataaaaagcacagatgtgtacacggagaaacattcagacaatctgtttaaacggacagaagttctagcagccgtcattgctggtggtgtgatcggctttctctttgccattttcctcatcctgctattggtgtaccgcatgcggaagaaagatgaaggaagctacgaccttggagaacgcaaaccatccagcgcagcttaccagaaggcacccactaaggagttttatgcataaagctcccatttagtgtctctatttaggagagcactgaacttttcaaaataaagctttggcatagaataatgaagatctttgttatctgttttgttcattacagagccatactggccctttaatgatgagaattccattgtatttaaattttttcgtgtatttctttagaatgacataaaagtaaaaatctaacatctgcagtgttctgtgaatagcagtggcaaaatattatgttatgaaaacccctgacattcatggaattgatttgaacatctatgtgcaaatacaaaatgattgtgtttgtcctctggttcaaagatgactgctactcccccttgtcagcaagtctccagttaaccttactgagttggtcttcatttatttatctcttgtccctcttctctaccctcccttcttgtcacctttcttagaaacaaaaccttatgccttttgtagctgtcatggtgcaatttgtctttgaatgattacaataatggtaatttagtgtatatgtgatttttctcaaatatgttaaccttaacctccactttatataatgtttttaaatatcagactatccattttatgcttgctttaaatttcattacttgtagcttcaggcagatttgcaaaggcaaattaatgtgtaaaattggattattactacgaaactgtttagtcctagctatcttcttttgggaggatttgacataacggacaagcctcagcaaacccaaagatgctaacagtattttgagaagttgctgcagattcctctggccactgtacttgttaatttcttgtcatttgaaggtacgagaaagagtttaaagaaaaaaaaaaaagatcagtttttgttcttaacatgcatttaaattgcaaacatctttttaagcctttgaagtgcctatgattctatgtaacttgttgcggactggtgttaatgagtatatataacagtttttaaaaagttggtattttataagcacagacaattctaatggtaacttttgtagtcttatgaatagacataaattgtaatttggaaacaacaaaaaaacctgctgaataaatcacatggcctaatattgaaaatgtcactgttataaattttgtacatttcttaccaaatgtacatctccccttgctgtgactgaccgtctgctctcagtgactatatgggtttggtttctgagtatctcatggtgtctgtcaatcaagaccaaagaacccctcagtgaggctgttaattacgagatttacctctaaattgttcagaggaaaagtattgttattctgcatgtatttgggtgcaggaataggatgactgccaggggatttcaaggtttgcagcctttgtagtgtagctactgacaatattgagagagatgccttcttttgcaatttactcttaaaagtataaattccaaagaagcaaagcgacctttctagaagtaggtgtctggggaacagacctatagaattgcttacctgtcaaagctcccctacagaagaaccctgtaagtgacaaccacagccactccatggggtaggagggaaggtagggggctctgcctgttgaatgacagcctggctgcttaagatggatgtttctagaaaaggtaatgccagaggaggagttggaggcatgggggtgccccgattgggtactcactgaacagagcatttcctttttttgttctgttttctattttaccattagtttttagttttaaactgtgagccatggaagtagaaagaagacagcaagatccgcagcttttccagcataaaattaacttttgataaagtttggctacttcgtttgagcaccttccctgagcttgtcacagaacacatttaaacaaaactaaagtaacacttgaaacagtgctgtgtctgaatctttaatggccttaattcatacctttctgtccaattacagctgtaattcaccatgttaaaaggaaatgatgggcccttccaaagctgcacaatgcccctcaattacggaggctgagaatgtagtgggtatacctctaactgtgtgaaacagtggaatttaatttgtagaataacttgcttggaatctatgccagggaaaaaaaaatcctggcaaatattttgtcactgctgtaaagcacatttgttaaaagtgccaaaataaagtctgtcatgc

SEQ ID NO: 2488 - DNA, 358 bp, Mus musculus
tttttttttttttttttgggctgtactgattatttaataagaaaatactaccctctatctagaactttctaagtgatggattgtagttaatgggtaggagttgattgggagacatatcacctttgcctagcccttttgtccgagaggcttaattacaaggaaggattcgcaaacaaccaaacacccagggacttaaaggcaattaattgtttggacaaacaacaagggggggggcgggaagcatgataagaggagatgcatgttatcatggacgtgctcagttggacacggagggtggcaagccgggacgccgggtctggatgatttttggctttggggaagtctttgggtcctcctc

SEQ ID NO: 2489 - DNA, 1543 bp, Mus musculus
gggctgagccagctaggttcccacgcaggagtctccgcagcagcagacacaggcacagggtggcactcttctctcctcagttagccagactgagtccgtagtgtaaagccgggtcagcagtccttgcgctgaccgaggtggaggcactttctgttgctgcagctggaggttgtatcgaccctggggaagatgtcttcattgcttctgtggtactggggatggaacgcagggcccatttctatgttaggcgagtgctctaccactgaggtacaaccttagccctctttataaaacatttttacattttgagacctggtcttatgatgttgccgtagtcggccttgaatttgctcagtggctgagcctgatcttctgtttaatactcctgtcacccaagtaactaggattactggccaggctgcttgaagatcttttagggaaggggtttggggaacagggtctcgtgtgtcagactagcctcagaggtgctaggattataggtctctgtcaccatgcccagctaaggatgtagtcttaagactttcagacataattataccagcatgagcttcttcaaaatttgatgtgcagactgtactatgggattttgttggtgtggctatactgaaatagccagtagttagatgactgactcagaagtcctaaagagagtattcactccccagtgagagacttcatgcagagtcacaatgttgttctttgagattctattgaaaaaggtctttgttagccaggctggctcatattgcagtcttctgctcagctccctgagtgtagatacatggtgcgtcattatgtcaatgcctggagaataatcataacgcccacttctgcatctgaagaagccgtcctgtcagctgtgagggatgcaggaatgaacactcagctatccaggtccagtaactcttccctctctagtatgctaggacaccttcaggtggactcttcagctgctttagcctacatgctgggtgtcttcagtatgttctacacctgtctcctgtttctaccattagtgagatctggtatcagcacacagttgttctctctcttctttattgtttttgtttgtttgtttgtttgtttgtttttcaagacagggtttctctgtagccctggctgtcctggaactcactctgcagaccaggctggcctcaaactcagaaatccacctgcctctgtctcccgagtgctgggattaaaggcgtgcaccaccaggcctgtcgttctttttcttcttgtaattacatgtaaacctctgtttagcacaatcttttgatgtttgcagtaatgctttactgtcactggcttggcactgaattttgatacccataaagtactggcagactttatgtcactgggatgaatgtaagccttgcacaaacttagagctattcatatatgatgagcctttagcaagctgcccggtcctcatgggcaaacttacccggctgtagttgcttttttccagtagtagttccttttgttaaacctctagcaatcaataaagatttaattcacc

SEQ ID NO: 2490 - DNA, 2166 bp, Mus musculus
ggtggctttggcgccgcccgcctcggacgcttggaaccgtcgcgtctgtgtcgcctgtcgcccatcgcctgccgccgctgccagccaccagcagccatgagcgcgcccggccccggtgtagtctgctgtcctctagattagtgctctccgccgcgacggtccgcagcatggagtcgcccgccgcgagcccgccggccagcttgcctcagaccaaaggaaaatccaaaaggaaaaaggacttacggatatcctgcgtgtccaagccacctgtgtccaaccccacacccccccggaacctggactcccggaccttcatcactatcggagacagaaacttcgaagtggaggctgatgacttggtgaccatctcagagctgggtcgtggagcctatggggtggtagagaaagtgcggcatgctcagagtggtaccatcatggctgtcaagcgcatccgggccacagtgaacacacaggagcagaaacgtctgcttatggacctagacatcaacatgcgcacggtcgactgcttctacactgtcaccttctatggtgccctcttcagagagggggatgtatggatctgcatggagctcatggacacttccctggataagttctaccggaaggtgctggagaagaacatgaaaattccggaagacatcctgggggagatcgctgtgtctatcgtgcgggccctggagcacctgcatagcaagctgtctgtgatccacagagatgtgaagccatccaatgtcctcatcaacaaggaagggcatgtgaagatgtgcgactttggcatcagtggctacctggtggactctgtggcaaagacaatggatgctggctgcaagccttacatggcccctgagaggatcaaccctgaactgaatcagaagggctacaatgtcaagtctgatgtctggagcctcggcatcaccatgatcgagatggccattctgcgattcccttatgagtcttggggcacaccgttccagcagctgaagcaggtggtggaggagccatccccacagctcccagcggaccagttctcccctgagtttgtggacttcactagccagtgcctaaggaagaaccctgcagagcgcatgagctacctggagctgatggaacacccattcttcaccttgcacaaaactaagaagacagacattgctgcctttgtgaaggagatcctgggagaggattcatagggactggcccaggaccccactggtctgccagcatccatacatccgtgctggggcagcacttacctacagccataagctactgccattctgttcctgggcatttgagaaattaaggggttgttcctgtcggtctctgcaactagctgtcccaagtgccaaagaaccagacctcaggggctcccagccaggccatatgtgccccacagtgcctctgctgttgctgctcccagggtctcaggcctctacccaagggatgaatctgacagggcctgtgtaccccggcaaacgctgtcgcttctgaagagcaggcagctggtgtctctctggacaggccatagccttggtactgtcctggatgccatgcaggttgtatatatattttaaatcacaactgaatgaatggacttcgtacactgtggcctggatcagggacatctctatcctgtctcaggtgctgaggacacactatggggatgaatctcctaagactttcctgagagacgtactgagcttcccaaggccttccccccagcactggccaatggtctctgagggacacactgtcctcagacagcctctggttaccacctttagtggtatctgcctttccctttgaactattattcctgttgccttttgctttgtgggtattgctgggttttcttgcatggtttggagctgaccacttaaccctgggtgccagcaggctcacagccgcccagtgctcggactggagtctgcaaggatggctcaagctcttggctcaaagccacgagggagctgtaacaactctccaggtgtgaccagctcttggaagctaataggtttactttggtggtgtttttaaaaaaaaagaagaaaatctatttttgtgaagaaaggcctgcctcttccagccttttcctgggcaggaacctattgctgttttaattaaaaaaaaaaaaaaaatcgtgcg

SEQ ID NO: 2491 - DNA, 1450 bp, Mus musculus
cggcgccgggtcgcggcgggccccgcagcagccatggcggcgggcgccgggccaggccggcgccgcgctgggtaaaggcgctaggtgagccgctcagtgccgcgcactgcgggcggctggaggagcaccgctacaccgcggtgggagagtcgctgttcgagccgccgctgcagctttaccgagacctggctgctccaatggatcccgctctggatggcccccaacaccatcaccctcatcggcctcgccatcaacctggtcaccacactagtgctcatcttctactgccctacagtcacggaggaggcaccatactggacataccttttatgtgccctgggactctttatctaccagtcactggatgccattgatgggaaacaagccagaaggacaaactcttgctctcccttaggggaactatttgatcatggttgtgactctctttccacagtatttatggccatcggcgcttccattgctgttcgcctaggaacacatcctgacgggttgtttttctgctctttcgttgggatgttcatgttttactgtgctcattggcagacttacgtctcaggagtgttaagatttggaagggtggatgtcactgagatccaggtagctttagtgatcgtcttcatgttgtcaacatttggaggagcaacaatgtgggactatacgatacctattctagaaataaaactgaagattgttccggttcttggagttgtaggtggattaatattttcctgttcaaattatttccatgtgatcctccatggtggtgttggcaagaatgggtctactattgcaggcaccagtgtcttgtcacctggactccacataggattaattattatattggcaataatgatctataagaagtctgcaacaaatatgtttgaaaaacatccttgcctttatactttaatgtttggatgtgtctttgctaaagttgcacaaaaattggtgatcgctcacatgacgaaaagtgaactatatcttcaagacactgtctttattgggccaggtcttttatttttagaccaatactttaataattttatagatgaatatgttgttctgtggatagcaatggtcatttcttcatttgatatgatgatatactttacttctttgtgcctgcaaatttcaagacaccttcatctaaacatcttcaagacttcatgtcaacaagcaccggaacaggtttacaagcatattgactgactagtagcccaaggaaaagaggagaagcagttaggggaacctatgtgtgaaggatatccccctatacaggaggttcaagttctttcttcaaagactcatcagaataacatggattgaagagactttcgaacatttgccatctcttgctgctgctgtttcatgaaaggagatatgaaacatgtttaatttttagttaaatgttataaaattttcagcaagt

SEQ ID NO: 2492 - DNA, 3118 bp, Mus musculus
gcgacatgagcctttccacttcctcctccgactcgctggagttcgaccggagcatgcctctgtatgggtacgaggctgacaccaccagcagcctggaggactacgaaggggagagtgaccaagagaccatggcacctcccatcaagtccaaaaagaagaggaacagctcttttgtgctgcccaagcttgtcaagtcccagttgcgaaagatgagcggggtgttcagctccttcatgacccctgagaagcggatggtccgcaggatcgccgagctgtcccgggacaaatgcacctattttgggtgcttggtgcaggactacgtgagcttcctgaaggagaacaaggagtgccatgtgtccagcaccgatatgctgcagaccatccggcagtttatgacccaggtcaagaactatttgtctcagagctctgaactggacccccctattgagtcactgatcccagaagaccaaattgatgtggtgttggagaaggccatgcacaaatgtatcttgaagcccctcaagggccatgtggaggccatgctgaaggacttccacacggctgacggctcgtggaaacaactcaaggaaaacctacaactcgtgcggcagaggaacccacaggagctgggggtctttgccccaacccctgacttgatggagctggagaaaatcaagcttaaattcatgaccatgcagaagatgtattcgccagaaaagaaagtcatgcttttgctacgggtctgtaagctcatctacactgtcatggagaacaactcagggaggatgtacggtgcagacgacttcttgccagtcctgacctatgtcatagctcagtgtgacatgcttgaactggacacggaaatcgagtacatgatggaactcctggacccatcactgctgcacggagaaggaggctattacttgaccagtgcctatggggcgctatctctgataaagaatttccaagaagaacaggctgcgagactgctcagctccgaagccagggacacgctgaggcagtggcacaagcggagaaccaccaaccgaactatcccctccgttgacgactttcagaattacctccgagttgccttccaagaggtcaacagcggatgcactgggaagaccctccttgtgagaccgtacatcaccacagaggatgtgtgtcagctctgtgctgagaaatttaaggtggaggaccctgaagagtacagcctgtttctctttgttgatgagacatggcaacaactggcagaggacacttatcctcagaagatcaaggccgaactgcacagccggcctcagccccacatcttccactttgtctacaaacgaatcaagagtgatccttacggggtgattttccagaatggagaagacctcactccctcataggggacacttgggacttcccattgatacatccaaaaagggagctgagagtctagctttctggctgccttgggtttgagcttagaagacagccacctcctcaagcatccctcagttcagtgactaagccatccataggctgatttggccaagggcatcctttagatacattgcccagatgaggtagctgagatttgggaaatagtaagactctcatccagaaatggtaaattgcatttaatggttcaggtgtcctgagatcactggttagttaactagttaaccttagccagcttcagggttggcttacacatctgtatatgtgctgaggaaacacttaaggtacaaactcttctcttggattcgatagcagctgttgacaagactgtccgatgcagtgcgtcaggtccctctcagctttgtggatggctccatccttccctcttgcccttcttttgtccatccttcatcctatacttttttttttttacaaagagcctttgtgtttttatatatttcatagaaaattttatagcagttgcaggtaaactgtcaggattggtttttaaaatatttttgtaacttttaaaatattctataagtatgcatgtgatttaacatttaatatttgaagataaatctcttgctggatttgagagtactgcattttagacgcctcatagataatctctcttctataactggatattttcggcaaatttgtggggagagacttctggttgtcttaaagaaatccctgacgctggccacaggctgcctttgaaaaatcgggtgtactgttgttacattgttgttacattgttcacttttagcggtgtattgttacattgttcacttttagtgctggtgtctgtttatgtttttaagcaatcgaggctgagaattagaagagaaatgaatgtagagagaggtagagagagaaacacagactctaagggggggactgaggaatgtagtctgcaggttcaggctcttcgcaagacgttggaaaaggagtcagtactgtaaaatatgtgctgcggtgagctttgacaaagatctgttccatatgctatctgcttggggaaaagtaaatcaaggataacgatccctctgacccattttgtaagccgacactaaggacatccatttatttggaggcagaaaccaagtcatgtataatacgagtttagttgagttcaatgagatgttgatggggagagaatgcactaaaaccaaaaccaaaccaaaaacaaaacaaaacaaaaaacaaaccttctgtatttggttggggcatggtagagctaacattcacacactagcatgctgggttccatcctcagtgtgacaaataatgagcaaaacaagcagaaaacatggatgtatggtgaagttagacttatgttgtataagatgagtttatggacacacgtattccagaagggtcatacatcagtgtaatacagatcattgcaaaacaaaagcagaaagccatgttactatcctgtgtaaggatgttcaggcatctgatctggaggacctcgtaccctgtacaaggcttttgttgtcccagaaccctcccttggcacatgctgggttgtgcttccttttgtaaatgattttcaatggaattttgcacataatacattgtaatactgtacaataatcctatgtaaaataatttttgcaataaaaaaaaaaaaaaaaaaaaaaaaaaaaaaaaa

SEQ ID NO: 2493 - DNA, 1604 bp, Mus musculus
tgtgcactttctctttcctcagcctgtgcatcacttccccttgaatcaatccacaggagtaccttatatcacatctgcaccctcaactatctgattcctgtgttgaccatgcctgggtggagctgcctggtgacaggagcaggagggtttcttggccagaggattgtccgaatgttggtgcaggaggaagagctgcaggagatcagagccctgttcaggaccttcggtcgaaaacaggaagaggaattgtccaagctgcagacaaagaccaaggtgacagtactgaagggagacattctggatgcccagtgcctgaagagagcctgccagggcatgtctgctgtcatccacaccgctgctgctattgacccccttggtgccgcttccagacagaccatcctagatgtcaatctgaaaggtactcagctcctactggatgcttgtgtggaagccaacgtgccaacattcatctacagcagctcagtgcttgtggctggaccaaattcctacaaggagatcatcctgaatgcccatgaggaggagcatcatgaaagcacatggtctaacccatacccatacagcaaaaagatggctgagaaggcagtgctggcagccaatgggagcatcctgaaaaatggtggcactttgcatacttgtgccttaagactctctttcatctatggggaagaatgccaagtcacttcaaccactgtgaaaacagcactgaagaacaacagcataattaagaaaaatgccacattctccatcgccaacccagtgtatgtgggcaatgcagcctgggctcacattctggctgccaggagcctacaggaccctaagaagtccccaagcatccaaggacagttctattacattacagatgacacccctcaccaaagctatgatgacttaaaatgcaccctgagcaaggagtggggcctccgccttgataccagctggagtcttcctctgcccctgctttactggcttgccttcctcctggaaactgtgagcttcctgctacgtccagtctacaactatagaccaccatttaaccgcctcttgatcacagtgctaaatagtgtattcaccttctcctacaagaaggctcagcgagatctgggctatgagccacttgtcagctgggaggaagccaagcagaaaacctcagagtggatcggaacactagtgatgcagcacagggagattggaaacaaaaagtcacagtgatatgaagagggagaggacatggccctgggtgttattaggtcctccagaaagggacttagaaacaatccaactcttaacaattccattttacactctgtccaacttgtctttgggtcaccagaagccttgcaagtcactggcccagttgcaacccttcagctctaagcacttgtccagcaatgcacaagatgtgcctcagctgctgtgacccaaggataggtggctgatagtgagttgcctggaacctcttgtaggttagaatttcatcagggcttcctcatctcctttccatgtgccaacgcatttcgtgtctgagaaaattcccatacctttatgaagctcaaagaaaagaacaataaaatcttttaatgctt

SEQ ID NO: 2494 - DNA, 1830 bp, Mus musculus
tttttttttttttttttttttttttggcccagaatgaagtgaccatagccaagttgtgtacctcagtctttagtttccaagcggctctcttgctcaatacaatgtgcatttcaaaataacactgtagagttgacagaactggttcatgtgttatgagagaggaaaagagaggaaagaacaaaacaaaacaaaacaccacaaaccaaaaacatctgggctagccaggcatgattgcaatgtctacaggcccagttcatgagaggcagagacaggaagaccgccgaaaggtcaaggatagcatggtctacgtatcgagactccagccagggctacggtcccaagatcctaggttttggattttgggctttggtttttgagacagggtttctctgtgtagccctggctgtcctggaactcgctctgtagaccaggctggcctcaaacttagagatctgcctgcctctgcctttgagggctgggacgaatgccaccactgcccaactaagattccattaaaaaaaaaaaaagttcaagataattaagagttgccagctcgttaaagctaagtagaagcagtctcaggcctgctgcttgaggctgttcttggcttggacctgaaatctgcccccaacagtgtccaagtgcacatgactttgagccatctccagagaaggaagtgaaaattgtggctccccagtcgattgggacacagtctctctttgtctaggtaacacatggtgacacatagcattgaactctccactctgagggtgggtttccctccccctgcctcttctgggttggtcaccccataggacagccacaggacagtcactagcacctactggaaacctctttgtgggaacatgaagaaagagcctttgggagattcctggctttccattagggctgaaagtacaacggttcttggttggctttgcctcgtgtttataaaactagctactattcttcaggtaaaataccgatgttgtggaaaagccaaccccgtggctgcccgtgagtagggggtggggttgggaatcctggatagtgttctatccatggaaagtggtggaataggaattaagggtgttccccccccccccaacctcttcctcagacccagccactttctatgacttataaacatccaggtaaaaattacaaacataaaaatggtttctcttctcaatcttctaaagtctgcctgccttttccaggggtaggtctgtttctttgctgttctattgtcttgagagcacagactaacacttaccaaatgagggaactcttggcccatactaaggctcttctgggctccagcactcttaagttattttaagaattctcacttggcctttagcacacccgccacccccaagtgggtgtggataatgccatggccagcagggggcactgttgaggcgggtgcctttccaccttaagttgcttatagtatttaagatgctaaatgttttaatcaagagaagcactgatcttataatacgaggataagagattttctcacaggaaattgtctttttcataattcttttacaggctttgtcctgatcgtagcatagagagaatagctggatatttaacttgtattccattttcctctgccagcgttaggttaactccgtaaaaagtgattcagtggaccgaagaggctcagagggcaggggatggtggggtgaggcagagcactgtcacctgccaggcatgggaggtcctgccatccgggaggaaaaggaaagtttagcctctagtctaccaccagtgttaacgcactctaaagttgtaaccaaaataaatgtcttacattac

SEQ ID NO: 2495 - DNA, 1047 bp, Mus musculus
cgcagctcttcagcccggtcccggtgtcagaggcgagatcctgtggctaagtatggtccctttcctctgctttcataatcccgggttcgcggccagtggggtgacagccttcactcgggaaagggagcgggcaggtaccccggaggagacgccgcgtgcacgcgggtcgtggggctgcgcaaccggcagcgcggcgcacgcggaggccagccgtgtcccggaggccttgtcaccccgagggtggggaccctaggccccgagacaccgcccacccgggactggatcgcttgggggcacgctttgagattacaaggtagccagccactcgatgaccttgagctgtcagacaggagcccctttactgaaaatctagacttcctcggctcttaccctgtctgcacactatgccttatgtcattaggtacaagggctcgcacccttcccaggtctcatattggagaacgcactgcttagagctttcccattacgccttgctagaagcttttaaaatgtatttttttaaagtataatagattaatcatttttctacctattacattttctcttgttgtagatttatctgttggttcatgatttgttgtataagtgtattaaaagaccgaatggcaatgtcagagctgcaagagaccttagggatgaattaacttctgtaatttctatataaaagttagatatgaaaaaaaatgacctttcccctctaatttcaaaacgctgagcaactgcaacagcaatcagtaaagtgacctgagtaaataatttgtaacgaatgtcagacctgggactccaccccccaagtagcgtggttctcatcttccttgaggctagactttgaatcgggaaacaataggaattcattttcaagtgcttttagctatgattaacactgagttaattaagagttgcctgtaatgctgggtgtagtggcagcctttaggcctagctacaaagagctccaagacagctggggctacatagagaaaccctgtcgaaagagatagagagagagagaaagaaagagagaaagac

SEQ ID NO: 2496 - DNA, 3341 bp, Mus musculus
tccgagacgctgcccttccccagcgatgggatccctgctttgtggaaggacctgttatgtgtgcccctgtcctgctggggagtggatggtacccaggacccagccagagaccagctgaagacattctccttgcaagctctcaccccaggaggtcccgtctcgggtggtggacctaccatggcattccggaggactgagggtatgtccatgatccaggctctggccatgactgtggctgagattccagtgttcctgtacacaacttttggtcagtccgcgttctcccagctgcggttgacaccgggcctgaggaaggttctttttgccacagcccttgggactgtggccttggccctggctgcccaccagctgaaaaggcgccggcggaagaagaagcaggtgggccctgagatgggaggtgagcagctgggcacggtgcccatgcccatcctcatggcccgcaaggtcccttcggtgaagaaaggctgctccagcaggagggttcagagccccagcagcaagagcaacgacactcttagtggcatctcctccatcgagcccagcaagcactcaggctcctcccacagcctggcctcgatggtagtggtcaattcatccagccctacagctgcgtgctcaggttcatgggaagcccgagggatggaggagtctgtgcccaccactgatggcagtgccgagagcctctatgtgcaaggcatggagctgtttgaggaagccctgcagaaatgggagcaggcactgagtgtgggccagagaggggatggaggcagcacccccacaccaggcgacagcctccagaacccagacaccgcatcagaagcactgtcagagccagagtcccaacgaagggagtttgctgagaagctggagtccctgctgcaccgggcctaccacctgcaggaagagtttggctctaccttcccctctgacagcatgctgttggatcttgagaggaccctaatgctgccactgactgagggctcactgcgacttcgagctgacgatgaggacagcctgacctctgaagactcctttttctcagccactgagatctttgagtccctgcagatcggcgagtacccgcttcctctctccaggcctgctgctgcctacgaggaggctctgcagctggtgaaggaaggaagagtcccttgccgaacactcaggacagagctgctgggctgctacagtgaccaggacttcctagccaagctgcattgtgtacggcaggcctttgaggggcttctagaagaaagaagcaaccagatcttctttggggaggtcggccggcagatggtgacgggcctgatgaccaaggctgagaagagtcccaaaggcttcctggagagctatgaggagatgctgagctacgccctgcggcctgagacctgggctaccacccggctggagctggagggcagaggggtggcctgcatgagcttcttcgacatcgtgctggacttcatcctcatggatgcctttgaggacctagagaaccctccgtcttcggtgcttgctgtcctgaggaaccgctggctgtctgacagcttcaaagaaacagccctagccaccgcgtgctggtctgtcctgaaagccaagaggaggctcctgatggtgcctgatggcttcatctcccatttctactccgtatcggagcatgttagccctgtgttggcctttggcttcctcggacccaagccccagctctcggaagtctgtgctttcttcaagcaccagattgtacaatacctgagggacatgttcgacctggacaacgtgcgctacacatctgtgccagccctagcagaagacatcctacagctgtcccggcggcgcagcgagattctattgggctacctgggggcacctgtggctagtagcatcgggctgaatgggccactgcctcgagaaaatgggcccctggaagagctgcagtaacaggggatgggctggaggggagaggtggctgtttgggcctcagatacaaggtgataggagagagaaagctgccactcccttcctttgggttggtatccaagggccatggtggccaagggccattgcccctaagcttgctccacttcctcacctgggaattcccaacacccaggggacaaatttccatggagaggaaccactagaagcactgatagcagctgcccttggggttccctgagcagcagaggcaggccagagtcagcagggactggccaggggcaggtagcaagagagaaaggtgtgggagcaaatggctcttgagtatggaccacagaaccccagtccccccctgctgctgagggagggcaagggatagttgagggatagaacatacagggctaggtggtgacagtcacagggtcctgcaattagcagccaccaatagctacattaagtcccagcacctaggcttctggccagtatggaaagccatgtctgggccatccagaggtgggcttgccccatgtgtgctcacatctgagcaggtactcacccttcacaaacccttggcgctgttctccacattcccacaccctgccaaagattgtttttatcccctctgtcaccaaagatggaggaggcaggactggccgcttcctgctctctggtgagccaggagctcctgggcagtgctgggccccagtcagagctcacagtggcccatctactgctccaaaagtgagcacggaaccatggcagggtgggcatgggctgcacagcgggcagctcccccttcccctttctgacaggaagctggactcagcactttgccttcaactccatgcacacgtgctttggggctgccaccacccacgtcctgcagacagttggcatttgtcacggcagctgcagtagtcctggcagccctccttttgcctgagctgggaagtttttatttattgccttaatactttatttggctgttccatcccttccaggttgtgacaccaggagaaaagactcctggtctggagttgagcactggctcctggaaccaagttcctctccctggaagggaaaagggttccccagggtcagcaggatgcagtaaagagagggcagccatggctctgggtcctctctgaggcttgtgctcagaagggagcagccctcatgcactgtcttgacattccattcatttgcacttaccctgagctgtgaatgtgaccctgggctaaggcctgctctgctctgcccctgacccatacagtgtggtattttcatttttgtcctgttcatgtgtctatgccccaccctctagcactcaaccagcagtggtagagtgtgtgtaaggcctgtgagtcagataaaggaccgaagcc

SEQ ID NO: 2497 - DNA, 1539 bp, Mus musculus
gaaccgaggagacacctgcgtccgctggcgcacttcaggggccagtgaggtccacggaggcggggtccttggggcgcaggacccaagtttcttctccatgggtatgtggtccatcggtgtgggagctgtgggggccgctgctgtggcactgctcctggccaacacagacatgtttctgtccaagccccgaaaagcagcactggaatatttggaagacatagacctgaaaacactggagaaagaaccaaggacattcaaagcaaaggagctgtgggagaagaacggggctgtgattatggctgtacgcaggccaggctgctttctctgccgagcggaagcagcagacctgatgtccttgaagcccaagttggatgagctaggtgtccctctctatgcggtggtgaaggagcaggtgaagagagaagtggaagatttccaaccttacttcaaaggggaaatcttcctggatgaaaagaaaaaattctatggtccagagaggcggaagatgatgttcatgggcctcatccgattgggggtgtggtataactcctttcgagcctggaatggaggcttctctggaaacctagaaggcgaaggcttcatccttggaggagtttttgtgataggatctggaaaacagggcatccttcttgagcaccgagaaaaagaatttggagacagagtgaacccactctctgttctggaggctgtaaagaaaatcaagctacagactccagcgtccgggagaagctgatcctgtacagctgctggctgggagagaacgcacggggcctgtgctgtgttcatcagatgagctgtgctttccccagggccccaagagccagaaggcccttgcaccatatttactaagaattggtgatgcattttaacattgtctgtttaggtcccagagcctttaacattccgtttaggcccagtagggcaaatagggtcccagacagaacagagttcaatctaacaaaccagtgagagttatttgaggaaagatctagaaaatttaatgtttaaagtttactgctgaagcttctttcaaaggaatatgtcctaagtgccggtatttgaagtgaagtttattttcatgcctagttaaaaaacaaacaaacaaacaaacaaacctgaaatctgagaaaagtgcggctaagaaacagctcagtggtggagcatttacctaacatgcacatggccctaagtgggatacccagacagacagacagacacacacacacacacacacacacacacacacacacacactctctctctctctcctaagaaaagctgatggctgacttgataattagagaattatccttttgtttgatgtgttttctgttaacaacttgttacttaaggtcagagtaccacataaagcaattgctgtgctgtgcccttggataaattacacaggtaaattacaaagtgaaggttctgtggtcttccctctatagacgcagagatttgctcccttgggaaaaactgtcacctgggaaactgtcacctctaataaaaatattcacc

SEQ ID NO: 2498 - DNA, 1532 bp, Mus musculus
agtcaggtggacggtcccagctatgctgtggcctgtcactgttcatctgacctgcagcagggccactccaatgggtttcccagcccggcttccatgggcgctaaaagcagagtgtgcttcttggttgggaagctggctagcgggcttccatgcaggggcctgggtggtgccgcattgattcccatgtgggaatcagccctccagtggagcagctgtggcatccagtttgagacagtagctgttgtgagatcacggcttctcctcttgttgctcctgagcacaggttgggagaagatacagggtgtgctggagtatccttgtagaatagcagcctttattccttccccactttacctgtctctggaaagggcagcagttgcatggggaaattaacatttggatttagctctgatcatagctcagaaccttctggaatagcgggttagaggacagaatttttagagcagggctgtttggtcaagaggtggacttaaagccttccttaggcttcacttagccaaccaaggcactcacaaatgtcccctcacgtctcttgtcagtccaggttgacccccgtctttggactcgtttgtctggttctatttaatacctcaaagtcagtgtggctctgggccacgttggggcaagagcgtggggggtgtgctgttgacacggcattcagcaaggtttggttctgggatgccgatggtcaccccctcccccgtctcttccctctgtcgtctgcctgtgatacacaccgatggcaataactttttttcggctccttgcagaagtgggagagggctgcagccaaccctgcaaccagagagcttctctctctcttgcttccactctgctctgttttggctacagagatctgttcatcccactcctgttcccccgcagcgtttctcatccctcgcctccctttatggacaggtgtctggccttttaaattcccgtgttgtggtgtcttctcatccctaccccagttatctgtcttggtcttgccgtgtgatgggatgtgcttgtaaatccagtatcaaatcagctttgtgtatatgtgtgtctctggggtggcttcttccttttgctggtcactagactgtgttgaacaaccatgtgctgtctgagcaggtcaggggctgaccgctacaggcccctcagcggttgagcctgttggggggacccagctgctcttggacaagtggctgggctcctgtctggcctcctcttttcctcctcctcctcctcctcctcctcctcctcctcctcctcctcctcctcctcttcctcttccttctcttcttccttgtcttcctcctcctctttctttaagtaatttgtgtgtatttctaactgatcgtattgaaaaaaaaatcctagtatttcagtgacatgcctgttgtgagatgaacctcctgtgacttctgtctgttctgtattgaggctcagggagaaactagcatttttttttccaaactactttttgtcactgtgacagttgtaaataaagtttgaaaatgctttcc

SEQ ID NO: 2499 - DNA, 298 bp, Mus musculus
cagcagataacccattctccccatccaccccttccctatgcacctgcccagaatatccctaagtaacctcctcttcacactttgggatccccacattggcttcctgaagggttgaccccgtcccaacactcttacatgaaccgcgtagtacatcactatccccgacccttcttccagcactcagtggggctacctgacctgggagtactcattcctgaagatggaaagagctgacaagaggactgctgggctttcggttcaattgttttttctttattaaatatcaactcttcctgcc

SEQ ID NO: 2500 - DNA, 2255 bp, Mus musculus
ttgctgtcgttggacttcagcatgggcacgtcttggtggctggcgtgtgctgcagcgttttctgccctctgtgtcttaaaagccagctcgctggatactttcctcgcggctgtttacgagcatgctgtgatcctgcctaaggacaccctgttgccagtgtctcacggtgaggctctggcattaatgaaccagaatctggaccttctggaaggagcgatcgtatctgcagcgaagcagggtgcgcacattattgtgactccagaagatggcatatacggtgtgcgtttcaccagggatacgatctacccatacctggaggagatcccagaccctcaagtaaactggataccctgtgataaccctaaaagatttggctctaccccggtgcaggagagactcagctgcttggccaagaacaactccatctatgttgtggcgaacatgggagacaagaagccgtgtaacaccagcgactctcactgtccacctgacggcagattccagtacaacactgatgtggtgtttgattcccagggtaaactggttgcgagataccataagcaaaacattttcatgggagaagatcagttcaatgtccccatggagcctgagtttgtgactttcgacaccccctttggaaagtttggcgtcttcacctgtttcgatattctcttccatgatcccgctgtcaccctggtgacagaattccaggtggacaccatactgttcccaaccgcctggatggacgtccttcctcatttggcagccattgaattccactcagcttgggctatgggcatgggggtcaatttcctagcagctaatctacataatccctcgaggagaatgacaggaagtggtatctatgcacccgattctccaagggtctttcactacgacaggaagacccaagaaggaaaactcctcttcgctcagctgaaatcccacccaattcactccccggtgaactggacttcctatgctagcagtgtagaatcaaccccaaccaaaacccaggaatttcagagtattgtcttttttgatgagtttacctttgtggagctcaaagggatcaaaggaaattacactgtttgccagaatgacctctgctgtcacctaagctaccagatgtctgagaagcgagcagatgaggtttatgcctttggagcctttgatgggctgcacaccgtggaagggcagtactacctacagatctgcatcctgctaaaatgtaaaactaccaatttacgcacctgtggtagttcagtggacacggcttttaccaggtttgaaatgttctcgctcagcggcacttttggaacccggtatgtcttccctgaagtgttgctgagtgaggtcaagctcgcacctggggagtttcaggtgtcaagtgatgggcgcctggttagcctgaagccaacctcgggacctgtgttaaccatcgggctctttgggaggttgtatgggaaggactgggcatccaatgcttcctcagacttcatagcacactcgctgataataatgctgattgtgacgcctattatacattacttgtgctgatggaatttttacattttttattttatttagaaaatttaaaattggtggatgcagaaaaaataactgtttgtcaacagtggactcgggtgtaagcaaataaagtgcctcttctttagaaaaacatatgtacaccagatacatttcaggaaaattaataaaactttgagcattggaacgagatggagggccaagtaaaggtcgcatgtgttttattcagaagaaataaaaattacagttaaaaggcacttcaaaccatcataagatagatttacaagaggtgtaaatctattatacatcttactcagttatgcttagaatttccaatgtgtttgttcatttgggctattaagtatttatctcaacatttccgttctctcatggaccagatcctgtagttttaattcttcagttcaagtcccagttcccacaacctcagaacgtgactgccttggtgtctttggcaatgaagacataagaggcatcattagcatggactttaattcaatatgactgatctcctcagaagaaatcaggacaaagacttgcatcaagtgaagcccttgtgaacacaggaaaagatggtcatgtacaacaagaaaaggggcctcaggagaacgcaaacctgctaacgtgtcaaacttccaggtctccagaatcatgaggcaataaatttctgttttaaatgaaaaaaaaaa

SEQ ID NO: 2501 - DNA, 1474 bp, Mus musculus
tctagctctccaagctgattatccgggctgctcctgacatttgcccattttccagggcctctctggagcaaccatgaagtccctggtcttgctcctttgttttgctcagctctggggctgccaatccgctccacaaggtacaggactgggttttagagaattggcttgtgatgatccagaagcagagcaagtagctttgttggccgtggactacctcaataatcatcttcttcagggattcaaacaggtcttgaatcagatcgacaaagtcaaggtgtggtctcggcggcccttcggagtggtgtatgagatggaagttgacacactggagaccacttgccatgctttggaccccaccccgctggcaaactgttctgtgaggcagctgactgagcacgcggtggagggagactgtgacttccacatcctgaaacaagacggccagttcagggtgatgcacacccagtgtcattccaccccagactctgcagaggacgttcgtaagttgtgcccacggtgcccactcctgactccgttcaacgataccaacgtggtccacaccgtcaacactgccctggctgccttcaacacacagaataatggaacctattttaaactggtggagatttcccgggctcaaaatgtgcctctcccagtgtctactctggtggagtttgtaatagctgccactgactgtactgcaaaagaagtcacagatccagccaaatgcaacctgctggcagagaagcaacatggcttctgcaaggcaaatctcatgcataatcttggtggggaagaagtttcagtggcctgcaagttattccaaacacagccccagccagccaatgccaacgcagtaggtcccgtacccacagcgaatgcagccctaccagctgacccacctgcatctgtggtggtgggacctgtggtggttccacgaggactttcagaccaccgaacttaccacgacctacgccacgccttctctcctgtggcctcggtggagtcggcctcgggagaaactcttcattctcctaaggtgggccagcctggtgctgctggtccagtgtcccccatgtgcccagggaggatcagacacttcaaaatctaggcttgattcggggaagtaaggttttggcagacaggacatagccaccactgaagctgggggcggggagggggtggcttgtccactgacaaagcaataccacatcacagctcgaattccaggtctcttcattcctcagagaacaggggcagagaggtaatggtcaaatttgatgaaaggcataaagccagcagcaacactggcactggtggggtgacaaatgactgccattgtttctctgccttcccactgacctcatataaaacagttgcaaccacgactctgaaaggtgctcttgccaatcttcaatctagccataaataaaagtgcccacacgagctttctcaaataagaaggctctgagcc

SEQ ID NO: 2502 - DNA, 5026 bp, Mus musculus
agggcagccccgggagccggaggaggagcggctgcgagcgcgggagccgagcgagcgcgatgccggcagcggcgggggacgggctcttgggcgagccggcggcaccggggggcgatggaggcgcggaggacacgaccaggccggcggcggcctgcgagggaagtttcctgcccgcctgggtgagcggcgtgtcccgcgagcggctccgggacttccagcaccacaagcgcgtgggcaactacctcatcggcagcaggaagctgggagagggctccttcgccaaggtgcgcgaggggctgcacgtgctgacgggagaaaaggtagctatcaaggtcatcgataagaaaagagccaagaaagacacctacgtcaccaaaaacctgcgtcgagaggggcagatccagcagatgatccgacaccccaacatcacacagctcctggacatcttggagacagagaacagctactacctggtcatggagctgtgtcctggtggcaacctcatgcacaagatctacgaaaagaaacggttggatgaagccgaggcccgcagatacatccggcaactcatctctgcggtggaacacctgcaccgtgcgggggtggttcacagagacttgaagatagagaatttgctactagatgaagacaataatatcaagctgattgactttggcttgagcaactgtgcagggatcctaggttactcggatccattcagcacacagtgtggcagccctgcctatgctgcgccagaactgcttgccaggaagaaatatggccccaaaattgatgtctggtcaataggcgtgaacatgtatgccatgctgacggggaccctacctttcactgtggagcctttcagcctgagggctctgtatcagaagatggtggacaaagcaatgaatcccctgccgacccagctctccacaggggccgtcaactttctgcgctccctcctggaaccagaccctgtgaagaggccgaatatccagcaagcgctggcgaatcgctggttgaatgagaattacactggaaaggtgccctgcaatgtcacctatcccaacaggatttctttggaagacctgagtcccagcgtggtgctgcacatgactgaaaagctgggctataagaacagtgacgtcatcaacacggtgctctccaaccgcgcctgccacatcctggccatctacttcctgttgaacaagaaacttgagcgctatttgtcagggaaatcagatatccaagatagcatctgctacaagacccagctctaccagatagagaagtgcagagccaccaaggagccctatgaggcctccctggatacctggacgagggactttgaattccatgctgtgcaggataaaaagcccaaagaacaagaaaaaagaggtgattttctccaccgtccgttttccaagaagttggacaagaatctgccttctcacaaacagccatcgccctcgctgatcacacagctccagagtaccaaagccctgctcaaagacaggaaggcctccaagtcaggcttccccgacaaagattccttcgtctgccgcaatcttttccgaaaaacctctgattccaattgtgtggcttcttcttccatggaattcatccctgtcccacctcccaggacaccaaggattgtaaagaaactagagccacaccaaccagggccgggaagtgccagcatcctccccaaggaagagcccctgctgctggatatggtacgctcctttgagtctgtggatcgagaggaccacatagaactgctgtccccttctcaccattataggatcctgagctcgcctgtgagcctggctcgtaggaattctagtgagaggacactctcccaggggctgctgtccggaagtacctcacctctccaaactccactgcattccacgctggtctcttttgcccacgaagaaaagaacagccccccgaaagaggagggtgtgtgttcaccgcctcccgttcccagtaatggcctcctgcagcctctggggagccccaactgtgtgaagagcaggggacggttccccatgatgggcatcggacagatgctgaggaagcggcaccagagcctgcagccttcctcagagaggtccctggacgccagcatgtcccctctgcagcccacagccccctccagcctctcctttgacatggccgacggtgtcaagggccagtgttaacctgggatggcaagattctgggtctctgtgaggacagccacggaacagggctccacacaggcaggcaccagggcatgggtgaacaacctcacgggagcatcctttattcttttatacctgccacacaaagtcccacgcttgtatcagctgaagtccacagactcaaagtccacacacttacttagggaccctctgagacgctgcgactagggggagggggagggggcgaactgtgggaatcacaccttccagcctgagattttctttgctatatcaccaatcactgagccctctccaggatccccccagtgggctcagagctaaaaaccacacctccatctgctgggccaatcagatttccagactggtaccaggttgtccctcccctccgctctgtgtgtctctcacagttctgtaactgaccgtcagtggtcagttacagtctcacgcggacgtgccactcgctggtaaggacgttcacccaacctagggatccctctacagagggaagcaacccccctttccctaacagtgagtccccacagagtgctgagtcacagtgctggaccgggaggaagatgggatggcgcctcagacagagatggaacccagcagagagaacccaggaggaagacgaagactcattaaacgctcattcctgtgcaacgttttgacaggtttttctttcctctctttctttttcccctgaccttttctttttgggttgaaatttgctgaggattgaacgaacttgtccaaagagatctttctttatatgaagtcattaattaaatttttttttttttttaaagacagggtctcattaagtagcccaagctggcttcaaactcatgatcctcctgcctcagtctccaaagtgctgagattacaagtatatatccgtgtctggctcaaaatagcaattcaaaaacaaaaactagttggccagatgaaaagtagttttaccaaattcacgtgtttttgtttttctgagaggctgcagctcagatggcctaaaggctggcttgggtggcaacaggaggaccacagtggcctgcctgcctaagggatagtagcctagccatcctgtgtttataccgtggcaacagcagaaggcatagaacttagctccagatggctctggagagagagaaaggattcttaaagcagagttgagacagcaagaagcagggaattcgctgtgtcatgctgttctgccgtggttagaacttagctgttctgctgggagctaggagcaggcttgccgccccctgggaacacgctcacaagacggttcgtccccaaaggaaacagtgccccccaaacaggctttcagtccatgctgtaatctgcaccttcccctccaggattgaaccaaagatgcatttccggttttgtgactgtgccactctgtgtgtctcttgtggaacctggtgttgtctgatcctgtccggctggcgctggatggaggactgtctctgtgtgcatcgtgggccctggtacttagcagaggacaaagggcactgttgtcaggaggggaagacttggcacgggctggaccacagttagtttagaagttatggaacagctcagaatcttctggcctttgactatttcagatggggtcagagaccagagctgtagccaggaagccaggttcatcatcttggtccatcgattctaaagtgggcaaatttctgtgacgtcacaaagcggcctttgccagtgagggctgagacacagtacaactgcctctcatttactggtggcgggcggcttcctttggcctctcagagctctgactgaactagaagagaacacggatttggctgaccctggaagaaagctgctctagtcctggctgaatttggtaagacctggactacttaaactttagggagggactgactccctcccgaggacccattacaggaggaggccaggcttttctcccagagctgatggtgttcttcattcagcatggcttccgttcagctcccaggacttgacactgaaaatagaactctttaagcagagagaagaggagagccatccacagacgctctccgtatttgatgtgacgtgtttgagctttgacgggtgaagagtccttttaaaagataactgccagctgcaggcatctggctctgcaaagctggtaggatgtgtacctgtgtactgtgcccgccccctttctcctagccctttatgtctttttctgactgtttgcttttctcgtatgtatgtgtgcctgtgttggtgcgagcctgtggagaaagagtctcccatccttcaaatgcttcgagaacagcgtcagatgtacaactagtttgcctgcgttgctactggtaccttggactctgaactcaggttacccacctgagtcctcagtaggcagtggacccattgagaggcaaatgagaacaggagggagacaagctgtgttctggggcgcacataaacacctgacagacgagtctaggaaaccgcgtgaaagaagaaatgttaaattctttattgttttattatatttatacggaaaatgtggctatccttttgttaagtgcagagtgtattatctgtttgacccatgactgtctgtccttcatgaatgagtctttgcctgtgattctagtcaagcctgtggctactgatgggaacggccgatctgtcatcatgtgaagtccaggaggaagagtctattttagtcatacgattttggtcatgagtaaggactatatttatgtcaccactattgaatatatgtacttttataatggctgtgaaatacactttttcctcacaaaaaaaaaaaaaaaaaa

SEQ ID NO: 2503 - DNA, 1519 bp, Mus musculus
gcggaggttcctacgggagcttagctattgagaagatggtggaccacttggcaaacacggagatcaacagccagcggattgcagcagtggagagctgttttggggcatcggggcaaccgctggccctgccgggccgtgtgctcctaggcgagggggtactgaccaaggagtgccgcaagaaggccaagccacgcatcttctttcttttcaacgacatcctggtgtacggcagtattgtgcttagcaagcgcaagtaccgcagccagcatattattcccctagaagaggtaacattggagccactgcccgagaccctgcaggccaagaaccgatggatgatcaagacagccaagaagtcctttgtggtgtcggcagcttccaccacggagcgccaggaatggataagccacatcgaagagtgtgtgcggaggcagctactggccacaggccgccagcccaccacggagcacgcagctccctggatcccggacaaggccacggacatttgcatgcgctgcacgcagacgcgcttctccgcactcacccggcgtcaccactgccgcaaatgcgggtttgtggtctgtgctgagtgttccagggagcgtttcctgttgccacgtctctctcccaagccccttcgcgtctgcagcctgtgctaccgagagctggccgcccagaagcggagggaggaggccagggagggaatcggaggctctccaccgcagctgtcccacctaggcggcactgtctgtggtgcatccagtggcgatgacgatgactccgatgaggacagagagggcaatggagatggtgactggcccacccaggtggagttctatgcttctggtgtctcctggtcagccttccatagttgacctttacctgcagagtgtttgtatcaagtcagtcctctgccggagacccttgcccatggcagtgggcgtgtgacaggtggctgttccagagccattactagtgcctttctactagacagtagcctcctgggccctcttctaagtctttttcagataatttcctttccatttcacatgcagtccttggtgaccaggctatagctgcaacccttggaacttgaccaggccaggtgccccacgcattaagggttaaagaaggcaaagggaagcttgggtttcagagtccattcccaccttcaaccatgaacaggtacagcccgtgggagagcatgagacttgtacatctaccatgccagatatcaccacctggcaaccgggtccttccaaactggacgccagatgtacggtgtgcgcccttcaggcccaggtgacctacagcctgagctctctgagctcaagccagcccatcaagccctctgccctgtcactaccaaggtgcctggtgcccatttggcttgtccccatctctgtctgcggttaatagaatcagtgttttctcgttaggactctagggtcagggagaaaagccctatccaaactgatttaccaataaacaagaataaagtaccaaaaaaaaaaaaaaa

SEQ ID NO: 2504 - DNA, 4462 bp, Mus musculus
tgtatcacccacacatcattcgtctgtctattgaacaacgtatcatcccatatcatcatatacgccctttgctaggacagagcagatttaaatcctgtagggcagttcggtctcctgcagagcacagcagttcatctgagaggtggacttagacacgttaggtacagctgcacagagtgtgggcgactatcctcaagtaatgtctccttctaaggagtcagatgagcttattttctttgtgaatggaaaaaaggtcaccgagaggaatgcagaccctgaggttaatttattgttctacttgagaaaagtcatccgactcacagggacaaagtatggctgtggaggaggtgactgtggcgcctgcacagtgatgatctcaagatacgaccccatctccaaaaggatcagtcatttctctgccactgcctgcctagttcccatctgctctctccatggggctgctgtcactacagtagaaggcataggaagcaccaaaaccaggatacaccctgtccaggaaaggattcgcaaaggccatggtacccagtgtgggttctgcactcccgggatggtgatgagcatctatactctcctgaggaaccacccagagccctccacagaacagataatggaaaccctgggcgggaatctatgccgctgcactggatacaggcccattgtggagagtgcgaaaagtttctgcccgagttcaacttgctgccagatgaatggggaagggaaatgttgcttggatgaagaaaaaaacgagcctgagagaaaaaacagtgtttgcaccaagttgtatgaaaaaaaagaatttcagcccctggatccaactcaggagcttatatttccacctgagctgatgaggatggccgaggagtcccaaaatacagttctgacttttcgtggggaaaggactacctggattgccccaggaaccctaaatgaccttctggaactgaaaatgaagcatcccagcgctccactcgtgattggcaacacctatctggggcttcatatgaagttcacagacgtatcttatccaattatcatctctcctgcaaggatcttagaattatttgtggtgactaatacaaagcaagggctgacactgggcgcgggcctcagcctgacccaggtgaagaacgtcttgtctgacgtggtctccagactccctaaggagaagacgcagatatactgtgctctcctgaagcagctgaagaccctggctgggcagcagatcaggaatgtggcctccttaggtggtcatattatcagtagactgccgacctctgacctcaaccctattttgggcataggcaattgcatcctcaatgttgcatcaacagaaggaatacagcaaatccctctgaatgatcattttctcgctggagttccagatgcaatcctgaagccagagcaagtgctcatctccgtttttgtgccacgctccagcaagtgggagtttgtatcagccttcagacaggcccctcgtcagcaaaacgcgtttgcaacagtgaatgctggaatgaaagtcgttttcaaggaggacacaaacaccattacagacttggggatcttatatggagggattggtgccaccgtaatcagcgcagataagtcctgccggcagctgattggaaggtgctgggatgaagaaatgctggatgatgctggcaagatgatttgtgaggaagtctccctcctgatggcagcccctggagggatggaggaataccgaaagactcttgccatcagtttcctcttcatgttttacttagacttgttgaagcagttaaagacgagggacccccacaggtaccctgacatctcacagaaactcctacacattctggaagacttccctttaaccatgccttatgggatgcagtcatttcaggatgtagacttccaacagcctctgcaagacccaatcggacgtcccatcatgcatcagtctggcattaaacacgccacaggagaggcagtattttgtgatgatatgtctgtgttgcctggggaactcttcttggcagtggtaaccagcagcaagtcacatgctaaaatcatctctcttgatgcctccgaggccttggcgtcacttggtgtggttgatgtggtaacagctcgagatgtgcctggtgacaatggcagagaagaggaaagcctatatgcacaggatgaggtgatctgcgtgggtcaaattgtgtgtgctgtggccgctgactcttatgctcatgcccagcaggccgcaaaaaaagtgaagattgtctatcaagacatagagcccatgattgtgacagtgcaggatgcactgcaatatgaatcattcattggacctgaaagaaaactagaacaaggaaatgttgaggaagcatttcaatgtgccgatcaaatcctcgaaggggaggtgcacttgggaggccaggagcatttttacatggagactcaaagcgtacgtgtggtccccaagggagaggataaggagatggacatctatgtgtcaagccaggatgctgcatttacacaggaaatggtggctcgcaccttgggcatcccaaagaataggatcaactgccatgtgaaaagggttggtggagccttcggagggaaagcaagcaagcctgggctcctggcatccgtggcagctgtagccgcacagaagaccggccgcccaatacgtttcattctagagcgtagggatgacatgttgataactggaggacgtcacccactactcgggaaatacaagattggcttcatgaacaatgggaaaatcaaggcggcagacatccagctttatatcaatggaggctgcaccccagatgattctgaactggtgatagaatatgctttgctcaaactggaaaatgcttacaagatccccaacctccgtgtccgaggtcgagtctgtaagaccaacttgccttccaatacagcgtttcgaggatttggctttccccagggggcatttgtaacagaaacctgtatgtccgctgtggcagccaaatgccgcttaccaccagagaaggttcgagagctaaacatgtacagaacaatcgataggacaattcacaaccaagagtttgacccaacgaatctgctacagtgctgggaggcatgtgtggaaaattcttcctactataacaggaaaaaagctgtggatgaatttaaccaacagagattttggaagaagagaggaattgccatcatccccatgaaattctcagttggatttccaaagacattttattatcaggctgccgctttggtccagatctacacagatgggtctgtactagttgctcatggtggtgttgaactgggacaaggtattaacaccaaaatgatacaggtggccagccgtgaattaaagatacctatgtcttatatacacctggatgagatgagcactgtgaccgtccccaacacggttaccactggagcatccaccggtgccgatgtcaacgggagagctgttcagaatgcctgtcagatccttatgaagcgtctggaacccatcatcaagcagaatcctagtggtacctgggaagaatgggttaaggaagcttttgttcaaagcattacgctctcggccactggatattttaggggttaccaagctgacatggactgggagaaggggagaaaggtgacattttttccctattttgtttttggagctgcctgttctgaggttgaaattgattgtctgacgggagctcacaagaacattagaaccgacattgttatggatggatcattcagtataaatcctgctgtggacataggccagattgaaggggcatttgttcaaggtcttggactgtatactctagaggaactgaaatattcacctgaaggagtcctatacactcgtggtccacaccagtacaaaatagcatcagttaccgacatcccagaagaattccatgtatcactgttgacaccaaccccaaacccaaaagccatctactcttctaagggccttggcgaagctggaacgtttctgggctgttctgtgttcttcgctattgccgcggccgtggctgcagctcgagaggagagaggcttgtccccaatttgggccataaacagccctgccacagcagaagtgatccgcatggcctgtgaggaccagttcacgaacctggttccacaaacggattctaaatgctgtaagccgtggtccatcccagttgcctagtgcttggggttccagcacaaaagcagatggacttaaaacttccacaggtcacaaatataaatatctatatctaaaatatgtagaaaattagaggcaattcttaaattttcatatttacaaaatattgtaatctttaatcacatgcactataagcaacgatgtttacggagcttcagccaaaggttatgtttaattcaatatattaaacggaattttccactgaaaaaaaaaaaaaaaaaaaaaaaaaaaaaa

SEQ ID NO: 2505 - DNA, 1859 bp, Mus musculus
gcagccctccgcctcgccgcctctcagtctcctcagagtcgccctctctcaccgccgccgccatgaacgggcagctcaacggcttccacgaggcgttcattgaggaggggacgttcctcttcacttccgagtctgtaggggaaggtcacccagataagatttgtgaccaaatcagtgatgctgtccttgatgcacaccttcaacaagaccctgatgctaaagtggcttgtgaaactgttgctaaaactggaatgattcttcttgctggggaaattacatccagagctgccattgattaccagaaagtggttcgtgaagccataaagcacattggatatgatgactcttccaaagggtttgactacaagacttgtaatgtgttggttgccttggaacaacagtcaccagatattgcccaaggtgttcatcttgaccggaatgaggaagatattggtgcaggagaccagggtttgatgtttggttatgccactgatgaaactgaagagtgtatgcctttaaccattgtcttagcacacaagctaaatgccaaattggctgaactacgccgcaatggtacattgccttggttacgcccagattctaaaactcaagtgactgtgcaatatatgcaagatcggggtgctgtgcttcccatcagagtccacacgattgttatatctgttcagcacgatgaagaagtttgtcttgatgagatgagggatgctctgaaggagaaagtgatcaaggctgttgtacctgcaaaataccttgatgaggatacaatttaccacctacagccaagtggcagatttgttattggtgggcctcagggtgatgctggcctgactggccgaaaaatcattgtggatacttatggcggttggggagctcatggaggaggggccttttcaggaaaggattataccaaagtggaccgttcagctgcttatgctgctcgttgggtggcaaaatcccttgttaaaggaggtctgtgcaggagggttcttgttcaggtctcttatgctattggagtttctcatccattgtcgatctccattttccattatggcacttctcagaagagtgagagagagctattagaaattgtaaagaagaattttgatcttcgccctggggtcattgtcagggatctggatctgaagaagccaatttatcagaggactgcagcctatggccactttggtagggacagcttcccatgggaagtgcccaaaaagcttaaatattgaaagtgttagccttttttccccagacttgttggcgtaggttacagagaagccttcaagctctgagggaaagggccttcttcctaaatttttctgtcctctttcagctcctgatcagttgcagtcactctaatcaatgacatgaattttagcttttgtgggggactgtaagttgggcttgctattctgtccctaggtgttttgttcaccattataatggatatagtgagcataggtgagccatgtaactgcctagaaacaaacactgtagtgaataatgctttgaaatcgaacctttgtgccctatcacctaatcctccaaagtcctaattgcaattactttcccaccagatgctgaaaacatccttgtagtgtgcacgtaaagtacttgtagtttgactgtagactctggcaatgccacagccctgtcagcatgaatctgtaacgtcttgagctctatttattgaatgtgaagcccctgtccttatcctccctgtaactcatttctaattatgtagttctttatcagggagtgttcctatccaatcaatcttgcatgaaacgaaagtttcagttggagctctagcctgactttgaaaaaaaaaaaaaaaa

SEQ ID NO: 2506 - DNA, 1100 bp, Mus musculus
gacagtggtctactctctccacaacatgttgcgcttcctggtgtttgcttccctggtcccgtgtggacacagtaccgaggacgttccggaaactgacgcccgcatggttggaggggctgaagcccggaggaactcttggccgtctcagatttccctccagtaccagtatggaggatcatggcaccacacctgtggaggcaccctcatccgaagcaactgggtgatgaccgctgctcactgtgtggacagccccatgacttatcgagtggttgtcggagagcacaacctgagccagaatgacggcaccgagcagtatgtgaacgtgcagaagattgtgtcacacccctactggaacaagaacaacgtggttgcaggctatgacatcgccctgctgcgcttggccaagagtgttacactcaataactatgtccagctgggtgttctgccccgggagggaaccatcctggctaacaactctccctgctacatcacaggctggggaagaaccagaaccaatggggagctggcccagaccctgcagcaggcatacctgcccagcgtgtcctatagcatctgctccagctcctcttactggggctcctctgtgaagaataccatggtgtgcgctggtggagatggagtccgctctggatgccagggtgattctgggggacccctccactgcatggtgaacggtcagtatgctgtccacggagtgaccagctttgtgtccagcatgggctgtaatgtcgccaggaagcccaccgtcttcaccagagtctctgcttacatttcctggatgaataatgtcattgcctccaactgagcgacttccggagtccagtggcctccccaagatggctcttagctttgcaatgagacctgaagtaagcaagaaggagttagagctgaggttatcgctcagtggccgagcacttgtctaatatgtgcacagccttgggctccatccctaatactgcaacaggagcaggggaatgctgctggtgtcttggtatctggggcaaaggtggggggttaatgaaaagcaactcagactactgaatcagatacagaaggcaaataaaaatcaatgtgttacc

SEQ ID NO: 2507 - DNA, 815 bp, Mus musculus
ggtgaagctggtggagggtgcctgatctggccgctgccaggggcgggcgggacggcgcaccatgtacactatcaccaaggggcccagcaagctggtcgcgcagcgccgcacaggtcccacacagcagcaggtggagagcaggcttggcgagctcctgaaatgccggcagccggtgccgccgaccgcgctacccgcgcacctgcagccctcggcacagactcagggaccctggccccttgcaagttctgggccaagacttgtattcaatcgagtaaacggccggcgacccctcaccacctccccatccctcgaggggacccaagagacctacacagtggcccacgaggagaacgtccgatttgtgtccgaagcctggcagcaggtagagcgacaactggatggcggccctgccgatgagagtggcccacggcctgtgcagtatgtggagagcactcctgatccccggctacagaactttgtacctattgacctcgatgagtggtgggcacagcagtttctggctaaaatcaccaactgttcctagcagctgtccgggaaggaatgttgccatagtggaccctttgccagaagaggaccatggtgcgccgatccaccttgtggcctggctgggtaccggccacacctgaagtgccaacatttggacttttgcacctgttgttcccttggcttggctgtcccaagctgccagagccaggggccaaacctgtctaacctcagtcctgctcactgtgcccagggaccagcccctggggctggcagggaggagttcaggctaataaagttgagaaactgcc

SEQ ID NO: 2508 - DNA, 805 bp, Mus musculus
agattggtcccttacttcctgtgcctggtattttcctttcttattttatgccttttgttgtgttccatttttaagatcttttaaagaaaggaaacaggaaaaatttccacctcctattctgaaagcgactttaatttgactggtatgaattgtggcttaagatgcgagggctacaggcagggtcctgctgcctcccttggccatgaggaccgtggggcttctcattcccgtccttccctcctaagcttttctgacagtggaagcctatgtatggtgctctgctttctgggctggtatttattctttgattaggctatttagaaagattcaggttttaaaaaatatattgtttttcaagacagggtttcttggtttagccctggctgtcctggaactcactttgtagaccgggtgtcctcaaacacaacagacattgcctgcccctgcctctgcctccggagtgttgggattaaagctgtgtgccactttatgtgacagattcaggcttttatctgcctagtaacccctctctgccattttatcatctcaggaacttgtgctttcccacagttacagtgtcctgatgtttcctggatgggaatgttcaaggatacagtatatcatggcaggaaattcgcagcgacaggagctggaggcacactcacgttgcagagacagctgggaagcagatgcagaactcagctcatctacagcagatgtcctcaagtgtgccatcatgcttctgctcggacgagagtggactaaccctctgaactgtaagccagccccaataaaacgttttcct

SEQ ID NO: 2509 - DNA, 845 bp, Mus musculus
gggcgcggtcaccatggcgtccagtgaggaggacggcaccaacggcgcctccgaggccagcgacgagaaggaagccgccggcaagcggagacgcctaggcttactggccaccgcctggctcaccttctacaatatcgccatgacggccgggtggttggttcttgctattgctatggtacgcttttatatggaaaaaggaacacacagaggtttatataaaagcattcagaagacacttaagtttttccaaacatttgctttgcttgaggtagtccattgtctgatcggaattgtacccacttctgtgcttgtgactggggtccaagtgagctcaagaatcttcatggtgtggctcattactcacagtataaaacccatccagaatgaagagagcgtggtgctttttctggtctcctggactgtgaccgagatcactcgctattccttctacacattcagtctcctcgaccacttgccgcacttcattaaatgggccagatacaatttgtttatcatcttatatcccgttggagttgctggggaacttctcacaatatacgccgccttgccttacgtaaagaagtcaggaatgttctcagtacggcttcccaacaagtacaatgtttcttttgactactactattttcttctcataaccatggcctcctatataccgttgtttcctcagctctattttcatatgttacgtcagagaagaaaggtgctccacggggaggtgatcgcggagaaggacgattaagtggttcccacacacaaggtgctcttttcagaaaaaccggattacttgagtccaagttttaataataagaataaacgacttcatg

SEQ ID NO: 2510 - DNA, 1936 bp, Mus musculus
gggaggacaacgtgggggattcgtcagcagcaagccggggctgacctctctgtctccattcctctgtttgttctgcagtacaaaatcggacagctgtatatgatcagcaaacacagccatgagcagagtgaccggggagaaggggtagaggtcgtgcagaacgagccctttgaggaccctcaccatggcaacgggcagttcactgagaagcgagtgtatctcaacagcaagctgcctagttgggccagagctgttgttcccaaaatattttatgtgaccgagaaggcgtggaattattacccatacaccatcacagaatacacttgttccttcctgccgaaattctccatccacatagaaaccaagtatgaagacaacaagggaagcaacgatagtatttttgacagtgaagccaaagacctcgagagagaagtgtgcttcatcgatatcgcctgtgatgaaattccagaacgctactacaaagagtctgaggatcctaaacacttcaagtctgagaagacaggccgagggcagctaagagaaggctggcgagacaaccatcaacccatcatgtgctcctacaagctggtcaccgtcaagttcgaggtgtggggccttcagacccgagtggaacaatttgtgcacaaggtggtccgagacatcttgctgattggacacagacaggcctttgcgtgggttgatgagtggtacgacatgacaatggatgaagtgcgagagttcgaaagagccactcaggaagccaccaacaagaagattggcgttttcccaccggccatttctatctccagcatcgccctactgccttcctcggtgcgcagcgccccctccagcgccccatccacccctctctccacagatgcgccagaatttctgtccattcccaaagaccggccccggaaaaaatctgctccagagacgctcacacttccagatccggagaaaaaagccaccctgaatttacctggcgtctacacttccgaaaagccatgtcggcccaaatcagagtaactcggtctgaacatccctttgggtcctttgttttcatttgtggcttttttttttttttttttaaagaattctctggacgaggaaaagactgcctccttcactcagatgtgttcttggatctcagacaatgcatgtggttaaataatctcacagatagcaagaacccctacgtgtgccacacagcatcatagtgaatgtgaaaagtatgatttagggaaaacaaaaaacaaaaaaaaaaaacaaaaaaacgaaaggaaacaaaacaggaggggctgaggacaccgctcagtgggtagagctgctacagctactgtggaacccggggttccatcccagccatggtaaccaggcaggaggatcagaagttcagggtcaacctcagctacatacagagtttgaggccagcctgagttatttgagacactgtctcaagaacaatcaaacaaaacccacagaatcttctctagctttagatgtggaccagggaggaagccttgttttgggggctttggtgagtctgatgtggacctcaatggtaaaagggtaaatggatgagaaaacttttttttttttttttggtaaggtgtggtaaattaatgatgtcagtttcctcccatcaaacctgaaattctcaacaacaacaaaaaaaaaaaaaaagaaaaaaaaatactctcaggtgtcacatgcctaattgttctcttttgggactgctgactaccaatacttgaattccagttgttatcaatattcctattttgatttagtctgactcaggatttggagcctgattaacttcttaaatttttgaaaattttaataaccaacttcttgaggctccaagtgcaattaatgataatgtctttataccttttcacaaaatttaataaagcacccatctgtttgcgtc

SEQ ID NO: 2511 - DNA, 3227 bp, Mus musculus
aaatagaaactctgactaatggcactctatccttaagagagattttttggggggatggctcgttatgttcatgaaaataatttatttaacagctttctctgagaaagacagcagtaggacttttaaagcaaagaaactggaaacatttgaagaacaccatggaagaaacagagaaaaaggttgcaacacaagaaggcagattcttctccaagatgaaggtgtttctgatgtcattaacatgtgcatacctagccaaatcactatcaggagtttatatgaattccatgctcacacaaatagagagacaatttggtatccctacatctgtagttggatttatcactgggagctttgagataggaaaccttttgttgattgtattcgtgagttattttggaaggaaactgcacagacctatcattattggtgttggatgtgtggttatgggcctggggtgtttcttaatggcatcacctcatttcctcatgggcagatacaaatatgaaacaacaatatcacctacaagcaacttgtcctcaaacagcttcttgtgtatagaaaacagaacacagaccttaaagccaacgcaagatccaacagagtgtgtaaaagaaataaaatcattaatgtggatatatgtactaataggaaatactatgcgtggaattggtgaaactcccataatgcccttgggtatttcttacatcgaagactttgccaaatcagaaaactctcctttatatattgggattttagaaatggggaagattgttggcccgattattggacttttgttgggatctttctttgcacgtgtttatgtagacattgggtctgtgaatacagatgacctgaccataactcccactgatacacgctgggtcggtgcttggtggattggctttttggtctgtgcaggagtgaatatcctgaccagcatcccctttttcttctttccaaagacactgccaaagaaagaactacaggataatgtggatgtgactaaatatgagaaagttgaaaaacatagagaaagagccaaaaaggaaaaccttggaatcactaaagatttcttgccattcatgaagagcctctgctgcaatcctatttatatgctgttcagtcttacgagtgtgctccagataaatggatttgccagtacatttaccttcttgcccaaatacctggagcagcaatatggaaaatccacttcagaggcagtattcctcataggtgtttatagcttgcctccagtatgccttggatatttaatcagtggctttattatgaagaagtttaagatcactgtcaagaaagctgcatacatagcatttggcctgtccttatctgaatattttatttttctctgtaactatttgttgacctgtgataatttcccagttgctggattaaccacctcttataaaggagttcagcaccctctatatggggagaaaaatgtccttgctgactgcaacacaaggtgcagctgcttaacggacacatgggatccagtgtgtggggacaatggcctagcttacatgtcagcctgcctcgcaggctgtgagaagtctgttggaactggaaccaacatggtgtttcaaaattgcagctgcattgggtcatcaggaaactcatctgcagtcctggggctgtgtaagaaaggccctgagtgtgacaacaagctgcagtactttttaatcaagtcagtattttccagtttcatcttctcactcgcagccatccctggatacatggttcttctgaggtgtgtcaaatctgaagagaagtcaattggagttggattacatgcatttttcataagactattagctggcattccggcacctgtttactttggcgctttgatagacagaacctgtttacattggggaactctgaaatgtggtcaaccaggggcatgcaggatgtatgatataaacagattcaggcacatttacctggggttgcctgcagcagtgagaggatcaagctttctccccgcagtcttcattctaatccttatgaggaaattccatttccctggcgacatccactctccagacactgaacttgcagagatgaagctcacagagaaggaaagcgagtgcacagatgtgtgcagaagtcctaaggtcgagaacgatggagaactgaaaactaagctgtaatgagttttcaactggcctgtgcaaggccatgaatggaatgtacacttcactttctttgaatcatgagagatatagtaggaatcctcatctttaaggacctcaacaattattttttactcataataaaaaacaattactgatagcatgtttcagaacattaaggtactacttcagattttctcagattagacatctacggtgacgcacacactgaactttaaagcttccttcattttcacatggcattttctcttttaactcaatcaaggggagttgtgtttcctacatatcttcaaatgggtttaaagttttcctattcctgaaacagcattcaattctactgaatttatccttcaatgttggaggtatttagaactgaaaatatgcattcttggttgggacacattgaaaaagttatcttttctatgttcaagatgtctgcataggtctatatctaggagttttcaattttttattattttagacatgagtttctaggattagacatctttctcatgtgtcatcttctgttttcagtctctcctttgtttagccctgtcacacatttgataattttgtttagagcactgacaaattagtcgggttattaaaaatcacattgcaagcttgttggacccattttccctagcaactcaaagtcgttcatgaaaatctttttcaaagcaactatttgagaaagccagttatttcaaaggttctcttgtaaagatgtagttgttcctcagctgtacaatgattgcctagcatgtgtgcaaccctgcattgaaccaaaaggtagagtagactactgacaataatgacaaaataaagtaaaataagaaataaatgaaaataaatcagagctggatgcagtagaagatattctcaaagactactttcttatactcaggatgcctctgactcagtggtcatttttttcatgtgtcctcagaacacatgaataaaatgatacatatttaaaagtataactataaattttataataaattataataaagttataaatttacaattaaaattaaactataactgaat

SEQ ID NO: 2512 - DNA, 899 bp, Mus musculus
agcagtcatggagggtcaacgctggctgccgctggaggccaaccctgaggtcaccaaccagtttctcaagcagttaggcctgcatcctaactggcagtttgttgatgtgtacggaatggagcctgaacttcttagcatggtaccaagaccagtatgcgcagtgttactcctcttccctatcacagaaaagtatgaagtcttcagaacagaagaggaagaaaagataaaatctcaaggacaagatgtgacatcatcagtatattttatgaaacaaaccatcagcaatgcctgtggaacgattggactaatccatgccattgcgaacaacaaagacaagatgcacttcgaatcagggtcaacattgaaaaagttcctggaggagtctgtatcaatgagccctgaagagagagccaaattcctggagaactatgacgctattcgagttactcatgaaaccagtgcacatgaaggtcagactgaggcaccaagtatagatgaaaaagtagatcttcattttattgcgttagtacatgtagatgggcatctctatgaattagatggacggaaaccatttccaattaaccatgggaaaactagcgatgagacgttgttagaggatgtcataaaagtttgcaagaagttcatggaacgtgaccctgatgagttaagatttaatgcaattgctctctcggcagcatagcatcttgacagaaacaccaaatactgtattatttgcaacaaaagttaaatttctgatgccataactaactcaaaatttttaatattttcattaacttgactaattaaactttatgtggaaacaaacaaacaaacaaacaaggcaaaagaaactgttgtagaaggaatgttctagtacaagaatagcccagcagtggtgg

SEQ ID NO: 2513 - DNA, 1326 bp, Mus musculus
gagctcttttttttttttttttttttttctgtccaaagtttccatctgtccgttctggaagctgtatctttcaaagctaaaatccagatgtttgactcactgttttgaaattaggatggcatgaggaagagccaggtcctgtgactaattttcctgattctgagtcttcgaaggtttgtcctggacacattccagagaatttcgtacccaaacatggatgcacagtccagcttactactgatacaggcctgagcactgctgagggagaggcccttcctcttggtggccagcggtcccagtccaccagggaagggaggtttgattggtttctttgacccatacagagttagtggacttgctctggaactctagcctagcccagcccagtcgtagtgtcccctcccccccctcccccatctcacacagctttaaaaccgtactacttttatttagaaacaaacaggatggcagagaggacacctcccccgcattcctgggggtgggcaggaaacttaggtcaggcctgagagcgggtccggctgtttccctagagtacttactgtgggtaggctgcctgtgctcatttgcccaatgcctgtgggccaggttgcctgtctcagtactgagactctagacttaggagaatcctctcccaggagtagctagttctacgtcccttgtgactcaagacactgcctggtcatctgctccagtggcagacctgacttacaatgtctaccctagtatgtgggtagaaggatctttctgttcccccattgcacactggagaagccctgggtaccgagtgtggggaccccatggacagtaccataaggctccctgctgagccactatgcattgtggggtcagagctcctgtccctccttggtgactgggaatccctgctgtggttttgttggacaggcccaggtgactgcttcccatccaaagccatcggtggaacttctgggggatcctttgccaaaaccccaaggcaaaatccaaggtccaaggccatttccagcagcttcccagttccctttcccataggaacttttttgttgaaacctagctcccaacatgcttccaaaggccatgttccgtctttcctggatcactacagtgaagtattacagttgtacagtttcccaatctggccttggcttgctcggataaaactttgttatgtattttgtaaggcatagattctatattgtaatgtcctatgcaaaagaaaaaaaattaatgaaattgtaaattttattgttttaacatgtatgcatgtttagtgacgtttacattttgaaataaaatttatgattcatc

SEQ ID NO: 2514 - DNA, 3135 bp, Mus musculus
ctgagtgtgcgagagacagcctggcaggagagcgctcaggcagacagacagacagacggacggacttggccaacccggtcggccgcggactccggactgttcatccgtttgtcttcattttctcaccaactgcttggatccagcgcccgcggctcctgcaccggtattttggggagcatttggagagtcccttctcccgccttccacggagaagaagctcacaagtccgggcgctgctgacagcatcgagagcggctcccgaccgcgcgaggaaataggcgagcggctaccggccagcaactttcctgacccagaggaccggtaacaagtggccgggagcgaacttttgcaaatctcttctgcgccttaaggctgccaccgagactgtaaagaaaagggagaagaggaacctatactcataccagttcgcacaggcggctgaagttgggcgagcgctagccgcggctgcctagcgtccccctccccctcacagcggaggaggggacagttgttggaggccgggcggcagagcccgatcgcgggcttccaccgagaattccgtgacgactggtcagcaccgccggagagccgctgttgctgggactggtctgcgggctccaaggaaccgctgctccccgagagcgctccgtgagtgaccgcgacttttcaaagctcggcatcgcgcgggagcctaccaacgtgagtgctagcggagtcttaaccctgcgctccctggagcgaactggggaggagggctcagggggaagcactgccgtctggagcgcacgctcctaaacaaactttgttacagaagcagggacgcgcgggtatccccccgcttcccggcgcgctgttgcggccccgaaacttctgcgcacagcccaggctaaccccgcgtgaagtgacggaccgttctatgactgcaaagatggaaacgaccttctacgacgatgccctcaacgcctcgttcctccagtccgagagcggtgcctacggctacagtaaccctaagatcctaaaacagagcatgaccttgaacctggccgacccggtgggcagtctgaagccgcacctccgcgccaagaactcggaccttctcacgtcgcccgacgtcgggctgctcaagctggcgtcgccggagctggagcgcctgatcatccagtccagcaatgggcacatcaccactacaccgacccccacccagttcttgtgccccaagaacgtgaccgacgagcaggagggcttcgccgagggcttcgtgcgcgccctggctgaactgcatagccagaacacgcttcccagtgtcacctccgcggcacagccggtcagcggggcgggcatggtggctcccgcggtggcctcagtagcaggcgctggcggcggtggtggctacagcgccagcctgcacagtgagcctccggtctacgccaacctcagcaacttcaacccgggtgcgctgagcagcggcggtggggcgccctcctatggcgcggccgggctggcctttccctcgcagccgcagcagcagcagcagccgcctcagccgccgcaccacttgccccaacagatcccggtgcagcacccgcggctgcaagccctgaaggaagagccgcagaccgtgccggagatgccgggagagacgccgcccctgtcccctatcgacatggagtctcaggagcggatcaaggcagagaggaagcgcatgaggaaccgcattgccgcctccaagtgccggaaaaggaagctggagcggatcgctcggctagaggaaaaagtgaaaaccttgaaagcgcaaaactccgagctggcatccacggccaacatgctcagggaacaggtggcacagcttaagcagaaagtcatgaaccacgttaacagtgggtgccaactcatgctaacgcagcagttgcaaacgttttgagaacagactgtcagggctgaggggcaatggaagaaaaaaaataacagagacaaacttgagaacttgactggttgcgacagagaaaaaaaaagtgtccgagtactgaagccaagggtacacaagatggactgggttgcgacctgacggcgcccccagtgtgctggagtgggaaggacgtggcgcgcctggctttggcgtggagccagagagcagcggcctattggccggcagactttgcggacgggctgtgcccgcgcgcgaccagaacgatggacttttcgttaacattgaccaagaactgcatggacctaacattcgatctcattcagtattaaaggggggtgggaggggttacaaactgcaatagagactgtagattgcttctgtagtgctccttaacacaaagcagggagggctgggaagggggggaggcttgtaagtgccaggctagactgcagatgaactcccctggcctgcctctctcaactgtgtatgtacatatatatttttttttaatttgatgaaagctgattactgtcaataaacagcttcctgcctttgtaagttattccatgtttgtttgtttgggtgtcctgcccagtgtttgtaaataagagatttgaagcattctgagtttaccatttgtaataaagtatataatttttttatgttttgtttctgaaaatttccagaaaggatatttaagaaaatacaataaactattgaaaagtagcccccaacctctttgctgcattatccatagataatgatagctagatgaagtgacagctgagtgcccccaatatactagggtgaaagctgtgtcccctgtctgatttgtaggaatagataccctgcatgctatcattggctcatactctctcccccggcaacacacaagtccagactgtacaccagaagatggtgtggtgtttcttaaggctggaagaagggctgttgcaaggggagagggtcagcccgctggaaagcagacactttggttgaaagctgtatgaagtggcatgtgctgtgatcatttataatcataggaaagatttagtaattagctgttgattctcaaagcagggacccatggaagtttttaacaaaaggtgtctccttccaactttgaatctgacaactcctagaaaaagatgacctttgcttgtgcatatttataatagcgttcgttatcacaataaatgtattcaaat

SEQ ID NO: 2515 - DNA, 2190 bp, Mus musculus
aggagcctgagcggattcggagcctgagccccagaccaccgcagtcctcaggatgctgactgcccgactcttgctgccccggctcctctgcctccagggcaggactacctcttactctacagcagctgctctcccgaacccaatcccaaacccagagatttgctacaacaagctgttcatcaacaacgagtggcatgatgcggtcagcaaaaagaccttccccacagtgaaccccactacaggtgaggtcattgggcatgtggccgaaggtgaccgggcagatgtggatctggctgtaaaagcagcccgagaagccttccgcctggggtccccatggcgcaggatggatgcctcagagcggggccggctgctgaaccgcctagctgatcttgtggaacgagatcgagtgtacttggcctcactggagacgctagataacgggaaacctttccaggagtcttatgtcttggatctggatgaagtcatcaaggtgtaccgttacttcgctggctgggctgacaagtggcatggtaagaccatccctatggatggtgagcatttctgcttcacccgacatgagccagtgggtgtctgtggccagataatcccttggaacttcccactggtcatgcagggctggaagctggccccggcactcgccacgggcaacactgtggtcatgaaggtggcagagcagaccccactctctgctctgtacttggcctccctcatcaaagaggcggggtttcccccaggagtggtgaacatcatcactggctacggccccacggcgggagctgccatcgctcagcacatggatgtggataaagtcgccttcacgggctccactgaggtaggccacctgattcagaaggcagctggcgagtctaacctcaagagagtcaccctggagctgggtgggaagagccccagcattgtgctggcagacgctgacatggagcatgccgtagatcagtgtcacgaagcccttttcttcaacatgggccagtgctgctgtgcaggctcccggacattcgtggaagagtccatctaccgtgagtttctcgagagaactgtggagaaggccaagcagaggaaagtggggaacccctttgagttggacacccagcagggacctcaggtggacaaggagcagtttgaacgaatcctgggctacatccggctgggacagaaggaaggggcaaagcttctctgtggcggggagcgtttgggggagcgcggcttcttcatcaaacccacagtcttcggggacgttcaggatggcatgaggatcgccaaggaggagatctttgggcccgtgcagcctctgttcaagttcaagaagatcgaggaagtaatccagagagccaacaacaccaggtatggcctggctgcggctgtgttcacccgagacctggacaaggccatctacttcacgcaggccctgcaagctgggacggtgtgggtgaacacctataacattgtcacctgccacacgccattcggaggctttaaggaatctggcaatggcagggagctgggggaggacgggctcagagcctacacggaggtgaagactgtcaccatcaaggttcccgagaagaattcctgagattggccatcttggaggcccagccctgtcctgcagctccgtgacatctagccagtggagggcaaaatctgatttcagcctgagttcccagtgaagtgttacaagaagtgtcaaccaataaagtagtccagccagagcttttctacttaaagcagagacggtggctgggcccagagtgcagcccatttcatccctcggtcccacctctctgatgagttatagccaagaagccttaggagtctccataaggcatattcaaaaccactgactggccataaaaaggagtgatgggctgatcccggggccacagggatcctcaaaaacagaacgatcagtgaaggacgccggccccacatcgatcagtgtttggctgggacccgggggaggggaatggggaaggaccactcgtggatgtggggctcctcttgggggaggttttgaaaatgttgtggaattgggcaatggacacagttggacaactttgcagtcatactgatttactatcaaattatgcacttaattaaggtatgggaattaatttcacttgaaaattaaaataagctcagtgtcctatttgc

SEQ ID NO: 2516 - DNA, 1400 bp, Mus musculus
  misc_feature 2: n = A,T,C or G
gncagaggagctccgcacagcgactgggcaaggctgtgcgcttgcgcggctcgggtaccctcccggaaccgtctcagcagagatagacagaagaaatggccctggtaccctatgaggagagcgcggcaatagggctccagaaattccataagcctctcgccaccttctcttttgcgaaccacaccatccagatccgtcaggactggaggcaactgggagttgctgcagtggtgtgggatgcggctgtcgtcctttccatgtatctggagatgggtgctgtggagctcaggggctgctctgctgtggagctgggtgctggcacagggctggtgggcatagtggctgccctgctgggtgctcaggtgactatcacggatcggaaagtagcattagagtttcttaagtcaaacgttgaagccaacttacctccccatatccaacctaaggctgttgttaaggagctgacttggggacaaaatttggaaagtttttcacctggagaatttgatctcatacttggagctgatgtcatatacttagaagataccttcacagaccttcttcaaacactgggacatctctgtagcaacaattctgtgattcttttagcttgccgaatccgctatgaacgggatagtaacttcttaacaatgctggagaggcaattcactgtgagtaaggttcactacgatcctgagaaggacgtacacatttacaaagcacagaagagaaaccagagggaggacttgtagcgggcagtattttctaagaagtgaatgtaccaggtaaggtctaacagctagaactcttagccatgttaatgacgtggctgactgcaagtcagtccgcttagagctgctcaaggaacaaagcacatgtgtactttgtagtcggtgccttgcctcatagcgtgtaactgtcagccagattggctcacttctgcaagtggacttgtgaggtctggctggtgtttcgctcttatcctgtgtgctcactgggtaagcagtccccactgatggagactggtgacctggagagtcagtcagacattctgggatggattttgtctcagtttccttgtctgctgagtgtaaacagatttattacatatataccctgaaatgtgtgtactgttggagtctcttgtgtttagtcttttttgtgtcggccgtgggctggtctgaacccgcaggccaggctgacctcaagcttgcagtgactgtcttccctctgccgccaactgctgggattacaggtgtgtgccatgccacctggctgactgtttagttcttaagccccttgagatgaagatgagttctctgggtctcgtgtcatacctttttaccagatttcaggagcaagtgtataagcaatgaaataaaaataaaattttacattgg

SEQ ID NO: 2517 - DNA, 1800 bp, Mus musculus
gacagcgtctccgcctccgccggcggagaccccaaggtatcgagactgcgggacccactgcccgcaggacatcgagtcacgatgttcacgagggagaccaagtggaacatctcattcgctggctgcggcttcctcggggtctaccacattggcgtggcctcctgcctccgtgagcacgcgcccttcctggtggccaacgccactcacatctacggagcctcggcaggggcgctcaccgccacagcgctggtcactggggcctgcctgggtgaagcaggtgccaacattattgaggtgtccaaggaggcccggaagcggttcctgggtcctctgcatccctccttcaacctggtgaagaccatccgtggctgtctactaaagaccctgcctgctgattgccatgagcgcgccaatggacgcctgggcatctccctgactcgtgtttcagacggagagaacgtcatcatatcccactttagctccaaggatgagctcatccaggccaatgtctgcagcacatttatcccggtgtactgtggcctcattcctcctaccctccaaggggtgcgctatgtggatggcggcatttcagacaacttgccactttatgagctgaagaataccatcacagtgtccccattctcaggcgagagtgacatctgccctcaggacagctccaccaacatccacgagcttcgcgtcaccaacaccagcatccagttcaaccttcgcaatctctaccgcctctcgaaggctctcttcccgccagagcccatggtcctccgagagatgtgcaaacagggctacagagatggacttcgattccttaggaggaatgccctgctggaggcctgtgtggaaccaaaggacctgatgaccaccctttccaacatgctaccagtgcgcctggcaacggccatgatggtgccctatactctgccgctggagagtgcagtgtccttcaccatccgcttgttggagtggctgcctgatgtccctgaagatatccggtggatgaaagagcagacgggtagcatctgccagtatctggtgatgagggccaagaggaaattgggtgaccatctgccttccagactgtctgagcaggtggaactgcgacgtgcccagtctctgccctctgtgccactgtcttgcgccacctacagtgaggccctacccaactgggtacgaaacaacctctcactgggggacgcgctggccaagtgggaagaatgccagcgtcagctactgctgggtctcttctgcaccaatgtggccttcccgccggatgccttgcgcatgcgcgcacctgccagccccactgccgcagatcctgccaccccacaggatccacctggcctcccgccttgctgagaatcaccattcccacatcgcccggctaccagccaagctccaagttgtcctgccccactaagaggagccccggggtggaacaagatcctgtctgccccggctctcccccttacatgctgtggaatgaggacataggaccctgcacagctgcaagtgggctttcgatgtgaaacctttcaccagccactcactatgctactcctggtggggagggatggggagtcgccctcccccggagcccacagagccctcccccgtcacgtcacctgtgccttactcctgcccaccaccttttcagtgcagggtcagtcttaagaactccacatctgctgctgctccctggtgtccaagtttccttgcagagtgtgtgaagaattatttatttttgccaaagcagatctaataaaagccacagctcagcttctg

SEQ ID NO: 2518 - DNA, 2531 bp, Mus musculus
cgacagcaacggcgcccccggaggatgcggtggagtttgtgctttgctgcatccgtcactgaagaacaaaataagagtaaaggagacaagctgcagagcatgggaggctgtggggtcttctgaaacctttgctgggctttccgcggagcatgagcttttaaaacgaattcttttcaaagaaacccatttgtgtagctggaaaaatgatacacatgctaaatgcagcagcctatcgggtgaaatggaccagatccggtgctgctaaaagggctgcctgcctggtggctgcggcatatgctctgaaaaccctctatcccatcattggcaagcgtttaaagcagcctggccacaggaaggcaaaagcagaagcttactcgcctgcagagaacagagaaatactgcattgcacggagatcatctgtaaaaaacctgcgccgggactaaatgcagcttttttcaaacagctactagaacttcggaaaatcctctttccaaaacttgtgaccactgaaacggggtggctctgcctccactcggtggctctaatctcaagaacatttctctctatttatgtggctggtctggatgggaaaatcgtgaaaagcatcgtggaaaagaagcctcggactttcatcatcaaattaatcaagtggcttatgattgctatccctgctacctttgtcaacagtgctatcaggtacctggaatgcaaactggcattggcctttagaactcgcttagtagaccatgcctatgagacctatttcgcaaatcagacttattataaggtgataaatatggatgggaggctggcaaaccctgaccagtctcttaccgaagacattatgatgttctcgcaatctgtggctcacctgtattccaaccttaccaaacctattttagatgtcattctaacctcctatactctcatccggacagctacatccagaggagcaagccctatagggcccaccctgttagcaggacttgtcgtgtatgccactgctaaagtactgaaagcttgctcgcccaaatttggttcgctggtggctgaagaagcccacaggaaaggctacctgcggtatgtccactcccgaatcatagccaatgtagaagaaattgccttctacagaggacataaggtagaaatgaagcagctgcagaaatgttacaaggctttagcttaccagatgaacctgattttatccaaacgtttatggtacatcatgatagaacaattcttgatgaagtatgtgtggagcagctgtggactaattatggtggctatacccattatcactgcaacgggctttgcagatggtgatctggaggatggtccaaagcaggctatggttagcgatcggacagaggccttcaccactgcccggaacttactggcctctggagctgatgcaattgaaaggattatgtcttcatacaaagagatcactgaactagcaggttatactgctagagtatacaatatgttctgggtcttcgatgaagtgaagagaggcatttataagagaactgtcactcaggaacctgaaaaccatagcaagcgtggaggtaacctggaactacccctcagcgacaccctggccatcaaaggaacagttattgatgtggatcatggaatcatttgtgaaaatgttcccataattacaccagcgggcgaagtggtggcttccaggctaaacttcaaagtggaagaagggatgcatctcttgataactggtcccaacggttgtgggaaaagctctctcttcagaatcttaagcgggctgtggcctgtgtatgaaggagtcctttataaaccgcctccccaacatatgttctatattccacagaggccatacatgtctcttggaagtctccgggatcaagtcatttaccctgactcagcggatgacatgcgtgagaaaggttacactgaccaagacctagaacgcatcctgcacagcgtgcacctctaccacatagttcaaagagaaggaggatgggatgcagtcatggactggaaagatgtcctttccggaggggagaagcagagaatgggcatggcgcggatgttttaccataaaccgaagtatgcattgctggatgaatgtaccagtgccgtgagcatcgacgttgaaggaaagatatttcaggctgctattggggctgggatttccctactctccataacacacaggccttctctgtggaaataccacactcatctattacaattcgatggcgaaggaggctggcgctttgaacagttggacactgctatccgtttaacgttgagtgaggaaaagcaaaagttggagtcgcagctcgctggaattcccaaaatgcaacagagactcaacgaactatgcaaaattctgggggaagactcggtgctgaaaacaatccaaactccagaaaagacatcctaatttatcttgacatgttttcagttaccttctaggtgaagcctcagagactctctctttactgcatgcagtatgttaagctaagtgcagagaaagcaagccggc

SEQ ID NO: 2519 - DNA, 825 bp, Mus musculus
gaggaatacaagagcgaggctccctcgcctcatcatagcaggggtcggcagaggccggcagccctgggctcagtgcagcggagagcgtgcccgcggtcagcagcagcccccagagccaggtgggcatggccgtggccgctgccctgggactctgcataatcctgatggtccgaggagggactggccaggaggtcctgggtccgcgtccaaacctgcagcaacctcctggaaacgcgcagctccgctccaactgccgctgccgatcggcgcaggagaccaagggccctgcagctccgctaccagcctgaggacagttttgccgaacctaatttgaaagcagagataagcggtcttgctgactccaggatgacttagcaatcaagcatatggccagaagacaatgctagaactgggtcaaggaacatcttaggaatgtcaggcgccagacgtgaacaatgaagcccagggaatctggagcatgtggcacttagaataggtctgctaagctgctctacgtcatggaaggttgtgcaagagacagaggagtgtcagatagtagatagataggcggaggggaggctgaagcccagagaatggccaggaggccgtagataggacacatgcaaacacagcagctaagggtcagagcaatggtctttgccctcaaagatctaccaagctaggccagcttgtcaatacatggttaatattgacttgtttggcatagattatcagtacattatgttctccatcaagtcagtttgtgcaatctcatgtagtctcagctggccttcaattcactatgtatctgatgaccttgaaccc

SEQ ID NO: 2520 - DNA, 4286 bp, Mus musculus
ttgaaatctcacagcccggttggttgcagtgacccacttcgttgaacatattcttcctaatcctagtactttcaatttgctctattccctggtgtctatgcatttaaatcgactatggggccattcttccttgaaccaccacagaagacattagctctctgggatccttgttaattttttctcctcttacatagcacctacgcttggaacatatgccagacacatctgtgagacaccccttgccgctgcagctcatggatggatgctgagttcccccacgcaccacacttcagcaggtgggtgtatttctgcttcacattatactcccacacggccatgcatgtcaggcatggagcaggctcataacccacttaattaaggtgatcatatcagatcctttatcaagatgcatagagtgctcagtgcctgtactatgatctcggatctttgggagatgggctagatagagtctgggacagaatacagcagagaaaccgatatgtttattgtccgatcatcagctaagcttctgggagctaggaatggggctccttggatgaacagaagtaaaaatgcctcgtctttatgactttcaacttccctcagcaggtctggaatgggtgaacaaacactgcctgcgtgggtgataaatagcctctttttgctgcttgtttgctgcttttatggttctgggagggaacctagaacctagcacatgctagacaagtcctctagcactgagctatctccccagcttggatgaaatatctgtaaagtactggtgcccgtgtgtaaaatatgcaccattaagtgttcaagaagaaaagactgggcatttctgttccaccaagacaagaagaatctgccagcagaatgtttgcgcagtcatttgagcaaaggggtccaagggacagtaccctccagtgctggggacccatgtgccgagcctcaggctgtgatgtggtgttgtttttaattctctcttttcccataggatcatggcatgtcaacttgacttgctcataggtgtgatcttcatggccagccccgtgttggtaatatctccctgttcttcagacggcaggatagcctttttccgaggctgtaacctcacccagattccctggatcctcaatactaccactgagaggctcctgctcagcttcaactatatcagtatggtggttgccacatcatttccactcctggagcggctccagttgctggagctggggacccagtatgctaacttgaccattggtccaggggctttcagaaacctgcccaatcttaggatcttggacttgggccaaagccagatcgaagtcttgaatcgagatgcctttcaaggtctgccccatctcttggaacttcggctgttttcctgtggactctccagtgctgtgttaagtgacggttacttcagaaatctatattcattagctcgcttagacctatctggcaaccagattcacagcctccgcctccattcttcattccgggaactgaattccttaagcgacgtaaattttgctttcaaccaaatattcactatatgtgaagatgaactcgagcctctgcagggcaaaacactgtctttctttggcctcaaattaactaagctgttcagcagagtctctgtgggctgggagacatgcaggaaccccttcagaggcgtgaggctagaaactctagatctttctgaaaatggctggacggtggacatcacaaggaacttcagcaacatcatccagggaagccagatttcctctttgattcttaaacaccacatcatgggtcctggctttggcttccagaacatcagagatcctgaccagagcacatttgccagcctggccagaagttcggtgctgcaactggacctttcgcacggctttatcttctccttgaatcctcgactgtttgggacactgaaggatttgaagatgctgaaccttgccttcaacaagataaacaagattggagagaatgccttttatgggcttgacagcctccaggttctcaatctatcctataatcttttgggggaactctataattccaacttctatgggcttcctagagtagcctacgttgaccttcaaaggaaccacattgggatcattcaagaccaaacattcagattattaaaaacgttacaaaccttagatctccgtgacaatgctcttaaggccattggttttattccaagcatacagatggtcctcctgggaggcaataagctggtccatttgccacacatccactttactgccaacttcctagagttatctgaaaacaggctagaaaacctgtccgacctctacttcctcctgcgagtcccccagctccagtttctcatcttgaatcagaatcgcctttcgtcatgcaaggcagcccacactccctcggagaacccaagcttagaacagcttttccttacagagaatatgctgcagctggcctgggagaccggcctctgttgggatgtttttcaaggcctttcccgcctccagattctttacctgagtaataactaccttaatttccttccacctgggatatttaacgacctggttgcattacggatgcttagtcttagtgctaacaagctgaccgtgctctctccgggcagtttacctgctaatttagagattctcgacatatctagaaatcagcttttgtgtcctgaccctgctttgttttcttcgcttcgtgttttggacataactcataacgagttcgtctgcaactgtgaacttagcacttttatctcctggctcaaccaaaccaacgtcaccctgttcggctctcctgcagacgtgtattgcatgtaccctaactcactgctagggggctccctctacaacatatccaccgaagactgcgatgaagaggaagccatgcggtccctaaagttttcccttttcatcctgtgcacggtcactttgactctattcctcgtcatcacccttgtagtcataaagttccggggaatctgtttcctgtgctataagaccatccagaagctggtgttcaaggacaaggtctggagtttggaacctggtgcatatagatatgatgcctacttctgcttcagcagcaaagactttgaatgggcacagaatgctttgctcaaacacctggatgctcactacagttcccgaaacaggctcaggctatgctttgaagaaagagacttcattccgggggaaaaccatatctccaacatccaggcggctgtctggggcagcaggaagacggtgtgtctagtgagcagacacttcctgaaggatggttggtgcctggaggccttcaggtatgcccagagccggagtctgtctgacctcaagagcattctcatcgtggtggtggtgggatcgctgtcccagtatcagctgatgagacatgagaccatcagagggtttctgcaaaagcaacagtacttgaggtggcctgaagacctccaggatgttggctggtttctcgataaactctccggatgcattctaaaggaagaaaaaggaaagaaaagaagcagttccatccagttgcgaaccatagcaaccatttcctagcaggagcgcctcctagcagaagtgcaagcatcgtagataactctccacgctttatccgcacagccgctgggggtccttccctggagtcatttttctgacaatgaaaacaacaccaatctcttgatttttcatgtcaacagggagctttgtcttcactgttttccaaatggaaagtaagaggtccagaaagctgcctctaagggctctcacctgccattgatgtcctttcaggcccaatgacatggtttccctccatcctattgcgtactgtctgctacccaggtggcaagagcaccttgggagaagttacaggcagcttcatgctttctgtgctgttcagttcaaaagcaggtgccttgagaatcctgaattcaagcactctgtagaacatggacagacaagatgggtccttctctggccataggcatgagggccagttgctgaggactgctctcactacacctaagtgcacaagtgataagaagttggacagatagacagatagcagcagtcccattgctgtagccagaatgcacttatttcctgttctgaccctgcaggcccagcttttggggaccacagccatgttctgcacgggacctctcaacctggcattcatgccctttcacgacttagcaccggcctgcccttctttcttccccacaactatacaagagctgttgcaaccactgaaaaaaaaaaaaaaaa

SEQ ID NO: 2521 - DNA, 1069 bp, Mus musculus
gagcttccttgcctcctgagtctttgctgtgccaaagccctgaaatatcatatctggccatcagacactggtaagttggaggtgtgaacttgtttggctctccctgcctgcagtgacaccagagacctggacaccagtgacctccctcagaagggcgtctcctgcacgtgaggagcatgtccattttcacatccttccttctgctgtgtgtggtgacagtggtttatgcagagaccttaaccgaaggtgttcaaaattcctgccctgtggttacctgcagttctccaggcctgaatggcttcccaggcaaagatggacgtgacggtgccaagggagaaaagggagaaccaggtcaagggctcagaggcttgcaaggccctcctggaaaagtaggacctacaggacccccagggaatccggggttaaaaggagcagtgggaccgaaaggagaccgtggggacagagcagaatttgatactagcgaaattgattcagaaattgcagccctacgatcagagctgagagccctgagaaactgggtgctcttctctctgagtgaaaaagttggaaagaagtattttgtgagcagtgttaaaaagatgagccttgacagagtgaaggccctgtgctccgaattccagggctctgtggccactcccaggaatgctgaggaaaactcggccatccagaaagtggccaaagatattgcctacttgggcatcacagatgtgagggttgaaggcagttttgaggatctgacaggaaacagagtgcgctatactaattggaatgatggggagcccaacaacacgggcgatggggaagactgtgtggtgatcttgggaaatggcaagtggaacgatgtcccctgctctgactcttttttggcaatctgtgaattctctgactgagggtgcttgtttctcagccctccttgattctttagggtactcctgacgtccgcagtttgttctgaaaaataaaatatgggaaaatataaacaattcaacattggttacccaatgcattctcttgtgaaggtgtagaaataaagtgagtttagttttca

SEQ ID NO: 2522 - DNA, 1574 bp, Mus musculus
aggtcgagatggaggcgacgctgaaccttgagccctcgggccgcagctgctgggacgaaccgctgagcatcgccgtgcgcggcctggccccggagcagcccgtcacgctgcgctctgtcctgcgcgacgagaagggcgcgctcttccgagcccacgcgcgctaccgcgcggactcccacggcgagctggacctggcgcgcacgcccgcgctgggcggcagcttctcggggctcgagcccatggggctgctctgggccatggagcccgatcggcctttttggcgattggtcaagcgcgacgtgcagacgcccttcgtggtggagctggaggtgctggacggacacgagcccgacggcgggcagcggcttgcacatgcggtgcacgagcgtcacttcttggctccgggggtgcggcgcgtgcccgtacgagagggccgggtgcgcgccacgctcttcctgcccccagaacctggaccctttcctgggatcatagacctttttggagttggaggtggccttctggagtatcgggcgagcctgctggctgggaagggctttgccgtcatggctctggcttattacaactacgatgacctccccaagaacatggaaaccatgcacatggagtactttgaagaagccgtgaactacctgcgcagccaccccgaggtaaaaggacctggaattgggctgcttgggatttccaaagggggtgaacttggccttgctatggcctccttcctgaagggcatcacagctgctgtggtcatcaatggctccgtggctgctgttgggaacaccatctcctacaaggatgagactataccccctgtgactatcctgagaaatcaggtcaaaatgaccaaggatggcctcaaggatgttgtagatgctttgcaaagccctctggtagacaagaagagcttcattcccgtggaaaggtctgacacgaccttcctgttcctcgtaggtcaggacgaccacaactggaagagcgagttctatgctgatgagatctccaaacgcctgcaggcgcacgggaaggagaagccccagatcatctgctacccagcagcagggcattacatcgagcccccttacttcccgctgtgcagcgctggcatgcacctcctggtgggtgccaacatcacctttggaggggagcccaagcctcatgccatggcccagttggatgcatggcagcagctccagactttcttccacaaacagttgggtagtgagtgtttgcatgtgtctcctaaaatataacctattatatgatggtttggaggttggggaaaggtacaaatacattgtaagaatatcatttcagatgacttcatctgaacataaaactgctttagatttacatttaaaaaaattgatataattatcaaaatagtgctgattcaagggctgggaatggagtttcattgtcaagtccttgactggcgcatgcaggatcctgggttcaatccagctgcgagaaataaagcacgttctatggaaactggagctatccaagaaaagtgccaggaataaaaaggaaccatgattaaaaaaaaaaaaaaaaaa

SEQ ID NO: 2523 - DNA, 316 bp, Mus musculus
ggaggaaagcagtggcaacctcagcgttgatgttcagtcctgggtttcagcttcctcttctactgcctgtatctatttccctcttctactgactgtgtctattccttactcacaaacaagcagccacattgacctgagcaattatgtacaaagaaccattcagaacaaaagcccagacccacaggagatgctgcttgggagaacatgaacccacggctgcctgaagttctccgctcccagccctaccctttccttctcctccatgtggattgtataagcaagaccagaactttaaaactagactatgtgaagcctc

SEQ ID NO: 2524 - DNA, 1749 bp, Mus musculus
gggccgggccaggctgctggcctcacctggcgagtgttgagagcggggtgcggcagccgctgcggcggcggggcgggggcatggaccaggcctgccagcgcgccgggtcccggcgagtgcgccccgccgcccagtgagcgccacggcggcggcgggggccggggccgacccctgccacccggagcccaaggagaacagggcaaaggggtttcctgagatgactctgctgccaaagaagccctgcaagtccaaggccaaggggttactgccgggagctctcttcaccagtttcctattgctgctgtactcctatgtggtacctccactgtatcccaacatggccttcacgacctcagaggctgcagcaccctgctcccctattcccaatgagccagtggcagccactcccgccaacggctcagcaggagggtgtcaacctcggcgagatattgtgttcatgaagacgcacaagaccgccagcagcacactgctcaacatcctgttccgcttcggccagaagcacgagctcaagttcgctttccccaatggccgaaacgacttccactacccgtcgtactttgcacgaagcctggtgcaggactaccggcctggggcgtgcttcaacatcatctgcaaccacatgcgcttccactatgaggaagtgcgcgggctggtgcggccgggtgccaccttcatcaccgtcatccgcgaccctgctcgtctcttcgagtcttccttccactactttggatccgtggtgccgctcacctggaagctgtcgagccgcgacaagctggccgagttcctgcaggaccccgatcgctactacgacccgagcagctacaacgcgcactacctccgcaacctgctcttcttcgatctgggctatgatagtagcctggacccggccagcccgcgcgtgcaggagcacatcctggaggtggagcgccgcttccacttggtgctactgcaggagtacttcgacgaatccctggtgctgctccaagagctgctgtgctgggacctgaaggacgtgctgtatttcaagctcaatgcgcggcgcgactcgccggttccgcggctctctggcgagctgtaccgccgagccaccgcctggaacctgctggacgtgcgcctctaccgtcatttcaacgccagcttctggcgaaaggtggaagctttcgggcgtgagcgcatggcgcgcgaggtagccgagttgcgccaagcgaacgagcacatgcgccacatttgcatagatggcggccaagcagttggtgctgaggccatccaggactcggccatgcagccctggcaacccctgggcatcaagtccatcctgggttacaacctcaagaagagcatcgggccacaacacgagcagctctgccggggcatgctcacgcccgaaatccagtacctgtctgacctcggtgccaatctctgggtcaccaagctctggaagttccttagggactttttaaggtggtgatgtatcctgcccacctcctgtttggcttcctgatgcagcaaggccgggcagggagcctctggcacctagccttccctagccacacctagtgccaccctggggtccctagggtcatagctgtctgggactagtctctctgcaggagagagcctaacggagaggtatttaactaattatgccattttttttttattaaatcccctttatttccagcctcctcttacaaggggagacgcagaagtaaagaaattttatgtgtg

SEQ ID NO: 2525 - DNA, 1491 bp, Mus musculus
actggcagcggcggcactcgcgccctgcgccacttgcacccgatggcggtcccgcagcgacagacccccgccccgcgcgcaggccgggcccgtaccctcttggctcggcatctcctccagggccaccaagcacctctgaagagccatgttccaagctgccggagccgcccaggccaccccctctcatgaagccaaaggcagcagtggcagcagcacggtacagcggtctaagtcctttagcttgcgggctcaggtgaaggagacctgtgcagcctgccagaagactgtgtacccgatggagcggctggtggcagacaagctcattttccacaactcttgtttctgttgcaaacactgccacaccaaactcagcctgggcagttatgctgcaatgcacggtgaattttactgcagacctcactttcagcagctgtttaagagtaaaggcaactacgatgaagggtttggtcgtaaacagcacaaggagctctgggcccacaaggaggtggactcaggcaccaagacggcctgagacccctttaacacccattccctcccagcacatggcctcccgctgggcagtggaaaggagattaacccgggggcgcggggtgggagaggatgaggctccctcacacaggtttcaggcataaggctctgctccaggattccttacttttcccatgggaggttggcgttgggaaccagaattggaattttcaccatactgtgtcctttagtccacctcatctcaccccacggctccctgggaggcccacaagcccagcttccctacttaggtgccttttctccagcaaggagtcagcatgccctcctcagggtcccaagctccctcactgccacctgggccttgtgtacccccttgtctccccatctacctctgccccttagcctggtaatgagccacagagactggaagagggagagtgccatctactgggcctcatagatgccacctcgctgaggggggagggctggggaagaggcaagacagcctgcagccttcagggtctgggggtcccttgcaccacaaagctaaagctcttgctagagcctcagctgacagggtcggcagtagctatgctcctccatctgttgtgctgttctgttgtgatcaaccctcttttaaaaacatttaaacagctcttgactctcttgtgtggcctgaatggggatgctttgtggcaggcatgcagcagactcctcatagcgaggggaatggaggacagcccacaatactcctggccttaaaggggctggtggtctgtgccaccttggggtgttaagctgtcaaacctgaaatcccactgtgtatcctcgtcccagagtagccaggcacactggcttgcaaccacacaaatgttttgggtttttgagacagggtctcactgtagctctgattggcctagaacacagagatctgcctgcctctgcttccaaagtgctgggattaaaaaggcctgtgtcacc

SEQ ID NO: 2526 - DNA, 2016 bp, Mus musculus
gcttacccgccctgctccgcgcggcatacacggaagtgtcttcttcattctgacaatccgggcgtttgtgatcgcgtctcgccagttggcgattactacacagaatgaaaggaatgcgagggccgggggagagccgagacaccgccatggccgtggagcaggacatatttgacgccgtcgtgatggcggatgagagattccatggggagggatatcaggaaggctatgaagaaggcagtagcttggggatcgttgaaggaaagcggtatggcatggtacatggagccaagattgggtctgagattggatgctaccggggttttgctcttgcatggaagtgtctcctacacagtggcgctggtggaaaagacagcaggaagatgaaggtggtggaggctctgattgcgctgctgcaggactttccttacgatgatcccacttatgagaagctccatgaagacctggacagaatcagagggaagttcaggcagctgtgctcactgctcaacgtgcagccagacttcaaggtgactccaggaggctctggacttgcgttttgaggacccacagaagagcagatgtctgcacattaagtgtcacagtgattaaaggcaagcctgagaggaatccattgttctgtgggaggaccagcttggcctcttccctgagtctctgcctaggtggcttacctgaccaccctgccttctgcacaggggcaacacactcaaaagaccgcttgtcactggccagagtgagtggccctgggtagggttaccctgagggtgggactcacagaggcaggccgatgtgaaatgggtcatgggaagccgtgataagatctttgctgcctgctgagcctctgctggccatgcttgggcctccttgtttcactccatccctctggcagccccagaggtggaggataccttatggcttagaagtgataaaatagacccatctagtctaagggcctggtggcagagctggcccccaccccaggtccatgccctgaagtaccacatagtgcctctgcctccaacatgcgctgtcattgccaacaccactggaggacctgattcctgctatctgcacaggactcaggctccactggacttggtttgcctctggatgcccagctgagaaaacaagggtgacgagacaagggaggaagctgaagcagggccttcatgctgctcctaacaggtgtggggtgagctctatacattaaggagtggcaatggagctgggtgctggtggtgcacgcctttaatcccagtgctcaagagatagtaggcagatctctcagtttgaggtcagcctagtctacaaagtgaattcaaaaccaaacaaacaaaaagtggcattaggggaactattggaaaccaaagcaggactaattggtggccgccactgtgaatgtgtagggcttgcctggtgacactgtacttcctttagcaacagcttgtgtgtctggcatggtatttacaggcagatataagacgagctggcaggagtggcacagtgctctcaggcatttcatagagagaatatctttgtgttgtatggatgcctcacctgtggcaaaaagcctatggcctatggcttaggcaggaaataggcggaacatctgggagagagaaagcattctgggatagagccaggtgggagatctaccagggaggatgtgaggagatggacacatggtacctgagcacaggtaaccagccagctggcagaatgcaggttaaaataaatgggttatcttcagttataatctagtcagaatagagcctagctgtatgtccgaaggatttgtaaatatgttttgagtctgaggcttggggcaccatgcacctggcctcctggcgctggcggctacctctcaggtattcagcaccactctctcaggtgcccaggatcagggactcttcggtgtgagaactgagctgctgttatcaccatattttactttcctattatattcagaaaaaagaataaatggtgtattttaaagcc

SEQ ID NO: 2527 - DNA, 1536 bp, Mus musculus
gatctttcagacagagcgtgtcttagtaaggtggcgatctgggccaggaaatttttctggccactagaaatctggcttgatctcaagctccctgcgttttccttggtagaagacccaggtagctaagctttccagcctgaacagagggcagctgggacacccaggactcagagtgaacgcagagcgggtgccactgtcgctccgatccagggaagccatgacgaaaacaaccacttgcgtgtaccacttccttgttctgaactggtacattttcctcaattatcacatcccacagattggaaggaatgaggagaagctaagggaattccatgacggtgggcgatccaagtacttgacactccttaatctgctcttgcaggccattttctttggggtcgcctgcctggatgatgtgctgaaaagagtcatcggaaggaaagacatcaagtttgtcacatccttcagagatctgctctttaccacaatggcttttcctatatccacatttgtgttcttggtattctggactctctttcactacgatcggagcctcgtttaccccaagggcttggatgacttcttcccagcatggggttaaccacgcaatgcatacctccatatttcccttttcactgtttgaaaccatcctcagaccacacaactatccatcgaagaagctaggactcaccttgctgggtgcttttaattttgcctacatcatcaggatcctgtggcgctacgttcagactggaaactgggtgtaccccgtgtttgactccctcagcccactgggtattatcatcttcttctcagccgcttacatcctagtcgccggcatctacctgtttggcgagaagatcaatcactggaaatggggtgccatagcaaagccacagatgaagaagaattgatgacgtactattttccaagagccatggaagaagaaacttaagaaccggtcatctttctattatcctcattattattattattatttctttttggatcaggggtggacttgcttggggagatagaaaggacggagaatgttgcatagttttaataaaggatataaagggagcttctcttgggatctcctggttttctaaaaggctgacatctcctgttacttttgattgacctccacattttgtttctgaccaaaaaggctcaacaagcttgtctaaacttgttgctggaccatttagagaatgggtgtggggacaagaacatgggggcataaactctctttaccttctaggggtatggggaagacacagatgacatgctccaaacgtcaaaatcatgaccaagctggagtagtggtgcacacagggcattccctgcattttggaggctaaatcaggaagatcgtgaattcagggttgccctggactgcagagtaagaccctgtcattagaagaccaaaaataataatttaaaagtagttgttgctgggtgggtaggggattggggggagggtatgggggacttttgggatagcatttgaaatgtaaatgaagaaaatacctaatt

SEQ ID NO: 2528 - DNA, 1271 bp, Mus musculus
ttctccgcatggatcccgcagagcgcgcgcaggcggcgcgagctcgggtgcccaggatcgatccgtatgggtttgaaaggcccgaagactttgactatgcggcttatgaagaattcttttccacgtacctggtgatactcaccaagagggcgatcaaatggtccaaacttctaaaaggaaacggtggtgtccggaaaagcgtgacagtgaagcgctatgtccggaagggaatcccgctggagcatcgggcccgtgtgtggatggccgtgagtggagctcaggcccggatggaccagagccctggatactaccatcgactgctcgagggcgagagcagctccagcctggacgaggccatcaggacagacttgaaccggacattccctgacaacgtgatgtttcggaagacagcggatccttgtctccagaagaccctgtacaacgtgctcctggcatatgggctacacaacccagacgtggggtactgccagtgctgcgcacagaaacctgggtcttccgcaggattgcgaagttctctgacaggaatgaatttcatagctgggtatctgatccttatcacgaagaatgaagaggagtctttctggcttttggacgctcttgttggaaggatactacctgattactatagcccagcaatgctggggctgaagactgaccaagaggtcctagcagagctggtgaggatgaagctaccagcagtggcagccctgatggatggccatggtgtgttgtggaccctgctggtgtcccgctggttcatctgcctgtttgtggacatcctacctgtggagacggtgctacggatctgggactgtctgttcaatgagggctccaaaatcatattccgggttgctctgaccttaattaagcaacaccaggaatttatattggaagccagcagtattccagacatatgtgacaagtttaagcagatcaccaaaggggactttgtgacagagtgtcacgcattcatgcagaaaatcttttcagaaccaggaagcctgtccatgacgaccatcaccaggcttcggaagagctgccgagcagcgctgcaggcacagagctgagtgcacaggcgccaacagctgcagttctcttcagagcacacacttcaccaattcctaccacaacgttcctgctgtaaatacttgaaatcacgacactcaatgtgaacttttaaaagaatgacttaaaattagtgttctccattttttcctacctttggagtcataaactgaattctctggccc

SEQ ID NO: 2529 - DNA, 4457 bp, Mus musculus
tgcccctgacctggtcgggaaaggttccaagagctcggcaacatggcttcctcaccccaccagcagctgctgcatcaccatagcaccgaggtgagctgcgactcaagcggagacagcaacagcgtgagggtcaagatcaaccctaagcagctgtcctccaacacccacccgaagcactgcaagtacagcatctcctccagctgtagcagctcgggagactcagggggccttccccggagggttggcggcgggggtcgcctgcgcagacagaagaagctgccccagctttttgagagggcctccagccggtggtgggaccccaaattcgactccatgaacctggaggaggcctgcctggagcgctgctttccgcagacccagcgccgcttccggtacgcactcttttatgtgggcttcgcctgccttctctggagcatctatttcgctgtccacatgaaatccaaagtgattgtcatggtggtcccagctctgtgcttcctggtggtgtgtgtgggctttttcctgtttactttcaccaagctgtacgcccggcattatgcgtggacctcgctggctctcaccctgctggtgttcgccctgaccctggctgcgcagtttcaggtttggacacctctgtcaggacgtgttgacagctccaatcatactctcacggccactccggcggacacttgcttatctcaagtaggaagcttctccatatgcatcgaagtgctccttttgctctacacagtcatgcagttacctctgtacctgagcttgtttttgggggtggtctattctgtcctttttgagaccttcggctaccacttccgaaacgaagactgctacccttctccgggccctggggccctgcactgggagctgctgagcagagccctgcttcacgtgtgcattcacgctatcgggatccatctgtttgtcatgtctcaggtgaggtccaggagcacctttctcaaggtgggacaatccattatgcacggcaaagatctggaagtagagaaagccctgaaagagaggatgattcattcagtgatgccaagaatcatagccgacgacttaatgaaacaaggggacgaggagagtgagaattctgtcaagaggcatgccacctccagtcccaagaacaggaagaagaagtcctccatacagaaggcaccgatagcattccgcccctttaagatgcagcagattgaagaagtcagtattttatttgcagacattgtgggtttcaccaagatgagcgccaacaaatctgcgcatgccttggtaggcctactcaatgacctgttcggtcgctttgaccgcctgtgtgagcagaccaagtgtgagaagatcagcactctgggggactgttattactgtgtggcagggtgtccggagccccgggcagaccatgcctactgctgcattgaaatgggcttaggcatgataaaagccatcgagcagttctgccaggagaagaaagagatggtgaacatgcgtgttggggttcacacggggactgtcctgtgtggcatcctgggcatgaggaggtttaaatttgatgtgtggtccaacgatgtgaacttggctaatctcatggagcagctgggagtggctggcaaagttcacatatctgaggccactgcaaaatacttagacgacaggtatgaaatggaagatgggagagttattgagcgccttgggcagagtgtggtggctgaccagttgaaaggtttgaagacatacctgatatcgggtcagagagccaaggagtcccactgcagctgtgcagaggccctgctttctggctttgaggtcattgacgactcacgggagtcctcaggccctaggggacaggggacagcatcgccagggagtgtcagtgatttggcgcagactgtcaaaacctttgataaccttaagacttgcccttcttgtggaatcacatttgctcccaaatctgaagctggtgcagaaggaggaactgtgcaaaatggctgtcaagacgagcctaagaccagcaccaaggcttctggaggacccaactccaaaacccagaatggacttctgagccctcctgcagaggagaagctcactaacagccagacctccctctgtgagatcctgcaagagaagggacggtgggcaggcgtgagcttggaccagtcagccctcctcccgctcaggttcaagaacatccgtgagaaaactgatgcccactttgttgatgtcatcaaagaagacagcctgatgaaagattatttcttcaagccgcccatcaatcagttcagcctgaacttcctggaccaggagctggagcgatcatatagaaccagctaccaggaagaggtcataaagaattctcctgtgaagacgttcgccagtgccaccttcagctcccttctggatgtgtttctgtcaaccaccgtgttcctgattctctccatcacctgcttcctaaagtatggagccaccgccacccctcccccaccggctgccctggccgtctttggtgcagacctgctgctggaggtgctttccctcatagtgtccatcagaatggtgtttttcctagaggatgtcatgacatgcacaaagtggttgctggaatggatcgctggctggctccctcgccactgcattggggcaatcttggtgtctcttcctgccctggctgtctattcacacatcacctctgagtttgagaccaacatacaggtcaccatgttcactggctctgcggtgctggtggccgttgtgcactactgtaacttctgccagctcagctcctggatgaggtcctcccttgccaccatcgtgggggctgggctgctgcttctgctccacatctccctgtgtcaggacagttccattgtgatgtcccccttggactcagcacagaatttcagtgcccagaggaacccatgcaacagctcagtgctgcaggacggcaggaggccggccagcctcataggcaaggagcttatcctcaccttcttcctcctgctcctcttggtctggttcctgaaccgggagttcgaggtcagctaccggctgcactaccatggggatgtggaggccgacctacaccgcaccaagatccagagcatgagagaccaggctgactggctactgcggaacatcatcccctaccatgtggctgagcagctcaaggtctctcagacctactccaagaaccatgacagcgggggagtcatctttgccagcattgtcaacttcagtgaattctatgaggagaactatgaggggggcaaggagtgctaccgtgtcctcaacgagctgatcggtgacttcgatgagctcttgagcaagccggactataatagcatcgagaagatcaagaccatcggggccacatacatggcagcctcagggctgaacacggcccagtgtcaggagggtggccacccacaggagcatctgcgtatcctcttcgagttcgccaaggagatgatgcgcgtggtggatgacttcaacaacaatatgttatggttcaacttcaagctcagggtcggctttaaccacggacccctcacagcaggtgtcataggtaccaccaagctgctgtatgacatctggggggacaccgtcaacatcgccagcaggatggacaccactggtgtggagtgccgtatccaggtgagcgaagagagctaccgtgtgctgagcaagatgggttatgactttgactaccgagggaccgtgaatgtcaaggggaaagggcagatgaagacctacctttacccaaagtgcacggacaatggagtggttccccagcaccagctgtccatctccccagacatccgagtccaggtggacggcagcattgggcggtctcccacagatgagattgccaacttggtgccttccgttcagtattcggacaaggcttccctgggatctgatgatagcacacaggctaaggaagctcacctgtcctctaagaggtcctggagagagccagtcaaagcagaggaaaggtttccatttggcaaagccatagaaaaggacagctgtgaagacataggagtagaagaggccagtgaactcagcaagctcaatgtctcaaagagtgtgtgaggcagcgccgagagctgccaaggtgctctgcgtgtccaaacacagtaacatctgtgtcgataggctgttgtgctatctagcacctcagtttctgtccccagatgtggtgtcacgtggtcatttcagcccgaatctctgtgtggagcacagttattcagggttcatttccacccatttcggttttcctttacttgcgttcctggaagccttttcctggaagcctgcccccagcccagccaggggatccagtcagcagcgtggagggattcaagtgccttcagggtctggccttgcgtctggggctgaggccactggtggaatcatggccctggggattatttgacttctttaag

SEQ ID NO: 2530 - DNA, 875 bp, Mus musculus
gctgatctgcaccctcaccgtcttcctctggaatcaacataaagttcagaaaccatgtctcgaagatatgactccaggaccacaatattttctccagaaggtcgcttataccaagtggagtatgccatggaagccattggacatgcaggcacctgtttggggattttagccaatgatggagttttgcttgcagcggagaggcgcaacatccacaagcttcttgatgaagtcttcttttctgagaaaatttataaacttaatgaggacatggcttgcagcgtggcaggcataacatctgatgctaacgttctgactaacgagctaaggctcattgctcaacggtacttattacagtatcaggagccaattccctgtgagcagttggttacagcactgtgtgatatcaaacaggcgtacacacagtttggaggcaaacgtccctttggtgtttctttgctgtatattggctgggataagcactatggctttcagctctatcagagtgacccaagtggaaactatgggggatggaaagccacatgcattgggaacaacagtgctgcggctgtgtcaatgttgaaacaagactacaaagaaggcgaaatgactctgaagtcagcgcttgctctggctgttaaggtgctaaataagacaatggatgttagtaaactgtcagctgaaaaagtggaaatcgccacactaacaagagagagtgggaagacggtgatcagagtcctcaagcaaaaggaagtggaacagttgatcaaaaaacatgaagaggaagaagctaaggctgagcgggagaagaaagaaaaagaacagagagaaaaggataaatagacagaatcacggattttataactccttagaggcgc

SEQ ID NO: 2531 - DNA, 496 bp, Mus musculus
  misc_feature 4: n = A,T,C or G
attnggggtgattttggccgcgccgagccgttagtttgaatgttagaagtgatgggggaaaagttagcgaagggtcggggtgtgctgttcctcctgctcggctcccctaggatgtatccttagggtaaacctgttagcgcggggctgcgcaggaatcccttcggtatcttaacaccgttctttggcctaaaggttgtaatatgaagaggcggctctcaaaccttggtcgaaagaagacgatggagagacgccgaatctgaggccttggctcccgtgtttgggaccaggagggaaggagagaagatagatttcgctgagacacttgcccgggtccctttgtgggtcagaatgggtcccgatgagaacctgagtgtgagagtgaaactacggagtatcatttgtagctttgttcctcaagacttgccatgagatttaagtagagcgcctgtgtggaaattgttaattgtagctagtcagatcgaagactattgacagc

SEQ ID NO: 2532 - DNA, 2681 bp, Mus musculus
cctctcagaaagaccggtggcgcatcgggcccggccgagcactggctgcccgaggctcacaccgcggcggcctgcttgctgaaggatcgagcgcctcaggttaaaagaaaaatgaagtacattctggttactggtggtgttatatcaggaattggaaaaggagtcatcgccagcagtgtgggcacaatacttaaatcatgtggcttacatgtaacatcatttaagattgacccctatattaacattgatgcaggaacattctctccttatgaacatggagaagtctttgtgctggatgatggtggagaagttgaccttgacttgggaaattatgagcgattccttgatatccgtctcaccaaggacaataatctgaccacagggaagatataccagtacgtcattaacaaggagcgcaaaggggattacttagggaagactgtccaggttgtccctcacatcactgatgcaatccaagagtgggtgatgagacaggcattaatacccgtagacgaagatggcttagaacctcaagtgtgtgttattgagcttggtggcacagtgggagacattgaaagcatgcccttcattgaggccttccgccagttccagttcaaggtcaagagggaaaacttttgtaatatccatgtcagtctggttcctcagccaagttcaacaggggaacagaagacaaaacccacccagaacagtgttcgggaacttagaggactcgggctttctccagacttagtggtgtgcaggtgctcaaatcctcttgacacatctgtgaaagagaaaatatcaatgttttgccatgtggaacctgaacaagtgatctgtgttcatgatgtttcatccatctaccgggtacccttgttgttagaagagcaaggggttgtagactactttcttcggagacttgaccttcctattgagagacagtcacgaaagatgctgatgaaatggaaagagatggcagacaggtatgaccgcttgctggagacctgctcgatcgctcttgtgggcaaataccccaaattctcagactcgtacgcctctgtcattaaagcgctagagcactctgcattggccattaaccacaaactggagatcaagtacatcgattccacagacctggagccaagtaccctgcaggaagagcctgtgcgctaccatgaggcatggcagaagctctgcagtgctcatggagtgctggttccaggaggatttggtgttcggggaacagaaggaaaaattcaagcaattgcttggtctcggaaacagaagaagccttttttgggtgtgtgcttaggaattcagctagcagtggtagaattttcaagaaatgtgctgggatggcaagatgccaattctacagagtttgaccccaagactagtcaccctgtggttatagacatgccagaacataaccctgggcaaatgggtggaaccatgaggctgggcaagaggagaaccctgttccagaccaagaactcagtcatgaggaaactctatggagacacagactacttggaagaaaggcaccgccaccgatttgaggtgaacccagtcctgaaaaagtgcttggaagagcaaggcttgaagttcgttggccaagatgtggaaggcgagaggatggagatcgtggagttggaagatcatccattttttgttggagtgcagtatcaccccgagttcctgtccaggcctatcaagccctccccaccctactttggcctcctcctggcctctgtggggcggctcccacattaccttcagaaaggttgccggctctcacccagggacacttacagtgacagaagcgggagcagctcccccgactcggaaatcactgaactcaagtttccatcaataagtcaggactgatctggatgagtcttcaacttcagctttgacagtttacaactatgattttacatcctgcttttgacacttcttttaaattatgtttttattaagattattttattatgggggaaaagcatttggaaaactttgtcacttgcatgtcccgtcatttatacttgatcctgcacacatgcatttgtgacgacaataatacctttgcagtttttgtgcttctgtgatgggaaacaggactctggatggaacctgatggtggctgctggctgtggttaagggccatcaaccaccttgttttccagccactcgagtcactgtcattggagtgaattgctgttgtctccctggggtgccaggactcccggtgctgggctgctaactgggtgttgctgacatctcagtgctgctgagttacaggggactaggtgccagctgtggttgccctcgccatccagagggttgtttggttctttggtacatcaaactctgtctgtataaagtatcatataaaaaccccgggtctctggctacactttctattcctggggctgagaaaactccttgacatcaaggggtcaagaaacacggaattttagggtaaccggttctaaagccctctcttgtgtgtgcaccgttggcttgaaggtattttttttcttccagaatggtgttattgcatttgaaatgcaatttgaagttattttcttaatgtgatatggcaatgggcatgaccatgtgcctacagtatggtggttagcttgatgcatatctaacttaataaataatgcagaaccatt

SEQ ID NO: 2533 - DNA, 1850 bp, Mus musculus
actcttctctctctcgccagcatagctcctctagggaagacttgactttaacaacatcagacttccaaaaggctctccgtggattccttcctgcttctctgcgaaatgtcaacttgcataaacctagagacctgggctgggacaagattggtggattacatgaagttcggcaaatcctcatggatactatccagttaccagccaagtacccagaattatttgcaaacttacccatacgacagaggacaggaatactgctttatggtcctccagggacaggaaaaactttacttgctggggtagttgcaagagagagtggaatgaattttattagtattaagggaccagagttactcagcaaatatattggcgcaagtgagcaagctgttcgagatgttttcatcagagcacaggctgcaaagccctgcattcttttctttgatgagtttgagtccatcgctcctcgaagaggccatgacaacacaggggttacagaccgagtagtcaaccagttgctgacacagttagacggagtagaaggcttacagggagtttatgtgctggctgctactagtcgccctgacttgatcgaccctgccctgttgcggcctggcagactggataaatgtgtatactgccctcctccagatcaggtgtcccgtcttgagattttaactgtcctcagcaagtctctagctctggcagatgacgtggaccttcagcacgtggcgtcggtcaccgactcgttcactggagcggatctgaaagctctgctgtacaacgctcagctggaggccttgcagggacggctgctgcccagtgggcttcccgatggaggctccagctctgacagtgacctgagtctgtcttcaatggtctttcttaaccacagcagtggttccgacgactccgctggagatggagaatgtggcttagagcaatccctgctttctctcgagatgtctgagatccttccagacgaatcaaaattcaatatgtaccggctctactttggaagctcgtatgaatcggagcttggaaatgggaccccttctgacttgagctcacactgtctgtctgcaccaagctccgtgactcaggatttacctgcagctcctgggaaagacccgttatttacacaacatcctgtgttcaggacaccttcccaagaaggctgccaagacctcacccaggagcagagagatcagctgagggcagagatcagcatcatcaaaggcagatacaggagccaaagtggagaggatgaatcccttaaccagcctggaccaatcaaaaccacttttgctattagccaggcacatttaatgactgcacttgcccacacaagaccgtctattagtgaagatgaagggaaggaatttgctgagctgtatgagaactttcaaaatccaaagaagagaaaaaatcaaagtggaacagtgtttcgaactggacagaaagtaactttagcataaaatacacttctgattttctagatgtgtttgttttaatggtctgtccctaagttgtaactataaaaatgatgtaaaaattttttaatttaataaatttggttaatctataaaatcacagactggaaagtgctgtgattctgctcaggactacctgagattaacagtgcaggctaaaggaagtgatttgtaacagatcgtttattttattcccaagtctgtattaaatccttaatgatattacgtcaatggtggacctcatttgttttcttttagaggcactcacagacccagagtcactgattttctggcttttggcagattgtatgccttgtaacttcttgattgttttgggaaaagatacattctattatcgtc

SEQ ID NO: 2534 - DNA, 1181 bp, Mus musculus
aggtctctcgagatggtggtggcgaagtcggaggcccgtaggaccccactgcatacttccgtgtagccagactctggccctcactgatcaccgccctagggctgggctacttcgcgtgggctgtcttctggcctcagagcatcccttatcagagccttgggcccctgggtcccttcacgaatatttggtggaccactatcacaccttcctaaggaatgggtattggcttgcttggctaattcatgtgggagagtccttgtatgccttggttttatgcaagcgtaaaggaatcacagacgtccaggcccagctcctctggttcctacagacttttctgtttggtgtagcctctctctccatcctgattgcttacagatcaaagcgccaaaaacacaattaaaaaagagagagcaagtttctctccacctcttcaagccctcctttcagtggggccctgggtaccatgatggcctccctgtcttctaggcagtgtctgtcgaagaacctgcctgagaccctctggttactattattttggtgctctgactaaccttggatagatctttcttgtttaagaaagaaataagaaagaccctgcccttccagctctgcagacctcctgcctgaagatggcctcaggccactttcctgaggtccttagctgagtcattttcctgccttttggctaaaacacactagatttatttgtgggtgcacctatgctctgtgtggtggtttgaatatgcttggcccatgggaagtggcactactaggaggtatgtggccttgttagaggaaatgggtcgctgtggaggccagattttgaggtctcatatatttgctcaagtctagccagtgtgaaacggtctccttccgctgcctttagatcaagatgtagaactctcagctccttttccggatcatgttcgcctggacactgccatgctttcctaccatgatgataatggactgagcctccgaaattataaaccagccccaattaaatgttcccctttgtaagagttctcttgatcgtgatgtctctttacaacaatgaaattcctaattaagacactcactccctgctctgactagcaccccctcccctcctccccactgatatcttagcttctacccccaaaactttttctcgttctggaccaagataaagtaaaacttcc

SEQ ID NO: 2535 - DNA, 1756 bp, Mus musculus
gcacgaggcatttctgattcagttaaaggattgccaattcatcagtccctgaaactagagcaatctcaacaggtttatttatttattatatgtaatacactgtagctgtcttcagacactccagaagagggagtcagatctcgttacggatggttgtgagccaccatgtggttgctgggatttgaactcctgaccttcggaagagcagtcgggtgctcttacacactgagccatctcaccagcccgaggacaagaaaagaaaatgggctttttaagtccaatatatgtccttttcttctgttttggagttagagtatactgccaatatgaagcttaccgatgggatgacgattatgaccaagagccaaatgaggattatgatccagaattccaatttcatcaaaatattgaatatggagttcccttttataataatattttaggttgtgctaaggaatgcttctgtccaactaactttccaacatcaatgtactgtgacaatcgtaaactcaagactatcccaattattccaatgcacattcagcaactcaaccttcagttcaatgacattgaggctgtgactgcaaattcattcatcaatgcaactcatcttaaagaaattaaccttagccacaacaaaattaaatctcaaaagattgattatggtgtattcgctaaactttcaaatctacaacaacttcatctagagcacaataacctagaagaatttccatttccacttccaaaatctttggaaagactccttcttggttataatgaaatctccatacttccaacaaatgccatggacgggctggtgaatgtgactatgcttgacctctgctataatcatctttctgattcgatgttaaaagaaaagaccctttccaaaatggaaaaattaatgcagctcaacctatgtaataacagattagaatcaatgccccttggattgccttcatcacttatgtatctatctttagaaaataattcaatttcatctataccagacaattattttgacaaacttccaaaacttcatgctctaagaatatcacacaacaaactggaagacattccatatgacatctttaatctttccaatcttatagaactcaacgttggacacaataaattgaagcaagcattctacattccaaggaatttggaacatctatacctacaaaataatgaaatagaaagcatcaatgtgacaatgatatgtccttctcctgatccagtacaccatcaccatttaacataccttcgtgtggaccaaaataagctgaaagaaccaataagttcatacatcttcttctgcttccctcgtatacacagtatttattatggtgagcagaggagtactaacggtgaaacaattcaactgaagacccaagttttcaggagctaccaagaggaggaagaggaagacgaccatgacagtcaggacaacactcttgagggtcaagaagtatcagatgagcactataattctcattactatgagatgcaagagtggcaagatactatataggtacacatttatgcctccataaagccttactaattacaaatgtaaacatgtaactgctcataataatatatctacaagtatgtgttagtataaagatcagaactgcgtttaagatgttggtgaaaatggctttacttcataagcttagagcttactaaaaatgatgcaaatcttaagaaatataaaatagaatggtaagtgggaataaaaaaaactaagctc

SEQ ID NO: 2536 - DNA, 2196 bp, Mus musculus
agagtgatgatgctcggcggccgagtcaccactagggcccaaagaccaagagtgcggcggcgcggggagcggcggggactgagtccagggccaacagagtccgggagactcgatctgcccacttgagcaatatgaagatttcattcatagagcccgccattctcctgaacgcgtttgctatgactctgaccatcccgctgacagcgcagtacgtgtaccggaggatctgggaggaaaccggtaactacacctttgcttccaatagcaatggctctgagtgtgaccaaaacaaaagcagctccatctttgcattccgggaggaagttcagaaaaaggcatctctcttcaacctgcaggtggaaatgagtgccttaattcctggtctggtgtctaccttcatgcttttagcgagcagcgacaaccacggacggaaacttcccatggtcctgtcatctcttggctctctgggtaccaacacttggctgtgcatgatgtcctactttgaccttcctctccagcttctgatagcatccacctttattggcgccctctttgggaattacaccacgttctggggagcttgcttcgcctacattgtggatcagcagaaagaatacaagcatagaatcatccgcatagccatcctggatttcatgcttggagtcgttactgggctaacaggcctgtcatctggctattttatccgagaactgggttttgtgtggtcctatttcataactgccatggttcttatagtcaacctggcctacattttatttttcctcaatgatcccataaaggagtcttcatctcagattgtgactatgtcatgtatcgaaagccttaaggacctattttaccggacttacatgctttttaaaaatggttccagtaagcggcaggctttgctttgtctgctgatttttacccttgtcatttatttctttgtgataatcggaatctccccaatttttacactttatgagctgggccctccgctctgctggaatgaggtttacataggctatggttcagctctgggcagtgtctcctttttaagtagtttcctaggcatctggctattttcttattgtttgaaggatattcacattgcctatattggcatttttaccaccatggtggggatgacgctggctgccttcaccaggaccactctaatgatgtttttagtcaggattccgttcattttcaccatcatgccactttccgtcctgaggtccatgctgtcaaaggtggtccactcgactgagcaaggtgcgttgtttgcttgtatagctttcttagaaacgctggctggggtcacttcgacctctgcgtacagtgggatttactcagccactgttgcctggtaccctggcttcatcttcctgctgtccgctggcctcctggtcctcccagccatcagtctatgctgcgtcaagagcattggctgggaagagggaagctacacactcctcgtccacgaagaacccagtgagcacacatcagactagtgacagtcggcagcaatgcacacgtccctatgcagtgagcacacatcagactagtgacagtcggcagcaatgcacacgtccctatgcagtgagcacacatcagattagtgacagtcggcagtaatgcacatgtccctatgcagtgagcacacatcagactagtgacagtcggcagcaatgcacacgtccctctgcgcaactcctgaagaatataaactccacaatcgcatttcatcagcaatccacaggacaaaaccctgtctcctaacccaagtgagtcgggaggaaggcaccccagctctgctgcttcttgggaccacccagcagcacactgtgttctacagagaacaggcccagcacctaccatgctcacttctccatggaccagagaaaccccgtgaagagccgaggaaggcttgtgaaccttgttaaaacttaaaagcaataacttcactggcatgctccagtctcccatgtgattgaggagttctgacctcagtctctccgtctgcacaatgggcttgctggcctctcagggattttgaaggcataatgaggaatttttattcagaataatcactgttgaaataatgtttcaggcatttctagttcttcccatacttgactgatgttttaagagcctgttaaggctctactaatggaatgaaaagtccttgaacgg

SEQ ID NO: 2537 - DNA, 1096 bp, Mus musculus
gggcactcttgtgcggcaacggctggggaaatgtctgaaaaactacgaagatgcagaaaggagctgactgctgctatagaccgagcctttgaaggagtcaggcattctcaggagtgcacagcccagcagaggctggacgccccgtcgctcacctcccagccggtacacaggctcctctgcagaaacccactggctgcctgcccctctgctgccccatactctggtgcctcgtgtgctcctgagagtgagaacccggccttcaggacacaccatattccggttaattcaaaacttcagcagcctctataccccaaaaggaaacctctgaccagcaaggaaaatgtcttgatgcagtcttccattttggcacgtgacagacagttttggagagctgcaggtgatggggaagactggagaaaagatagtttaaggaaggatatggagagagatttaaaagctgacccaaatgtactgctcagcagttctagccaagaggtcacaaaggatctgctagacatgattgaccatacaagtatccgaactattgaagaattggctggaaaactagaatttgaaaatgaattgaaccgtgtgtgtggacactgccaagattcacccttcaaggaggaagcctgggccctgcttgtggatgagagtcctcagaaggctctggatgctgaccctggtagcctcaagcaggctttggatgatcagaatatagttgagactgttctggacttggaagaagactacaacttgatgacttcttttaaataccaaatagagtgaggagagtggatgtcagcagccacagtggttaccagaacaagtcttcacgaggggttggcagagcccaaattgccacaccttgtttaatttctgctgaatcccattttgagctgagagcccaggttttagttctgttattttgaaatgtttgaaaagttttttttttggacttgacattttttttaaagtgtattcttggttagtgttgaatatatacagtccccaggataggttataggttgtgcctctgctctttgtccttgtattcttttatatgaatccctggaaaaataaaaatccaggaacc

SEQ ID NO: 2538 - DNA, 1827 bp, Mus musculus
agtctgtgcttcttgcagccccagtcccacactttggaagcatgtctgtccaagagaacgagctaccccagcagctctggccctggatctttaagtcccaaaaagacttagcaaagtctgctttaagtggggctccaggagggccagcaggatacctgcgacgtgccagtgtggcccagctgacccaggagctgggcactgccttcttccagcagcagcaactgcccgcagctatggcggacaccttcctggaacacctctgccttctggatatcgactcagagcctgtggccgctaggagcaccagcatcattgccaccatcgggccggcgtcacgctctgtggaccgcctcaaggagatgatcaaggcagggatgaacattgcacgactcaacttctcccatggctcccatgagtaccatgcagagtccatcgccaacattcgggaggcggctgaaagttttgcaacctccccactcagctacagacccgtggccatcgccctggacaccaagggtcccgagatacgcactggagtcctgcaggggggtccagagtcggaggtggaaattgtgaagggttcacaggtgctggtgaccgtggatccgaagttccggacaaggggcgatgcaaagacagtgtgggtggactaccacaatatcacccaggtcgttgcagtggggggccgcatctacattgacgacgggctcatctccttagtggtgcggaaaattggcccagagggactggtgaccgaagtggaacacggtggtttcttgggcaacaggaagggtgtgaacttgccaaatgccgaggtggacctgcctgggctatcagagcaagatcttttggatctgcgcttcggggtggagcattatgtggacatcatctttgcctcctttgtacgaaaagccagtgatgtggtggcagtccgagatgccctagggccagaaggacggggcatcaaaattatcagcaaaatcgagaaccatgaaggcgtgaagaagtttgatgagatcctagaagtgagcgatggcatcatgatggctcggggtgaccttggcattgagatcccagcagagaaggttttcttggctcagaagatgatgattggacgctgcaacctggctggcaagcctgtcgtttgtgccacacagatgctggagagcatgatcactaaggctcgaccaactcgggcggagacaagcgatgtggccaatgctgtgctggatggggctgactgtatcatgctgtctggagagaccgccaaaggcagtttccccgtggaggctgtaaagatgcaacatgcgattgcccgggaggcagaggccgctgtgtaccaccgccagttgtttgaggagctacgccgggcagcgccgctgagccgtgacccaaccgaggtcactgcaattggagccgtggaggcttccttcaagtgctgtgccgcagccatcattgtgctgacaaagactggccgctcagctcagcttctgtctcgctaccgacctcgggctgctgtcattgctgtgactcgttctgcccaggctgcccgacaggtccacctgtcccgaggagtcttccccttgctctaccgtgagcctccagaggctgtctgggcagatgatgtggaccgaagggtccaatttggcatcgaaagtggaaagcttcgtggcttcctccgagttggtgatctggtgattgtggtgacaggctggcgacctggctctggctataccaacattatgcgggtgctgaccatatcctgaaacgcctctcccctttctgaccttagttgcaccccatttctttcaacccacacccctccca

SEQ ID NO: 2539 - DNA, 323 bp, Mus musculus
ggatcccaccgcttctttgacacagaggcccattcagtcccttatcaattcaccagaccctcccagtcactgacccacccacaagccttttttctgaaattcctctccaaagacacacgggcatctgtgccccagcttctgggtccaagcccctcagcacctctcatacctcagagctctttccattaatttctttccccattcaaaacatgtatacccttcagaaaattctgcttgctttatgaagcccaatggaagaaacaattatttgtcaatacctcatctgtggattgtgattttctgtaaataaacaattatatccc

SEQ ID NO: 2540 - DNA, 2499 bp, Mus musculus
gattgacttcggtccagggaagagacctggctcactgccttctttcctcatccataggctggctccaagacctatgtgaaataatggccacagtgatattcactgtacagagaattctccagggtggagaactgcatctctatgtcaccatcaactccttcccgaggccagcattgatctatatctgcatcagaaccagacctgggttcataggtcaaaactacctccacaaccgcaaccgcatggcagggcagaagaagaaagcaagagaagtcccaggtctgctcctactgtgagtatctagtaggctctcattcctgcggagggcctagtgccttgcagcttctccatggatatcagccaaatgcagaatcttaatggctttccctttcggttcgacaagcccagagctctagcctgggtgcgggctgtgtgtgaagaaataggagtcttggtttcgttttgtaacctgggcccctccagtgcctaccagctggggctgggaacaggaccaacattcattgacaaatgaagagatgaaaacattttcgaagctgacaggccatcaattgggtgccacccgggaagagaagccatggtctgcagctctgcttcctggccccaccaccaggagaatatgggactgccagccacacccaatgggccgccctaggtttgggaggtctctttttatcctgagagaaggcttgggagcagttacgaaagcgacgagcctaccggcttggacacggagcagcgattgcttggcttgttgggtatggctgaggcctgtatacagttggatgacctaagttatggaaggacagagtagtcatgtacacagaagggccctcttgagtggcagctagggccactgtaattttgtcccatggggtagcctgggtcaagctctcactggaaactgccagtcagccgagggaccctgaggagactcacattatctgtttgctgtttaggtccagcagtgaaggcccctactgatttggggaaccagcctcctggcgcttcctaaatgccctgttttgagaagttccacagagtgagggtgtaagtgtctggcctgaagggagagacatgctccccctgggttccaatccccatcataccttagctgtcagcagggaggggaggttccagaggctacaggaggctgtagcagagaaacaaaggcttacattactactccaggtttgctgttctccccggaggcagatggcactgtgtgttgggtggggatcacttcaccaggcctgcctttgccccaaggggcagtttcttggataggatagggatagtgtcattaagcccatttgaggaagcaagcaaccaaccgttaccagctttggacttcactgaccatgttcagttactgttggacactcttttccttcaggcacaaatgggtaatttctcatgttcctgcctctgtgactggggccaagcaggcatgtctcctttgttcagttcactgctccaacctctggaatcgtccctgctgtccaggttctctggccaggtgtcacatggctttactctgtcggcagtcctcatgagatcgatgactcctggcgatccacgtgtgaatgacttgtaggaagggcgccggagtgagctgaggttgacagagagacacctgcagaggctccagcagctatgtgagtgtatggctggacagtgtcacttgtgagatgctcacagtcctgtggtgtcaactagatcaaagtctctcataagatagaagatggaatctgcccttggtcacaacgcttgattcagaaccctggctttttatagggctactctttcctccggtgatgaaggttaacatcctggaacatccatggcacagatgcgggctaagtcctctaccctagaagatgtacagtgcagccctgggcaggattcctccaaggctcacacagtttaaatgtttcagactgggatcattgcaaaaggaatttttcgcctacagaagagagaggcaaggaaggaaagctatgcccaaggtctagaaacagggcagtagccctgagtttggaaagccgctcccacctggtccaactctctcttagctcaaccagttgtccgtgtgaagattaggttgctggttttggcttttttttttttttccttttttcttttttgtcaacttgatacaagctaagaagaaaggcaatggcccctgagaacatgactccgtcagattggcttgtaggcaagttcacaggggagggggggtcagttccttgattaatgatctatatggaaggcgcccgaaccattgttgagtggtgccaccctgggcagatggccccggactgtctaagaaagcaggctcatcaagccacaacaaactagccagtgagccccgtaaacagaattcttctgcagttcttgctccagttcctgcctcgagttcctgccttggcttccctgactgatggactctcagccaaataaacactctgctatgatagc

SEQ ID NO: 2541 - DNA, 1990 bp, Mus musculus
tgttaacatgggttttctcttttcccttccctgtaatgcacggcttctgcagagactgcccagctgctcctcatagtttctgatgggcgaggccttttcctcgaaggcaaagacagagtcctagcagcagtccaggctgcccagaatgccaacatcttcgtcatttttgttgtgttggataatcccaattcacgggtgagtgagcaggtagcacaagcccccattctgcagaataggggggccttgaacttgttcagaagtgtagctgcaaccctgtcctggggtgctggtgctcagtgccattcctttcacaaagctccacacaaccctgcaaggtgaagaccattcttcccaacacagaatcgtgaggaggagagcagagagtctcagatgcagaaagcaacgaggaccctgagctcctttaaaaagagacggcctgtagcatacatcctagcagctggccgactcggggtgtcagggagcatatagctgcaggttgcactgatcctaactgactggcaaggcaagtggggattgctccatagaaagtagagacatggatgaaggaaagcagcatttcttacttgttcctcttccttgaacttctccatggcataaagagctgccttcttcataaacattttggaagtttctcagcttttcttgtcaactaaaaaggtcaagaactagttaggaaactatttaatttttctttttctttcaaaatgtcttttgttaacaggattctatcttggacattaaagtaccaatatttaaaggaccaggagagatgcctgaaatccgatcctacatggaagagtttccatttccattttacatcattcttcgggatgtgaacgcgcttcctgagaccctcagtgatgcgctcaggcagtggtttgagctggtgactgcatctgaccactcctagagcagagcacagtctagtgaggctgtggggtcactggagctcccttacacagctgtttgtgaactcagagctctgattctacttcatcttggacctgatttttcttttttactgtatccaacagttataaaaacatttttattgcactatacatttgtatttacaacatagaagagcttagcacaagctcttggactccctgctgtactgactgagcacagacagctcacaagtagtaccagggctcgtgactagggaccaggtagaggtcacactgcccctttagagctcagccactcgctttcctctgctcagtaccttgaggaatgaatccaggaacacggggctgcactctggtccctgccttaagctctacatagagccacttggttggacacatcttaccctgctagaaagcagggtacttagatggtgtgttctcataaagcagccagcaaaggtgaccgcagagctgcacaaaactgaagcagctttttgtgcctcccagtggctgcctcaggagcctatgcaataatggacaggtgattctccctcatttcattcttgggctgccatagcccctgctgtaatttatttctttagccatccttcccccgatactaagaggaaaaattattcctcatactgctttcaagctatcctaagccagtgtcactgtggaaaggagcgaacggatgctgcgtccacgagaacttgacagctccatcctcccctcacccgcacagcacggtagtgttaggcttggttcccttgggcctgggggcagttttacttggccagaaagcagtgtttgaatacttgaaatcatgtgttgtgttctgtttaaatgttgtttgtagacattgtgctgtacacctgtctccatgtctgtttgcagatgacactgtgaagtgtgccacccttatatggtggtcatcaaagacagattgctctgtgtttaacaaagcgtcctaaagcatggacttaaagttattttattttttattccaaaatgctatgcagcttatattctgaaagctattaaataattgttgagct

SEQ ID NO: 2542 - DNA, 2443 bp, Mus musculus
atggcccgggccgcagtcctcccgccgtccagattgtcaccgacgctgccgttgttgccgctgctactgctcctgcttcaggaaacaggagcccaagatgtgcgggtacgagtgcttcccgaggtccggggccgcttgggaggcaccgtggagttaccgtgccacctgctcccacccacgacggagcgcgtctctcaggtgacctggcagcgcctggatggcacagttgtggctgctttccacccatccttcggagtggatttccccaactctcagttcagcaaggaccgtctgtcctttgtcagagcgagaccagaaacaaacgcagacctgcgggatgccacactggccttccggggactgagggtagaggacgagggcaattacacctgcgagtttgccacgtttcccaacggtacccgcaggggggtgacctggctcagagtcatagcccagcctgagaaccacgctgaagcccaggaggtcacaattggcccccagtcggtggctgtagcccgctgtgtctccactgggggccgcccccctgcccgaatcacctggatctcatctctgggtggagaggccaaagatactcaggagccagggatacaggctggcaccgtcactatcatcagccgatactccttggtgcccgtgggccgagcggatggcgtcaaggtcacgtgtagagtggaacacgagagcttcgaagagccgatcctgctgccagtgaccctctctgtgcgctaccctccagaagtatccatctccggctatgatgacaactggtaccttggccgcagtgaggccatactgacctgtgatgtacgaagcaacccagagcccacagactatgactggagcacgacctcgggcgtcttcccagcctctgcagtggcccagggctctcagctgcttgtccactctgtggatcgaatggtcaacactaccttcatctgtacagccaccaacgctgtggggacaggccgtgctgagcaggtcatcctggtgcgagagtcacccagcacagcaggagcaggggccactggtggcatcattggaggtattatcgctgccatcatcgccaccgcagtggctggcacaggcatcctcatctgccgacaacagcggaaggagcagaggcttcaagctgcggatgaggaagaagaactggaaggacctccctcctataaaccacccaccccgaaggccaagctggaggaaccagagatgccctctcaactcttcaccttgggggcctcagagcacagcccagtgaagacgccatactttgatgctggtgtctcttgtgctgatcaggagatgcctcggtatcacgagctgcccactctggaagagcggtcagggcccctgctgttgggggctacaggcctgggaccttctcttctggtgcctccaggacccaatgttgtggagggggtttccctgagtctcgaagatgaggaggaagatgatgaggaggaagacttcctggataaaatcaaccctatttatgatgccctgtcctaccccagcccctctgactcctaccagagcaaagacttttttgtgtcacgggccatgtatgtgtgagggaggcacaggggctctgacgtctcacctttcacccttgacccatgagctttccaccagtaatctaggacactctgacttccaggcagaccagggaccaactatcacccattgcaatccacctgtgacttcttagtgactccaccatgacgtccaatctatgatgtctgaggcaggcaaacctgcacaactggaaacctggagatttttatctcccttggcagggagctcaccatatccttctgcaccacctgtgaccccccccccccccccaaggactcctaagactacgaccctttgaccatgccactcagtatctcaagaacccttaaagtcccaaaggaatcggaccttgcacttgtcctcaggcaatagaatccaacagatatgcaagaacgggatcaggggccatccctgttgctcagacctgagccctccaggcagcagaagctcacctgatccctccccaccctgctccccaaaggtgaaaaggagaggattccccaatgtaaggtaggacctccccatctccacctactcctgcaggcaggaatctcaggtttctcacaccctctcctcagcacccaggttcctgtctccagagcatgaattccaggtccaatgctagaggggagaacctaatgcaagtgtgcccttgccaccccaagtttgggagactctgctcttatcctgaggactactgaattcttttaacccctacccagtgagatgagaactacatatccctctttaggggatggtgtgtgtatgtgtgtgtgatggagaatctgggcatctgggttgggaattttattttgtaagcatttcctacataatatgagtttctacc

SEQ ID NO: 2543 - DNA, 290 bp, Mus musculus
tcaggatgtaacctgaggtcaacttctgggttgctagcccacccccgactttatgggctcacgttccttcaaccttgatgaaacatttggcaatggggatccctgctcacatcacagagacactctgggttcccccagacccctttagtgtgcgttctcccatctgtttgcatagatatttaactttacaaaaaggacagtgaattcctagatttccactggtttataatagttgctcaaaaacattagcgcatttttttaagaataaaggattgaccttttgaaagcat

SEQ ID NO: 2544 - DNA, 2246 bp, Mus musculus
ggataccggctcacgtagaaaaaggacaagactataggaaagaaagcaaacactccgccgaggactacagcaaagacagaaagtatctgcaggatgacctcattacatcaggtgttatattttatcttttttgcctcagtttctagtgaatgcgttactaaggtcttcaaagacatcagctttcaaggaggtgacctgagtactgttttcacaccgagcgccacatactgccgcttggtctgcactcaccacccacggtgcttgctcttcacgttcatggctgagtcatcttcggatgatcctaccaaatggtttgcctgcatcctgaaggacagcgtcacagaaatattgccaatggtaaacatgacaggcgcgatctctggatattccttcaagcaatgccctcagcaattaagtacttgcagcaaagatgtgtacgtgaacctagacatgaagggcatgaactataacagctctgtcgtgaagaatgctcgagaatgccaggagagatgcacagacgatgcccactgccagtttttcacatacgcaacagggtattttcccagtgtggaccatcgtaaaatgtgtcttttgaagtacacccgaacggggacgccaaccacaataacgaagctcaatggcgtggtatctggattttcactgaagtcctgtggactttcaaacttggcttgtatcagggacattttccctaacacggtgctggcagaccttaacattgacagcgtggtggccccagatgcttttgtctgtcgtcgcatctgcacgcatcaccccacttgtttgttcttcacattcttttcccaagcatggccgaaagaatctcagagacatctttgtctccttaaaacctctgaaagtggattaccaagcacacgcattacaaagagccacgccctttcgggcttcagtctccagcactgcaggcacagtgtcccagtattctgccatccgtccttttacaacgacactgatttcttgggagaagagctggacatcgtcgatgtgaaaggccaagaaacctgtcagaaaacgtgtaccaataacgcccgctgccagttctttacctactatccatcgcacagactgtgcaatgagaggaaccgcaggggcagatgttacctaaagctttcctccaatggatctccaacgagaatacttcatgggaggggaggcatctctggatactcactgaggctgtgcaaaatggataatgtgtgcacaactaaaatcaaccccagagtggtaggaggagctgcgtctgttcacggtgagtggccatggcaggtgactctgcacatcagccagggacacctgtgtggaggctccatcattggaaaccaatggatactgacagcagctcattgtttctctgggatagagacacctaaaaagctgcgtgtctacggtggcattgtaaatcaatcagaaataaatgaagggactgctttcttcagggttcaagaaatgataattcatgatcagtatacgacagcagaaagtgggtatgatattgccctgttaaaactggaatcagccatgaattacacagattttcagcggccaatatgcctgccttccaaaggagatagaaacgcagtgcacacagaatgctgggtgactggatgggggtacacagcactaagaggtgaagtacaaagtactcttcagaaagccaaggttccattggtgtcaaatgaagaatgtcagacaagatacagaagacacaaaataaccaataagatgatctgtgcaggctacaaagaaggagggaaggatacgtgcaagggagattctggagggcccctgtcctgcaaatacaatggggtctggcacttggtgggcatcacaagctggggtgaaggctgtggtcagaaggagagaccgggggtctacacgaacgtggccaagtacgtggactggattctggagaaaactcaaacagtctgaaagagttcaactggtatcactttgtggccctggaagattattccatagaaatgagcttgacgtctctgatgaagacactgggatactgactcttccactgtaaccaattgaatggccttgatgtacgtaagaacacccagaaagaaaactattattttcagaattcctgatctgggagaaccactggttgttttctgcatccagctactactcaaggaaacaaatacagcaaggagattttaaaaataaaaacacatcagatatataaggaaaatatc

SEQ ID NO: 2545 - DNA, 1204 bp, Mus musculus
ggatgattagaatataaccaaagtggcatgctgaattcgccataatcaaggaaccttttccgggtggggaactcagaaattgctcaggaaaatggacaaaggaagtatggtggccctccaccaggctgggattctacacccccagaaaggggctgcgagattttcattgggaaacttccccgggacctctttgaggatgaactcataccattgtgtgaaaaaattggtaaaatttatgaaatgagattgatgatggattttaatggtaacaacagaggctatgcatttgtaacattctcaaataagcaggaagccaagaatgcaatcaagcaacttaataattatgaaattcggactggccgtctcttgggagtctgtgccagtgtggacaattgccgattgtttgtgggaggaatccccaaaaccaaaaagagggaagaaatcttatcagagatgaaaaaagtcacagaaggagttgttgatgtcattgtctacccaagtgctgctgataaaaccaaaaaccggggatttgcctttgtggaatatgagagtcaccgagcagccgccatggctaggcggaggctgctgccaggaagaattcagttgtggggacatcctattgcagtagactgggcagaaccagaagttgaagttgatgaggacacaatgtcttccgtgaaaatcctgtacgtaaggaaccttatgctgtctacctcggaagaaatgattgaaaaggaattcaacagtattaaaccaggtgctgtggaaagagtgaagaagatccgagactacgcttttgtgcacttcagtaaccgagaagatgcagttgaagccatgaaggctttgaatggcaaggtgctggatggttccccaatagaagtgaccttggccaagccagtggacaaggacagttatgttaggtacacccggggcaccggtggcaggaacaccatgctgcaaggagaatacacctaccctctgagccatgtttatgacactaccacaacctaccttggagctcctgtcttctataccccccaagcctatgcagccattccaagtcttcatttcccagctactaagggacatctcagcaacagggctctcatcaggaccccttctgtcagaggtaacactagctagttcttgtctttccataactcctaaatttcaaatgactaataaactatagtttagatgaact

SEQ ID NO: 2546 - DNA, 980 bp, Mus musculus
agatcattatctaggacttgcaaacaagagcgttaaggatgccatggccaaaatccaagcaaaaatccctggattgaagcgcaaagcagaatgaaaaggccccaaacagtagacattcatctttaaaggggacactcccttggttacggggtgggcgggtcaggggtgagccctgggtggccgtgcagtttcagttatttttagcagtgcactgtttgaggaaaaattacctgtcttgacttcctgtgtttatcatcttaagtattgtaagctgctgtgtatggatctcattgtagtcatacttgttttccccagatgaggcacttggtgaataaaggatgctgggaaaactgtgtgttatattctgttgcaggtagtctggctgtatttggaaagttgcaaagaaggtagatttgggggcaggaaaaacaacccttttcacagtgtactgtgtttggttggtgtaaaactgatgcagatttttctgaaatgagatgtttagatgagcatactactaaagcagagtggaaaaatctgtctttatggtatgttctaggtgtattgtgatttactgttagattgccaatataagtaaatatagacataatctatatatagtgtttcacaaagcttagatctttaaccttgcagctgccccacagtgcttgacctctgagtcattggttatacagtgtagtcccaagcacataaactaggaagagaatgtatttgtaggagcgctaccacctgttttcaagagaacatagaactccaacgtaaccgtcatttcaaagatttactgtatgtatagttgattttgtggactgaatttaatgcttccaaatgtttgcagttaccaaacattgttatgcaagaaatcataaaatgaagacttataccattgtgtttaagctgtattgaattatctgtggaatgcattgtgaactgtaaagcaaagtatcaataaagcttatagactt

SEQ ID NO: 2547 - DNA, 2408 bp, Mus musculus
gggtgccaggacctccggtggataccagactgctttttcagagacaggccatggacacagtgtgtattgcggtcgttggagctggcgtgatagggctgtctactgcagcatgcatttcccaactggttcccggatgcaccgtcactgtcatctcagacaggttcactcctgataccaccagtaatgtagcggctgggatgcttattcctcacacgtgtgcagataccccggtacccacacagaagcgatggtttagagagaccttcgagcatctttctgaaatcgccaagtctgcagaggctgcagatgcgggtgttcacccggtatctggttggcagatattccgcagcgtccccgctgaagaagtgcctttctgggctgatgtggtgctgggatttcgaaagatgacagaggctgagctgaagcggttccctcagtatgtgtttggccaggcttttacaaccctgaagtgcgagacttctgcctacctcccgtggctggagagaaggcctgcctgcctacagaacccctgggccacgcccatacaccctccgtggagggtccaaaggaccggaagctgctttatacccgatgtctgatgtgcttggagtgatttgtgtgtattcatggagtcggccaggctggggtggacggacactcccagagggtatagcagcagctcattgtcagagagacagtgatggcgtcaagacggaattagaccatatgcatctggcggctttgccaacctaaaatacattttaaagctctaactctggagcaatgtcaggctatgaagaaaccagtctctaagacttgccaattgagactttaaactaggcttcttcttgtttctgaacaaactgactgaacataagtgactttttgttttgttgtttttaaatctctgatgagaaggtgctgttctttgggttgagatctgcgagttagctttaaagctgactaacagtgcacatgcagagagcagtcctaacacaactcgcacaagttcgcatcgtccttgagtcccacccggccatccttagctctctcttcatcctcagtgtggctgtttctcacctctccacttcaaacctgttttcctatgatgcctaaaaactcattctgattgactttagagactcctaacaaggttgcctctattcattctcgagtgagaggagacctaactccataccaagagagatgttttccttcagatactgaatggttgggccagagctcctggcagctctaataagccatgtttggccccattctccacaagccaattaaacaatggtgaaaagcaaagtggagcaaacaaaccaacaaaaaggagtgttattcagtctagccacattgttaacaaaatccagtccaccctccagaaccacacccaccatcaggtttaaagagaggggagaggtatgtgtcactgaagcgctccggtcagggtgtggtctgggtaccacgctgtgtccagccgcagtcttttctgcacatggtctaacaagttgtcaggactgcctgaatctctttccaggagacactcagcctctaacactggggttcagccttcctctctcagcatgagattcctgggggaaaatggggtccattttcaacagtctgatagctaaagcaaggggacaaacgtctctcaattatcttcgctcctaccgggatccattccacattcagctctgagccccaattccaggcagccttgctcggcctccagcctcctccattctattgggatggatgctctcatcctctgaggtaggatgcaccgctgcctgagtgttgtgtctggccagcagatcacaacctgggttctagcctggaaaggcattttggaaacctggaagagaagaggggttggctgcgcgacataaggaaggaaccaagacaaagctctctgctcaaggttcaatttttactatttcagcactcagttataaaggaagggggaggtgcccaattcccgccaaataatcttggaatccagtagcagggtgatcacgtgatggtttcggaacagcaaagcggcaggttccagcagtaggcgtggcagaaagattgagcgggaagctccatccctgagcaagcaggtttcaggctgggggaggggagactacacctgagaagccggctgggcatgggcaaggtaccagcctccttcctctcctctagctgcagaagtcctgggcaagtagtcttcagggacatagccccaagtcttttaccttgtctctgacattgacttaatctgcaaaaggagttttcaccttatagcttagcaatgcaggggcttacttgggtaacattctcaaaataaggtatagtctgtctcaaaggaatgtttgccagcttagaaaccacataaaatttaaatgattttc

SEQ ID NO: 2548 - DNA, 1292 bp, Mus musculus
gactggcaggagtccctgtggcctgcggtgcaccgtggaagagccatgtctactttccgcctggccctcatacagcttcaagtttcttccattaaatcagataaccttacccgggcttgtagcctagtgcgggaggcagcaaagcaaggtgccaacatagtttctctgcctgagtgcttcaattctccatatggaacaacctactttcctgactatgcagagaagattcctggagagtccacacaaaagctttctgaagtagcaaaggagagcagcatatatctcattggaggctccatccctgaagaggatgctgggaaactgtataatacctgctctgtgtttgggcctgatggaagtttactggtaaagcacaggaagatccatctgtttgacattgatgttcctgggaaaattacgtttcaagaatctaaaacattgagccctggtgatagtttctccacatttgatacgccttactgcaaagtgggcctgggcatctgctatgatatgcgcttcgcggagcttgcacaaatctatgcacaaagaggctgccagctcttggtgtatcctggagctttcaatctgaccacaggaccagcccactgggagctgcttcagcgagcccgggctgttgataatcaggtgtatgtggctacagcctctcctgctcgggatgacaaagcctcgtatgtggcctggggacacagcactgttgtggatccttgggggcaggtcctaaccaaagctggcacggaggaaacaatcctgtactcagacatagacctgaagaagctggctgaaattcggcagcaaatccccattttaaaacagaaacgagcagacctctatacagtggaatcaaagaagccttgatatctgtttcaaaaatgtcaccaacaggatgatgctctgtcagatgatcaactctactacatctcttttttttggagggaggggggaacagggccatttcatgttaattctatcaatgatctgtgccacaaggtcccctattttaattaaaagtttcatctttaattaaaatgtgcttggtaacaatgttctagctcttaactagtctgatggttcctaggcatttcagtcccaagatccttttgaacaattaaaaactgaagcctctaagcattgtttccatgtgtggtgggctggtcccatctgtctgagaaaatgtacatttaccagaacactaattttcatggtgctaatatcccatcaacatgacacttttaaaactttttattaaaaattgttttcatacaataaaaaaa

SEQ ID NO: 2549 - DNA, 1212 bp, Mus musculus
  misc_feature 316: n = A,T,C or G
taatagatttaaaaaaaaaatccaaactaagactgggagaaaaaacaaggaagagagggaagcgagatctgagagatggggctgagactcccggggtaggctcagcatggttttgactattctccacatccggacttagaaaagtgagtttgtcagggcaggaagagaaaggtgaaatctggagcgggcagagctgggcagatggatagaaaaggaatggaaactacacaggttgtgtgtgtttgtgggggggggaagtgggggctctaagatctgaggttaggcttgtttaaagctgagccattgttgtccccanaggaatcaaatcttactgcttttgtgaaggaagagaggatggcaacgatattgcacgaaaagagggaagggggtaggcaaggaggcagggaggaactttcatgtgctattcgctgactgggattggtaatagatagctcttggcccaccacaagctgcttccacacagcctaactgactgggagcagctatggatcaccatggccatgttttgcttgcagggggccatttcactgtctgtcacatcttcagtccatagacacatccctgcacagtgccctttccatagacgtggataggaggagagggctcaggcctggggctgtggagatgattgcatgaatagggggcgctatgcccagtgggtaccttgtctcctctctgggaaaggatctcttctgatcctgatgggaaggggcttagccagccaaagggcagggataggaggctttgtctgctgcctgctggctaccatcttgagtgtgacttacaccagggtgcagacaaagtgagcttgacctggaagcctagaggcccaagaggccggggtgaagcaagtatctctgagatcaagcctacccttcagctcagagagtggacccctgcctaggctcccacacatgatcctaggtcccagatatgccacccgtggagcccgtttcaaggcccatcttccagaatgtttaaacctgtgtatgtaaccagtaaaatgggagtttgtactgtgtattgaatctgtcttcttattggcctctgtgggctgctgggggagacctggagagttgtttattctagtgtcccccaccccctgggactctttgcttttgcccagttttctttctctgttgtggataagattttgtagagttgtgtgttgtatgcttgtgtttgaccatt

SEQ ID NO: 2550 - DNA, 2069 bp, Mus musculus
ggcaggagcgggagctttttgagtactttgtggttgtgtccctcaagaagaagccatctcggaacacctacctccctgaagtctcctaacagtttcccaagctggaccgtcccaccaaacagatgcgggaggcagaagaaaggctcaaagctatcccccagttttgctttccggatgccaaggactggctccctgtgtcagaatacagcagtgaaaccttttctttcatgctgactggggaagatggcagcaggcgctttggctattgtaggcgcttactgccaagtgggaaagggcctcggttgccagaggtgtactgtgtcatcagccgcctaggctgcttcggtttgttttccaaggtcctagatgaggtggagcgccggcgtgggatctcagctgcactggtctaccccttcatgagaagtctcatggaatcgccctttccagccccagggaaaaccatcaaagtgaagacatttcttcccggcgctggcaatgaggtgttagagctgcgtcggcctatggactcccgcctggagcacgtggactttgagtgcctcttcacctgcctcagtgtgcgtcagcttatccgaatctttgcctcattgctgttggaacgcagagtcatttttgtagcagataagctcagtaccctgtccagctgctctcacgcggtggtggccttgctctaccccttctcctggcagcacacattcattcctgtcctcccagcctccatgattgacattgtctgctgtcccacccctttcctggttggcctgctctccagctcccttcccaaactgaaggagctgcctgtggaagaggcactgatggtgaatctgggatctgaccgattcatccgacagatggacgacgaggacacactgttacctagaaagttgcaagctgctctggagcaggctctggagaggaagagtgagctcatctcccaggactctgacagtgactctgatgatgaatgtaataccctcaatggacttgtgtcagaggtgtttatccggttctttgtggagactgtgggtcactactccctcttcctgacacacagtgagaagggggaaagggcttttcagcgagaggccttccgcaagtctgtggcctccaaaagtatccgccgttttcttgaagtttttatggaatctcagatgtttgctggcttcatccaagacagggagctaaggaagtgtcgagccaagggcctctttgagcagagagtggaacagtatctagaagagctccctgacactgagcagagcgggatgaacaagtttctccggggcctgggcaacaagatgaagttcctccacaagaagaattaaatgcctttcctggtagcagagtttagtgctttgcagagcccagggagagggcccagcctgggaccctgtgggctgctgtggctactttgcttctacaggccccactccaagccagcccacttctgccttcaccatattccaggatactgtttgtaaataatctgctgtaagctttcctgtttttgtaacaagcaaagaaaatctggtaaatatttgtatattcccaaagggccaggtgctttcttgccttgtctgagcttggatggagtcttgctgggtgctggtgactggccaattatgtgcagctgactgtctcagccaaaccactcatgtttcctcaagacttctggcctgtctgcctgaggccctgctgccagtcttgggccctggagagcaggtgctgtcttaattatgtataagaggactggttttttttttgtttttgtttttttggttgtttttaaatctagagtttctaattttttcttcttagtagttcccctatctgccaagcctcttgtttctgaaaggcaaggatcacttcgcccttttttgcaatgtagagccaggcacttgggcctggtccttgttccttccatcctctgacatggtcagtgagtcatgggaagcggagctcccgtcagtcagtggtggccatgatgcggtacagggcatttctccttccaccatccacagatgttctcaataaactgtacattcattttg

SEQ ID NO: 2551 - DNA, 1277 bp, Mus musculus
gtggggggggccccccgccccgctcgaagctcccggaggcgaggctcgcgcgcccgcccccgccctggccccagcgcccacccggtcggccccggcccagccatgatcaaggccatcctcatcttcaacaaccacgggaagccgcggctctccaagttctaccagccctatagtgaagacacgcaacagccaatcatcagggagactttccatttggtgtctaagcgcgatgagaacgtttgtaatttcctagaaggaggattattaattggaggctctgacaacaagctcatttacagacattatgcaacactatattttgtcttctgtgtggactcctcagaaagtgaacttggcattttagatctaattcaagtatttgtggaaacattagacaaatgttttgaaaatgtttgtgaactggatttaatattccatgtagacaaggttcataatattcttgcagaaatggtgatggggggaatggtattggagaccaacatgaatgagattgtcacacaaattgatgcacaaaataaactggagaaatctgaggctggcttagcaggagctccagcccgtgccgtatcagctgtaaagaatatgaatcttcctgagatcccaagaaatattaacattggtgacatcagtataaaagtgccaaacctgccctcttttaaataagtattaaaaaggccactcccaggtaaaatccagagggaacgtcatctaagtttaccatgcaattgtttaccaaaaatagtgaaggagactcttaactttgctcttggagttaagtcaaggtactgtatagaagctgcataaaatcagtatggaagttcaatgttgcttttcttgctcagtgattttaaagaaattgactagctcccgtgtgattttgttttgttttgtttttcttttcttttctaaattgcattcctatgcccacataaaggcatgcctctatatattggctattacagtatttcgaaaagtgagatgtttctttaattatgtacaacccaaaatgttgatgttttgtatggatcacaagtgcagcattctctaattctttctgctgtttgtcacaattgttatttaaagaaccaagtatgtattgcatgaaaacatgaccttttctttagtttaaataaactccaaggtaactggacttctaaagtacctttctgttttgcttggtatctactttagcaataattttttttttacaatcttctgactcaacaaagtaaataaaagtatattttcccactgtt

SEQ ID NO: 2552 - DNA, 1076 bp, Mus musculus
gttccctgcattgagaaagtatatagtcaggaacttgaaattctaaacctagcatcctacctttagattttagtcttttttgggtccatgtctaaaaaatttgtaagtttaaaaatgagtaactgttgcctagttcactaagattttaaaacaaaatgacatgagcacagatagctcctaagcaccaggaaggctgtcttacaggtctgcaggctggcagtgtaagagtaggcagctgagcactcggactctggcaaggccccatttcaggtccaccgatggagccgccatggtgggaggggaggctctggaagagcaaaacgcatgctgaacctcttctctcatgagccacacttctccaggctacctcactggggcagggttttgaagagacaggtccagaccatagcagcctcaggtaaagctttactctctgataatttgcacatcctttgaacagctatttaattatttgctatcagcgatagtttaacctattttaaatgttatttatcttattttagtgtttgatatataaaagccatttaggaaattatttatggggttagtgccctgacccctttaatgtagcaaatacatatcaaaatgaaaccttgcatggaagcctagtgtctataaaaagaaatgatgtttattttctgttgtgatcatggaattgggatgttttaggcagaactatatcgccataaaacttagggggaaaaaagagacatgtccacactgtacttctaatgcccaggggtacgagtaagcctcagcagcctgagtgacaagacagaattcacacatattcgggcaactcaaattcaggtgagggcatttgttttgtttatgagtagccatattaacgatgctctttcatttgcacaaatggaatctgaaacattattgtccatgggagactctaaaagaaaaccataggtcagagtgacttgcagtttcagatgatagaggttttttaggattaaggataagctaattttattaaatgaaaatatttctatgttactttctcactgacagcatgtttctcaataaaatacctattttaactc

SEQ ID NO: 2553 - DNA, 304 bp, Mus musculus
ctagtcctctattcctacaaagcttccccatcgctatcacctcattcctttccctaggattgtacgataactggtttccgccatcggaacagttttcttcgatccatccaccaccggagacgcctttaccggaaccgacttaccaaagagcaactgaaacagattcctacccatgactatcagaaaggtcaggccaggagaagggccctttttcccagctgccctcatcttgaaggatttttgaacccagtgagtagataaaggattcaaaaaagaaccggaaaggtcccacctttgcttggct

SEQ ID NO: 2554 - DNA, 3244 bp, Mus musculus
ggaaaagccttgcgagcttaacagggccaccctgcccgaagcgaggatggcggtctctgcgctccagctgtggcgtatgggcgggctgctgagaagacgcttcccaacctgcttgtctccttggaagattcctcctcgtgtcctcaaatcctcacaaccggaagctctagtcagtctgacaaacaatgcagtagcctttgcacctctgcagacacttactgatgaggaaattatgatgaagcagacagtcaaaaaatttgcacaggagcacgttgctcctctggtttcctctatggatgagaactcaaaaatggagaaatcggtgatccagggattgttccagcaagggctgatgggcattgaagttgaagcacaatatggagggacagaagcttcctttttctgctctgtcctagtgatagaggaactagctaaggtggatgcttcggtggctctcctgtgtgacatccagaacacaataattaacaacctgtttagaaaacacgcttcagaagaacagaaggccacctatttgccaaagctggttacagaaaaattagggagcttttgcctctctgaagctggagccggtagcgactctttcgctatgaaaacaagagctgataaaagtggaaattactacgtcctcaatgggtcgaagatgtggatcagccatgccgagcatgcagagctcttcctggtcttcgccaatgtggaccccagctctggctacagaggcatcacctgcttcttagtagaccgagatacagaaggtttccagatagggaaacgagaaaataaaatgggcatcagagcttcatccacctgtcagttaacatttgaaaatgttaaggttccagagactaatattttggggaaaattgggcatggttataagtatgccataggaagtcttaatgaaggtagaatcggaattgctgcacagatgctaggactggcccaaggatgttttgactacactattccatacattaaagaaaggatgcagtttggcaaacgaatatttgattttcaggggctccaacaccaagtggctcaggtggccacccagctggaagccacacggttgctaacatacaacgctgctaggctcgtagaagccggaaggccatttataaaagaagcatctatggccaaatattatgcatctgaggtcgctgggctaacaacaagcaagtgcatcgagtggatgggaggggtcggctacaccaaagattaccctgtggagaaattcttccgagatgccaagatcggtacaatatatgaaggagcttccaacatccagctgaacaccatcgccaagcacatcgatgcagagtactgatgactgtgggatgggccctctgcgtcactgacaaaccatttccagctgctgtgccttattgagcagggtctagagcagtgcagggcttccttggacttcccttgtcctggtctcaggcctggattttgttcctgtctctttccaatctactctaagtctatttctaagcttctgaacgcatatttctcatcctagttgcagagtatacaaaagtttcactctagcagcatttgggaagaagaaaccatttgaggtattggtattgctgacagaaatagtcactttatattcctactaaatctttgtactgtggtatgagccagaggagcgtttgttacacttggcaatttttattcaatactttatagattcagtggtaagtggctaaacaaggtagaagctgataaaatttatttggaaaaatctagaatcttagttctaaatatcaaaaatagtagaaaataaaaagtgtagcttgtaggccatataattgacaataacaaaaagtcccaaatgttattttaaccaacaaaaggagtatgtttggctgctataattgaactatatgaaagatgtattatgtggtggcttttagcagcccatttaaaaaacatgtccctgtattagttttcaactataaagtttaagtaatttggcctaatcatctgaaaataatttattagatcatgcactattttttggtagtatgatttatttctgtattttaattgagtattttccctcaaacttggttattggactttatcctaaatagtaattaattgagaaattcaattttggttttcaaaattgattcttaagagaaatatacccccataagaaaataatatcacaatctcataaggatagggaatggagacttggtagtctgaaaacatacattcagtataaatatatgtagtcatttatatagtatattagataattttatatttgtgaagacaaagatctatgttttacaatgtaaatgaaaaacaggcaaagcctaatcagatatccagctggtgaagccattgatcagtgttagggatttacagtcgggagaagacgctctagttgcagaccctgagtcccctggagagagaagtagacagtagacaaacgagtcgcacatttccagaggaaacatcacaagttagatgtgaaaaatgcccgaggctcacgcagttgctggaaataatcgttacttctagatagaaagtattttggtgcttttgcaaaaggataatgtttattaagaaacttgacattttctaggtaattttgctttgcacagttaatgtttattgagctaaattaatttccacaatgcaaatcatagttaaatatgcaaggttgtataaatacagttgaaataggaattacattaaaacagtaggaagaaataaaacaaatttagaccttgaatccaaagagataaggtctacttgactttcaaatgggggaaatgatgaaaggcctcacccagtctcagaacagacagatgagtgtgataagaaaggaaggggtggatgcagaccctgacagggcagacaccttccactcctgtaataatgggaaagagcagggcttagagatgatgcagccgcgggagtcaggatgagtaaacagcctgccctcctttcctagactcatggcaatcctcctgcttcatgtgtaacctgggctggccgcagattcatggcaatcctgctttcaggcttccagtgctgagattttatgtctgcaccccagctcccatttctgacttgttgattttgaagtcatgcccacgattacagctttgtcaattattctcatttatttctatttgttttgctctatgtagttcccagttatgtttttaggggtaataaagttcatggctgttggatcacc

SEQ ID NO: 2555 - DNA, 1425 bp, Mus musculus
gcctcgcagcagcacggacccgagagccgccgctgccgccaccggcacactcgatctgatttgtactcactgtaacaagcaccgctcccaagaccttctggatccagacccagggctccagctccctggaaatccttagcacgaaggaggctgcagtcttggattccctggtggaggacggactccactgctctctggtcttgccccctgatgatgatagtgtgaccactggcatcttcatgagctccagaggtcacagcacgctcccacggactctcatggcccctcggatgatttccgagggagacataggaggcattgctcagatcacctcctctctcttcttgggcagagccagcgtggcctccaactggcacctcctccaggcccgcggcatcacctgcgtcatcaatgccaccatcgagatccccaacttcaactggccccagtttgaatatgttaaagtgcctctggctgacattcctcatgcccccattagactgtactttgacactgtggccgacaagatccacagtgtgagcaagaagcacggggctaccttggtgcactgtgcggcaggcgtgagccgctcggccaccctctgtattgcgtacctgatgaaattccacaatctgtgcctgttggaggcatacaactgggtgaaagcccggaggcctgtcatcaggcccaacctgggcttctggaggcagctgatagactacgagagccagctctttgggaagtcttcagttaagatggtacagacaccctatggcatcatcccagacgtttatgagaaggagtcccgacacttgatgccttattgggggatttagtgttgccacagctggcatccacagcccctcagcagtaccagcatctgccacacaccatctgttcccctcttcctctctctctggttctcccgagagggtttctacgctgggtgttcgggtttaagagatggggaggggaaatacgtgcgttgcctgtgacgttttttaaaactagcattttgaaatagtgaacatggaaatctttaactggcctttaatcatttgtaacagctggaccagtgtaggacacctttcctgctttctttctggctcctgacttttaagagccttagcaggtgcagtaggagctcattgctcagttctggtcctgattaaccctctagagaccagctttgccaagggctgcaggctggtcggtttaaggaagatcaagggcagctcagtccctacaggattagcctggtccttttcctctgttatttgattctataagttaagttcattgttgtttagttgataagtggttatgataaaaatctgttgcaaagaccctcttgaaattagtgtgccctgggatcacattagcgttatttttaataaacttgcttaacataaaaaaaaaaaaaaa

SEQ ID NO: 2556 - DNA, 2779 bp, Mus musculus
aaaaagtgcgttgtttcacaacctgagacttgtatatataatggtagactgtaaagggtaccttccccacctgacattctgggatgtcagtttgtaggtagagattacgagttgttttgttttgttttgttttgttgttgttgttttttttccttatctgagcctaactccattcaactggttacctctttgtgggtgtctttaatgaagcttgtaaatggcagaaagcaaacattcccgtggtttggtatggatatcggtggaaccctggttaagctggtttactttgaaccgaaggatatcacggcagaggaagaacaggaagaagtggagaacctgaagagcatccggaagtatttaacttctaacactgcctacggcaaaactgggatccgggacgtccatctggaactgaaaaacctgaccatgtgtgggcgcaaagggaacctgcacttcatccgcttcccgacctgtgccatgcacttgttcatccagatgggcagcgagaagaacttctccagcctccacaccaccctctgtgccacgggaggtggggctttcaagtttgaggaggacttccgaatgattgcggacctgcagctgcataaactggatgagctggactgtttgattcagggccttctttacgttgactcggttggcttcaatggcaagccagaatgttactatttcgaaaaccccacaaatcccgagttgtgtcaaaaaaagccatactgtttggataacccgtaccctatgttgctggttaacatgggctcaggcgtcagcatcctggcagtgtactccaaggacaactacaaaagagtgacggggaccagtcttggaggtgggacattcctaggcctatgttgcttgctgactggttgtgagacctttgaagaagctctggacatggcagctaaaggcgacagcaccaatgtggataagctggtgaaggacatttacggaggagactatgagcgatttggccttcaaggatctgctgtagcatcaagctttggcaacatgatgagcaaagaaaagagagagtccatcagcaaagaagacctcgcccgggccacattggtcaccatcaccaacaacattggctccattgctcggatgtgtgcactgaatgagaatattgacagagttgtgtttgttgggaactttctcagaatcaatatggtctcaatgaagttgctagcatatgccatggacttttggtctaaaggacagctgaaagcactgtttttggaacatgagggttattttggagctgttggggccctgttggaactgttcaaaatgaccgatacacagtagaggaacagcccctcgtgcggacagaggactgacgggccttgccagagaaggtgacatctccgtggggcagaaaccaagccactatggtggatgaacctgctgtatttgtaaataacctaaaatcctagaccttttgctcttagctttcaagcttatgatacaaaatggggaatataagaattttttctgtatactgtatttttaaaaaaaaaaaaaacaagaaattgtgcagcgtggccaaacctaaccaatttcatgcattaactttgaaaacttgtatgatgttcattcagaggggcctgaaatgaaagcgctgtccatttttcttctggggtttactgatcagtgtggtaattttaacttcatttagtaattactctaggagattttgcctttacttatattttttcatgacgtttcatgatttgctgttggtttcaaatgaaactacgaatctggtatgttgcactgtgaacactttgttctctctctctctctcaaatcttttctgttgcaatgtcttaggacaaaaaaaaaagaaaagaaaagaaaaaaggatcccccccttctgtttttgttcctcgtgatttctctcttctctgtctgtatgcttttctcattgtaattgctcctgtcaatcaaggtgctgaccaactcaacacaaagttaaacacatatctgcagttctaaacatgtgaccctgtgagaagactttaaacgaaggggttaatgaaagtggcgaacattgaacattgtgtgcagttttatctttgtcttcttacacccctcaccactgtcatgtcccatcggatttactttacactacactgtaatagtctgagatgacttgccctcatttgcatatgccgtatgaagggcagcaaacccctgtataaatttggaggggctcccatagctgatctgattgatcaccccagactcagggcaaaagtactgggtcgagatatcagttagaaataatggtctgttttatatatgtttgtacctaggaagggtgtaacgagatatcctaagtaataatgttgaagattgtttctttttctttttctttttttcctgatttctgttttagtatttaaactgagatcggtactttatttcatttctaaaactttaatataatttatgatacgctcgcatatatggacatttcatcctgagaggttttcattaagatagatgggtcactttcaaatgaggatgttgtacacacgccgtaacaggagatctagtgatcttttggatcaagggttcccttccaagggctttttgaaaggctactccttggtcagtcttcacctctctaccttgtggagccccgctcttcatttccatatccttgagtcttgaagaagctgatgctaatggaagaattcacttgtctggtttaaataaagccggtttgtgttgggaaaaaaaaaaaaaaaaaaaa

SEQ ID NO: 2557 - DNA, 726 bp, Mus musculus
agagcagccctggcaggctctcccagctccccttggcaggctcttcctttttctgaggaaagtggcttgattcccctgactccttgccagctgctgatccgtacatggccaggacagccacagtgcaagggacagctgcattacctagggtaacagtgaccaagtctggagacccttttgtccagttaggctcagcttgggtctctgtcacacctatgaaatccttctggggtgctgtcttacactccggtggcttcccttagatggtggagctaggttccttttcctgtcttggggccctgcctgtcaccccactgcctactgggggccaaggctgttttctctcctggatatccttgtgttgtaattatgtacagaaggtcaggttggcctggggtgggtgctgtcctttcccctctccacagcgctgcttcactccagtttatttaagaggatatgctaggaagtgtcctccgtctccttcccacccgtgccctgctctctcctaactcacttgctttgtatgctcaggcctctctgctgcagtcacaaagtctgtcttcgattttgttcctttctagccatcaagcccctctctgaataagggtcttcccttgagtccaggggtggaaccaatgtttacattctcttctgtcttggtcccacctcagtggcagttttgtggcgctttgaggaaccggaaaatgaacctgctgttatatctgt

SEQ ID NO: 2558 - DNA, 1141 bp, Mus musculus
gagagcccagggctgtcagttcttggccagccaggacccttgaccgagtgctccggtgctatggccgccccaccgcagctacaggctcttctccaggccgtcaacaagctgctgcgccacgccgctaccacgctgcgctggccgtgataaagggcttccggaacggggctgtctatggagtcaaaatccgggcccctcatgcactggtgatgacctttctcttcaggagcggcagtctcagagagaagcttcaggccattctgaaagccacgtacatccactctcggaacctagcctgctttgtgtttgcctataagagtctccatgccctacagtcccatgtgcaaggcgagacccaccagatgcactctttcctggctgccttcatcggggggctcctgctgtttggagagaacaataacattaatagccagatcaacatgtacctgacctcacgcgtcctgtacgccttgtgccgcctgggtgtggagaagggctatatccctgcgctcaagtgggacccgttccccttgcacactgcggtgatttgggggctcgtgctgtggctttttgagtaccaccggcccactctgcagccctccctacagtcctccatgacctacctctacgaggacagcaacgtgtggcacgacctctcagacttcctcatcttcaacaagagccacccctccaagtaacacagtccaaggtgcttcaggaactcctccgcccagacagcttccaggcagcagcccaccttccaggcagctgctcagggtatggttctgttggcataccctcgtggaggagcctgccttctcaaagtcataatcctcacactccaacttgtattaacccaggctcccatttgctgaagtaaaagtactgagttttccacttaccagtacttttgagtactgtagcaagtggctgggtcccattaaggagtctgtggcttgattccagatgctcttccgacttctgtaaggccagggcaaactcaccccctctcagcttcaggtcattcacttcaggggaggaccctccgaggagagtgtcttcctggtggatatgatggcccttcccctctactgtatatcagagggctccttgctagtgggcaataggtcacaaacacttc

SEQ ID NO: 2559 - DNA, 2094 bp, Mus musculus
tagattaaatggcaggagcgtagctggaatggacaagggtcttccgtggagacttggcccgccactcctccggcatgaagctcgctcatctcagtctctttctcttggctctccacttgagttcttccaggtccccgtcagcatcagatctgcctcaggaggagctggtcgatcagaaatgcttactgcagaaatacacgcatcgctcctgtaacaaggtcttctgccagccgtggcagagatgtatcgaaggcacctgtatctgcaaactcccctaccagtgcccaagggctggcaccccagtgtgtgccatgaatggaaggagctacccgacatactgtcaccagaagagtttcgaatgtcttcacccagagatcaagttttcacataatggaacgtgcgcagctgaaggaaactttaatgtttccttaatttatgggagaacaaaaacagagggacttgttcaagtcaaacttgtggaccaagatgagagaatgttcatatgtaaaaacagctggagcatggcggaggccaacgtggcctgcgtcgaccttggatttccactgggtgttcgtgacatacaaggaagttttaatatatctggaaatctccatataaacgacactgaatgcctgcatgtacattgccggggagtagagaccagtttggcggagtgtgcctttacgaagaggagaactgagttgtccaatggcttggcgggggtagtgtgttacaagcaggatgcagatttcccaacgagtctgtccttccagtgtgtaatgggaagcacattcctcaggagaaagcctgcaacggtgtcaatgactgtgggagaccaaagcgatgagctgtgttgcaaaggttgccgaggtaacgcttccctttgtaagtcgggagtttgcattccagaccaatacaagtgtaatggtgaggtggactgcatcactggtgaagatgagagccgttgtgaagaagaccgacagcagaacattccaaaaggccttgcacggtcagctcaaggagaagctgaaattgaaactgaagaaacagaaatgttgactcctggtatggacaatgaaagaaaacggataaagtccttattacctaaactctcctgtggagtcaaaagaaacactcacactcgcaggaaacgagtgatcggagggaagccagcgaatgtgggagactacccatggcaggtggcaattaaggatggccaaagaatcacctgtggtggcatttatatcggtggctgttggattctgactgctgcgcactgtgtcagacccagtagagctcacagttaccaagtctggacggctttattagactggctaaaacctaactctcagttgggaattcaaacggtgaagagagttattgttcacgagaaatataatggagccaccttccaaaatgacatagctttgattgaaatgaaaatgcacacgggcaagaaagaatgtgaactccccaattccgtccctgcctgcgtcccgtggtctccatatctgttccaaccgaatgacagatgtatcatctctggatggggtcgagggaaagataaccaaaaagtctactcactcaggtggggcgaagttgatctaataggcaactgctctcagttttacccagatcgctactatgagaaagagatgcagtgcgcaggtacgcgtgatgggtccattgatgcctgcaaaggagactccggaggccccttggtctgtgaggataccaacaatgtcacttacgtttggggcattgtgagctggggagaaaattgtgggaagcccgagttcccaggtgtttacaccagagtggccaattattttgattggattagctatcacgtaggaaggtctcttgtttctcaacacaatgtctgaagctatgacctccttctttctacatttattcttttaggagttacattttaattgaaatgaaactgtatagttagttctcctcagagctggcaagaagcaactcctactggctagtcctaaagtttcttccaagtttatgctgttttagaattctgccatataatctacaataaatattccggctaagcatacaaaaaaaaaaaaaaaa

SEQ ID NO: 2560 - DNA, 6585 bp, Mus musculus
gggccatgctcctagtctgcccgtgcttcttcctcctggtggttctgggaacccgctgggcgggctggggcagccaccaggcagaggccgcgcaactaaggcagttctatgtggcagctcaggggatcctctggaactatcatcctgagcccacagatccaagtttgaattctataccttccttcaagaaaattgtctacagagagtatgaacagtattttaagaaagaaaagccacgatctagcaactcaggacttcttggacctactttatacgctgaagttggggacgtcattaaagttcactttagaaacaaagcagacaaaccactaagcatccatcctcaagggattaaatacagtaaattttcagaaggggcttcttacgcagaccacacgttccctgccgagaggaaggatgatgccgtggctcctggagaagaatacacctatgaatggatcgtcagtgaggacagcgggcccacacctgatgacccaccatgcctcacccacatctactattcctatgaaaacctgacccaggatttcaactcgggtctgattgggcctctgcttatctgcaagaaaggcaccctgaccgaggatgggactcagaagatgtttgacaagcagcatgtgctcctatttgctgtgtttgatgaaagcaagagccggagccagtcaccatccctaatgtacacaattaatggctttgtgaataagacgatgccagatataacagtctgtgcccatgaccacgtcagctggcatctgatcgggatgagctcggggccagaattgttttctattcacttcaacggccaagtcctagagcagaaccagcataaagtgtccaccgtcaccctggtcagcgcaacatctacgactgcaaacatgactatgagcccagaaggaagatggattgtttcttctctcatcccaaagcattatcaagctgggatgcaggcttacattgacattaaaaactgcccaaagaaaacgaggagccccaagaccctcactcgggagcagaggcggtacatgaagagatgggagtatttcatagccgcagaggaggtcatttggaactatgcacccgtgatacctgcgaatatggacaaaatttacaggtctcagcacttggataatttctcaaaccaaattggaaaacattacaagaaagttatctacaggcaatatgaagaagagaccttcaccaaacgcactgacaaccccagcatcaaacaaagtgggattctgggccctgttatcagagcccaggtcagagacacactcaagatcgtgttcaaaaatatggcgagccgaccctacagcatttaccctcacggggtgaccttctctccttacgaagatggaatcaattcttcctccacctcaggcagtcacaccacgatcagaccagttcaaccgggggaaaccttcacttacaaatggaacattctagagtttgatgaacccacggaaaacgatgcccagtgcctaacaaggccatactacagtgatgtggacgttacaagggatattgcctctgggctgatagggctgcttctaatttgtaagagcaggtccctggaccagaggggtgtacagagggtggcagacatcgagcagcaggccgtgtttgctgtgtttgacgagaacaagagctggtacattgaggacaacatcaacaagttctgtgagaatcctgatgaggtgaagcgtgatgatcccaagttttacgaatcaaacatcatgagcactatcaacggctacgtgcccgagagcatttccactctgggattctgttttgatgacactgtccagtggcacttctgcagtgtgggaactcatgatgatattttgaccatccacttcactgggcactcgttcatctatgggaggaggcacgaggacaccttgaccctgttccccatgcgtggtgaatctgtgacagttacaatggataatgttggaacttggatgttgaccaccatgaattccaatccaaaacgcagaaacctaagactgagattcagagatgttaagtgtaatcgggattatgacaatgaggactcatatgagatttatgaacctcctgcacctacatccatgacaactcggagaattcatgattccttagaaaatgaatttggcatagacaacgaagatgatgattaccagtacttactggcgtcatcattaggaattaggtcattcaaaaactcatcattgaatccagaggaaaatgagttcaatctcactgctctcgctctggagaacagctctgagttcatatctccaagcacagacagagttgttgactcaaactcttcacgaatccttagtaaaatcatcaataataacctcaaagactttcaaagaacacttcctggctcaggagccaccgtggctggtaccctccttagaaacctcattggcttagatgagaacttcgtcctcaactcttctacagaacatcgttccagctcatatcatgaaaatgatatggaaaatccacagtcaaacatcacaatggtatacctacttcctcttggtccaaaaggatctgggaatcgagaacaagataaacctaaaaccatcaagacaggaagaccccacatgatgaagcacaggttctcctggatgaaagcgccagctggtaaaactgggaggcattcaaacccaaagaattcgtattctggaatgaagtctgaggaggacattcctagcgagttgatacccttaaagcaaaagatcacttccaaatttctgaatagacgatggcgtgtggcttctgaaaagggtagttatgaaataatagcagcaaatggtgaagacacagatgtggataagctgaccaacagtcctcaaaatcagaatatcacagtacctcggggagagagcacctctcacacaaacacaacaagaaagccaagtgacctcccaacattttctggagttggacataaatctccacatgtaagacaggaggaagaaaacagtggttttcagaaaagacagttattcatcaggacacggaagaagaagaaaaataagaagcttgcactacacagtcctctatctccaaggggctttgaccctttgagaggacataaccattccccatttccagacaggagactacttaatcactcactgttactccacaagtccaatgaaacagctctttctccagacctgaaccagacctctccttcaatgagtacggacaggtcacttcctgactataatcagtactcgaaaaatgacactgagcagatgagctcttctttagatctttatcagtcagtgcccgcagaggaacactctccaacatttcctgcccaagatcctgatcaaacacactctaccacagatcctagctacagatcctctccgccagagctcagccaggggcttgattatgacctaagtcatgacttttaccctgatgacattggtctaacatctttctttccagaccaaagtcaaaagtcatctttctcttcagatgatgaccaagcaatcccttcctcagacttaagcctctttaccatctctccagaattggatcagacaattatttacccagacctggatcagttgctcctttctccagaagacaatcagaagacctcctccccagacctgggccaggtgcccctttctccagatgacaaccagaagacctcctccccagacctgggtcaggtgtccctttctccagatgataaccagaagacctcctccccagacctgggtcaggtgcccctttctctagatgacaaccagaagacgacctccccagacctgggtcaggtgcccctttctccagatgacaaccagatgatcacctccccagacctgggtcaggtgcccctttcttctgataaccagaagacctcttccccagatctgggtcaggtgcctctttttcctgaagacaaccagaattacttcctagacctgagtcaggtacctctctcctcagaccaaaaccaggagacctcctccacagacctactgactctctctcctgattttggtcagacagtcctttccccagacttggatcagctgccactcccttcagacaatagtcaggtgaccgtttccccagacctcagcctcttgaccctctcaccagattttaatgagataatcctagccccagaccttggtcaagtgaccctctctccagacctcatccagacaaaccctgctcttaatcatggacacaaagcatcctctgcagaccctgatcaagcatcctaccctccagattctggtcaggcttcatcgcttccagaactgaatcggactcttcctcatccagatctcactcacataccacctccttcaccatctcccacactcaataacacttctttgtcaaggaaatttaaccctcttgttgtagtaggtctcagtagagtagatggagacgacgttgagattgttccaagtgaggagccagagagaatagatgaagattatgccgaggatgactttgtaacctataatgacccctacagaacagacactaggacagatgtcaattcctccagaaatcctgacactatcgcagcatggtacctccgaggccacggtggacacaaaaaattctactatattgcagctgaagaaataacctggaattacgcagagtttgcacaaagtgaaatggaccatgaagacacaggccacactccaaaggacaccacatacaagaaagtcgttttcagaaaataccttgatagcacgtttacaagtcgtgatcctcgggcagaatatgaggagcaccttggcattctcggtcctgtgatccgggctgaagtggatgatgtgatccaagttcgatttaaaaatttggcatccagaccgtattctcttcatgctcacggactttcctatgaaaaatcctcagaggggaagacttatgaagatgaatctcctgaatggtttcaggaagatgatgctgtccagcccaatagcagttacacctatgtatggcatgccaccaagcgctcagggccagagaaccctggttctgcctgccgggcttgggcctactattctgcagtgaatgtggagagggacatccactcaggcttgatcggcccccttctgatctgccggaaaggaacacttcacatggagcgcaacctgcctatggacatgagagagtttgtcttactcttcatggtctttgatgagaagaagagctggtactatgaaaagtccaaggggtcacggagaattgaatccccagaagagaaaaatgcccacaagttttacgcaattaatgggatgatctacaacctgcccggcctgagaatgtacgagcaagagtgggtgaggctacacctgctgaacatgggcggctcccgagatattcacgtggttcacttccatggccagaccctgctggataataggaccaaacagcaccagttaggcgtctggccccttctgcctggttcatttaaaactcttgaaatgaaggcatccaagcctggctggtggctcctagacacagaggttggagaaaaccaggtagctggcatgcaaacgccatttctcatcatagacaaagagtgtaagatgccaatgggactaagcactggtgtcatatctgattcacagatcaaggcttcggaatatctgacttattgggagcccagattagcacgattaaacaatgctggttcatacaatgcttggagtatagaaaaaactgcattagattttcccattaaaccttggatccaggtggacatgcagaaggaagttgtagtcaccgggatacaaacccaaggtgctaaacactacctaaagtcctgctttaccacggagttccaagtggcttacagctctgaccaaaccaactggcagatcttcagagggaagagcgggaagagcgtgatgtattttactggtaattcagatggctctacaataaaagagaatcgacttgacccacccattgtggctagatacattaggatacacccaacaaaatcctataatagacccacccttcggctggagctgcagggctgtgaggtgaacggatgttccacaccactgggcctggaagatggacggattcaagacaagcaaattactgcatcttcatttaaaaagtcgtggtggggagactactgggagccctcccttgcccgcctgaacgcccagggccgcgtgaacgcctggcaagccaaggcaaacaacaacaagcagtggttacaagtcgatctgctcaaaatcaagaaggtaacggccatcgtaacgcagggctgtaagtctctgtcctctgagatgtacgtgaagagctacagcatccagtacagtgaccagggtgtggcatggaaaccttaccgacagaaatcctccatggtggacaagatttttgaaggaaacagcaataccaaggggcacatgaagaactttttcaacccgcccattatttccagatttatccgcatcattcctaaaacatggaaccagagcatcgcccttcgcctagagctcttcggctgtgacatttattagaattaaattccaaaaaaaaaaaaaaaaa

SEQ ID NO: 2561 - DNA, 2221 bp, Mus musculus
tctttgcgataccccaggcccagcggctcctccccagccctgcgacgccggacgcgcctgctaggggacacgggcggagggtcgcggcccctggctgcctacatgggcgcccccggcgagctgcgcaggtgtggacgcggcgctgcggcaatgccaagtgagttcacctctgcaaagctgagaagtgattgctcaaggacctccctgcaatggtacacccgaacccagcacaagatgagaagacccagcttgttaataaaagacatctgcaagtgcacgttggttgcatttggagtctggctcctgtacatcctcattttgaattacaccgctgaagaatgtgacatgaaaagaatgcactatgtggaccctgaccggataaagagagctcagagctatgctcaggaagtcttgcagaaggaatgtcggcccaggtacgcgaagacggctatggctctgttatttgaggacaggtacagcatcaacttggagccttttgtgcagaaggtccccacggccagtgaagctgagctcaagtatgacccgccttttggattccggaagttctccagtaaagtccagagcctcttggatatgctgcccgaacatgacttttctgaacacttgagagccaaggcctgcaagcgctgtgtggttgttgggaacgggggcatcctgcacggactagagctgggtcacgccctcaaccagttcgatgtggtaataaggttgaacagtgcgccagttgagggttactctgaacacgttgggaataaaactactataaggatgacttacccagagggtgcgccactgtcggacgttgaatactacgccaatgatttgttcgttactgttttatttaagagtgttgatttcaagtggcttcaagcaatggtaaaaaatgaaagcctgcccttttgggttcgcctcttcttttggaagcaagtggcagaaaaagtcccactccagccaaagcacttcaggattttgaacccagttatcatcaaagaaactgccttcgacatccttcagtactcagagcctcagtcaagattctggggccatgataagaacatccccacgatcggcgtcattgccgttgtcttggctacacatctgtgtgatgaagtcagcctggcaggctttggctacgacctcagtcaacccaggacccctctgcactactttgacagtcagtgcatgggcgccatgcactggcaggtcatgcacaatgtgaccacagagaccaagttcctcctgaagctcctcaaggagggcgtggtggaggacctcagcggcggcatccactgagaactcggaacacggcaaacctcacccagcaccgcagctgagagcgtggtgagcagcctccacagggacttcaccctgcagctgcttcgatgtgcagctagtgttttcaaactccacattttttttaaaaaaggaaaagaaagaacaacagcaacaacaaaagctctgctctgtgcacctcttcgtcctatttatttgaagtcagtgttggattttgcacagttttgtaagttaatcttaagaatgggattggaaggacttttcaaagagaattgtatagtttattgttttttaaggaagtaatttaatttgcagaaactgtacacacgtactctgctcaggtgttgaggtgggaggagaggggcttctggcccctggatgatggctgtgatgcccgatactggggtctgctgctctgtttggtagaactgatggcagagaaacttcctgcctccaggataaagggcttactcatcacctctggcagctgctagacaagttcataacccctttctgctagtccatctgccagctggctcgcaggactcaggcagggcagctgtcccggaggctgctggttggtgagccactgtcagctgagcgccgtgatgttgccccagggtggaagaagccacacttcctacactgtcagggcacttttaaacttctggaggggtgtgtgtgtgtgtgtgtgtgtgtgtgtgtgtgtgtgtgtgtgtgtgtgtgttcattctgcccttccaaatcatctaagtgttatttaaggcactctgctgtttgtatgagatggctcatagatattatgacaaagcctttgttatccaggccatgggaagaggaaaaagaaaagaaagagagaaaagaataaaagcttttgaggagcccctgtgatttcctgaaaaaaaaa

SEQ ID NO: 2562 - DNA, 1732 bp, Mus musculus
ttgggtgtgtgtcacaaaggcattttcatttcgatattgtcagtattgtctcccgtgttgtttagtagatctcattgtattaatttttttgaaattatcttctatgatgtctatccatggttactatacatgttgttcactaaggctgaaaaaaaaatggggatataagtgttccagttctcataactaatcatgactatatatgacacagtcctcggtgcttcctagccagtggttgctataataagccaatgcagggtaagtacataaggattgttgccaacgactttgtgttttgaaaagagctgatatgaaatacccattgtgtcctcgcatacctaaacaccagtgcggataaatcctggagggttgtctcattttgctcttcctgaaagatgtcaaagataaattattttaagatgccatggagtaaacatcagcctgcatatatctccatcgtctgccaaatgcttttctcagttaaaagatattttctcatagaaaactgagcgttttctttcctcacctcctattagctatttcagtgatcattttataagttaaaagctataaatgaaacaaagaaaaaaattttttaacatttttgccttgtactcaaactttactactaaaaattaaattcccagaataccagtctattagcaacctctttgtagagaaattaactattctgtacccaacatatttatttatttattatccagccatagcaaaataacaaaacaagacaaaaaagatttgctaaaacagttatttgctttttctccttcccttctatactccatgtatatatatatatgtatatggtcagtgattccattaaagggaagctggtcatgaaaaaaattctatgttttctccctatattatatatcatgtcatgtatcgaatacagtggataaagaacttgaggtagtgttccaatgacattagtttctatgagagaacagatgtagtgagagttttaatggggtttatgagaaggccctctttaaagtgtatattactctgtaaacatttcactcaagggccagaagttaaagtataactaaatcgctgtgttgtcagaataatatttaacattaacaagaacaaacccatggtcaaaccaaaaaatagtgggttgaagtatacatttcattttctaatgcattggcaattcggatgacaaagaaatttaatataaagctgtagagtaaattcagtgtctaacctttttttttaatttatttaaatagttgtggcattctagtctttacattttatgtctgtcttattactgttccttctttctaacacttgttttctgtaggttcactgaatgcacaatagtcacatttcacatgactcaactcccaagtggtgttaatcattgggcctgtgtcataaaatgcatggatctttaatacctacatgtcgctgacacttttcactacagggctggacttagtaactgaccaactcgggggggggagggggcgctggggtattagaacatgatcaaaatgtctctgctcagggatttatggtggatcattgcagacagtgctaaaaatgtagagcacaagacaagtttactaaattaaaattttattttttgaaaaactgttatttgtataaattatcaagatttgtaggctttccttttgtagaaataattgtttgatgtgccagagaatttcaattttgttttgaacaataaagcattgat

SEQ ID NO: 2563 - DNA, 1560 bp, Mus musculus
agcgtcagagagctgagatagccctgctccatacacagatgggaccatgaactccagccacagctttaaccagacctactcggcctctgtccacagcctcggaagcacccgggggcggcaggggagctgccatcgggcaccgagtgtccatggaggcgcagggggtgtccgcatctccctttccttcaccacgccaggctgcctgcctcctggaggatcatgggggtctggaagaagcagtcccctgctaggtggcaatggcaaggccaccatgcagaatctcaacgatcgcctggccacatatctggagaaggtgcgggctctagaggaggctaactcgaagctggaaacccgtatactaaggtggcatcaggagagagaacccagccacagaaaggattattcccagtatgaggaaaacatcagccgcctgcaggagcagatagtggacggtaagatggccaatgcccacattgtcgtgctcattgacaacgccaggatggcagtggatgacttcaacctgaagtttgaaaacgaacactcgttaaagaaagacttggaaattgaagttgagggcctccgaaagaccttggatgatctgaccattgtcacaacagacctggaacaggaggtggaggggatgaggaaagagctgatcctcatgaagaaacgccatgagcaggaaatggaggagaatcacttgccgagtgacttcaaggtcagtgtgaaggtggacactactccaggggaagatctgattaaggtcttggaagatatgaggcaggaatacgagttaataataaagaagaaacatcaagagttggacacctggttcagagagcagtcagccgccatggcccaggaagtggccagtccagcgcctgtacagggcaaccaaagtgatatccatgagctgaggagaacattccaggccctagagattgacctgcaggcccagcacagcaggaaaaccgctttggaaaacatgctgacagagacccgggctcgatactcctgccgtctccaggacatgcagcagatcatctcccactacgaagaagagctgattcagctccgccaagacctggagcgtcagaacaatgaacacaaggtgctgctgggcatcaaaacccacctggagaaggaaatcgccacctaccgccggctcctggagggagacactgaagggacgatggatggatctgagtcaaggctgaaaggatctgaagcttcaacgatcaaggccatcactcaagagagtgtcaatggaagaatcgttctttctcaagtgaatgagatccaaaagcatatatgaagccaaggagtttctgcctgttgtaaaaaccacactccccctatggaaagtctttgtctccgcgctaatgggtgagtctcgacggaaatccttggagttttcagattcagaaacttttctctataatggtctcacaggacttcccatgatgctcttaatatattgttggaatttttgagtgaaagaagaagtttataaattaaagctctactctcctgctctcaaaaaaaaaaaaaaaaaaaaaa

SEQ ID NO: 2564 - DNA, 1810 bp, Mus musculus
gagaggggcgcgggcgcgtgctggcgctggacttaggagctccggagcccgaagcgcacgcctagccgcgtgggggcgatgagcgccgagggatcgcatccctggccgccccccgcgggcgtcctagtcacctactggtgcccgcgcggaccaaaacagctctggccttgttgtatgacgaggggttggaaaatgcctatgacgtccgcctgaagctgacaaaagaggtgctgactattcaaaagcaagatgtcgtctgcatcgggggagctcctcctggtgctaatacaacctgtgggtggcctgggcctaagtatcaagggaggagcagagcatggggtccccgtcgtcatatctaaaatattcaaagaccaagcagctgaccagacagagatgttgttcataggagatgctgtactacaggttaatggcattaatgtagaaaacgcaacccatgaagaagtggtgcatcttctgagaaacgctggcgatgacgtcaccatcactgttgagtatctcagggaagcaccctcatttctgaagctgccattagggtccccagggccatccagtgaccatagcagcagggcctcatcgcctctctttgacagtggcctgcacctgaatggacactgcagccacacagctccatcatcaccttcctcacccatagctaatgaaccaaagtatgagaagcgttggctagacaccttgtcagtccctctgtctatggctcggatctccagatacaaagctggaacagaaaagctcaggtccagtgcattggaggtgctggccctggatggagccagcacaggagtccttcaattctccactgctcaggactgtgctgactggttgcgttcaatctcacacgacatcagtgacctgacgccttcaacatatgaaaatggcaaataaatgctgttctcccctgtgaccaggtggtgcacatgggatgggtaaatgagaggctccaaggagctgacaactctcagaacttcagacccaagttcttggccctgaggggttcatcattctacatttttggcgctcctccggtaagcacactggattggggacgagcagaacgtgcctataacctctgtgaggtgctgtttaaagttcacaagttctggctttcagataactattggctgcaggcaaacctgtatcttggtctccaagattttgactgtgaagaccccaggtcatactgcttcagcgtcctggccaaccatgggaagagccacatcttcagtgtagagctgggcagtgagctggccgtgtgggagaaggcattccaaagagcaactttcatggaagttcagagaaccgggtccaaaacatatctgtgcagctggcaaggggagacgctgtgcttcacggtggattttgctctgggattcacctgctttgacggtaagacaaagaacgtactctggagattcaagttctctcagcttaagggatcctcagatgatgggaagactcgagtaaagctgctgtttcagaatctggacaccaagcagattgaaacgaaggagctggagttccaggatttgacggcggtcctccactgcatccactccttcattgccgccaaggtggcctccctggaccccgtgttcatggatagccagagtatggcaagaagatacctgtgcagcagctaaaacaagtttgaagagtgctgcaagcaattaaattattttcttaagaaactaatctttcctgcacaatgttgcacctttgtgtggttttataatgagcctatagttgtgataccaataaagacatcactagtttc

SEQ ID NO: 2565 - DNA, 3880 bp, Mus musculus
ccccagcctgcctaggtgctgggagccgggagctggattatggtggcctgagcagccgacgcagccgcaggagctgggagtccctcacgctgcaaagtccgcctggaagaccctgaaagctgcaggctccgatagccatgcccgcccctcccagccccacaaggggcccgatccccccgctgaggctggcggtcgccgtccagatttagctgggtcccccggatcgccatcgtcctcttctctcgtgcgctacagatttctcctgcccactctccaccgccgggagcaggaactgatcgaaggggcctgcagactctgcagtcctgatgcccccgaggccgctctcctgagagaagccaccaccacccagacttaggggcaggcaagagggacagtcaccaaccggaccacaaggcccgggctcactatggccccagcgctgcactggctcctgctatgggtgggctcgggaatgctgcctgcccagggaacccatctcggcatccggctgccccttcgcagcggcctggcagggccacccctgggcctgaggctgccccgggagaccgacgaggaatcggaggagcctggccggagaggcagctttgtggagatggtggacaacctgaggggaaagtccggccagggctactatgtggagatgaccgtaggcagccccccacagacgctcaacatcctggtggacacgggcagtagtaactttgcagtgggggctgccccacaccctttcctgcatcgctactaccagaggcagctgtccagcacatatcgagacctccgaaagggtgtgtatgtgccctacacccagggcaagtgggagggggaactgggcaccgacctggtgagcatccctcatggccccaacgtcactgtgcgtgccaacattgctgccatcactgaatcggacaagttcttcatcaatggttccaactgggagggcatcctagggctggcctatgctgagattgccaggcccgacgactctttggagcccttctttgactccctggtgaagcagacccacattcccaacatcttttccctgcagctctgtggcgctggcttccccctcaaccagaccgaggcactggcctcggtgggagggagcatgatcattggtggtatcgaccactcgctatacacgggcagtctctggtacacacccatccggcgggagtggtattatgaagtgatcattgtacgtgtggaaatcaatggtcaagatctcaagatggactgcaaggagtacaactacgacaagagcattgtggacagtgggaccaccaaccttcgcttgcccaagaaagtatttgaagctgccgtcaagtccatcaaggcagcctcctcgacggagaagttcccggatggcttttggctaggggagcagctggtgtgctggcaagcaggcacgaccccttggaacattttcccagtcatttcactttacctcatgggtgaagtcaccaatcagtccttccgcatcaccatccttcctcagcaatacctacggccggtggaggacgtggccacgtcccaagacgactgttacaagttcgctgtctcacagtcatccacgggcactgttatgggagccgtcatcatggaaggtttctatgtcgtcttcgatcgagcccgaaagcgaattggctttgctgtcagcgcttgccatgtgcacgatgagttcaggacggcggcagtggaaggtccgtttgttacggcagacatggaagactgtggctacaacattccccagacagatgagtcaacacttatgaccatagcctatgtcatggcggccatctgcgccctcttcatgttgccactctgcctcatggtatgtcagtggcgctgcctgcgttgcctgcgccaccagcacgatgactttgctgatgacatctccctgctcaagtaaggaggcccgtgggcagatgatggagacgcccctggaccacatctgggtggttccctttggtcacatgagttggagctatggatggtacctgtggccagagcacctcaggaccctcaccaacctgccaatgcttctggcgtgacagaacagagaaatcaggcaagctggattacagggcttgcacctgtaggacacaggagagggaaggaagcagcgttctggtggcaggaatatccttagacaccacaaacttgagttggaaattttgctgcttgaagcttcagccctgaccctctgcccagcatcctttagagtctccaacctcgagtattctttctgtccttccagaagtactggtgtcatactcaggctacccggcatgtgtccctgtggtaccctggcagagaaagggccaatcttcatttcccctgctggccaaagtcagcagaagaaagtgaagtttgccagttgctttagtgatagggacttgcagactcaagcctacactggtacaaagactgcgtcttgagataaacaagaacctatgcgatgcgaatgtttatactcctgggggcagtcaagatgaggagacaggataggatagagacaggaaggagatggtagcaaaactgggaaaggcagaactctgatcactttctagttccaagtttagactcatctccaagacagaagcccatctggactaagaggtatcattccccaatgtgcctgtggttgtagtctgaactgaaatgaaatgggggaaaaagggcttattagccaaagagctctttttaacactcttagaggaacagtgctcatgagaaaagtcccactggacagatgaattcctatcttgttaattctgtctctctctgcttcttcaacatgctaagtggcaccaaaatgacccaaccccaaggtcttaggtgccctatgggacaacagttagaatattgtagggctagggatggtcttcccagcataggttcactccaaccaaggtgctaaaaggaacagacaggagaagtcctcctctctgatccacaaaggcagagccctcaagattcatccagccagggttagggctgatgcatttgcctctgcctggattttgtttttattttctttctttttgcccaagtgggtacaaaacgataagctctttatggaatactgagtgggttcattcctctcttgccctctccaatggcccctctatttatctggctaaggaaacaccacgcattggctagtattaaacagcaactgtaagatagagggctttctgttctatgtcattgccttcagtatcaaggctgcctggagaaaggatggcagcctcagggcttccttactttcttctcctttcctgacagagcagcctttctgtcctgctctctgctgcccctcccaatataatccatgggtacccaggctggttcttgggctaggttgtgggggccacactcacctcttccctgccagttctaacacgacagacatgaagccagtgttagtgggaagagctgggttttcccaggatgaccactgcatcctctcctggtacgctctacactgctttcaggctggggacctgccaagtgtgggacagttgatgaggaagagacattagcagggcctctggagttgctggcccagccagctgcccacaagccataaaccaataaaataagaatcctgcgtcacagtttccagctgggtcctcttccttgccctcgcactggtgctgctctggctgagtaggaatacacccacagactgccaggaagatggagactgtccgcttccggctcagaactacagtgtaattaagcttccaggatcactaccatgaaaacgccgcattctgctttatcatttctacccatgttgggaaaaactggctttttccccatttctttacagggcaaaaaaaaaaaaaaa

SEQ ID NO: 2566 - DNA, 2902 bp, Mus musculus
gccgggactggcgaggtgcagttattccctcaggccgttggcttgcccgccgccgccgtcgccgtcgccgccgcctcctgcaggccgcggacctggtttagattctcaaaccatgaattatgtgggccagctggctgggcaggtgctcgtcactgtgaaggaactctacaagggcattaaccaagccacgttgtctggatgcatcgatgtggtcgtggtgaggcagcaggatggctcctaccagtgctcgccttttcacgtacgcttcgggaagctgggtgtcctgaggtccaaggagaaagtgattgacatagaaatcaatggcagtgctgtggatcttcacatgaaattgggtgataatggggaagccttctttgtagaggagactgaagaagaatatgaaaaattacctgcttatcttgccacctcaccaattcccactgaagaccagttctttaaacatattgaaacccctttggtgaaatcaagtggaaatgaaaggccagctcagagttcagacgtttctcacaccttggaatcagaggcagttttcactcagagtyctgtgaaaaagaagaaacgaaggagaaagaagtgcaaacaggacaataggaaggaggagcaggcagcttcccctgttgcagaagatgtaggtgatgtgggtgtgagctcagatgatgagaagagagcccaggcagcaagaggatcttcaaatgcttccttaaaggaagaggactacaaggagccttcactcttccattctggggataactaccccttatctgatggagattggtccccattagaaaccacctaccctcaggctgtgtgccccaagagtgactctgagctggaggtgaagccatctgagagcctcctcagatctgagccgcacatggagtggacgtggggcgggttcccagagtccaccaaggtcaccaaaagagaacggtatgactatcatccaaggacagctacgattacaccatcagagaacacacatttcagggtaattcccagtgaagacagcctcataagagaagttgaaaaggatgctactgttgaagatactacctgtaccatagtgaaacccaaacctagagccctgtgtaagcaactgagtgatgcagcgtctactgagcttcccgaatcacctcttgaagcacctcagatttcatcgctattagatgcagaccctgttcccagcccatcagcagaggctccctcagaacccaaaccagctgctaaagactcaccaacaaaaaagaraggtgttcacaaaagaagccagcaccagggacctgatgacatttaccttgatgacttaaaggctcttgagcctgaagtggcggctctctatttccctaaaagtgacacggatccaggttccaggcagtggcctgagtctgacacattctctggttctcagtccccacagtctgtggggagtgcagctgcggacagtggcactgaatgcctctcagactctgccatggacttgcctgatgtaaccctctccctctgtggaggcctcagtgagaatggagagatttctaaagagaagtttatggagcatatcatcacttaccatgagtttgcagaaaaccctggccttatcgacaacccaaacctcgtgatccggatatataaccgttactacaactgggcgttggctgctcccatgatccttagcttacaggtatttcagaagagtttgcctaaggccaccgttgagtcctgggttaaagacaagatgccaaagaaatctggtcgatggtggttttggcggaaaaaagaaagtatgatcaaacagttgccagagaccaaggagggaaaatctgaggtccctccagcaaatgacctgccttccaatgctgaggagccaaccagtgccagacctgcagagaatgacacttctagtgacgaggggtcacaggagttggaagaaagcatcaaagttgaccccatcaccgtagagacactgagtcactgtgggacggcctcatataagaagtctctccgactctcctcggaccagatagcaaaactgaagctccatgatggccccaatgacgtggtattcagtatcacaacccagtatcagggcacctgtcggtgtgcagggaccatctacctgtggaactggaatgacaaagtcatcatctctgacatcgacggaacaataaccaagtctgatgctttggggcagattctcccacagctgggtaaagactggacgcatcagggcatagctaggctctaccattccatcaatgagaatggctacaagtttctgtactgttctgcacgtgccatcggcatggccgacatgacccgtggttatctgcactgggtcaatgataaggggacgatcttgcctcgaggccctctgatgctgtctcccagcagcttgttctctgccttccacagggaagtgatagaaaagaaaccagagaagttcaaaattgagtgtctgaatgatattaagaacttgtttgccccgtccaggcagcccttctatgctgcctttggaaaccgtcccaacgatgtctatgcttacacacaagtcggagttccagactgtaggatatttactgtgaatccaaagggtgaattaatccaagagaggaccaaagggaacaaatcatcgtatcacaggctgagtgagcttgtggaacacgtgttcccacttctcagtaaggagcagaattctgcctttccatgcccagagttcagctccttctgctactggcgagacccaatccctgacctggacctggatgacctggcttgaacaaggcctcgatggcaagatggggggcactggcactggccctcttacagaggaagacccaggagctgacagtcaggaacctgctttccagaacagggacggggaccc

SEQ ID NO: 2567 - DNA, 1236 bp, Mus musculus
gactccacaccagccaggaacagatggcagccttacgcagaatcctttccacacatgctgctggtgattctgcacagctcattgtctcctttctgtctgcttaagtgtccatgttggctgttgaagagtatgaggaactgcaagtgaacctggaactggagaaggaccttcgcaagaaagcagagtcttttgcacaagagatgttcattgaacaaaacaaactgaagagacaaagccaccttctgctgcagagctcccttcctgaccagcagcttttgaaagctttagacgaaaacgcaaaacttatccagcagcttgaagaagagaggatccagcatcagaaaaaggtcaaagagctggaggagcggctggagaatgaagcacttcacaaagagatccataacctcagacaacagctggagcttctggaagacgacaagagggagctagagcagaaataccagagctcggaggagaaggcccggaacctgaagcattcagtggatgaacttcagaagcgagtgaaccagtctgagaattcggtaccttccccgcctcctcctcctccacctttcccccctccacctcccaatccaatccggtccctcatgtctatgatccggaagcgatctcaccccagtggcaatagtgctaagaaagaaaaagacaattcagccagagacagctgaggaagtcacagacctgaagaggcaagcagtggaagagatgatggacagaattaagaagggagttcatcttagaccggttaaccagacagccagacccaaggcaaagccagactctctcaagggctcagaaagtgcggtggatgagctgaagggaatcctggcctcccagtaaaggtggatacaggagaaaatgtgtgggcagtgaaaaccaagctgagccagttgtagtattagatcctgtttccacacacgaaccccaaaccaaagaccaggctgctgaaaaagacccaactcaattcgaggaggagggaggtgaaacccaaccagaatacaaagaagacagcggtgggaaaacaggagagacggacagttccaactgctgatctgaaaccagaggctggcaggttggtggggccttctcaaggagcacgtggctcgtctgcgtgtaaccggcaggaactgttggacattcctttgttctggccacacacttctttgctggtatcactttgtaagtagcaatcataagtaagctgtttagcaaaat

SEQ ID NO: 2568 - DNA, 2882 bp, Mus musculus
tttgtgtggacagtaatgaccgcacgtttccgattgcctgctggcagaacctacaatgtccgagcatcagagttggcccgagacagacagcatacagaggtcgtttgcaacattcttcttctggataacactgtacaggctttcagagttaacaaacatgatcaggggcaagttctgttggatatagtcttcaagcatcttgatttgactgagcgagactattttggtttacagttggctgacgattccacagataacccaaggtggctggatccaaacaaaccaataaggaagcagctaaagagaggatcaccttacaatttgaactttagagtcaaattctttgtaagtgaccccaacaagttacaagaagagtatacaaggtatcagtactttttgcaaattaagcaagacattcttactggaagattatcctgtccttgtaacactgctgcccttttagcatcatttgctgttcagtctgaacttggagactacaatcagtcagaaaacttggcaggctacctctcagattattctttcattcctaatcaacctcaagattttgagaaagaaattgcaaagttacatcagcagcacgttggcctatctcctgcagaagcagaatttaattacctaaacgcggcacgtaccttagaactctatggagttgaatttcactatgcaagggatcaaagtaacaatgaaatcctgattggagtgatgtcaggaggaattctgatttataagaacagggtacggatgaatacttttctgtggttgaagattgtaaaaatttcttttaaatgcaaacagttttttattcaacttagaaaagagttgcatgaatctagagaaacattactgggatttaatatggtgaattatagagcatgtaaaactttgtggaaagcgtgtgtagaacatcatacattcttccgcctgggtagaccacttccacctcaaaaaaatttttttgcacattattttacattgggttccaaattccggtactgtgggagaactgaagtccagtcagttcaatatggcaaagaaaaggcaaataaagacagggtatttgcaagatcctcaagtaagcctttggcacggaaattaatggattgggaagtagtcagcagaaattcattatctgatgacaggttagaaacacaaagcctcccatcccggtctccacctggaactcccaaccatcggaattcttcattcacacaagaggcaacccgggttcggccgtcttcagttggtcatttggtagaccatgtggttcacatgtcccccagtgaggattttgtaagtcagagatctccatcatcaacgcaagctaatagcatagttctggagtcatcaccatcacaagagacccctgaagatgggcagccaccagctttaccacccaaacaatctaagaaaaatagttggaaccaaattcatttttcaaactctcagcaagatctagtcacccatactaatgaatcctttgatgtgccctcttcccctgaaaagtccactcctaatggtggcattccacatgataaccttgttctaatcaaaatgaaacctgatgaaaatggaaggtttggattcaatgtaaagggaggatatgatcagaagatgcctgtaattgtttctcgagtagcaccaggaacacctgctgacctctgtgtccctcgcttgaatgaaggggaccaagtggtactaataaatggtcgggacattgcagaacatacccatgatcaagtagtcttgtttattaaagctagctgtgagaaacattctggggaactcgtgctcctagtccgacctaatgctgtatatgatgtagtggaagaaaaactagaaagtgaaccagacttccagtatattcctgagaaagccccactagatagtgtccatcaagatgaccattccttgcgggagtcaatgatccagctagctgaggggcttatcactggaacagtactggcacagtttgatcaactctatcggaaaaaacctggaatgacaatgtcttgtgccaaattacctcagaacatttccaaaaacagatacagagatatttcaccttatgatgctacacgggtccttttaaaaggtaatgaagactacatcaatgcaaactatataaatatggaaattccttcttcaagtattataaatcaatacattgcttgtcaagggccattaccacacacttgtaaagatttttggcaaatgatttgggaacaaggctcctccatggttgtgatgttgaccacacaagttgaacgtggcagagttaaatgtcaccagtattggccagaaccctcagaaagctcatcctatggatgctatcaagccacctgccactctgaagaaggaaaccctgcctatatcttcaggaagatgacactaattaaccaagagaaaaatgaaagccgtcaacttactcagattcagtacacagcctggcctgaccatggagtacctgatgattcgagtgactttctggattttgtttgtcatgtacgagaccagagggctggaaaagaagagcccattattgttcattgcagtgctggaattggaaggactggggttcttattactatggaaactgccatgtgtctcattgaatgcaatcagccagtttatccactagacattgtaagaacaatgagagatcaaagagcaatgatgatccaaacacctagtcaatacagatttgtatgtgaagctattctgaaagtttatgaagaaggatttgttaaaccattaacaacatcatcaaataaataaaacaaaaaggttggaacaagtactgggaaactgattttgttatgttcactgtgccataatactgcttgcaagaaatggcctctcac

SEQ ID NO: 2569 - DNA, 1345 bp, Mus musculus
gagcctgggagccttgacgttaggaacgaatcgaacctggatctggagccgggtgagatcaaatcggggatgctctcataatgaatgtcaaccagtcagctccacctgttccaccatatgggcagaaccagcccatctacccagggtatcatcagtcgagttatggtgggcaaccaggacctgcagcccctgctactccctatggagcctacaatggcccagtgccaggttatcagcaggcacctcctcaaggtatgttttgagctagggaagggaatgagcagtcttcaggttcgattgtgttgctttaacaaagctgcttaggtcctgtgactgaggaacatgagtctgactctttgaaaatgaaggccctgggaatagtcttgtctcgcctcgtttttacatgtgactgttctacctaagccacctaggaagaatgcatcttccagattcagcaacagctcactttggtgggtgtcaccctggacagcatcattactgttactgtattactgagagctggatggaagggttgtggtcatagctcttgtgttgcctgttgactttgtctccctgaagtcacttgttcctcatatgtgttgaaaatgcctcttatttgacttctggttcttaatataatactactctgggacacatatgtgtgtaaatgaatctgagtgtaaaagtgtttttgtatgcttgacatagggtactccctggatcttttactgtctttattttcctttgcttgggtttcctcttcttgaatgttgtgtgatgtgagtgaaataagagactcttgtgttgcattagattctctgtgtatctcttggggaggagttgaatgtcggccccgtgtatatatgctttagtgttagagtacgctgctgccagtcctcagctttgtttgatattacttttccaagaaaggtagctggccctccacatgctaacctggcacatcttataaagttattaatagtagacttttggttgtgctggctgaagaggtagaggatgccaaactctgtgagtcttttgttgttgttttccagacaggatttctctggatatccctggccatcctgaaactctctctgtagaccacactggcctggaactcagagatcagcctgcctctgcctccccagtgctgggattaaaggtgtgcaccaccactgcccagcaaccaaaccctatgtttgggagtagattccaccaggcctactgtcacaggcctgtaattccagttataagggagggtgcagtaggaggaacctcaaggcttgcctgggctgtagagtgagtccaaatccaatttagggaacagagtaagagtctgttt

SEQ ID NO: 2570 - DNA, 4120 bp, Mus musculus
gccgccaccatgggtttcgagttggatcgcttcgacggcgacgtggaccctgatctgaagtgcgccttgtgccacaaggtcctggaggacccgctgaccaccccgtgcggccacgtattctgcgccggctgcgtgctgccctgggtagtgcaggagggcagctgccccgcgcgttgtcgcggtcgcctgtcggccaaggagctcaaccacgtcctgcccctcaagcgtctcatcctcaagttggacatcaagtgcgcgcacgcggcgcggggctgcggccgggtggtcaagttgcaggacttgcccgagcacctggagcgctgcgacttcgcgcccgcgcgctgccgccacgcgggctgcggccagctgctgctgcgacgcgacgtggaggcccacatgcgcgacgcgtgcgacgcgcggcccgtgggtcgctgccaggagggctgcgggctgccgctgacgcacggcgagcagcgggcgggcggccactgctgcgcgcgggctctgcgggcgcacaacggagcgctgcaggcccgcctgggcgcgctgcacaaggcgctcaagaaggaggcgctgcgggccggcaagcgcgagaagtcgctgttggcgcagctggccgccgcgcagctcgaactgcagatgaccgcgctgcgctaccagaagaagttcaccgagtacagcgcgcgcctcgactcgctcagccgctgcgtggccgcgccgccaggcggcaagggagaagagaccaaaagcctgactcttgtcctgcatcgggactctggctccctgggattcaatatcattggcggccgaccctgtgtggacaatcaagatggatcctccagtgaaggaatctttgtatccaaaatagttgacagcgggcctgctgccaaggaaggaggcctgcaaattcatgacaggattattgaggtcaacggcaaagacttatcccgagcaactcatgaccaggctgtggaagctttcaagacagccaaggagcccattgtggtgcaggtgttgaggaggacacctcgaaccaagatgttcacgcctgcctcagagtcgcagctggtagacacgggcacccaaaccgacatcacctttgagcacatcatggccctgacaaagatgtcttctcccagcccacctgtgctagacccctacctgctgcctgaagagcatcccgcatcccatgactactatgatcccaatgactacatgggggatatccatcaggacatggacagagaagagctggagctggaggaagtgggcctctacaggatgaacagccaggacaagctgggtctcactgtgtgctaccggacggatgacgaagatgacattgggatatatataagtgagattgaccctaacagcattgcagccaaagatggacggatccgtgaaggagatcgcatcatccagattaatggcatcgaagtacagaaccgtgaagaggccgtggcgcttctaaccagtgaagaaaacaagaacttttcattgctgattgcaaggcctgagctccagctggatgagggctggatggatgacgacaggaacgacttcctggatgacttacacatggacatgctggaggaacagcatcaccaggccatgcagttcaccgccagtgtgctccagcagaagaagcatgaggaagacggtgggaccacagacacagccaccatcttatccaaccagcacgagaaagacagtggtgtcgggcgaacggatgagagcacccgcaatgatgagagctcagaacaggagaataacggtgaagatgctacggcatacgccaacccgctggcaggccagaggaagctgacctgtagccaggacaccctgggcagtggcgacctgcctttcagcaatgagtccttcatctctgcggactgtaccgatgtggactacctgggcatcccagaggatgagtgcgagcgttttcgcgaactgctggagctcaagtgccaagtgcagagcgccagcccctacagcctgtactaccctagcagcccactggatgctgctggcaagagtgaccccgagagcgtggacaaggagctggagctactcaatgaggagttgcgcagcatcgagctggagtgcctgagcatcgtgcgcgcgcacaagatgcaacagctcaaggaacagtaccgtgagtcctggatgctgcaccacagtggcttccgcaactactacaccagtgtggacgtgcgccgccatgagctctcggacatcactgagctgccggagaagtcagacaaggatagttcaagcgcctacaacacgggggagagctgcagaagtaccccactcaccctggagatctctccggacaactccctgcggagagtagccgagggcagtagtgaaggggccacagctaacatcgaagcttacaggccatcccccaagaatctgctcgccatcactgaggaccctgaagtaagcaccccaagctataaccctagtgccaaagagctggaccccagccaggctttggagatcaaagaacgccgaggtagcgatggcagcaggagccccaccgccagcccaaagctgggcaatgcctacctgccctcataccaccactccccctacaaacacgcgcacatcccagctcacgcgcaacactaccagagctacatgcacctgatccagcagaagtcagcagtggagtatgcgcagagccagatgagcctggtgagcatgtgcaaggacttgaactcttctaactctgtggaacccaggatggaatggaaagtgaagatccgcagtgacgggacgcgctacatcaccaagaggccggtgcgtgacaagctgctgcgggagcgtgcgctgaaaatccgcgaggagcgcagtggcctgaccacggatgatgacgccatgagtgagatgaagatggggcgctactggagcaaggaggagcgcaagcaacatctggtgaaggccaaggagcagaggcggaggcgcgagtttatgatgcagagcaggctggattgtctgaaggagcagcaggcctccgacgacaggaaggagatgaacatcctggaactgagccacaaaaagatgatgaagaagaggaacaaaaagatctttgacaattggatgactatccaagaactcttaacccacggcacaaaatcgccagacggcactagggtatacaattccttcctgtcggtgactactgtataactctcacttgtgtacatacgagagaccactaccattggggtagacatccctgcctcgttcaatgcggcaagtttttgtatatataagcccggccatcatgttgatagtctaaatttgccactcctgcaactttgggtgtcctggctctgttttcagtggagggaaaatacacccttactctcttagaaggcaatattaacaagcagctttttttcaaatagcaatggtaattttttacttgttaacctttttcataaagtgtttaaatttccaaaagatcttttattaagcatactttcacagaataatttgtttaaactatattcatataaaagaaggttaaacacgctttttttctgcctaaaacacaaaatgcaactgccagtatgtatttttaatgggtccctattttgtaatgtcacttcgctgaatgtgtttcatacaagtcaccattcattcatacagcttatatcagttggggtttcaacacaaaccagccaaagtctggttggtgatttgacacacacacacatacatacacacacacacacacacactaaccaaactagcagcatttctagtcgggatatccatttttaacatttttatggttaaggttcccaagaagagtgtcaaggttttaacagaaagcaaaatttcctgcagctttgtggacgcttaaagcatgtttgcaaatattgccgcctgttggaagaatttgcatgtacagggaagtcgcggatggagacctgtttgtggagttttaagtgctcattgttgtagacctttgctttgtagattggaagggacagacttaaccaagcaagttcacaggatcatgattagttacaaacatcaagtaaaatgaagttaaaataaattattattttctatttgaaaaaaaaaaaaaaaaaaaaaa

SEQ ID NO: 2571 - DNA, 2532 bp, Mus musculus
ggggagccggggccgggtctaccggcggacgcaggctcgatgcggccggtcaccgtggacagctccaaggcccgcacctccctggacgcgctcaagatcagtcttcgccagctcaggtggaaggagttcccatttggccggcgcttgccttgtgatatctactggcatggagtttcatttcgtgacagtgacatactctccggtcaagtgaacaaatttccaggcatgacggagatggtgcgtaaggtcaccttgagccgagcactgaggatcatgcagaacctgtttccagaggagtacatccgcaagcccctcctcatcgacaaactcaagttcgacatccgtctgtatgtcttgctgaagtcctaggatcccttagagatttatattgccaaagatggactctctaggttttgtacagagccatatcaagaacctaacccccagaatctgcaccatgtctttatgcacctgaccaactactccctgaatatccacagcggcaagtttgtccactctgacagcgccagcacgggcagcaagaggactttctctagcattctttgtagactgtcttccaaaggtgtggacatcaagaaggtctggtctgatatcatctccttagttattaagactgtcatcgccctgaccccagagctcaaagttttctaccagtcagacatcccaacagggaggccggggcccacctgcttccagattctaggctttgacattcttctgatgaaaaacttgaagcctatgctacttgaagtgaatgcaaaccccagcatgcgaattgagcatgaatacgaactctctccaggagtgtttgaaaatatccccagcctggtggatgaagaggtaaaggtggctgtgatcagagacacgctgcgcctcatggacccgctgaagaagaaaaaggagatccagtctcagcagatggaaaagtctttcacttcaaaggaagatctgaactgtgacccgactggtggtgactccgagcccaaccctgaagcccatctgccctccatttgcctcaagcaggtgttccccaagtatgccaagcagttcaactacttgcgcctcgtggacaggatggccaatttgttcatccgatttctgggaatcaaggggacgatgaagttgggaccaactggctttcggaccttcataaggaactgcaaactcagcagcagcagcctgtccatggcagctgtggacatcctctacatagacatcacaaggaggtggaactcggtgaccgtggaccagcgggactcagggatgtgtctgcaggcatttgtcgaagctttcttcttcctggcccagaggaagttcaagctgcaacctctccatgagcaggtggcgtccttgattgacctgtgtgaataccacctgtccgtgctggatgaaaaacgcttgctgtgccatcggggccggcccctccaaagaaatccgccccagatgaaccgcccagagcattcagccacaggcagctctgcaccccgagtaatcggggctagcaagctctctcaatcctgacatgctctgtcctgaaggccactctgtcctggaagaaggcgtgcctgtgggggctgagtaccctgggctccccccacccccatctgttgggagccactagggttccagctgcaatcacctgtgcgtcctctctgtgttccgtagggcattttgcctcacacggccaatccttgcctgtccccttcccagcacttcatggtgacccaccctgtttgggaatcatcagtggatatatgacatccaagatgtgacagatggcaccgactattctgggctcctgggaagcaccaactggggcagtttttgctgtgcttggggcggcatgggaatggagggggaggggaaggtgaaggacagaccatcctaaggtaaagagctgtggatgtggagaacagtcacaccggggtctgagagcctgctggtcagagcttagcatcatcgcatgtctttccttctgcccattgcctgaaacgaagttgaaatacgaagaaggtggacacctccgatcatgtgctgcacgggtgtcctttacagacttacctcacttttttgttaacttgcctgttgccgcaatgtttaatactaatcaagaaataattaagaaataatacagtaaggtcttcagtctccccatccaggttccaggggacccctgcaacggtgggggactgacccaatggccaagagccactgtgtacccaacactgtgctgtgagccctgagaggggaggggcttcagaggggagagcataaggcccccatgatagcaggacaagcagacgtgtgtgtagagcatatggtagcctagaccagaacaaccagtgttctcgagtgtctactccgaggggcagaggtgaaaggccttggttgctgttccttggaacccaagtgggtttcccagaagtcccaaatgagaagtgtgtggggacattctttaaccagccttgagctgtacagctgtagaaagctattaaataaagctttgacttg

SEQ ID NO: 2572 - DNA, 1187 bp, Mus musculus
acctactacagcgttatgattccaagcccatcgtggacctcattggtgctatggagacgcatctgaaccctccgagctggagctggatgatgtcgtcatcaccaacccccacatcgaggccatcctggagaatgaggactggatcgaagatgcctcgggcctcatgtcccaatgcatcgccatcttgaagatttgtcacactctgacagaaaaactcgttgccatgacaatgggttctggggccaagatgaagacgtcagcaagtgtcagtgacatcattgtggtggccaaacggattagccccagagtggacgacgtcgtgaagtcaatgtaccctccactggaccccaagctcctggatgcacggacaaccgccctgctgctgtccgttagtcacttggtgctagtgaccaggaacgcctgccatctaaccgggggcctggactggattgaccaatcactgtctgccgctgaggagcacctggaagtccttcgagaggcagccctggcttctgagccagataaaagcctccccaaccctgagggcttcctgcaggaacagtcggccatttaatcatctccgaggccccatttccgcccctgggcgagccttctacttcctgtagatttagttgttctctagagctctgtcggccagccctgggtgcagggtaaagccgagagcctcacgctggacaggctctgctgcaatggcaaacagtggctggagagtggcagtgtaatcccacagttaggggagacgctgtgtacctctacagcagagcgcagaaagctgccgggctcgctgctacatttagttcatttaatgtttccaagaaaatcgagttgccctctaagaattgagagacttcatatcaaattagaatttccggcttctgaaaatcaaggcgtggcaacatggacaatcagaactaagtggctaggtcgagatagtctcttcgggtgacccttgtgctccccttgctaatttgtttgtgttcagtgctttggttcctgaagcatcagagctccccacccccaccccgcttcccatgtatcttccgctttcccatttgtgttagaagctgaggaaatgcgaagtcaattgtttcctttttatcactatgcctgcaatttcgctttacaaccaccaggcgaatagtaaacttgttcttctgttttcctcg

SEQ ID NO: 2573 - DNA, 1408 bp, Mus musculus
ggtttccgttgcaggggctggtgcagcctgagctgctcgggaggcttgggctctcactgctctctgtgcttgcttgcagctgtgtaaatgagtatggaagattatgatttcctgttcaaaattgttttaattggcaacgctggagtgggaaagacgtgcctagtccgaagattcactcagggtcttttccccccaggtcaaggagccacaattggagttgattttatgattaagacagtggagattaatggtgaaaaagtgaagttacagatctgggacaccgcagtgcaagagagatttcgctccatcactcaaagttactatcgaagcgccaatgccttgatccttacctatgacatcacctgtgaggaatccttccgctgccttcctgagtggttgcgggagatagaacagtatgctagcaataaagtcatcactgtgttagtaggcaacaagattgacctggctgaaaggcgagaggtctcccagcagagagcagaagagttctcagaggctcaggacatgtattacctggagacttcagccaaggaatccgacaatgtggagaaactcttccttgacttagcatgccgactcatcagcgaagcaagacagaacacactggtgaacaatgtatcgtcacccttacccggagaggggaaaagcatcagctatttgacttgttgtaatttcaactaaaggctgaggcaaagagaatcaaagggaatcagtagttgccttggtgggccgtacgttgctagggaatctggcaatgactatggctctcgctcttggaccttctgactcctgtaggctccagagcttaccaagcatgcaggccaagggccttgactgcaggccagcattagcagaacacataatggtttcacccttttgcagtctggcgttggagcaaggagaaaattgcactaagcgctccatgatctgcagagcatgttgcttttgtttttaaaaaagcaagtaaaaaatgcattcctgaacacagagcaggggatcgtgtactgtaggaatccttctgtgtgtcagcgggtgcatgaggggctattctttaggcttcagtggtaatctggtgcccatggatttcttgactaccaggtaaaccaaaactggaaaggccaagtactgtctctgtagtacttattgaggaccccatggagattttgaaaagtgttatttcttttgtccacaagcactttcaaaacctttgggatataaaaatgggaactcttctcacgaccaacagtaaaaattattgtttaacaatatatacaagctccatgactctttttggtgctaatgattatgctatttcacagaccaaacgttttagtacattgatacccttagatgtattacctaaaaataaaaagagaatgggggaaatcct

SEQ ID NO: 2574 - DNA, 2249 bp, Mus musculus
gggccgctagtgctgtagctgctgcagccccgggaagcctgcgagtctagcgatgaagctcattatcctggaacactattcccaggccagtgagtgggcggccaagtatattaggaaccgtatcatccagtttaacccagggcctgacaagtacttcaccctggggctccccactgggagcaccccgcttggctgctaccagaagctgattgagtactataagaatggggacctgtcctttcaatatgtgaaaaccttcaacatggacgagtatgtgggtcttcctcgagaccacccagagagttaccacttcttcatgtgggataatttcttcaagcacattgacatccaccctgaaaacacccacattttggatggaaatgcggctgacctgcaggccgagtgtgatgcctttgaggagaagatccaggctgccggagggatcgaactctttgtcggaggcattggccccgatggacacattgccttcaatgagccaggctccagcctggtgtccaggacccgtgtgaagactctggctatggacaccatcctggccaacggtaggttctttgatggtgatcttgccaaggtgcccaccatggccctgacagtgggggtcggcactgtcatggatgctaaagaggtgatgatcctcatcacaggcgctcacaaggccttcgctctgtacaaagccatcgaggagggcgtgaaccacatgtggacggtgtccgcctttcagcagcacccccgcactgtgtttgtgtgtgacgaggacgccaccttggaactaaaagtgaagacagtcaaatatttcaaaggtttaatgcttgttcataacaagctggtggaccccctgtacagtatcaaggagaaggaaattcagaaaagccaatctgctaagaagccatacagtgactagcctgtgaccgacatggtattcagtacctcagagggacaggcaggtctttccggaaagtctctgtaggagagagagtagaattactttttagtccactctggctgctgcagatctgaggcttggtatatacatgttaaggagtttggctatggagaacattgttgattataattttctccttcttttttcagtactgggggctgaacctggggccttgcacatgccaaggaggtgccttgctaactgagctatgtccccaactttctgccccttttcataatggttttgtaaccatccgaagtctccatcactgactgtaattatattcttctgcccctatgcacatgggcagcacacgccgtcgagaactccggtctgtatgtgtgctttttctagagttggcagggattagggcttgtgcactttggacataacctttctggagacttgagatcccctcttctgccagccttcccactgagaattttcattttaaagaatacacttccagaacttgaattatgcacaaggaagcagcccttcctgccagaaccaagaacctgggggagaagcctgtcccttgttcccattgtgtggattgtctttcctgttgtcagtagctagcctttctgtaaacaggccttctgggcatgtggggctaagatggctttcacaggtaaactcaaagcttacaaaggccagccttgtcttgttctctctcaagattccaacaagagaaaagtggaaaggcctcctgcctgagctctgttttcctcaacagattcttacacactccctagtaaggagatcgcgtggtcacagacacgctatgatttcagtgtttttacccaaggtggggagctgacatctgcacatgcgctgtgctctgcggcctcctcagagctgagtgccaagattatacacgctactgctctctcctcgcttaactcaccccagcactcccaccttcgggtttatatcctctgtcctcagcatcagaactaaacccttcacccctctgtccttcaggctcccttcccaggctcctctgcttggccttgctttatcttctctgcctctgtggagtagtcgctgcctccttctccgtccttgtgcctgtgtgaagctagagctgcctatttccaggagaggtctttcagaacattgcccaggccctccagaagtactgtgtttggtaccagcatttgtttgtagtttttatatgtgattgtgctattgtgctgtgttaagctaatggatcaatggacttgtttacaatgtgatattttctattaaatttaatattttcaaaaaaaaaaaaaaaaaa

SEQ ID NO: 2575 - DNA, 2276 bp, Mus musculus
gaagagcagcactcaccttaccgcaacctggcgggccccacaagatgagcgaagggatctcattggcctccagtagcgagcggagcagagtctcctgccctacggccctactctgcccgatgtagtcctgcagcgtgtctggacgcatcttgtcagccagcggcttgccctccagcatctgtcggatctcctccgccgccagcgcccggggatgcgcgcggcccgcgctgactccgaacgaggcgtcggcggcgtccgcatcccagtgcccgggatcgtcctcaccgtccacgtccgcgtcgccatcgccgtccacccccgcctcctcctcctcctgcgcctccgcctcatcccagctgcgcggggatgcgctgcctgcggcggctgcagccgctggtctcttccccataccctttctggcggggctgctggagcgggccaccgggaagtccgggataaggcgcgcaccgctgggcgtgggcggtgcgtcgtagctctcacggctctcggtctcgccgccgtcatcgccctcctcgccctcgccttcgctgctttcggccgccgtcggggtggcgggctgcttcagcgccgagctctccgacagtagacgcctcttggcgccgggtggcgagggccccttggcccgctccccagcgcggtgagagccggccgctggctccgcgtgccccgcagggtgcagcagcaggcagcggtccaggtgcgaattgatgtgcgcggcgggcatcatctgctggcacactgggcactgcacctggtgcaactgcgacaggaaggggtcgtcttccggcccgctcacctccatggtggcagctgccctccctggcgcccgtgcggctgcacctgcccctgagaacgccgatgcccgccgctaggcccggtgccgcgcgaccctcgcgcgggtagggagcaggacacgcacgggccgagggagggcgccgctcatgcctcacgtcctgagctcccgcgtcaactcgccctcggcccgcagctggcaacgcctcgcgagtcgtgtcgggaagtgtagtccaaagcgggcagaagactccgcaacccgatgcccccaatcgccgccggcaatttctcgcattgaactttgggaaatgtagttctccgtcacaacaggccctctcgtcttcttcggtccctgggaagagcctttctgtggcgctgcttggataggcgtggtgcgcgtgcgcatgcctgctcagtaccggaaacaaccgccttcgagtaaaacccaagcggagggaacttgggaacctggctttccaggattttggccttctgggtgcggaactagaaatgctgtcatcagggagaatatttgtaataaaactaaaacgaagtggaaataccccagaagtgcctaggaagctggagaaagggcttcgacataaacacacaagagctacacaggtagacaaagttcaattccgaaggctgctcaaggaaatgcaataaaagggattccctcccctgtgccccttaattttactttaggacctgtcgcccaaagtacttgcttaatagttatctctagctgatataatagtcgtaaactgaaaatcaccgttgtatcccaataacaaaatgatggcaggcagtccttaaaggtatttccagcagacaggagcaggaaatgagtacaataggcatttataaatgtatattctctgggtgtagtgctgtgtacctttaatactagtactcaggaggcactgacaggtggatctcagagtttgaggccagcgtggtctacattttgagttccaagtcagccagggctacataatacaaaattgtatttttacttttgaaaagcaaatttaaaaagttagtgtggtagtctacatccatgtattactgcttatgattttattatgcttttctgtaagttactccttggaaagatgcaaaaggagctggagaggtggctcagtagttaagagcacttgctgctattgtaggttcctctttcagtttgcagcaccaggtcagaggatctggctccttattctggcctctgggggcactacacctaggtaatgcacagtcgtacatgcaggcaaaacatgtaaatataaatgtaatacatcttttaaaatatttaaatacatataggtagattgagaggagtgtgacttgttaagttgctaaggctggaattctcaacctgtacctgggggctaccaaaaacatcaaaattttattataattgattattgctgataatcagaaattaaatgtgttaaggg

SEQ ID NO: 2576 - DNA, 1913 bp, Mus musculus
tgggcctggcgggcttcgtctccaccctcgcgaagccgggacacagatctcttcggtttttaggggaagttcatctgaatctcgtgacccggctgtccccgggtcttttagagtccattgctgtcgcctcatggcaacactgagatcgctgctgctggctgcgctgctgtgggtccctgccgaagccctgagctgctatggggactccgggcagcctgtggattggttcgtggtatacaagctgccggctcacagcgggtctagggatactccaaagggactgacgtataaatacatggaccagaactccgacggttggcaagacggtgtagggtacatcaacagctcggagggagccgtgggccgcagcttgcagccattgtaccgaaagaactccagccagctggcctttctactctacaacgaccaacctcctaaatccagctcagctcgggactctaccggccatgggcatacgaagggtgtcctgctcctggaccaagaagggggcttctggctggtccacagtgtgcctcgcttcccaccccctgcgtcctctggtgcatacacctggcctcctaatgctcaaaccttcggccagaccctactctgtgtgtccctcccgttcactcagtttgcaaggattggcaagcagctaacctacacctatccccttgtctatgaccacaagctggaaggcttcttcgctcagaaattacctgacctagagacggtgatcaagaaccaacatgtcctccatgagccctggaatagcagtgtaatactcacttcccaagctggggccaccttccagagctttgccaaatttggaaaatttggagatgacctgtactccggatggttggcagaagcccttggcaccaacctacaggtccagttctggcaaaattctccaggcatcctgccctccaactgctctggagcctatcaggttctggatgtgacacagacaggattccctggcccatctagactaactttcagtgccacagaggaccactccaaatggtgtgtggcccctcaagggccctgggcctgtgtgggtgacatgaataggaacaaagcagagacacaccgaggtggcggcacagtatgcacccaactgccttccttttggaaggccttccagtccctggtgaaagactggaaaccctgtatagaggggagctgactgaagcccatcggagcaaaggactaagactccgcagtctaaccaggtgggggccggactagcctttaccccagcacttgggaggcagaggcaggtggatcgattctctctctctctctggtttttcgagacagggtttctctgtgtagccttggctgtcctggaactcactctgtagaccaggctggcctcgaactcagaaatctgcttgcctctgcctctgtctctttctcccaagtgctgggattaaaggcatgcgccaccactgcccggctcaggtggatctcttgagttccaggccagcctggtctacagagagttccaggagagccagggcaacacagagaaccccatgtctcaaagaaaagaagaaaaaaaaaaaaaaaagaaaaacaagaaaaagagaaaagaaagaaagaaatatttttcattaaaattatgtttataaagaatttttattaatatgagagaaatggtacaatgtattgaaaagctggatatgagtttatgaatcacagtatctgagttaggctaaaaatcacataggaaaaggctgtcggtggaactgtgccaaaggtcagcagttttccctggaacgggatattaggttattcccaaatcaacctctcagaccttttgtgcttccccattttattgtgtaacaacatcacatacttctgaaataggacaataaagctgcggtttccattataaaaaaaaa

SEQ ID NO: 2577 - DNA, 494 bp, Mus musculus
  misc_feature 392: n = A,T,C or G
tttttttttttttttttacagtgtttaataaaaatttattgacttacaagtgattatttatcaaaagaccattaatagcaggtactgaaatgatgtgttactgggtggtgctgagagactaataggaaatcaatgctactggccggacagaatgcatatgaggggcccaccccccccaacagtgagcaaaatttcaccagcaaaatacaccagacgctagcccctgtgcagtgaaaagtccctcctttttatttattgtttacaaatgaaataatcaatacttttaatctagaggaaaatttattaactttcccatcggagagagacatattgactgggggagaggggagtgggtgcggtgagagacggatggctggatggtcatctcttancctgtccaagagtctgtgcgtgaactgggataacccaggccacacgggatgttgcgcccggagaaaccgagtctggcaactaatatgtacagctggggccag

SEQ ID NO: 2578 - DNA, 813 bp, Mus musculus
gacccgcctcggaccgacatggcccaggaacgcccctcctgtgctgtggagcccgagcacgtccagcggctgctgctgtcctctcgtgaggccaagaagtcagcctactgcccctacagccgcttccctgtgggggctgccctgctcaccggggacgggaggatcttctctgggtgcaacatagaaaacgcctgctacccactaggtgtgtgtgccgagcggactgccatccagaaggccatctccgaagggtacaaggatttcagggctattgccatctctagtgacttgcaagaagagttcatctctccctgtggagcctgccgacaagtcatgagagagtttggcaccgactgggccgtgtacatgaccaagccggatggcacattcgtagtcaggacggtccaggagctgctgccggcctcgtttggacctgaagacctgcagaagattcagtgaaggttgaagaatagaatgtctgctgaatgtgcaagccctacctaaggaacggctcttggaagacttcataatgatgctgtctctggctgggccttggggacacttgccacatgggtcccaaatggctgggcaagggtgaccttgattcacacaccacagcctccccttgagtgatggaaggtgccactcacctaggccaaagcccacatcctcttggggactcagagcactcctctccttccactcccaaagacacgggtattccagacccggtctgcctccctaccagccttcttaggctctgtcgtgtgacttttcagattataaatgccacagcacgtgctgtttgagaag

SEQ ID NO: 2579 - DNA, 1977 bp, Mus musculus
  misc_feature 1599: n = A,T,C or G
aagcgcggggcgggtcgtggcagagcaaggcatcgtcgcagccggcgagcaagactggccagcgctcctcggctttccagcccgctcccttcgctcatcccgccgccttgcagcccgcggcccgcagcgcggtgatctggggctccacggggccgggctgagcggccgccgcccgccccgagccgccgccgccgcccggccgcccgcccggcttagccgccgaggcgcctggcggggtccgcgccgccgggggcgggcggctcgggctgctgggcggctggcgcgcgcgcgccgcgggcggccggcggagaagcgggcccggcggccggcgagcatggaggagaagtacctgccggagctgatggcggagaaggactctctggacccctccttcacgcacgccctgcgcttggtgaaccgagaaatagaaaagtttcaaaagggagaaggcaaggaggaagagaagtacattgacgtggtgataaacaagaacatgaagctgggacagaaggtgctgattcccgtgaagcagtttcccaagttcaactttgtggggaagcttttgggtccgcgtggcaattccctgaagcgcttacaagaagaaacgttgacaaaaatgtccatccttggcaaaggttccatgagagacaaggcaaaggaggaagagctgaggaaaagtggagaagcgaagtactttcacctcaatgacgacctgcacgtgctcattgaagtgttcgcacccccagcagaagcatatgcccggatggggcacgccttggaagagatcaagaaattcctgatccctgactattatgatgaaatcaggcaagcacaactccaggagttaacatatttgaatggaggttcagaaaatgcagatgtcccagtggttcgagggaaatctactttgcgtacgagaggtgtaactacaccagcaataaccaggggaagaggaggagtcacagccaggcctgttgcagttggggtaccacgtgggacaccgactccccgaggagtcctttccacccgagggccagtgagccggggaagaggccttctcactcccagagcaagaggtgtccccccaaccggatacagacctcccccgccacccccaacacaggagacctatggagagtatgactatgacgatgggtacggtactgcctatgatgagcagagctatgactcctatgacaacagctacagcaccccagcacaaagtgcagctgattactacgattatgggcatggactcagcgaggacgcttatgactcctatgggcaagaggaatggactaactcaagacataaggctccttcggcgaggacggcgaagggcgtctacagagaccagccatatggcagatactgattgtactgtctgatgttgtgaaatagccaatctccaccgtcctgtatactgttcaaagtaatttttttctatgaccaatccctttttaaataaatcaaaatgcttaaaatctgaatggatggaacttaaagccactttgttgaagcatccacttgacagggagaagaaggacatgtaaaattttgttatttgcagtctgtatatgaaaactaggttatgaaaanggaaaaaaataactttgattaactagtgttaaacaaaaagataggtttactaaatatgttaatccattctttaacataagtctcacctttcatcttaaaggtttccatagaatttagttattttatctttcagccatatgctagtttttttttttcttctttctttcttgccaacttgcgtaaaaagggagccgattacaagtgcagacaatgtggtattcttttgtaactgagtcctgaaatgttctgtagtgttaggcaaagtctcctcttgcttgatactaaataaacttttgaaagaaaaaaaaaaaaaaaaaaaaaaaaaaaaaaaaaaaaaaaaaaaaaaaaaaaaaaaaaaaaaaaaaaaaaaaaaaaaaa

SEQ ID NO: 2580 - DNA, 3162 bp, Mus musculus
atgggccccggcccctgccgcgtgccccgcgcccctggctggctgctccgcgctctggccttgatggtggcggcttgcggccgggtcgccttcgccttcaacctggacacccgattcctggtggtgaaggaggcggtgaaccccggtagcctcttcggctactcggtcgccctccatcggcagactgagcgacaacagcgctacctccttctggccggggctccccgggacctcgctgtgggtgatgactataccaaccggactggtgctgtgtacctgtgtcccctcacggcccacaaggacgactgtgaacggatggacatttcagagaaaagtgaccctgaccatcacattattgaggatatgtggcttggagtgactgtggccagccagggccctgcaggtagagtcctggtctgtgcccatcggtacaccaaggtgctgtggtctgggctagaagaccagcggcgcatggtgggcaagtgctatgtgcgtggcaatgacctacagctcgaccccggcgatgactggcagacataccacaacgagatgtgtaacagcaacactgactacttgcagaccggcatgtgccagctgggcaccagcggcggcttcacccagaacaccgtatacttcggtgcccctggtgcctacaactggaaaggaaacagctacatgattcagcggaaggactgggatttatctgaatatagctacaggggctcagaggagcaaggaaacctttatattgggtacacggtgcaggtaggcaacgccatcctacatcccacggacatcatcactgttgtgacgggtgccccacggcaccaacatatgggcgctgtcttcttgctgaagcaagagtcaggtggagacctgcagaggaagcaggtgctgaagggcacgcaggtgggcgcttattttggcagtgccattgccctggcagacctgaacaatgatgggtggcaggacctcctggtgggtgctccctactacttcgaacggaaagaggaggtagggggtgccgtctatgtcttcatgaaccaggcgggcgcatccttccctgatcaaccttccctcctgcttcacggccccagccgctctgcctttggcatctctatagccagcatcggtgacatcaaccaggatggattccaggacatcgctgtgggagccccatttgagggcttgggcaaagtctacatctaccacagcagctccggggggctcctcaggcagccccagcagataatccatggagagaaactcggactgccaggcttggccaccttcggctactccctgagcgggaagatggatgtggatgaaaacctttacccagacctgctagtagggagcctgtcggaccacatcgtgctgctgcgggcccggcctgtcatcaatatcctccataggaccttggtggccaggccagctgtgttggaccctgcgctttgtacagctacctcctgtgttcaggtggagctgtgttttgcctacaaccagagcgctgggaaccccaactacaggcggaacatcaccctggcttacacactggaggctgacagggaccgacgcccacccaggctccgatttgcccgcagccagtcatctgtcttccacggcttcttctccatgccagagacacattgccagacactggagttactgctgatggacaatgttcgcgataaactccgtcctatcgtcattgccatgaactactccttacctctgcgcatgcctgatcgcctcaagctcggcttgcggtctctggatgcctacccagtcctcaaccaggcacaggctatggagaatcacactgaggtccacttccagaaagagtgcgggccagacaacaagtgcgacagcaacctgcagatgcgagcagccttcctgtctgagcagctgcagcctctaagcaggctccagtacagcagagacactaagaaactgtttttgagcatcaatgtgaccaattcaccgagcagccaacgggctggggaagatgcgcatgaggcattgctcaccctagaggtgccatccgccctgctactgtcctccgtgcgcccgtctgggacctgccaagctaataacgagaccatcctgtgtgagctaggaaaccccttcaaacggaaccagaggatggagctgctcattgcctttgaggtcatcggggtaacgttgcacacgagggacctcccagtacttcttcagctgtccacgtcgagtcaccaggacaacttgcagcccgtactcctgactttgcaggtggactacaccctccaggcctcgctcagcttaatgaatcatcggttgcagagcttctttggtggcacagtgatgggtgaggctgccatgaaaactgcggaggatgtgggaagtcccctgaaatatgaattccaggtgagcccagtgggagatgggctggcagccttgggcacactggttctaggtctggagtggccctatgaagttaccaatggcaagtggctgctgtaccccacggagatcaccatccatagcaatggttcctggccctgccagccgtctggaaaccttgtcaaccctctcaaccttactctctctgaccctggagtcacaccactgtcgccacagcgccgccggcggcaactggatccagggggagaccagagttccccgcctgtcacactagctgctgccaaaaaagccaagtctgagactgtgttgacctgctccaatggccgtgcccgctgtgtgtggctggagtgcccccttccagacacctccaacattaccaatgtgaccgtgaaagcacgggtgtggaacagcaccttcattgaggactacaaagactttgacagagtcagggtagatggctgggctaccctgttcctgagaaccagcatccctaccatcaacatggagaacaagaccacatggttctctgtggacattgactcagagctggtggaggagctgccggctgagattgagctgtggttggtgcttgtggccgtgggtgctgggttgctgctgctggggctcatcatcctcctcttgtggaagtgcggcttcttcaagcgagcccgcactcgtgccctgtatgaagctaagaggcagaaggctgagatgaagagccagccgtcagagacagaaaggctgaccgacgactactga

SEQ ID NO: 2581 - DNA, 2097 bp, Mus musculus
ggccatttcgtgacgccgcgagaccgagaatctgtaggagcagaaccagagggaagcgggtgggcctgtcggagcgttaggatttgagcttgggccttttgaacccaggatctcgaaatgcatcgtgattcctgtcccttggattgtaaggtttatgtaggtaatcttggaaataatggaaacaagactgaattagaacgggcttttggctattatggaccactcagaagtgtgtgggttgctcgaaaccctcctggctttgctttcgtcgaatttgaggatccccgagatgctgctgatgctgtccgggaactagatggaagaacactgtgtggctgccgtgtaagagtggaactgtcgaatggtgaaaagagaagtcggaatcgtgggccgcctccctcttggggtcgtcgtcctcgagatgattaccgcaggaggagtcctccacctcggcgcagatccccaagaaggagaagcttttcccgaagccggagcaggtcactttctagagataggagaagagaaaggtctctgtctcgtgagagaaatcacaggccgtctcgatccttctctaggtctcgtagccgatctaggtcaaatgaaaggaaatagaagaccagtttgcaaaagtggtgtacaggaaataacttcatctgacaggagtatgtacaggaaattaaagttttgtttgagacttcataagcttggtgcatttttaagatggtttagctgtttaaatttgttttgtctcttggaacagtgacacacaaaacaatgtaattctctatggttttcagatggatcataagaggcacgtgatatcaagaattgttactttacaatgttcccttaagcaagatttaattttctttgaattttagtttttcatagactgaaataaaccttaggtcctgcccagttttaagtgtgatgtactaatgatataaagcaactggcggaaattgaaagaagctatagtcctctagtagctgagacactgtggcactgtgggtggaatgataaagcggtgtttaagagctgctgtgaacacaagccaacagataagggtaggaaccacactgaagatttgcaaaggggttccttcctggtttctctatggggatgcagagctattgtaacgtctttatttggaaatgtaaaactcagatgccagtgtcctttcagtttaagggtacattgtagagctcaacttttcagttactgtgcaagattgtttttcatgctgtcatttgtaatatgtttgtgagaatctttgggattaaagttttggttacaaattgttgtttaacttgaaagcctgtttttccttgcacactcaaaatctgtgagcttggtatcaagtccaggtaaaacattcctattggaagccatacttatattttcttgtaaagtgcttttgaattaataaagtactagcataattgtgtagtagtcagtcgagcgaaccactgttgccattgttcttatccctgggaaagtagttggttacccagttcattctttgtaagaaacacaactgagaagcactacattagtgaaggaatttttttttcccctttgcttgtcacttatgagagttagccattttttaggtgttgaagccagttcaggattatggctgttagtgactaacattttaaagtaagctccagtatggtaggtatattgtaattcccttaagttgcccataaaaagtggctttgatcttcagcatgaaaacattcaaaattttaaaatttattttataacttgaggtgttgcatgggattccaaattgatccatcatgatgtaaaatccccaatatggttaattgtaatgatgcacagttgaaatggaggcatgcatatcctttctcttagaatctggaggagttgtggtttcaggtatttgtgtgcaactagattaaatcataatgcaacagtcttgtggcttaagtttccttaaatgtgttcttttgagataagattctactgtactgacttggtctatgtaagagccattgcactaagttaaatctgtaagcttataaatctcccccattgttatctttaaacaataaatttcagtaaaaaagg

SEQ ID NO: 2582 - DNA, 2123 bp, Mus musculus
  misc_feature 2082: n = A,T,C or G
ggcagagcaggggcccggccgaggcagcgctgcgcgggccaccatggccacggacgagttggccagcaagctgagccggacgtgcagatggagggcgaaggcggcgaggcgacggagcagccggggctcaacggggcggcggcggcggcggcggccgaggctcccgacgagactgcccaggcgttgggcagcgcggacgacgagctgagcgccaagctgctgcggcgcgcggacctcaaccagggcatcggcgagccacagtcgcccagccgccgcgtcttcaacccctacaccgagttcaaggagttctccaggaagcagatcaaagacatggagaagatgttcaagcagtatgatgccggcagggatggcttcatcgacctgatggagctgaaactcatgatggagaagctgggggccccccagacacacttgggcctcaagagtatgatccaggaggtggacgaggatttcgacagcaaactcagcttccgggagttccttctgatcttccgcaaggcagcagcaggggagttgcaggaagacagcggcttgcacgtcctggcccgcctgtccgagatcgatgtctccacagagggcgttaagggtgccaagaacttcttcgaggccaaggtacaggccatcaacgtgtccagccgctttgaggaagagatcaaagctgagcaagaggaaaggaagaagcaggctgaggaggtgaagcagcggaaagcggcctttaaggagctgcagtccacgttcaagtagccagagccaaggccgagacctggccctgccccgtgtgcggtctgggggcacgggtgggtacaggggatctgtgggagactagctcccaggtcctgctctctgtgcccggaccactactaaaaaccgcaaacgatatgtgacccgatctcattcaggagtctcctcggtggttggtccctgccctgccctctcctgcggttcatgcggctgtgatgccagccagcagcatcctctctggccatccctacgtgtcttgttctctggccaccttgctgcctgctctagcccaacttcagcccattcacgcccctgcctttggtaccagctactttctccacccacccaactccccttaactataggccgccctgccatggtccagcagagagtgagaccctccccaggacgcttcctttcagatcaggccccatctctgatggaagtggagagactcttctattagtgaggagatccggggactcctacattagtgaggagatccaggccctagcactctaagctgatttcaatggggcccagccaggcagggtgaaggccactgtgcgaatctacctcacaggctacactctgccaggcatgccttggggatgtgagtgatagggttccgaggggaggggcagaaatgtcaccctctgacagcctacccccgcagcaagctgagggtcccaaggggctgtggagagaggggtggggtccctaagggattggccttttcagggtggacctcagcactctgccttgactccccaaggagtgcctgacgtgtttatgttcactggcagtaggactcggggccggcacccctttcacactctccttccttgggtttgtcacccgtgatggcaccagcctgtcgtgcccacccgtagactcgcatggggactccccaggccacagtgaaacccgtgccgttcctatatagctccatgtgctggctcacgtgtgtgtatgtgcgtgtccgttgctgtgttgtgaaactgtgacgtcacccagtctaagtgaatggccaccggggccaccgttatgcaatgttcagcgtgtcactgcttgtgaagctcgataactctttattttactacaatgtccccagagtccctgggacccctgtgggacttgcaaaggttttattttttcggtcttagaacctatgagaatcggaggggccgagccaagcccagcccagcccagctgccgtggccttggcttgcgtttgcctcagcggatatgtttatacagatgaatataaattctctttacttttggctgtttcacttttatttttgttccccctctcantacctcccaaaaaaagaaaaaaagaaaaaaactacttcttt

SEQ ID NO: 2583 - DNA, 1460 bp, Mus musculus
ggagatccggctgactgccagcacatccaaacgtattagcttccttatgatggtttaatgctttcttattttacttcctgtgatcacagaaactcattttcagcttctgccaaagccagcaactctgggaaagagtctgctccttgaatacctctgcaggtgtcaacaaggctcaaggagcaggatggatctcgatgtggttaacatgtttgtgattgcgggtgggaccctggccattccaatcctggcatttgttgcgtctttcctcctgtggccttcagcactgataagaatctattattggtactggcggaggacactgggcatgcaagttcgctacgcacaccatgaggactatcagttctgttactccttccggggcaggccaggacacaagccatccatccttatgctccatggattctccgcacacaaggacatgtggctcagcgtggtcaagttccttccgaagaacctgcacttggtctgtgtggacatgcctgggcatgaaggcaccacccgctcctccctggatgacctgtccatagtggggcaagttaaaaggatacatcagtttgtagaatgccttaagctgaacaaaaagccctttcaccttataggcacctccatgggtggccacgtggctggagtatatgccgcttactacccatctgatgtctgcagcctgtctctcgtgtgtcctgctggcctgcagtactcaactgacaatccttttgtacaacggctcaaagagctggaggagtcagctgccattcagaagattcccttgatcccatccaccccggaagagatgagtgagatgctgcagctctgctcctatgtccgcttcaaggtgccccagcagatccttcaaggtcttgtcgatgttcgcattcctcataacagcttctaccggaaattgtttttggaaatcgtcaatgagaaatccagatactctctgcatgagaatatggacaagatcaaggtcccgacacagatcatttgggggaaacaagaccaggtgcttgatgtgtccggggcagacatattagccaagtcaatctctaactcccaggtagaggttctggaaaactgtggccattcggtagtgatggagagaccgaggaagacagccaagctcattgtcgactttttagcttctgtgcataacacagacaacaagaagctgaactgaggctgttgccacagcttgcattgtgcacacagcatctgctcccatccccaaaacctgacacagtaaccactctcagggatcctgccccaaatgctgtctgagcaccaacagccctgaggaagccagttgcctatcccagtatccttggttccacagagcatcaggggccacaagaaactctccaggatcctttttttcaaaatagaaacctaaatggaacaaacaaacaaaaaaaaaacaaataaaaaaatctagccatgaagcc

SEQ ID NO: 2584 - DNA, 1155 bp, Mus musculus
ggaaggcagaccctcacggtcagtaaaacagcagcctgcacaaatctccctcaaagaactaggggactgccactgcagatctatgaagatgtagctctgccttcaagaaacatgaattactactattactatgctggcaccttcaacgtgccattcctgtttgatgattgtggtctgaggtaactggcctaaataaggagactaacaagactgtaaaggttttttttcaagaccacgtcctgagtgtgtctgctgcaaagagaatctgcccagaacaccctgcaatggcaggaatttatggaatattctatgccagacttggaggtaacatctgtgctctcctgcggctctctggtccactcaaggaggagtatgctcgggagcatggcttggacttccagagacttctggatgcgagcacctacaaggagacctatcggagggacatgatctgttggggggagcagaagcgccaggcagacccaggcttcttctgccggaagattgtggaaggcgtgtcccagcctatctggctggtgagtgacacacggaggacatctgacatccagtggtttcaggaggcctatggggctgtgatacagacagtccgagtagtggcctcggagcagagtcgacagcaacggggctgggtgttcacaccaggggtggacgatgctgagtcagagtgtggtctggacaactttgggaactttgactgggtcattgagaaccacggagatgagcagtgcctggaggatcagctggagcacctgctgggatttattcaagccaaactttagtgatgaggcttaggggacgagcagagactgatgggcctggcgaacagtggttctgccagatgtgggtccccagtcccagccgaggtcagcaaacagacagacagtctggcttgccagaggtctgggcaggatgctcgtgagtagtgggcaaataaagaaacctctggtgttgtgttttccctggagaggacactctgcctctttagggcacttatagggcaaaggcaggcgcatgagttttgcctgaggcaggaacattgccacacccatgatgggcaggctgcagagctgtgatggtggttttccctgtgtgtacgctctcagccctggagtcctaataaacttactggatcgc

SEQ ID NO: 2585 - DNA, 674 bp, Mus musculus
gagcagcgcctacagttgccaagattgaagtagaactgagtgtgaggcgactccagacatggggcacccgggttcaggaccaaggccagacactacaggtaacaggattgagaggccctgtgctccggcttcgagaaccattgggagtgctggccgtggtgtgcccggatgagtggcccctgctggcttttgtgtcactactggcccctgcactggcccatggcaatgccgtggtcttagtacccagtggggcatgtcctctgctggccttggaggtctgccaggatatagctcctctgtttcctgctggcctggtgagtgtagtgacaggggatcgcgaccacctgacccgctgtctggccttacatcaggatgtccaagccctgtggtacttcggctcggcccagggctcccagtttgtggaatgggcctctgcaggaaacctcaagtctgtgtgggtaaacaggggcttcccaagggcctgggatgtggaggtccagggggcaggacaggagctgagtcttcacgcagcacgaacaaaggccctgtggctgccaatgggggactgatgccgaagccacccactccatctttgatgctcaggagcaccaagtgcttggaacgtttctctcagatttcccatggcttctaataaactgagtgactttaactgt

SEQ ID NO: 2586 - DNA, 678 bp, Mus musculus
tttgcttgggtgagatctgactttccagagctgtcaagcagggagaggaagagactccgggaggcagtaggactgttgtgtctgtggagaacctagttttctccagtcagtctcaggcctgctgattctgctgcctctgcctgctgagtgtctgaagcttcccccgaggccttggcttgctgctccgctcccttgggtcggtttgtggctcgtgtgggagagcaaagaaggtagcagccccctcctcccacttccctctgtgagatgaaggaagtgctggcctgggcctaggcatagactcagaatgggtagggctgctaaggggacctagccacagtcaccagttttctctcagcgtgtggctgaactggaacctgcaggctttcctgtcccacttgggcctgcccttcttcactgcccatcctgtgtttgtgcccgcttagctttgtggagtggacactgagaagcacaactcaggggcttggccaggaattaactatggtctgggcagagcggggattgaagtcatcagagtcacaggcagttccccaggaaaagcccagtgccagcttccttccagggccaggccactgccttcctggctcccttccctgtccctgcgtccccagccctgcgccttccttgctatttggattaaagcctctgttttacacctgc

SEQ ID NO: 2587 - DNA, 1819 bp, Mus musculus
tggaagggagatcggagcagagtgagagagaagctaccctttggaccacaaatgaagcccctccttgtgctgctgctgctgctgctcctggatctggctcaggcccaaggtgctctgcacagagtgcccctcagaagacatcagtcccttcggaagaaactacgggcccaaggacagctctcagaattctggaggtctcataacttggacatgacccgactcagcgagtcctgtaatgtgtattcgagtgtcaatgaacccctcatcaactacctggatatggaatactttggcaccatctccatcggcaccccgccgcagaacttcactgtcatctttgacaccggttcatccaacctctgggtcccttctgtgtactgcaccagcccagcatgcaaggcacacccagtattccatccatcgcagtccgacacatacacggaggtagggaatcatttctccatccagtatggtaccgggagcctgacaggaatcattggagctgatcaagtctctgtggaagggttgactgtggatggccagcagtttggagaaagtgtcaaggagccaggccagacctttgtgaatgcagagtttgatgggattctgggtctgggatacccctcattggctgctggaggagtgaccccagtgtttgacaacatgatggcccagaaccttgtggctctgcctatgttttctgtctacttgagcagtgaccctcaaggtggctcaggcagtgagctgactttcggaggctatgacccctctcatttctctgggagcctcaactggattccagtcaccaagcaagcctattggcagattgccttggatggaatccaggtgggagacactgtgatgttctgctccgaaggctgtcaggccatagtggacacagggacctctctcatcactggcccccccgacaagatcaaacatcttcaagaggccattggggccacacccattgatggagaatatgcagtggattgtgccactctcgacacgatgccaaacgttaccttcctcatcaacgaggtttcatataccctcaacccaactgactacatcctgccggacttggtggatggaatgcagttctgcggcagtggctttcaaggacttgacattccacctccagctgggcccctctggatcctgggggatgtcttcatccgacagttctactcagtctttgaccgtggaaataaccaagtgggattggcccccgcagttccctaaagagggatgtatgcctacatatggatgcctgatacccatttaacctgttagatacctttgtaactatcaaagccgtcatttcccatggggtgtagccaccccagagtattcagaccaatcaaagcataagagtgcaccccactcactgcaaacacacacacacacacaccacctctaccatcaccacgatggaagaagttctgtctatagtcttcactgcttattgttgactttctattatggaaatctctaaacatgtacacagtagacgtgatggcaagataaatacccacacacctctgcctcaggtcacaacccatccatgtgtggaccagactctctatcttccatccctctggttccacgcctctagatttggaagcagattctaagcaccaggtcattttatctaatgtctaacatccttacaaatcagaatttaaatgcctcaccctctcataaatgtggatctgttttttacagttggtttatttgtatcaggattaaaaccagatccataactggacaaaaaaacccataactgatttgattttaaatatcaaaaaaaaaaaaa

SEQ ID NO: 2588 - DNA, 1649 bp, Mus musculus
gtctcgggtgcttgcgctagctatttgcactcgtacgccgccggacctcgccgctgcctgcctcgcgccatgggtcgacagaaggagttgatgaatcgttgtggggagatgcttcacatccgctaccggctgcttcgccaggctctggcggagtgcctggggaccctcatccttgtgatgtttggctgcggctccgtggctcaggtggtgctcagccgtggcacccatggtggcttcctcaccatcaacttggcttttggcttcgctgtcacccttggcatcttggtggctggccaagtgtctggagcccacttgaaccccgctgtgaccttcgcaatgtgcttcctggcacgagagccctggatcaagctgcccatctatgcactggcacagacactgggggccttcttgggcgctgggattgtttttgggctgtactacgatgcaatctgggcctttgccaacaatgagcttttcgtctctggccccaacggcacagctggaatctttgccacctatccctctggacacttggacatggtcaatggcttctttgatcagttcataggcacagcgcccttattgtgtgtactggccatcgttgacccttataacaaccctgtgccccgtggcctggaggctttcactgtgggcctggtggtcctggtcattggaacctccatgggcttcaattctggctatgccgtcaaccctgcccgtgactttggacctcgcctcttcaccgccctggctggctggggctcagaagtcttcacgactggccggcactggtggtgggtacccattgtctccccactcctgggttccatcgctggtgtcttcgtgtaccagctcatgattggttgccacctggagcagcccccaccctccaccgaggaagagaatgtgaagctggcccacatgaaacacaaggagcagatctgactgtcactctcctgagtgtccactgactgtgtggggaccagtccccgaaagccctttgtgatgcctctctcgggctaaaccgctccctgtgtccacccctgctggatgggccctccagaatttctatgaactctgcccattaggcgatgtgaggttcccacccacctttaagccaaggtaggatagcaaataagatggagatttagagagagagagagagagagatatttatagagagagaatgaatgtgtacatgtgtgctgttttctaagctgaatgatgcaaaggcaagggaccaagttttcaaaacaaactgtagcagctcaggggaagggagcccaggggaagggagattgtgtctcatgttgtgccagagtgtgcatgcttcagggactcctccatgtggaggtggacccagaagtgagtttctaagtatgcgtgtgcctactgtttttttttttttttttgaaatggacttctaggcttgctgatggggaagggataagaagggtgtagctcacatctggagctatgacccttgactgggggctgtgtaatatgtttctgttataagatagacattgggaggggctgaagtccaggtcgtaagtttcataatttgttttttaaatatataaatatatacatacatatatgttacagccctaggaataggggtgggaaactccactttttaaaagggg

SEQ ID NO: 2589 - DNA, 1014 bp, Mus musculus
gctctccggcagggtcgccgcgatggccgcccagggagagccgcgggtccagttcaaggtcgtcctggtgggcgacggcggcaccggaaagacgacattcatgaagcgccacttgaccggagagtttgagaaggagtatgtagccaccctgggcgtggaggtgcacacattagtcttccataccaacagaggacctatcaagttcaatgtgtgggacacagccggtcaggagaagttcggggggctgcgcgatggctactacatccaagcccagtgtgccattataatgtttgacgtaacatcaagagttacttacaagaatgtgcctagctggcataaagatctagtgcgtgtgtgtgaaaacatccccattgtattgtgtggcaacaaagtggatgttaaagacatgaaagtgaaggcaaaacctattctcttccaccgaaagaagaatcttcagtactatgacatttctgccagaagtaactacaactttgaaaagcctttcttctggcttgccagaaagctcattggagatcctaacttggagttcgttgccatgcctgctcttgccccacctgaggtagtcatggacccagctttggcagcacagtacgagcatgatttagaggttgctcagacgactgctctcccagatgaggaagatgacctgtgagaaagtgaagctggagccctgcgtcagaagtctattttaggcaactgtcctgtgatgccagccagcggtgcagtgtgtgtgccaccttatttagctaaaggagatcgtgcaattcattgggatgctgaaggagatgaatgggcttcggagtgaatgtggcagttaaaatacaccttcatttttttggacttgcgtatttagccccctggaacagagttgttctggatttcaaagataagactgctaccgtagcatcacaatagtcagtggtgaaatcttgtttgtaactgtcattcccactctttcatttagaatcagaataaagttgtatttcatatttg

SEQ ID NO: 2590 - DNA, 1730 bp, Mus musculus
tgtagcctggaggtgcctttgtttgccttctcttcagtgggctttgtggcatcatggctgctcagacagatttctgggatgctattgtgattggagcaggcatccagggctgctttaccgcgtaccacctggccaaacactccaagagcgtcctcctgctggagcagttctttcttccccattcccgaggaagctcacatggacagagccgcataatcagaaaggcttatccagaggacttctacacgatgatgatgaaggaatgttatcagacatgggcccagctggagcgtgaagccggaacccagttacacaggcagactgagctcttacttctggggacgaaggaaaatccaggattaaagacaatccaggccaccctgtctaggcaagggatcgaccatgagtatctttcgtcagtggatttaaagcaacgctttccaaacattcggttcaccaggggagaagtggggctcttggacaagactggaggtgtcctctatgcagacaaggccctcagagccctccagcatataatttgtcagctaggaggcactgtgtgtgatggagagaaggtagtggagataagacctggtctacccgtcacagtgaaaaccaccttgaagagctaccaagccaacagcttggtcatcactgctggtccctggaccaaccggcttctgcatcctctggggattgagttgcctctccagacccttaggatcaatgtgtgttactggcgagagaaggtccctgggagctatggtgtatcacaagcttttccatgcatcctgggtctggatctggccccccaccacatctatggactgccagcatccgagtacccggggctgatgaagatctgctatcaccatggtgacaatgtggacccagaggagcgggactgccccaaaaccttctcagacatccaagacgttcaaattctatgccactttgtcagagatcatttaccaggcctgcgggctgagccagacatcatggaacgctgcatgtacacgaatactcctgatgagcactttattcttgattgccacccaaagtatgacaacattgtcatcggcgctggattctctggacatggattcaagttggcccctgttgtggggaagatcctctatgagctaagcatgaaattacccccatcctatgacttggctccgtttcgaatgagtcgcttctctacgctgagcaaagcccacctttgaccccagctgactctctcctgggcaggaaagccctcctaggggagatttccaggagatgtggccttgacgagtttcttctcctcctgattcaatggaatctcccataaacaccaaatgattgaacattttccccccaatcagcctccctagtctatctcatttctccttcccagaaagtcagcgagattcaccatcacagaacagcaaggggctttaagatggatgtctcaatggggaggggctggagacaggctcagtagactaagggactcctttaaatttctttttgctgggacactgggtgaacttgcgattgctttgactaaatctgctcagggggaatgtaaaacagattatattttataaaccactagtgcctttgggtttctttgccaaaaacttaagccagcctctatcaccaaaaaaaaagtgtcacctctaataaatacacatttgccaggaaaaaaaaattgctgaaaaaaaataaacaaaaacctggattgc

SEQ ID NO: 2591 - DNA, 1847 bp, Mus musculus
  misc_feature 1575: n = A,T,C or G
aattcggatccatggaaggccgccaccccagcagactgaagccagacgtgaaggagttcatgtaagggagtccctgctgtcctccagacacactgatgcctgggctacggatggggacggggacgcaatgtgtctggaattctctcttccgaatcctggattctgttgacgaagcttgcctttgagattcctgaacacggagaaatagagattaaaaaccccagaagagagaaagtaaatgattcacaatcttgatgggttttgccgtatttatgttcttccactgtattagataccagtcacaaatgacttagaggccataaactgtgctttaagtaactagcctgcctttctatccagatctttgcctccagaggtgagaagatgaacaactccaccaccacagaccctccaaaccagccctgctcctggaacaccctgatcacaaagcagatcattcccgtgttgtacggtatggtcttcatcacggggctcctcctcaatgggatatcaggatggatattcttttatgtgcccagctccaagagttttatcatctatctcaagaacatagtggtggctgactttctcatgggcctgactttccctttcaaagtccttggtgactcaggcctcggcccctggcaggtgaatgtgtttgtgtgcagggtctctgccgtcatcttctatgttaatatgtacgtcagcatcgtgttctttgggctcatcagctttgacaggtactataaaattgtgaagccccttctgacgtctattgtgcagtcggtgaactatagcaagctgctttctgtgctcgtgtggatgctcatgcttctccttgctgtcccaaacatcatcctgacaaaccagggtgtcaaggaggtcacgaagatacagtgcatggagctcaaaaacgagctggggcggaagtggcacaaggcgtctaactatatcttcgtgagtatcttctgggtcgtgtttcttctgctaatcgtcttctacacggccatcacgaggaagatcttcaagtctcacctcaagtccaggaagaattccacctccgtcaagaggaagtccagccgcaatatcttcagcatcgtgctcgtttttgtcgtctgctttgtgccttaccacattgccagaatcccctacacaaagagtcagacggaaggtcactacagctgccggacgaaggagaccctgctctatgcgaaagaattcactctgctactctcggctgccaatgtgtgtctggaccccattatttatttcttcttatgccagccatttagagaagtcttaaataagaagttacacatgtcactcaaagtccagaatgacctagaggtttccaaaaccaaaagggaaaatgcgattcatgaaagcacagatactttgtaaattcccatccccttccaagtattatcagtcttgttacatgataattaagatacatgaataaaaagcaggcatatgatgataagtaacttagctagcaatatatctaataatatgtatgaagtccaaaaaggtataataaaaataaaatataagtttccatgcaaaatggaagtntgtagcacatcacatttttttagaaatcaaaggaacagagaagtggctttgtgggtgctggcgtatgagttaccaaaaccaaacttctcttctattaactggcttcttagaagacacccagtctttccgaccttcctcctaagcattcttccaagcaacactcgtatctatttcatgctttgtactatgcatgtgccaataaacaagttgtcttcaaaacccaaaaaaaaaaaaaaaaaaaaaaaagggcggccgcaagcttatgtatttaa

SEQ ID NO: 2592 - DNA, 1396 bp, Mus musculus
ggtgagaaattattgctagcacagaggaagcccggtccccaggccatgggggtacagctgaggctgccacccggagagccctgccatgaagggtatgtactgtcgctggtctgctccaactcttcccgggcttcgtgcgagatcacaaatgtgtcagagtcgctgccttatcctgtcgtctacacgaacctgaattcctctaaaaccaacttcagcatttcagcaagtgtagaaaacaaatacaatctgtatgtgggcttggtattggccataagctccagcgttttcattggctctagtttcatactcaaaaagaagggtctcttgcaactggccgacaagggcatcaccagagcagggcaaggtggacattcttacctcaaggaatggttgtggtgggcaggactgctgtcaatgggagccggagaggctgcgaacttcgccgcttatgcctttgcgcctgccaccttggtcaccccactgggggctctgagcgttctcataagtgcaatattgtcttcctattttttaaatgagcgcttgaatattcacgggaaaataggctgcattttaagcgtattggggtcaactgtgatggttatccacgccccacaagagggagaagtcacatctttgcatgaaatggaaatgaaattgagagatccagggttcgtttcctttgctgtgatcatctctgtgatctcactggtgctgattttgattgtggccccaagaaaggacagactaatatattagtctatatcgcaatctgctctttgattggagcgttttccgtctcttctgtcaaaggcttgggaattgccattaaggaactgctggaacaggaagcctgtttacaaggatcccctgttcttcatcctgttgaccatgcttgcactttccgtgaccacccaaattaactatctcaacaaggccctggacactttcaacacatccctggtgactcccatttattacgtgttcttcacatccatggtggtaacttgttctgccatcctgttccaggagtggtatggcatgaaagctggagatatcatcggtaccctgagcgggttcttcaccatcatcaatggcatcttcctcctacatgcttttaaaaacaccaacatcacctggagtgaactcatgtctactgctaagaaagaagccctttctccaaatggcaatcagaacagttatgttttactagagaacgcagacttctcagcctctgggtatgatgacgacatcaccctgtttagcaggaccaatgaccaaagtagccataaactttgaacttcaaccaagacatccaaagcaatatttattcttggaaggtctatttgacgttagcatgtataacactgtataaatcctctgaatgggaggccaagcg

SEQ ID NO: 2593 - DNA, 848 bp, Mus musculus
gtcagaagactttgacttctgatagccatggactcactagactgctgaggaagacccagcatctattcaatctgctgaaacatccaggaaactacttttaacaccgagaatcaagtatggaaatgctgaactaagaagagcccaaggaagaactgtgttgccagatcaggaactccaactctaaagaagatgagtgatccatccaaaaccaaccagtgcccccctccatgctgcccaccaaaaccatgttgcccacctaaaccgtgctgtccacagaaaccaccttgctgtcccaaatccccatgctgcccacccaagtccccatgttgccctccaaagccctgtccctgtcctcccccctgtccctgtccctgtccagccacctgtccttgtccgctgaaaccaccatgctgcccacagaagtgttcgtgctgccccaaaaagtgcacctgctgcccacagccacctccttgctgcgctcaacctacctgctgctcttcagagaacaagactgagtcagattctgatacatctggccaaactctggagaagggctctcaatcaccacagtccccaccaggtgctcaaggcaactggaaccagaagaagtcaaacaaatagactgtccctgacaccatgccctttttcaaagggtataggattactacaggtcaggctaagactatgttgtaaagatgctgttttcacaataaccaacaagtccactcaaccataagctaccatttcgacctaactgtaggctactattgcaactggaaatggaaggtagaaaaggatagaaacatcttgtctagtgatcctgacatttagatagcaaagaaataaaa

SEQ ID NO: 2594 - DNA, 3304 bp, Mus musculus
  misc_feature 3229, 3230, 3231: n = A,T,C or G
ggtggatcctccaacccgctcccataaggctttggctttccaacttcagctacagtgttagctaagtttggaaagaagacaaaaagaagaccccgtgacagctttgctgttgttgtttgccttagttgtcctttggggtctttcggcataaggctgttgtgcttatagtggtgctatcttcggttcctctcactcctgtgaacaagctcccgggcaagagcagctaaagctaccagcatcagaacaaacacggggagaacgcctggtgtcatgaccaaggcaagagatcaaacccatcaggaaggatgctgtggatccttagcaaactacctgacctcagcaaaattcctcctctaccttggccactctctctccacttggggggatcggatgtggcactttgcagtgtctgtgtttctggtggaactctatggaaacagccttctcttgacagctgtctatggactggtggtggcaggctctgttctggtcctgggagccatcattggtgactgggtggataagaatgccagacttaaagtggcccagacgtcactagtggttcagaatgtgtccgtcatcctctgcggaatcatcctgatgatggttttcctacacaagaatgagctcctgaccatgtaccatggatgggtccttactgtctgctacatcctgatcatcactattgcaaacattgcaaatttggccagtactgccactgcgatcacaatccaaagggactggattgttgttgtggcaggagaaaacaggagcagattagcagacatgaatgctaccattagaaggattgaccagctaaccaacatcctggcccccatggctgtcggccagattatgacatttggttctccagtcattggctgtggttttatttccggttggaatttggtgtccatgtgtgtggagtacttcttgctctggaaggtttaccagaagacccctgctctggctgtaaaagctgctctcaaggtagaggagtcagaactgaagcagctgacctcacctaaagatactgagccaaaacctttggagggaactcatctaatgggtgagaaagactccaacatccgtgaacttgaatgtgaacaagagcccacctgtgcctcccagatggcagagcccttccgcactttccgagatggatgggtctcctactataaccagccagtgtttctggctggcatgggcctggctttcctctatatgacagtcctgggctttgactgtatcactacagggtacgcctacactcaggggctgagtggatccatccttagtattttgatgggagcatcagcaataactggaataatgggaactgtggccttcacctggctacgtcraaaatgtggccttgttcggactggtctattctcaggactagcccagctttcctgtttaatcttgtgtgtgatctccgtattcatgcctggaagccccttggacctgtctgtttctccatttgaagatatccgttctaggtttgtgaatgtggagccagtgtccccaactaccaaaatacctgagaccgtctttacaacagaaatgcatatgtccaacatgtctaatgtccatgagatgagtactaaacccatccccatagtctctgtcagcctgctgtttgcaggagtcattgctgctagaatcggtctttggtcctttgatttgacggtgacacagttgctgcaagaaaatgtaattgaatctgaaagaggcattatcaatggtgtgcagaactccatgaactaccttcttgaccttctgcatttcatcatggtcatcttggccccaaatcctgaagcttttggcttgctggtattgatttcagtctcctttgtggcaatgggacatcttatgtatttccgatttgcccagaagactctgggcaaccagatttttgtttgtggtcctgatgaaaaagaagttacagatgaaaatcaaccgaatacatctgttgtataaaaatagtttagctgtggcccctgttactagattgtggagagcatgtgtgcttattttgtactgcagaatcccaataaatgcctgcatttctctctggttttaccacctctgtgccttaagggctaggascactaactaaccatcgccagcaaagatggttatttctccttacatgtaaacatgggaaaataggaagagggagaggcagtcagcgtgtgtatagaaagggcttaatggtaaaatgaacttcccttactcttataagtatattaaattttgaagagtggttgtcaggtgagtaaaattattccttagcagatatttattatctactagaataataaatcaattcaccctaaaactcactcttgtaaaagtttgccccacttccttttttaagatcagtgatatttttbtcagttacattacagaaacaagtttttcctccatgtatgaaggttatagttagataatgagtgttatccttattaatcccattgaacttaaggaawttwttgwatgtggaggatgaaatgtgtaactagacttgtccaaaaggttcatggaataacttttgcattttgaccatcagaaagggcraaatattacagtaatgtgtgtatggtggctcttcataaaatgactctcaaaatctgcagaaagaagraaagttgtaggtttctagtgtggtacagaaggacttaaggcttgttattagtgtgattgtagaaactggaagctaagggtgaggacctcatgtaaccagagtcactgtcatcagccatcactayctatcttggtaaatgagagagctgacctggcaccttacaggcagaaaagcggcccacactaagaaaggactgcaaatcagtgartctgtatagaacattttaccttcactgacttgggccgatgtgtttgtcatctctgtgtttttctagagcaacaatagtcacaaaagttcccctttcaatatccctgagaagaataaagaaaaaactgtttgtaaatatttttttaaaactgttctgcaagtctttttgtaacatgcagtaccaacatgggacattgccttaacttttgatgcactttcatggagactgactgccatgcattgctgtgagcactttctttgtcgttcagtttaatcttttccttcacctttattacagtatgacataatgatttactatgttgtcaaagcttcataaaatatttctatataaaatgtttgtagaatcttcannngcctttactgagttgtgttctcccaattattgttacttatttcaaaattagcatataaaaagtgtttgatatc

SEQ ID NO: 2595 - DNA, 867 bp, Mus musculus
agcttgaactttccacctgaggactgtggaggccgacaagtcgaaatggagacccgagaatccacagagtcttctccaggcaagcaccttgttacctcagaggagttgatctcagaaggaaaatgggtcaaatttgaaaaaacaacttatatggatcccactggtaaaaccagaacttgggaaacagtgaaacttacaaccaggaagggaaaatctgctgatgccgtgtcggtcatacctgtgctgcaaagaaccctgcaccatgagtgcgtcatcctggtgaagcagttccggcccccgatgggcagctactgcctggagtttccagcagggttcatcgaagacggagaaagcccagaggcggctgctcttcgggagctggaggaagaaactggctacaaaggtgaagttgcggaatgctctccagctgtgtgcatggatccaggcttgtcaaactgcaccacacatgttgtgacagtgaccatcaatggagatgatgcaggaaatgtaaggccaaaacccaaaccaggggatggagaatttatggaagtgatttctttaccaaagaatgatctgctgacaagacttgacgctttgggagcagaacaacaccttacagtggatgccaaggtctacgcctacggtctggctctgaaacacgccaactcgaagccattcgaagtgcccttcctcaaattttaaggccaaggaggacactggccatgatttgtaaatgaaaccatgcggccttcactattcagtgtattcaattaagttcaatgtaggtcataaatcagctttttcgtaaagcagcacagtgcatgtggtatggaattataattacagagaggatataaccttcattaa

SEQ ID NO: 2596 - DNA, 1709 bp, Mus musculus
ctctctgctatggtggaccacagtcaaggatggtttagcacaatgaaggtgctcaccacagcattgcttctagtcaccctgcagtgttcccatgccctgagtcccaccaactgtgatgcttctgagcctctggctgagaaagttctagacctgatcaataaagggcggaggagtggctatgttttcgagctgctgcgggtctctgacgcccacttggacagagcgggaacggccacagtctactacttagctttagatgtgatagagtctgactgttgggtcctttccacaaaagcccaggatgactgtcttccatcgaggtggcaatctgaaatagtgattggacaatgtaaggtaatagccacaagatactcaaatgagtctcaagatcttagcgtgaatggctataactgcaccacaagttctgtctcttcagcacttcgcaataccaaggacagtcctgtactcttggacttctttgaggattccgagctctacagaaagcaagcccgtaaagccctggacaagtacaaaacggataatggtgactttgcctctttcagagtggaacgggcagaacgggttataagagcgagaggaggggaaagaaccaattactatgtggaattctccatgaggaactgttccacacagcatttccccaggtcccctctggtctttggattctgcagagcacttttgtcctacagtatagaaacctctgacttggaaaccccagattccattgatataaactgcgaagtcttcaacattgaggatcataaagacacaagtgacatgaaaccccattggggccatgagcgtcctctttgtgacaaacatctgtgtaagctcagtggatccagggatcatcatcatacccataagacagataaacttggatgcccacctccaccagaaggaaaagataactcagacagaccacgccttcaagaaggagcccttccacaactgccccctggctatccccctcattctggtgccaacagaacccatagaccctcttataatcacagttgtaatgagcatccttgtcatggacatcgtccccatggacaccacccccacagtcaccatccccccggtcaccattcccatggtcaccatccccacggtcaccatccccacagtcaccattcccacggtcaccatccccccggtcaccatccccatggtcaccacccccacggtcaccatccccatggtcaccatccccacggtcaccatcctcatggacatgacttccttgactatggaccttgtgacccgccctccaatagtcaagaactcaaaggtcagtatcatcggggctatggtccaccacatggacactcaagaaaaagaggtccaggcaaaggactctttcctttccaccaccaacaaattggatatgtctaccgactccctccactgaatataggtgaagttctcactcttcctgaagccaatttccccagcttctctttgccaaattgcaacagatccctacaaccagagattcagcccttccctcagacagcctccaggtcatgtccagggaaatttgagagtggatttccacaaatttccaagttttttggatatacacctccaaaataaaacctgattccttggtagggggaagaggacaatattctgaataaataaaatatgatgagttaaaaaaaaaaaaaaaaaaaaaaaaaaaa

SEQ ID NO: 2597 - DNA, 1252 bp, Mus musculus
tcagggttttttgccaaaagttgaaattcccatgggaaaggagctattttaaagacattcttatccttcccaaagggaaagttctcagaatttgagtcaaagaaagttgaaggtcacatttacctcttatgtcacaatcattcgtgtctggcccatagctacagactttgtttacttcaaaacccaaagtcagctgtctcatttttatttatgtgccagaactcatcatttcacttgtaattgaaaggtcttaccttgttccataaaatattttaaactctttgttaaatgttttgattttatactataaaactgatttaaaaattaagccagtcttaacacactcaccctgtctgtagtgtaaggaagtgtgagaaggaagttcttttttattgtttgtttgtttgtttgtttgtttgtttgagacagggtttctttgtgtagccctggctgtcctggaactcacgcagtagaccaggctggccttgaactcagaaatccgcctgcctctgcctctgcctctgcctcctgaatgctaggattaaaggcatatgccaccaccgcctgacgagaaggaatttcttaataaatgagtttacatgtctaaatcaagtgtaagttatatgcgttgtgttggaaccttttctacgtttatgtataaagatttcttatattattatttttaatgccattgcgttgcaataatttagctcctgactcatttgacaaaaatacatcttttatgaagaagtactcttgactttgatatctgtacactgaaaatcatgtcagaagtacccaaagataagtttttatacagatagacgcttcgtaagcgctggcttgttacccactaactaactgtactgtgttctcaatgaatcatgaaagacaagagtgggtcactgtagaattattttaaactgtcctttaaaagagaagaaactataagctaatctagttgccaagtaggaattccttatttaatttacctcctatgcaatgattaatgctgcgaaatgtatggttaataagttacagtatattcacagaagaaatatctttccaaggtgtaagaagcagccagttgcattcttttggaaatttactatactgtttcaatgtgttaagtgccttgttgtaaagtaaaattttaagtctcgagttcattattttcctgacctatatttttcattatgattatctactgtgtgctgttgtaatcattttattaaatgcttacattttaacc

SEQ ID NO: 2598 - DNA, 1052 bp, Mus musculus
acacagatccacaagctcctgacaggatggcttcccttcgactcttcctcctttgcctcgctggactggtatttgtgtctgaagctggccccgcgggtgctggagaatccaaatgtcctctgatggtcaaagtcctggatgctgtccgaggcagccctgctgtagacgtggctgtaaaagtgttcaaaaagacctctgagggatcctgggagccctttgcctctgggaagaccgcggagtctggagagctgcacgggctcaccacagatgagaagtttgtagaaggagtgtacagagtagaactggacaccaaatcgtactggaagacacttggcatttccccgttccatgaattcgcggatgtggttttcacagccaacgactctggccatcgccactacaccatcgcagccctgctcagcccatactcctacagcaccacggctgtcgtcagcaacccccagaattgagagactcagcccaggaggaccaggatcttgccaaagcagtagcatcccatttgtaccaaaacagtgttcttgctctataaaccgtgttagcagctcaggaagatgccgtgaagcattcttattaaaccacctgctatttcattcaaactgtgtttcttttttatttcctcatttttctcccctgctcctaaaacccaaaattttttaaagaattctagaaggtatgcgatcaaactttttaaagaaagaaaatactttttgactcatggtttaaaggcatcctttccatcttggggaggtcatgggtgctcctggcaacttgcttgaggaagataggtcagaaagcagagtggaccaaccgttcaatgttttacaagcaaaacatacactaacatggtctgtagctattaaaagcacacaatctgaagggctgtagatgcacagtagtgttttcccagagcatgttcaaaagccctgggttcaatcacaatactgaaaagtaggccaaaaaacattctgaaaatgaaatatttgggtttttttttataacctttagtgactaaataaagccaaatctaggct

SEQ ID NO: 2599 - DNA, 1240 bp, Mus musculus
gcagaaccacttagcctcgacctttatttcttaccaggtgcagcggtcatggcgaggaccggacacccctggaaatgggcaatggctaccctgatcacaaccctggttctgggggtctcagagcctgttcttgctggggatgtttcctcttgtgacaacccctctggaaccgaaccctctgggaccaacagagacctcagcacggattccaagtctggggaggacacccgttcagatagcagctctcgaattgtgaatgggtcagactgccaaaaggatgcacagccatggcagggcgccctgcttctggggcccaacaagctgtactgtggggctgtgctgatcagcccacagtggctgctcacagcagcacactgcagaaagccagtgttcagaatccgtctgggccaccattccatgtcacctgtctatgagtctgggcagcagatgttccagggaatcaaatccatcccccaccccggttactcccaccctggccactccaatgacctcatgctcatcaaaatgaacagaaaaatccgtgactctcactcagtgaagcccgtcgaaattgcttgtgactgtgccaccgaggggactaggtgcatggtgtctggctgggggacaacgagcagcagccacaataacttcccgaaagtcctccagtgcctgaatattactgtgctcagtgaggagaggtgtaaaaactcctacccaggacagatagacaagaccatgttctgcgcaggtgatgaagagggcagggactcctgccagggtgattccggaggtcctgtggtctgcaatggcaagttacagggccttgtgtcctggggtgatttcccctgtgctcagcggaacagaccaggtgtctacaccaacctgtgtgagttcgttaagtggattaaagacaccatgaactccaactaatgagccacaccaggaaccacggaaccagtgccacccaacggcaatgaggagcactgtccctctctgagaatgctgaagataacttcagtctctccagaacttgctctatgtttcttggcaccaagatcaccatccctcacagtggactgacccccgtttctatagccagaccctagggacacttcctgaaatgtctaaattgtgttgaaacccatcactacctatggacccatccataaacccagagttgagccttttcttcagccgtcacccagatttagacctcaaataaaaaacgggaagaaccgtg

SEQ ID NO: 2600 - DNA, 295 bp, Mus musculus
gctggtactggtggaagtaagccctaggatccatatttgttttgtgttctgcttaaatcagcaagaatgataaattcgatggtgtgaaattggaagtatcaagggctttctttggtgactgcacaaagtcatgtctccacctggaatttattatgaccttttttcactgtatgtacttcatatgtctaatatttatttcaaaacaaattaaattgttcttccttcatctataatgttttatctaacattttattgatgtaaagtcaaattgtgtaataaaagtcttcctggattt

SEQ ID NO: 2601 - DNA, 692 bp, Mus musculus
ggacccggagatcggtggagagcggagagcttggtctgcactgcctacgccgttggcagcgaggctgtctccggaaggcggaccggcgctagcccagtacccgctctcggctgcccgctgctctcctctgcgcccctgccaatctcattcaggactcagtgactggtttttttttgtttgtttgtttgttttgttttgttttgtttttcttaatcacaagggcgtgggtcagcctcccctaggacttcatgtctgtatatttccccattcactgctctgactatctgagatcggctgagatgaccgaggtgatgatgaacgctccatccatggaagagattggtctcagcccccgcaaggatggcctttcctatcagatctttccggacccatcagactttgaccgttgctgcaagctgaaggaccgcctgccctccatagtggtggaacccactgaaggggaggtggaaagcggggagctccggtggcctcctgaggaattcctggtccaggaggatgagcaagacaactgtgaagagacaacaaatgaaaagaaggaccagtagagtccacgcaggctcgcctgggtcatgccagccagcacacctgaactgtttttcccatggtgatggaagaagagaatgagccacagtcattgtgaaaatgtcaaacgaggcttccgttttgcaccc

SEQ ID NO: 2602 - DNA, 920 bp, Mus musculus
agagaaagactattataactttgagaactacagagcgacactctatctcagtaaagcaaaaactacaaaagaaagccccagtgtcttctgcagcaacattcctgtgtgaggctcacccaggcttgggaacatttgagagctgtctcaagaacagagtgatgtctggagagtaatactggaagctcgcttggtctggatgtcattgagaatctactgcagttcctcattttcaagaaaccctcccagacttggaatcagagctttggactcttcagcagtctctgggcaaagatttgctaaacaggccaactcaaactttatgcagccttttctggagaagcaagtgacgaacactggcaatggtctctctgaaacgggcgtatagtttagggttttcatgacgacctctgaaagctcctgctcattctctgcactctcattctgctgccttcgacgctccagaagcaggagcacttcagagtttaggagagtctctgttgtttcaaactctttggcaaagacgagccgggacacatcttctacattgccagcctgctcattgcttctacctgccaccattgtataggatggaccgccacccgttctcgctccttttaaaagttacttttgcatctgttctttgctgatcttaattccagtggagaaggtatgtctcagatgtacctcagaagctgaggagtcagccatggcagaaggaaaagggttaagcaaagtggtcacttctgcataaacattcaatttgagcaggctcaccaagactagactatgattgggagaaggacagccggagtctcatcctaagaagaccaggcctccctcaacgccttctagtcttgcctctggtttctaaggatgttggtttggaccttatgagagtggataaaactgagtctgagtcg

SEQ ID NO: 2603 - DNA, 1046 bp, Mus musculus
tgaaccctccagctctcaaggaggactgccagaagcacgtttgggacctgggtgaggaagagaggagctaggccctgggccagctgaatttaattgtgcagctattgttcgcctccgttgagcctcacctctgaaccttcgaggcatccgtcctgggaggtgatttctgtctaatccctaactcctgacacttttgctgagtaagccgttcccccctcccccacctcccccaggcttagccacaggctactcataattttaggttccttttgattatagccccaactcttgtttccccgtgacacaaccctacctctgctattctgtctgcctagcctcatcccgacgttactggaaaatcttccccgttctatcatccagaggttggaagaaagaaggtgatatggttgggtggcagttgacgacatgtaggcaggacttcttcagtggtttgtggagttcagcctagatctagagaagtgaaagtaaggctttctctctgcatcttggaagggaggagggaggcttatcagatgggccacgcgcccctgcctgttgaattgccgtcactccgcctcggggaccatatttagtgtgagaggtaaaagctaaaaatcatctggccatagtcttcatgggtcactggtgtttgaaaacgaatccgcacgaatccggtttagaggataagttttctcctctgtcaggtggctgtggcattgaacttcaggaaatgtgtccctaaacacatgtggttctttttgggcagttttaatttcctgcccttgtcagcacttcagccatcgtcggcaaggctcttgtttccactgtatcatccacacactaggtttggcccccttggctttgcaggtagacattttgttgagtttagatggggctagcaaaatgactcagtgggtaaaggctgccagtctcaaaaccctgagttccatccaggggacccccgtgatgaaaggcttgagttgaaagttgacctccgaccttcatgtgtgcaccgtggcatgtgaactcacacaaaataaataagt

SEQ ID NO: 2604 - DNA, 2753 bp, Mus musculus
gaccagagcggttctttcctgaaaattcccaaggacgccatccctatgcctatgtgccattttctgctggacctcgaaactgtattggtcaaaagtttgctgtcatggaggagaagaccattcttgcctgtatcctgaggcagttttgggtagaatccaaccagaagagagaagaactcggcctggctggagatttgattcttaggccaaataatggcatctggatcaagctgaagaggagacatgaagatgacccctaactccatcctcaagctgtgactttattaatgaagatcattccataggaaacatgagaattgttcccatggattcttctgcaaagggacccattttggagcctccagctctgtcatcgtgtttatatgacttcttgaaattggtaacatattaagtagctgaacctggactgggatgtccgtggactatattgacaggttaaacagttgaaactgatgccagaaacccagtgtaaacactggagccaagcaaagaccgccctcggtgccatattcagagggcttgaagaccatcttcatgtgaagactccctctcctccagaaccacaacgtgaccatccttccaggatgattttattcaaccgagtgggttattttgtttccttgtttgctaccgtctcctgtgggtgtatgactcaactgtataaaaataccttcttcagaggtggggatctagctgccatctacaccccagatgcccagtactgtcagaagatgtgcacttttcaccccaggtgcctgctgttcagctttctcgccgtgactccacccaaagagacaaataaacggtttggttgcttcatgaaagagagcattacagggactttgccaagaatacaccggacaggggccatttctggtcattctttaaagcagtgtggccatcaaataagtgcttgccaccgagacatatacaaaggacttgatatgagagggtccaactttaatatctctaagaccgacaatattgaagaatgccagaaactgtgcacaaataattttcactgccaatttttcacatatgctacaagtgcattttacagaccagagtaccggaagaagtgcctgctgaagcacagtgcaagcggaacacccaccagcataaagtcagcggacaacctggtgtctggattctcactgaagtcctgtgcgctttcggagataggttgccccatggatattttccagcactctgcctttgcagacctgaatgtaagccaggtcatcacccccgatgcctttgtgtgtcgcaccatctgcaccttccatcccaactgccttttcttcacgttctacacgaatgaatgggagacagaatcacagagaaatgtttgttttcttaagacgtctaaaagtggaagaccaagtccccctattcctcaagaaaacgctatatctggatatagtctcctcacctgcagaaaaactcgccctgaaccctgccattccaaaatttactctggagttgactttgaaggggaagaactgaatgtgaccttcgtgcaaggagcagatgtctgccaagagacttgtacaaagacaatccgctgccagttttttatttactccttactcccccaagactgcaaggaggaggggtgtaaatgttccttaaggttatccacagatggctccccaactaggatcacctatggcatgcaggggagctccggttattctctgagattgtgtaaacttgtggacagccctgactgtacaacaaaaataaatgcacgtattgtgggaggaacaaacgcttctttaggggagtggccatggcaggtcagcctgcaagtgaagctggtatctcagacccatttgtgtggagggtccatcattggtcgccaatgggtactgacagctgcccattgctttgatggaattccctatccagatgtgtggcgtatatatggcggaattcttagtctgtccgagattacgaaagaaacgccttcctcgagaataaaggagcttattattcatcaggaatacaaagtctcagaaggcaattatgatattgccttaataaagcttcagacgcccctgaattatactgaattccaaaaaccaatatgcctgccttccaaagctgacacaaatacaatttataccaactgttgggtgactggatggggctacacgaaggaacaaggtgaaacgcaaaatattctacaaaaggctactattcctttggtaccaaatgaagaatgccagaaaaaatacagagattatgttataaacaagcagatgatctgtgctggctacaaagaaggcggaacagacgcttgtaagggagattccggtggccccttagtctgtaaacacagtggacggtggcagttggtgggtatcaccagctggggtgaaggctgcggccgcaaggaccaaccaggagtctacaccaaagtttctgagtacatggactggatattggagaagacacagagcagtgatgtaagagctctggagacatcttcagcctgaggaggctgggtaccaaggaggaagaacccagctggctttaccacctgccctcaaggcaaactagagctccaggattctcggctgtaaaatgttgataatggtgtctacctcacatccgtatcattggattgaaaattcaagtgtagatatagttgctgaagacagcgttttgctcaagtgtgtttcctgccttgagtcacaggagctccaatgggagcattacaaagatca

SEQ ID NO: 2605 - DNA, 2912 bp, Mus musculus
aaaggcagcctgataaagctccttgtgacaggctgtcttgccagtctcccagtatgctcctcttgctctgaagtgctccaggattgaaaccacagcttcccaaattagcctgggaagagtgtgcggacccagcagccttttaacccgcgtcagtgcctttgctatgttcaagactgctgttttggatggtgaatgctagctagcactccatcgagacatgacagcaaaaaattctccaaaagaatttactgcttcggaatctgaggtttgcataaagactttcaaggagcagatgcgcttggaacttgagcttccaaagctaccaggaaacagacctacatctcccaaaatttctccacgcagttcaccaaggaattcaccatgctttttcagaaagttgctggtgaataaaagcatccgacagcggcgtcgcttcacggtggctcatacatgctttgatgtggaaaatggcccttctccaggtcggagcccactggaccctcaagccggctcttcgtcgggactggtacttcatgccgcctttcctgggcacagccagcgcagggagtcgttcctctacgatcttgacagcgactatgacttgtcaccaaaagcgatgtccaggaactcatcacttcccagtgagcaacacggcgatgacctgattgtcactccttttgcccaggttcttgccagcttgcgaagtgtaagaaacaacttcaccctgctgacgaaccttcatggagcgccgaacaagaggtcaccagcggctagtcaggctccagtctccagagtcagcctgcaagaggaatcatatcagaaactagcaatggagacgctggaggaactagactggtgcctagaccagctagagaccatccagacctaccgctctgtcagcgagatggcttcaaacaagttcaaaaggatgctgaaccgggagctgacacacctctcagagatgagcagatcagggaaccaggtgtctgagtacatttcaaacacgttcttagacaagcagaacgatgtggaaatcccatctcccacgcagaaggacagggagaagaagaagaagcagcagctcatgacccagataagtggagtgaagaaactgatgcacagctcaagcctgaacaacacaagcatctcacgcttcgggatcaacacggaaaatgaggatcatctagccaaggagctggaagacctgaacaaatggggccttaacatcttcaatgtggctgggtactcacataatcggccccttacgtgcatcatgtatgcaatattccaggaaagagaccttctgaagacgtttaaaatctcatctgacacctttgtaacctacatgatgactttagaagaccattaccattctgatgtggcatatcacaacagcctgcatgctgctgacgtggcccagtcaactcacgttctcctttctacgccggcactggatgctgtcttcacagacctggaaatcctggctgccatttttgcagctgccatccatgatgtcgatcatcctggagtctccaatcagtttctcatcaatacaaattctgaacttgctttgatgtataatgatgaatctgttctggaaaaccatcaccttgctgtgggattcaaattgctacaagaggaacactgcgacatctttcagaatcttaccaagaagcaacgccagacactcaggaaaatggtgattgacatggtgttggcaactgatatgtccaaacacatgagcctcctggcagaccttaaaacaatggtagaaaccaagaaggtgacaagctccggtgttctcctcctggacaactatactgaccggatacaggttcttcgcaacatggtacactgtgcagacctgagcaaccccaccaagtccttggaattgtatcggcaatggaccgatcgtatcatggaggagtttttccagcagggagacaaagaacgggagaggggaatggagattagcccaatgtgtgataagcacacagcttctgtggaaaaatcccaggttggtttcattgactacattgtccatccactgtgggagacctgggcagacctggttcaaccggatgctcaagatattctggatacactagaagataacaggaactggtaccagagtatgataccccagagcccttccccgccactggatgagaggagcagggactgccaaggcctgatggagaagtttcagtttgaactgacccttgaggaagaggattctgagggaccggaaaaggagggagaaggccacagctatttcagcagcacaaagacgctttgtgtgattgatccagagaacagggattctctggaagagactgacatagacattgcaacagaagacaagtctccgatcgacacataatctctctccctctgtgtggagatgaacattccacccttgactgagcatgcccgctgagtggtagggtcacctaccatggccaaggcctgcacaggacaaaggccacctggcctttccagttacttgagtttggagccagaatgccaggccgtgaagcaaatagcagttccatgctgtcttgccttgcctgcaagcttggcggagacccgcagctgtatgtggtagtagaggccagttcccatcaaagctaaaatggcttgaaaacagaggacacaaagctgagagattgctctgcactaggtgttgggaagctgtcctgacagatgactgaactcactaacaacttcatctataaatctcaccacccaacccattgtctgccaacctgtgtgcctttttttgtaaaatgttttcgcgtctttgaaatgcctgttgaatatctagagtttagtaccaacttctacaaacttttttgagtctttcttgaaaaacaaaaaaaaaaaaaaaaaaaaaaaaaaaaaaaaaaaaa

SEQ ID NO: 2606 - DNA, 2025 bp, Mus musculus
aaaggcataaatcctaaagatgtcttccagtaatgaccacgtgttagtaccaatgtcgcagagaaacaacaacggccttcctaggatgaactccagagccgttaggacgctcgcagaaggagatgtgttgagttttcatcacatcacctatcgagtgaaagtaaagagtgggtttctagtccggaaaacagttgagaaagaaatactatcagatatcaatgggatcatgaaacctggccttaatgctattctgggacccacaggcggaggcaagtcttcgttgctagatgtcttagcagcaaggaaagatccaaagggattatctggagatgttttgataaatggagcacctcaacctgcccatttcaaatgctgttcaggttatgtggttcaagatgacgttgtgatgggcaccctgacagtgagagaaaacttacagttctcagcagctcttcgacttccaacaactatgaagaatcatgaaaaaaatgaacggattaacacaatcattaaagagttaggtctggaaaaagtagcagattctaaggtcggaactcagtttatccgtggcatctctggaggagaaagaaaaaggacaagcatagggatggagctgatcactgacccttccatcctcttcctggatgagcccacgactggtttggactcaagcacagcgaatgctgtccttttgctcctgaaaaggatgtctaaacagggtcgaacaatcatcttctccattcatcagcctcggtattccatctttaagttgtttgacagcctcaccttactggcttccgggaaactcgtgttccatgggccagcacagaaggccttggagtactttgcatcagcaggttaccactgtgagccctacaacaaccctgcggattttttccttgatgtcatcaatggagattcttctgctgtgatgttaaatagagaggaacaagacaatgaagcaaacaagactgaagagccttccaagggagagaagccagtaatagaaaatttatctgagttttatatcaactctgccatctatggagaaacaaaagctgaattagatcaacttccaggagctcaggaaaagaaaggaacatcggccttcaaagagccagtctatgttacctctttctgtcaccagctccgatggattgccaggcgctcatttaaaaacttgctcgggaaccctcaagcttctgttgctcagttaattgttacagtcatactggggcttattattggtgccatttactttgatctgaaatatgatgccgctggaatgcaaaatagagctggagttttgtttttcctgactaccaaccagtgtttttccagtgtgtcagctgtggagctgttcgtagtggagaagaaactcttcatacatgagtacatcagtggatattacagagtgtcttcttacttctttggaaaggtgatgtctgatttactccccatgaggttcttgccaagtgttatattcacttgtatattatacttcatgttaggactgaagaagacggtggatgcttttttcatcatgatgtttacccttataatggtggcttatacggccagttccatggcactggccatagccacaggccaaagtgtggtgtctgtagcaacacttctcatgacaatcgcttttgtatttatgatgctcttttctggcctcttggtgaatctcagaaccattgggccttggctgtcctggcttcagtactttagcattcctcgatatggcttcacagctttgcagtataatgaattcttgggacaagagttttgtccaggattcaatgtaacggacaacagcacttgtgttaacagctatgcaatatgtactggtaacgagtacttgataaatcagggcatcgaactgtcaccttggggactgtggaagaatcatgtggccctggcttgtatgattattatcttcctcacaattgcctacctgaaattgttgtttcttaaaaagtattcttaatttcccctttaacggactattaattgtactcc

SEQ ID NO: 2607 - DNA, 781 bp, Mus musculus
ttcacaaagattgatagccatggccttccttataatggatgtgctattacagttttacaacctttaggggggaaaggactcatttaatattaaagatagaagatgtagaagcagagccatccaatgttcttagtaaccccattctaagatactctaaggcctgcctgaacaaaccttatgtaactaacaaggaagagcataatagagttgagctatagacatgtcaaacaattaaagaccagcctgttagtcattacaaggcaattaggaaatgtgtttactcaactttaccaatagacaacaaagttctgcaaagctgctattaagtttcaactctagtaatctctagggttctaagggctcacagtgattataataatgaaggttaataattagtgcaactgccaacctctaacaagagtaggttgatagacaagtaaattaagagtttgttatcaattccataaatgtgactataaaatctggtactgactttctggtcctgatgctagaatgaaggtggagaccttgctgcctggagggaatgtgcttggcccacaagcttgtgcaataatttgacacctagctaccgaacacagttctgatgaattgtacagcgtgagccacaggtggatggtactatgattacacgtcattcatatcatataattggatttagcatgctgtaatcttcatttctctgtaggagtatggactatgttagaatgtgtctgcctttgtttggatttttttaatattataataaaataaacttagtttt

SEQ ID NO: 2608 - DNA, 1247 bp, Mus musculus
ggcacgagggtgtccatctcaggtcaccaccaactctggcacgagggtgtccatctcaggtcaccaccaactctgaaggctcttcacagcagcattcgttctgattgaagcctgctgcaaaaatgagtgcctcagaagacgtttggagaaaagatctgaagatgatccatggctaccccatgatctatgcttttgcactcaattgggaaaggattgaagagttccagagcacaccaggtgacattgtaataaccacttaccctaaatcaggtactacttggcttagtgagattgtagacatggttctaaatgatggaaatgttgaaaaatgtaagagagatgttatcacctccaaagttccaatgttggaactgagtgttcctggaataagaatatcaggtgttgaactcttgaagaaaactccatcacctcggataataaagacacatcttccaatcgatctactcccaaaatccttctgggagaacaagtgcaagatgatttaccttgctcgaaatggcaaggatgttgctgtctcctattatcattttgatctgatgaatagtattaatcctcttcctggcacctgggaagaatatctggagaaattcctagctggaaatgtggcctatggttcatggtttgatcatgttaagagttggtgggaaaagagggaagagcatcctttactttacttatactatgaagaattgaaacagaacccaaagaaagaaatcaagaagatagccagctttctagacaagaccttggatgaagaggccttggacaggatcgtccatcacacctcctttgaaatgatgaaggaaaaccccctggtcaattacacccatctgcccacagcaatgatggaccacagcaagtcccctttcatgagaaaaggtattgttggggactggaaaaattacttcacaatgacccaaactgagcaatttgatgctgtctataagaagaagatgtctggaacaacacttgagttctgcacagacattcagagtgcctaatctacaacttgaatatatggtttcttaaaatagtaacctggaagagaaatcaaatagattcatgaaggaaaaataaatgtgctttaaaaatgctaattgaaaacatactacacattccccagcaggtaatcttccaaatgatctagagccaaggacttttgttaccttagttttcaaaggatatgtcttcagatttctagattcttactgagttgaataaataca

SEQ ID NO: 2609 - DNA, 1013 bp, Mus musculus
cattctgcacctcaatctctccatggagcagctgctgcgcgcccagcttcacaccacaacactgcgggcctttgggagctccggagggggctgcatcagcgagggctatgcctactacactgacagtggccccgtgtttgtcaaggtcaatcgcaggacacaggcccggcagatgtttgagggagagatggcgagcctggaggccctccgcaacactggcttggtgcgggttcctaagcccatgaaggtgattgacttgccaggaggtggggctgtctttgtgatggagcacttgaagatgaagagccttagcagtcaggcatcaaagctcggggaacagatggcagacctgcacctttacaatcagaagctcagggagaagtccaagactcggcagaacacagtgggctgtggggcggagggtgctgagccccagggtgtgaccaagtttggctttcacacagtgacatgctgtggctttatcccacaggtgaatgaatggcaggaggactggccgaccttcttcactcgacaccggctccaagctcagttggatctcattgaaaaggactatgctgaccgagagacacaagagctgtggtcaaggctacaggtgaagatcccggatctgtttgcgggtatagagattgtccctgccctgctccatggagacctctggtctggaaatgtggctgaggatgaccagggacccgtaatttatgatccagcctccttctatggccattctgagtttgaactggccattgcatcgatgtttggggggttccccagatccttcttcactgcctaccatcggaagatcccaaaggctccagggttcgacaagcgcctgctgctgtaccagctctttaactacctaaaccactggaaccactttggacgggagtacagaagcccgtccctgggggtgatgaggaagctgctcaggtagcagatggctggacctaataaaatgtcaaactagaaaaaaaaaagggagaaaaaaaaaaaaa

SEQ ID NO: 2610 - DNA, 1638 bp, Mus musculus
atttatagtcctcatggccacgggtggcaacatagccttcttggcccgatcctgagctgcgtagctgtgtgtgaggtcatcgatcatccagatgtcaagtgccaaatcaagaagaaggattccaaggaaatagaccgcagccgagcaagaatcaagcacagcgaggggggagagatcccccctaagtactttgtagtcaccaataaccagcttctgcgggtgaagtacctgctggtgtattcccagaagcagcccaagagggcctcgagccagctctcctggttgtccagccactggttcgtgatcatgatgtccctgtatctgctgctgctgctcatcgtgagtgtcaccaactcctctgtgttccaccacttctggaatcgtgtgaagagatgatcccaggtgcttggagtggggccactcaccgtgtgccttatggaaacttgtcctctacctcctgtgtgtcacatccggtcaggtcgagtctggggaccatttgcaggggtgcacaggacgagttttatatgccataagtgtactgattgcctttgttgatgtgcccagacacaatccagtcagtgggggatccctggcccctcacttgtcagtttcaggggtgtcctaccctctgcttcctcctaaatagtctagggaggtggctcttcagccagagccaaaggaaaaagtcctgctgcatttaaaagcaaagtgtccaagctgtccgaggtgtgtttacaattgcccagatggaggccggcccggatgctaatgccttttggaagacagaatgtgtgcaacgggaacaataaatcattaggcgactgccttgttttgactcaagacacccaagagggactgtcgtgtttctcataaaaatatcagtgggatcgtttggggattccatcggctttagtctgccggtgcaaaacattttaacagttttctcagatcaacaaccgtctctgccacagctgtaccccctccctccttaaccacacaagaggaggagccacaggcgggataacaaaatgcagatttaacaactagcaactctgtcatctttttctaaaaatgaccaactgctgattacagctcaaacggaaccaaatgtttgcgtttctgtttttgttgtcatttatttgacaagttagcctctatgagccaaatagagggggagatgtgtgaacctggagcaccgagtggctacatccacagcctctttctggtgttgttatggagaagggtccaagccataggctcaccagggtcctcattcccacaaagctgccttgatacccaacactctaggctctcaggggcccggcagccttcacagcagaggcctgcctcagtgggccacgggtctccatgggctgagcctccatccgagaagcctgaggttgagtggtaagcagaggcccagccatccttgctgtggtgtttatccctccttcctgccaggtttcagcggcagaagacccctgtctgctgggaatggagtttccatagaggaggagaaaataatttttttcctataatttgtaaagcttgtgaaaaagccactatcgtgattttttaaatcaagtagtgggacatttaaaaaacaataaagatattttcctaaaaaaaaaaaaaaaa

SEQ ID NO: 2611 - DNA, 832 bp, Mus musculus
atgtgtgccccacaggagcagcgctctttatgctggagggagtcagctcagctcattttcctttgcagaggcggctcagtggtgattgtgggttctgtagcaggcttcactcggttcccttctctgggtccttacaatgttagcaaaacagctttgctgggtcttactaagaactttgcagcggagttggccccgaagaacattcgagtgaactgcttagcacctggactcatcaagactcgattcagcagtgtgttgtgggaggagaaagcaagagaggacttcataaaagaagccatgcaaatcagaaggctaggcaagccagaggattgtgctggcatagtttccttcttatgctctgaagacgccagttacatcaatggagagaccgtagtagtggggggaggaaccccttctcgcctctgaggacccagaaacagcctaccagggcaggtgtgtggggcgggctcagtccaccttgcctctgtcgcccttcgttgccaccacctaacatcttgttcacctcacaaaatcagttctgcccagtgataagttcctgctttccctgtggtcgaagtgtggtcagatgagcatccttgctgttgctatggccttgaaaacggctttggggagggggcgggaagctgggggataggtagtgggaaaagggcttgctgagaagactgtggctactttagtgaagatcaaatccctctcatcctcgcctctggacactttgaggagagatagaagggacagacctgaacagagatagaaattaacaatttacgtataaggtacaaataaaatgaagatgatcgcgttgctctgc

SEQ ID NO: 2612 - DNA, 940 bp, Mus musculus
cctagtgcaggcagcgagcggaatgcagcggccggaggcctggccacgtccgcacccgggggagggggcctcagccgcccaagccgggggcgcagcgccgcccacccgagccacggaacagcgggaaccttctctctacaccatcaaggctgtcttcatcttagataatgacgggcgaaggctgctggccaagtattatgacgacacatttccctccgtgaaggagcagatggttttcgagaaaaatgtcttcaacaagaccagccgcaccgaaagtgaaattgcatttttggggggcatgactatcgtctacaagagcagcattgacatcttcctgtatgtggtgggatcttcctccgagaatgagctgatgctcatgtctgtgcttgcctgcctgtttgactctctgagccacatcttaaggaagaacgtggagaaacgctggttgctggagaacatggacggagccttcttggtgctggatgaaactgtcgatggaggtgtgattctggagagcgacccccagcaagtgatccagaaagtgaattttaggactgatgacagtggcctaacagaacagagtgtggcccaggttcttcagtcagccaaggaacagattaaatggtcgctattgaaatgaagaccttggaatcaaggctccttccccagagaacttttgccagtccccgcgtaagccccaagatctcaagacgcaagagagaccactctgccttctcaggcctctctcagaactgatccctgaggtctcctgccagggattctgagacgcaaaagcttgaccccagctccctcacccctactcagcatcctaacctggccttggggccatgggaaccagcaaagttgcctcccctcggacctctgacatcctcagtcctaggccttaataaacttacatttttcccccccaaaaaaaaaa

SEQ ID NO: 2613 - DNA, 3271 bp, Mus musculus
gctttccaagggtggttttcacgtgagttttgattttgtctttatatgcgagggaactactgggaaccgggcctgactttgtagatcctccttttcttggcggggaccgggcgtgcggtcccgctccccgtaatgtacggaggtagaagaaagggctctggccctctcggcgttatgtcttcggtgcttgcggcttcccgttcgcgggttctatcctcagacgccggaacacttaaccgtgcagaaatgtagctaggtcccgcagtcccctctgggttactcaacgctttttattttattttaggtcgacattgacgctcccggagtgatggttaacattttctttgctgtttattattgaatcaataaagtctgtgaaccctaaggaccctgtgttcgctaccttttttttctgcgactcgtaatttgcaaatctttaggaccgaaagcacatgttgggagtgatagtgactattcactaaagatctctggtcgatcttgtggggggacttaataagctaaatctcaaccaggatgtaaatctttatgagtatagaaagtgcgctcctaaaggcatgggaatcaaacctgtagttatggtaaaaagcctagcgtaatggtgcgcacgtgtaatcagcagaactaacctggggtagcatgcacccttatcttcaagcttcctggcatttaaactggcggtaggcacagctttctcactaagatattggaagtaaaactaggatctcaatcctccacaggcatgccctgtggatgttctcggggtggacttgtctccgtgctgggacctacataaacagccttatacaaggaggccattgccattcccagtgcagaatctgggagccctagcatccttaggttcctcacagctctccagggataattgttgctaagcgagatttgcctgaggattcaaggaccctccttttcagctgccctactagaagtaagaaaaaaaaaaatccaatggctggactgggtataaaaattaagcactaaaccgggcaatggtggcccacacatttaatcccagcacttggcaggcagtgacaggcagatttctgagttcaaggccggcctggtctacagcgtgagttccaggacagccagggtgatacagagaaaccttgtctcgaaagaccaaagaataaaagttaaggccttataagacattcagttaaatctcaaaagatttctgagagtttccattctgcttttgttggtcaaacatagagttggaattttgccattgtatgaatagctagtaattgagagtgttttcctggtttgcacaatttgtgtcctggttcataaacctggagcctgagggtaatactgggttaccaggtggggagacctgacatcattactggctgggctcaatctgaactgcagagctggtgtgaattgtgtgtcctgcagcttagagtaagccaaagagctttgaaaacaataataatggagatgaaattggaggaaaaaaaaaaacaccaatacttacccccaaaagtactgagaggtgggaaatggggatattccataaatcgtgttctatagatgcaggaccctgttgggtcccaaagaggacagagattgggagtttcctgaccctctgtatcttcaggaatccagaaggcatcttgttcttgaccccagccaagtccagggtttattgttcttaaaggagatgtgggatcctgtgggatccaggcccaacctgggaaaagagtaaatattcttgatatgctgtgtctttaattgatttgagacaaggtctctccatgtagccttggctggtctttaacatgtaacaggacaagctggctaccatgcctgacccagataaataaagatttagttgttttagtgtgcataaatgtttgccatatgcatgtctggtacatgaggatgttagaagaaatctgatcccctagacctggagctacagatgcttgtgaactaccacaagagttctagaaaacaaatctaggcccctctgcaaaggtagcaagttctcttagaactgctgagcctcattatttgtgtgtgaggcaatagagttttattctacctttaatccagtaccgggtcagtggaactagtcaaatttctatgagatccaagcccagcttgtgggagtggggttggtaatttgtgcatatttgtattaggaggcagagactgacatcaggtatcttcctcaattgcccttcacttgatatacggagagcttgcctatggagttagtctagctgggtagtttgcttgctccagggatctcaacctctagagtacactgcgattgcgggtaagctgtcatgcacaactggtctgtccatatagataacagggatctgagttcaagtgcacatgctttcagaacaagcactacctactgagctgtccctctatccctattctctcatttataaagggaaattgtctcctttaattgagttgttctgaaaactcttaaaagtatttagcattgtgactggagcataatgcacacacacacacacaaaacccaacaactctttatgtttttgtttttgtttttcgagacagggtttctctgtgtagccctggctgtcctggaactcactttgtagaccaggctggccttgaactcagaaatccacctgcctctgcctcccaagtgctaggattaaaggcgtgtgccaccacacccggcaacaactttttaataacaacatacagccgttcattaacctccaaaatgttaattacctctagatagatacagggtaattacatcatcttccttccccagtaatgagccattaaaatattattagacaccagcaagatccgagccatgcaagataaataataaatcatatctccagaacaaaaagggacaaaagcaaattaaggctacaggtgaagctcagtagctgataaattacctaacatgcaaaaggccttcatttgtggggctggtcaaacagcttagccagcaaaagctcaagtgagccaagtatcagggtgcttaattgctaagacccacatccatcgttgtcctgcttaacacagggtctcaatgcatagctctggttgttctgcaactcgatgtgtggaaactcagatcctgcctctgcctcgaagtgctgggattaaaagtgtgcaccaccagtggcccagccacataaacattttttaaaaagtgctttaaagccctgggttcaatcctcaacagtacaaacaaaggaaaacaaaaaccatgcac

SEQ ID NO: 2614 - DNA, 1185 bp, Mus musculus
gcccctgagttaaaagaatagtagcttggggcctctggcagcttttcctggaccccattctacaatatttcttcatttgtacctcgaaccctacaaaacctaagaagtgagaggaaaagagaaaccaaggtactaactttcctgaatactgactctgaggccattggaataagaaaagtacaactcccactggtcctgaaactctgttcttttgcagctgtgaagtggctaaaagcagttaacaaactccttggcagccttggactcgcattaccttttgaggccactctgaacaagctagcctccctcaccttctttgggaggaattctgggcaattgtaaggttttggcttgacagaggcatctaaagataacagtcagctaaaaggcaagagtctccattggcatactggttcttgcctctgaaatgtaggtggtgtgcacacaacagcagcaagccaccggaggactagaaagcatcagagtgtaagacacttctcttgactactggcttaccaaagcagtcttaccatgataaagcaacagtggaaatgatgaggagaaagactcaggcagtgacacaagggcagaagcaacacagcacatgaagggaggcaaacattcctgttcagtactggagaaagaggggaaggagactaaacggcaagcgcagcccacaggccgggccagagagggtgcaaacagactgtgtagatgcttccccagtgaagggctgccaagaattgtgcatgatgcccccacagcacagacaagacagcaggtaaaaaagagggaacgggtgcaaatcaaagaccaccaggagcgcatgcttcgagggagggaactcacagagcaaagactcaaagaacaactcatgcagaaagaccagagccagctcccttcacttgagaagctccatcgagtgaagaaagagatgaaggactgtgaaagggccaatgcacacccacttctgcagctacgcactaaaagtctcattaagttggagagtcttttggagaagtctcaggcaggagatgaagggaaaacagctgtaaagcccaatcaaaagaaatgcttggccctgccaccatttttgagaagtcatgtacgaaaaatcaaagatcagtaaaattttgttgccttttgtggaaaaaaaattactaggaattaaataaaaaacttctt

SEQ ID NO: 2615 - DNA, 1318 bp, Mus musculus
gacttggtcacagcccgacagagttttagtcatttggagccacactgggggaaaaaaaaatcaccttggatctgattctagctgagaatcagggagctctgggcatgttggctgcagcaaccccctatggtctttactgaggtgtcctgtgactcagctcttcagaacgtaatgaagtagatgacttgactacaatgtgggaaaatcatgacagaaagtgcggtttgtaccggggccgtcagtgctgtaaaggaagtctgggaagaaagaataaagaaacaccatgaagacgtgaagcgggagaaggaatttcagcataagctagtgcggatctgggaagaccgagtaagtttaactaagctgaaagagaaggtgaccagggaagatggaagagtcattttaaggatagagaaagaagaatggaagactctcccttcttctttactgaaactgaatcagctacaggaatggcaacttcacaggaccggattgttgaagattcctgaattcattggaagattccagcatctcattgtgctagatttatctcggaacacaatttcagagatcccccgagggattggactgctcactagacttcaggaactgattcttagctacaacaaaatcaagactgtccccaaagaactgagcaactgtaccagcttggagaagctagaactggctgtgaacagagatataagtgacctcccaccagagctcagcaaactgttaaaactcactcaccttgacctgagtatgaatcagttcactacgatccctcatgctgtgttggacatgcctgccctcgagtggctggatatgggaagcaacagcctgcaacagcttcctgactcactagacagaatgcgaagtttacatacactgtggctgcagaggaatgaaataacatgcctgccagagacaatcaaaaatatgaaaaacttgggtactcttgttctcagcaacaacaaactacaagatatcccaggctgcatggaagaaatgacgaatctgaggtttgtcaacttccgagacaacccactaagactggaggtgacgcttcctcccagcgacaacacagatggagaggaagaacaggagttatttgggctgcagtttatgcacgcatacatacaagagtcccggagaacagaagaccaagtcaactgtctgactcaaatgccaagctctatacattctgatggagaaagtaattgaaagagccctgctgaaaaggaatactttgactacttggtgaatatttttgtgaatatcgaaatataatttaaaaataatttaaatttttttgtttgtg

SEQ ID NO: 2616 - DNA, 2664 bp, Mus musculus
gcacgaggggcgctgggagcggcggtcggacgccggcggagccgcggagcaggaagaagatgagcctgaagtccgaacgcaggggaattcatgtggatcaatctgagctcctgtgcaagaaaggatgcggttactacggcaaccctgcctggcagggtttctgctccaagtgctggagggaggagtaccacaaggcccggcagaggcagatccaagaggactgggaactggcagaacgacttcagcgggaggaggaagaggccttcgcgagcagccagagcagccaaggagcccagtccctcaccttctccaagttcgaggagaagaagaccaatgagaaaacccgaaaagtcaccacagtgaagaagttcttcagcgcctcttccagagctggatccaagaaggaaattcaggaagccaaagctcccagtccctccataaaccggcaaaccagcattgagacggaccgagtgactaaggagttcatagactttctcaagaccttccacaagacaggccaagaagtctataaacagacgaagatgtttttggaagcaatgccttataaaagggatttaagcatcgaggaacagtcagaatgtactcaggacttttaccaaaatgtggctgaaagaatgcagacccgtgggaaagtgcctccagagaaagtggagaagataatggatcagatcgaaaagcacatcatgacgcgtctctataaatttgtgttctgcccagagactactgatgatgagaagaaagatctcgccattcaaaaaagaatcagggccctgcactgggtaacgcctcagatgctctgtgtccctgtcaatgaggaaatccctgaagtgtccgacatggtggtgaaagcgatcacagacatcattgagatggactcaaagcgtgtgcctcgggacaagctggcctgcatcaccaggtgcagcaagcacatcttcaatgccatcaagatcaccaagaatgagccagcctctgccgatgacttcctgcccaccctgatctacatcgtcctgaagggcaacccccctcgcctgcagtccaacatccagtacatcactcgcttctgcaaccccagccggctcatgacgggcgaggatggctactacttcaccaacctgtgctgtgctgtggctttcattgagaaattagacgcccagtctttgaatttaagtcaggaggattttgaccggtacatgtctggccagacatcccccaggaagcaggagtctgagagttggcccccggaggcctgcttaggtgtgaagcaaatgtataagaacttggacctcctgtctcagttgaatgaacggcaagaaaggatcatgaacgaagccaagaaacttgaaaaagacttaatagactggacagacgggattgccaaggaagttcaagacattgttgagaaatacccactggagattaagcccccgaaccaacccttagcagccatcgactctgagaatgtggagaacgacaagctccctccccctctgcagcctcaggtgtacgcagggtgacggccctgtttatttggggctggtttctgggagctgctgcgttccactgttcaggtccggaatatgaactgactgcttaaagtttcaaagtgtttttaggtacagatttagggattggttattctcttttttcttctctagcggggaagcttagtaaataataatgtactatttatttgagctggtggagtaggtttgtgtgaattctgtgtcgctcttttatgtcctgcctgatttcccatgggcttcctctgtgtagacactgttgttggttttgggcaaacactgccttttaaaggataaaacagatgctataaagtctatgttgaaatgaattctatgttcccacactcccccagtgtgaaataattttgtaattgtaaagatagaagataatgttaataagtaaatatgtaaaattgtaaatatgtaaaaaaaaaacacatagggctggggaggggtgtctcagcgtgcatggcatttcatgagctgatgttttttttttttttttaggtgaaaatgaaatttattgaatgtttgcctttagcgccattttatatggtttgtcccactaaaaagaatctaaagaatttgagctttaacaggacattggcactaactgccctaacttgagattctttctggtacatgtgaagaagttgtaacgccaacttttaggtcacatacagaattattctgggaccctggggtggtggctcagtcagtaaagtgctctcctatactgatgtgaggacctgagctccctgtccggccccgggtgaaaagctgggcatggtgacactcacttgggacagctctgctgggagccagagttcctggggcagggggcatcgctgtcaatgagacacctcgtgtaagcaaacaaatcaagatggacggctcctgagaaatgatagccaaggatgccctctggcctccacatggccacatatgtgcctgtgtacctctacatacatgtgtagcacacacacatgaacacacagttgctgattagtacagttgacttggaactgtgcttgcagcttcctttccctgtttatccaataaacttcccccacagtgctgtggggctattgccttttttatctgaaaaaaaaaaaaaaaaaaa

SEQ ID NO: 2617 - DNA, 533 bp, Mus musculus
gaacgtccgtttccggttgtctccggctgtaaggttgaatattgagtgtcccgggaggtcagattgctgtcagacatggctgctggacatggacatgaacatggacatgaacatggacatggccatggtaaaatggaacttccagattacagacagtggaaaattgaagggacgccattagaaacggtgcagaagaagcttgctgcccgagggctgagggatccatgggctcgcaatgaggcttggagatacatgggcggctttgcaggcaacatcaccttcccgagtgtaatattaaaaggattcaaatgggggtttgctgcgtttgtggtagctttgggggctgaatatttcctggattcccagaatggtgataagaagcatcactgaagagagcgccttgtgacgtctcttccataaaaataagattctctcactgtagcattcttggctgtatgtttgtccttgaaagaatattatatggtttaataaagtaagaaaaactgttgtttttgtaactcttaaataaaatt

SEQ ID NO: 2618 - DNA, 1923 bp, Mus musculus
cacagaaaaacacagctcagcagatccaggcactaaagagagctagctgcaagcaggagcagtcaagagtctgtggtcagaagtactggagtgggccagcagggccagctttttctaccatggcagcccaaggctacggctactatcgcactgtcatatttgcggccatgtttggaggctacagcctgtactatttcaaccgcaaaaccttctcctttgtcatgccctccttggtggatgagatcgctctggacaaggacgatttggggctcatcacaagcagccagtcggcagcctacgccatcagcaagtttgtgagcggggttctgtcagaccagatgagcgcccgctggctcttctcctctgggctgctcctggttggtctggtcaacgtagtcttctcatggagctccacagtgtcagcctttgctgctccttggtttcttaatggtctggcacaggggctgggctggcccccctgtgggaagatcctgaggaagtggtttgagccatcccagtttggcacttggtgggctgtgttgtcaaccagcatgaacctggctggaagtttgggacctatcttggcaacgatcctcgcccagagctacagctggcgcagcacactggccctgtctggggcactgtgtgtggttgtctccttcttctgtctgctgctcatccacaatgaacctgctgatgttggactccgaaatctggaccctctgccctctgagggcaagaagggctccttgaaggaggagagcaccctacaggagctgctgctgtccccctatctctgggtgctgtccactggctaccttgtggtcttcggagtaaagacttgctgtacagactggggccagttcttccttatccaggagagagggcagtccgcccttgtgggtagctcctacatcagtgccctcgaggtcggaggccttgtaggaagcattgcagctggttacctgtcagacagggccatggcgaaggcagggctgtctctgtatgggaaccctcgccacggcctattgctactcatgatggctgggatggcagcatccacgtatctcttccgagtaacggtgaccagtgactcacccaagatctggatcctggttttgggagccgtgtttggtttctcttcttatggtcccattgccttgtttggagtcatagccaatgagagtgcacctcccaacttgtgtggaacctctcatgctattgtgggacttatggccaatgtgggtggatttctggctggcttacccttcagcaccattgccaagcactatagctggagcacagccttctgggtggcagaagtggtttgtggagccagcacagttgtcttcttcttgcttcgaaatatccgcaccaagatgggccgagtatccaagaagggagagtgaatcgagtcctcgctatggagcatccccaactgcagccttactggcaggacacggaaaggagagcggctgctctggctaacacagaacctttacgtttctgtgtctccactgtctctctgaacctccatggtgctgcaagttaccagtggctaatgaggtcccaactcccatcccatgctctatttaaaatgatgacgtttggttctagactccatcagcttctgtttctaccttctggcagacaggcaactcctgaattcagggtgtctcctatacccttcttcttctcctaggtcctgatctcctagtgagtattaatggcctgtggtttctgccgtaccccaaggcttcttggcagggggcaaaattgatgccaatacctcagtccctaagggaggagaggagtccaccactctcatgaataccctgggacaaaagggaagaatatagagggcaaaccgacttgtatagatcgaataaagctagatttgatacaaaaaaaaaaaaaaaaaaa

SEQ ID NO: 2619 - DNA, 1397 bp, Mus musculus
gaggtctctcctgctccacggtccccaccgctttttgcagcctgcctggggaagtaagacttcaacgaaaacctgatgcgacctctcctgattgctccgggccgattcatttcccagttgtgttgtagacgaaagcctcctgcctccccacaaagcaagatctgcctcaccatggctcgtccaagttcaaatatggcagactttcggaagtgttttgcgaacgccaagcacatagccatcatctcgggggctggcgttagtgcggagagtggggttcccactttcagaggcgctggaggttactggagaaaatggcaggctcaggacctggcaacccctcaggcctttgctcgaaacccatcacaggtgtgggagttttaccactaccggagggaggtcatgcggagcaaagaacccaaccccgggcacctggccattgcccagtgtgaagcccggcttcgtgaccagggcagacgggttgtggtcatcacccagaacattgacgagttgcatcgcaaggctggcaccaagaaccttctggaaatccacggaaccttatttaaaactcggtgtacctcgtgtggcactgttgccgagaactataggagtccgatctgcccagctttagcaggaaaaggggccccagagcagagactcaagacgccagaatcccagtcgacaaacttccccggtgcgaggaggcaggatgcggaggcttgctgcgacctcacgtggtgtggtttggagaaaacctggatcctgccattctggaggaggtggacagagagctcgccctctgtgacctgtgtctagtggtgggaacatcctctgtggtctacccggctgccatgtttgcccctcaggtggcttccaggggagtcccggtggccgagtttaacatggagaccaccccagccaccgacagattcaggtttcattttcccggaccctgtgggaaaactcttcctgaagcccttgctcctcatgaaactgaaaggacttcttaaccgccctgtggaaagaggagaaggacctgcagtacggtatcctggagtgctaaagcagggcactaacgggaaaaatggctttatggatggtgagctgaactctggaaaaatatggaaacacccttcaagccccaagcagacaatctgttacgtgatgggtttcaaaataccagcagcaaatgtgtttgatctggaagaggctgtcaagtccttccatattatttgatttgaactgaaatatgagtaattgggatttgatattttttggttagttactggaagggaaaattttgtaattaaattgctttagaaggcaattatcctgattgtatgtttgcatcttgggcaaaaacagaaaaagagaattaaaaccctgaaagttaaaccccc

SEQ ID NO: 2620 - DNA, 1192 bp, Mus musculus
cggaggtctcggttgagaggagctgtggcgtgttcctcgcggggagagagagagacacatcagccaatgtccctccattggaatcccgactccagcccgggagcaatcgcgtagcccgatcacccaggaagagaaattgtaagcagataagaagaacgcgttcagtttgagacaccatttgcagctggaaatggggaatggactgtcagaccagacttccatcctgtccagcctgccgtcctttcagtcctttcacattgttattctgggtttggactgtgctggaaagacaacagttttatacaggctgcagttcaacgaatttgtaaataccgtacctaccaaaggatttaacactgagaaaattaagactcactcaacctgaagcacatcagattgtctatgctagccgaccagtgagctgcaggatcctcaagtttctgctcctcatgtgtcccctagggggtgttgggaatacagatgtgtgccaccatcctggctttatgaaggcatccacctcagaagctcacgtgtgcacgatagggcctcactgtataaccttggctggccttggacttccagtcttcctagctgagctacccgcatactgagattacaggtttgctccacagtactttctctggctcaacataagaagcagcagcaacaatgacatcataaagtgaatgaggggaagagcacaccaactggttattcaacactgtactggctggttttgggtgttaacttgacacaggctggaattatcacagagaaagaagcttcatttggggagatgcctccacgagatccagctatcctggcttccaccatctttactcctgaggcagttttgtttcacctgtggactttgccatggtgctctttgacttgagcccagtgacaatgaggttttttgagacggggcctcacactggagcccaggctggcttggaactcacgatcctgggaatgcaggtgtctttaaggtcactttctcccggcacctgaagatgccttgaagttattgaagctataaatatggtgatcaaaagatcactcttcatctcgcttttgtgtatttcttctctcttggatctttagccaaaattgtattctgtctattgtattcatgcatttggctattagatctgcagtaaaaataaccaaacattaaaaaaaaaaaaaaaaa

SEQ ID NO: 2621 - DNA, 545 bp, Mus musculus
gtggaacgccggggttgtgcttttaaaggcgctagctggtgcgctctgtgacttgattgctgctgcttctgagcttgctcccgcgctttcggcatccgtatcacctcaccagtatgtctcaggctgaatttgacaaagccgctgaggaggtgaagcgcctcaagactcagccaactgatgaagagatgctgttcatctacagtcacttcaaacaagctactgtgggcgatgtaaatacagatcggccggggctcttggacctcaagggcaaagccaagtgggactcgtggaacaagctgaaagggacttccaaggaaagtgccatgaagacctatgtggaaaaggtagacgagctaaagaagaaatacggaatataaatcaccagatttggtggccagccacacgtgtgacctgtgaggacataatgccttggttttttctaatgtagatgatatggctgtgatacattagggccagcgttaacctctgctcctcctccctctgtagtttttacctacaatcaattaaaagtacatttgttactc

SEQ ID NO: 2622 - DNA, 2281 bp, Mus musculus
ggccggaagtccggaaggctgactccaacgccgggaaaactgacaactaagtttgccgaggagtcttccgtcgcaatcctggtttctttccttcataatcccttgggaagaaatgtcttctgttaaaagaaatcccaaaaaggagatgatttctgaactccacagttcagccgcagagggaaatgtcgcaaagttagcaggaatactcagccattctccatctcttctcaatgagacttctgaaaatggatggactgctttaatgtacgccgccaggaacgggcatcccgatgtggtccagtttctgcttgagaaaggatgtgacagatcacttgtcaataaagcgaggcaaaccgccctggatattgctgcattttggggttataggcatatagctaacttgttagcaaatgcaaaaggtgggaagaagccctggttcctaaccaatgaagtagacgagtgtgagaattattttagcagaacactactggaccggaggagtgacaaaagaaataattctgactggctgcaagctaaagagagccaccccaccacagtttatctccttttctcagacttgaaccccctggttaccctaggtggtaataaagaaagctcgcagcagccggaagtccggctttgccagctgaactacccggatgtaaagggttacttggctcagcctgagaagatcaccttggtgttccttggagtcgagcttgagatgaggaaaggctcacccgcccaggcgggaggagtcccagaggaagaggaggacggtttggttgcttggtttgccctcggtattgaacccggtgctgctgaggagtttaagcaaagacatgaaaattgttattttctccacccgccaatgccagctcttctgcagttgaaagaaaaggaggctggggtggtagctcaagcaagatcagtgcttgcctggcatagtcgatacaagttctgcccaacctgtggcagtgcgactaaaattgaggaaggaggctacaaaagagtgtgtgtacgagagacttgccctagtctccaaggcgtccacaacacatcttacccgagagttgatccagtcgtaattatgcaggtcatccatccagatggaaccaaatgtcttctaggcaggcaaaagcgattccccccgggcatgttcacatgtcttgctggatttatagagcccggggagacaatagaagatgctgtgcggagagaggtggaagaggaaagtggagtcaaagttggccatgttcagtatgtctcttgtcaaccatggccaatgccctcctcgttaatgattggctgtttagctgtggcagtgtctacagaaattaaagttgacaagaatgaaatagaggatgcccgatggttcactagagaacaggttgtggacgttcttaccaaagggaagcagcaagcattctttgtgccaccaagccgagctatcgcacatcagttaatcaaacactgggtgggaatgaaccccaatctctaaatgaaaaatactagcctctgttggagtactactgaatttttaacactacttatttctcaagaaagagtagatatatttattgatctttagaatcttataacataaaacttgggagcttcaaaaatattgtaagtgttctttctattattaacaacagaattcatagtttcataaactggagcgatgcctcgagattttcgtaaatttggaggctgcctgtgaacatttttgttgtgtttcccaattttatctcagaaaactaactgtatttctaccaagaaagaccatgttgggatgaagtgtgctccataaacgagataaaccttagttcatctcatggaaagagcggattccttgtgggagataggagtcaaaagaactcggatgaattttgagcttttgtgtatctttagtgatccaattatcattctcctgactttctgttccagtggtcgtactgttgcagtgtcactcctagtgtcatctgagcagtgttggcaatgattgttattttaacactttacccattactgatctcagaatcctgtacccatgggtagagaactaaagaacaggtgcacaccattgtatctgggacggcacagttacatcccaagccaactcctacatctctctgttttacttaaaattgctattaagacacgtgatgactatccaattcttcacctgactcttaacattttagaaaggaatttctgaaggtcagaaactacataccaagccaatagtaatttacatattaaataaagcactaactgt

SEQ ID NO: 2623 - DNA, 3611 bp, Mus musculus
ttcggtcctgagcaccgagcagggcgcagcactccccgcgccggcggcatggcggtgtcctggaggagctggctggccaacgaaggggttaaacacctctgcctgctcatttggctgtccctaaacgttctacttttctggaaaaccttcctgctgtacaaccaagggccagaatactactacattcaccaaatgttgggcctaggattgtgtttaagcagagcatctgcatctgtcctgaacctcaactgcagcctcatccttttacctatgtgccggacagtcctggcttatcttcgaggatcacagaaggtccctagcaggagaacaagaagattgttggataaaagcaagactctacacatcacatgtggtgtaactatctgtattttctcaggtgtgcatgtagccgcccacttggtgaatgccctcaacttttcagtgaactacagtgaagatttccttgaactgaatgcagcaagataccagaatgaggatcccagaaagcttctcttcacaaccattcctggtctgacgggtgtctgcatggtggtggtattgttcctcatggttacagcttctacctacgcaataagagtttctaattatgatatcttctggtatactcacaacctcttctttgtcttctacatgctgctgctgttgcatgtttcaggtggtttgttgaagtatcagacaaatgtagacactcaccctcctggctgcattagtcttaaccagacatcatcccagaatatgtccataccagactacgtctcagaacattttcatggatctttgcctcgagggttttcaaaattagaagatcgttaccagaaaacacttgtgaagatttgcctggaagaacccaagttccaagctcatttcccacagacctggatttggatttctggacctttgtgcctttattgtgcggagagactttaccgatgcatcaggagcaacaaacctgtcaccatcatctcagtcatcaatcatccctctgatgtaatggaactccgtatgatcaaagaaaactttaaagcaagacctggccagtatattattctccattgccccagtgtatcagcattagaaaaccacccatttactctcacaatgtgtcctactgaaaccaaagcaacatttggtgtccactttaaagtagtaggagactggacagaacgattccgggatttgctactgcctccatcaagtcaagactctgagattctgcccttcattcactctagaaattaccctaagttatacattgatggtccatttggaagcccatttgaggagtcactgaactatgaagttagtctctgtgtggctggaggcattggagtcactccatttgcatcgatactaaacactctactggatgactggaaaccatacaagttaagaagactgtactttatctgggtgtgcagagacatccaatcattccagtggtttgcagatttactctgtgtgttgcataacaagttttggcaagaaaacagacctgactttgtgaacatccagctgtacctcagtcaaacagatgggattcagaagataattggagaaaaatatcacacactgaattcgagacttttcattgggcgtcctcggtggaaacttttatttgatgaaatagcaaaatgtaacagagggaaaacagttggagttttctgctgtggacccagttctatttccaagactcttcatagtttgagtaaccggaacaactcatatgggacaaaatttgaatacaataaagaatccttcagctgaaaccttaggagactactggggactttaaagaggaacaagtgcaatttctaagacttagaaactcagctgaatcaaacagctgtgctatgccaaagaataccaagggtttgctatttatgattatttaaaatgagaattcagaaaatgtggcaaaatggcatggttaatctgcgagccaaaggggccctgaagaatatctgatgtggtgattcacattttgatgagcaaattaaaagaatgccgttagacgcacgctgttgatttttatgggaaattcaagaagtctcttacaaggagctgaactcacttacactgaagctgatagctgcagccctctttaaattgttttcggttgaacacattcaagattgaacaaaattaaaaattcattgaaactcagactccattttctaggttgtgcataagtggagtagctttcatttggataggctccaggcaaacactgggaggttgaaactgtagcacaaaactttgtatcgatacgggtacttcatatctgctgcttcactactgactctcctgcctcgctgcagtgttcctaatctatatgctcacaaagcttatacccatgtggatgtagtatctacttatgtttgcatcttatcctccgtctaggaaaatctgctcccccttagccaatcttggacacaattatttaatagaactgtttgatcaccgatttgttcaatttagtcccatggcttagtaatgaaaatgtgctttaagcttatccttaaaaaccaaagagctttgtatcttgcaccaaacacagaagcacaagacctctctcctttgactcactttgatttcagataagagatgctgaattcatggagtgataccctgctttgctttctacaaaagtagaacttcttcagtatttattcaaatttcagtttagaatcactaatattatttttgcactgtttgatatcacggtgagttactagatttaagtcccctgttcatgtgatccaatcagtttatcacctattttttaatattcaggaatcagaaggaaaatttactaccttaagaaagaagatattcatacagtttatcaacttaatttggtatataattattaatgctatcaaataggacacattgctgaaattagtaccttaacttatgcttggtaatcttttgtatatcacatgattacaataaatcctgttattatttggatttcatgtgattcagtactaacagacaagcatactaaaacatttagcatcaaataaccacctgtatatttagttacacatatattttttttatccttggaacactttcctatccctcctatgggcaatgtgcaatgctcatgtagactgaactgtggagacataaactatgacatcatagcaatgctgtctagattacaaagagttttcacaaaacacatactacaaaaataaaaataaaaataaacctcataaaaaaaaacttgggcttgtccaggcttgatgtgcaatactgattccttaccaatcataacttatttttatgcctatgtgaattcatcacatttcaaaaattcaggtcaaacttacaaaacaagatgatatttcagacttgtgtgctatgttgagtgaacttccttgcctaatctaaactccagtgcatgttcaaggatctatatgttaaacatggtatatttttgaacaggaataaattaaagctttatcacacatatagaagacagcttcatttctttttagattctatggtggtggttactgttgtataaatcctaaatcacgaattttgatggtaataaatattaaaattaaaaaaaaaaa

SEQ ID NO: 2624 - DNA, 415 bp, Mus musculus
cggccgcgtcagacttcacattgtgtttattctgggtgacgtatggacatatttcaatttctttgttgagcagctcatagatgtcctccgcgggttgcggaatgtataagtgcactctgttctccaataggaacttcaggcgtaggttatggcaggcacgatccacatgatgagtcttgcagatgagctccaaagtgtcccacacagtgtcgcatgttcggacagccgtcaaaggtgggtggatgttggctagacattaccatgatggggtgaaatattcatgggccccactgtcagagtccagattgagcaggtggccactgcgtaggatcacttccttctccgtcgtgtcatctgggacaatggcatcacatattcactctaaagatctctttacagcaacagtcgcctctcc

SEQ ID NO: 2625 - DNA, 1163 bp, Mus musculus
  misc_feature 317: n = A,T,C or G
ggtgggcgatggcggctagcagctcttccggcctcgcgcagggcaccaacccgtcgtccaggtaacgagccccgtgggcggcgaggcgccccaaccccgcgggactcggacgtgagtcacggggagcggggcgggcccgaggcggggcgacggcccctggggtccgcgggagggcggggcggggagtccggggagtgacaggcagggtgggggcggggaccccgtggggatagggctagcctaggagggaccgacctggatgggtagggtggggaccgaggatggaggacagagttgggggaggggactgacctcanagaggacctgagaccttggggaaccttccaagcgggaatagggtggggtgttctggcccctgatggatagaattggagtttttggtgtctgatgtatgggggaatcctccaggcagggatggagtcagagttctggttcctgatggatggaggaccctcgagacggggatggagtctggggttctgatggttaatggatgggggaccctccagatgggcctgaattgggggttctaatccctgatgaatgggggaccctccaggtaagtatggaattgggggttttggtgtctgacaaatgggtttaccctctagacagggaagaatttgggttcagtccttgatggatggggggctctccagacgaggatggggtctggggttctgtgtctaatggatggggggttaagctaggcagggtaaagtgagcctctggtctttggaagtcagtaaagcacaggcaagtggcacaggcttccaatccaatctttgaagagagaagctgaggcagtgtgtgtgtgtttaagttcagggctagcctgagctacagtgagtatgaggccaggctgaagaactaaaggagatgttgtctttaaataaaaggccacatgaataatgtccgtgccaagtggagagaaggcgcttggctgtgtgtgaggagttgggggctgacggctggggacgagtgtcctcttcactcagtggcttggttagggttacagttgcagtgataacacacccgggccaagagctggtgagagggtcactgtggggaccagagttccaggtctgtaagtcaggcaagtccactgccgtagcacaacacacacaaatatacaaatgatg

SEQ ID NO: 2626 - DNA, 3148 bp, Mus musculus
gcactctgcactcggccgcctgggctgaggggacgggacgggtgcgggcgcgggctcagcgggccgggagctgagtcaaggccgagaagcagagggaggcaagaggacagtgcaccgagatggcggctgcaacggctgcggcggccgcggcggcggcggcgggggaagggatggagcctcgagcgctgcagtacgagcagaccctgatgtatggccggtacactcaggaactcggggcctttgccaaagaggaagctgctcgtattcgcctgggagggcctgagccctggaaggggtccccttctgcccgggctaccccagagctcctagaatatggacagagccgatgtgccagatgtcgcatttgttctgtacgctgccacaagttcctggtgtccagggtcggtgaagactggatcttcctggttctgttggggctcctcatggcattggtcagctgggctatggactatgccatcgctgtctgtctacaggctcagcaatggatgtcccggggcttaaacaccaacatcttactccagtacctggcttgggttacctaccccgtggtcctcatcactttctctgctggattcacccagatcctggccccacaggctgtcgggtctggcatccccgaaatgaaaaccatccttcggggagtggtgctgaaagaatacctcaccctcaagacctttgtagctaaggtcattgggctaacctgtgccctgggcagtgggatgccccttggcaaagagggaccctttgtgcacattgccagcatgtgtgccgcccttctcagcaagttcctctccctctttgggggtatctatgagcatgagtcccggaacacggagatgctagctgctgcatgcgcagtaggagtgggctgctgctttgccgcaccaatcggaggggtcctattcagcattgaagtcacctccaccttcttcgctgttaggaactactggcggggcttctttgcggccaccttcagtgccttcatctttcgggtcttggcagtgtggaaccgtgatgaagaaaccatcacagctctcttcaaaactcggttccgactcgacttcccatttgacctgcaagagctgccagcctttgctgtcattggcattgctagtggcttcgggggagccctctttgtctacctgaaccggaagattgtccaggtgatgcggaagcaaaaaaccatcaaccgcttcctcatgaggaaacggctgctcttcccggcactggtgactctgctcatctccactctgaccttcccccctggctttggacagttcatggccggacagctctcacagaaggagaccctagtcactctgtttgacaaccggacgtgggtccgccagggcctggttgaggatctagagctacccagcacttcacaggcctggagcccaccacgtgccaatgtcttccttactctggtcatcttcatcctcatgaagttctggatgtctgcactggccaccactatcccagtgccctgtggggccttcatgcctgtctttgtcattggagcggcatttgggcggctggtgggcgaaagcatggccgcctggttcccagatgggattcacacggatagcagcacctaccgaattgtacctggaggctatgctgtggtcggggcggctgcactcgcaggagcagtgacacacacagtgtccacagcagtgattgtcttcgagctcacgggccagatcgctcacattctgcctgtcatgattgctgtcatcctggctaatgctgttgcccagagcctgcagccatcgctctatgacagtatcatccgcatcaagaagctgccctacctgcctgagctgggctggggccgccaccagcagtaccgggtgcgagtcgaggacatcatggttcgggatgtaccccatgtagccctcagctgcacttttcgggacctgcggttggcactgcacagaaccaagggccgtatgttggccctagtggagtctcctgagtccatgatcctactgggatccatcgaacgctcacaggtggtagcactactaggagcccagctgagcccagcgcgccggcggcagcacatgcaaaagctaagaaaagcccagctgtcctcaccgtcggatcaagagagcccccccagctccgagacatctatccgcttccaggtgaacacagaggactcgggcttctctggagcccacgggcagactcacaagcccctgaagcctgctctaaagagagggcccagcaacagtacaagcctgcaggaaggtaccacaggcaacatggagtcagcaggcattgccctcagaagcctcttctgtggcagtccacctctggaggcaacatcagaattggaaaagtcagaatcctgtgacaagcgcaagctgaagcgggtccgaatctccctggcgagtgactcagacccggaagccgagatgagtcctgaggagatcttagagtgggaagaacagcagctagatgagccagtcaacttcagtgactgcaaaatcgaccctgcccccttccagctggtggagcggacttctttgcacaagacccacaccatcttctcattgctgggagtggaccatgcttatgtcaccagcattggcagactcattgggattgtcaccctaaaggagctccggaaggccattgaaggctctgtcacagcacagggtgttaaagtcaggccacccctcgccagtttccgggacagtgccaccagcagcagtgacacagagaccactgaggtgcatgcgctctgggggccaagatcccgccacggcctcccacgagagggtaccccctccgacagtgatgacaagtgccagtgaaccccttacggatggcctgtattccttctgcaagcagcagtgaccagaaactggaacccaaggccaccctaactgctgggggatcatcaagtgtcctggcgggatgaggtggggttctatggcccctgccccatctttgagaaaagggcagaactaaactgggtttatctggaaagcccaatgacaagatgtatatagaaatttacaaagatttttatattaatttaataaaacaataaatagaataaacaccttaattagccactcatgtatagaaaaaaaaaaaaaaaaaaaaaaaaaaa

SEQ ID NO: 2627 - DNA, 1503 bp, Mus musculus
atgaagggcaatgtcagcgagctgctcaatgccactcagcaggctccaggcggcggggagggagggagaccacgaccgtcctggctggcctctacactggccttcatcctcatctttaccatcgtggtggacattctgggcaacctgctggtcatcctgtctgtgtaccgcaacaagaagctcaggaactcagggaatatatttgtggtgagtttagctgtggcagacctcgtggtggctgtttacccttatcccttggtgctgacatctatccttaacaacggatggaatctgggatatctacactgtcaagtcagcgcatttctaatgggcttgagtgtcatcggctcgatattcaacatcacggggatcgctatgaaccgttactgctacatttgccacagcctcaagtacgacaaaatatacagtaacaagaactcgctctgctacgtgttcctgatatggatgctgacactcatcgccatcatgcccaacctgcaaaccggaacactccagtacgatccccggatctactcctgtaccttcacccagtctgtcagctcagcgtacacgatagcagtggtggttttccatttcatcgtgcctatgattattgtcatcttctgctacttaaggatatgggtcctggtccttcaggtcagacggagggtgaaacccgacaacaagcccaaactgaagccccaggacttcaggaactttgtcaccatgttcgtagtttttgtactttttgccatttgttgggccccactcaacctcataggtcttattgtggcctcagaccctgccaccatggtccccaggatcccagagtggctgttcgtggctagttactacctggcgtacttcaacagctgcctcaacgcaattatatacggactactgaatcagaatttcagaaaggaatacaaaaagattattgtctcgttgtgcacagccaagatgttctttgtggagagttcaaatgaagaagcagataagattaaatgtaagccctctccactaatacccaataataacttaataaaggtggactctgtttaaaaagccagtggtgctagcagattatccacactggttggggtcttcctgctctccttgtttgctttcttttgtctagaaatcagtctatccaacttgaagctcttcagggttgcctccatagtgttggaaaggatctcctgtctgccccataatcagattgctagtatcaaggggaatgctgaacaggcacaccatagtttaaatggacaacttgtatcagcagaggaggtcgtggtgcagactctctcgtctctggggcaaccaggtcttgggggttgcccacatttaggattacaatatacagcaacagaccaaacctgaacaaaatgtggaaggaactcaagacaagagggaccatggggaccttccttttattgtaagcgagtgatacagagtgtttattcttacctatggctgaattaaaatagtcaaaaaacttaa

SEQ ID NO: 2628 - DNA, 604 bp, Mus musculus
tcgtgaattttgtcagttttgtgatatcctgtttcgccttcactcctgcaaatgtgttatctggaatacaagaaattatatttaccattttaaaggtctcccagaattgagtgtgcagtagcagaaactgcccatcccactataacgtaaaaaagtgttcttacaggtaatttacatcctaataaaggggacgtacacaacccgaactgactctaaagcatttagtatggtgagagtattgggacgcttgtgcaaacttaaacacagagagtgaaaccaaacattaaagaagagtatccatctacccaactcagacctgcgtgaactatccactggtaaagtgggaactgtttaaatggggaagacaggagagatcgaaacgtatgcaaatcaatgcaaaaatagatcttagctcagttgtgacttggtgcctcttaaatgaatggaagagttgaaaaactgcctcttcacctgaagaaattagctattttatcagcaatactgctttggaaagttttgtgtatactgttttataacaaagccaggggccttctgcaagttccggctgtttttcagtttatttcctgaccagttaaacttacct

SEQ ID NO: 2629 - DNA, 1889 bp, Mus musculus
gtctgcactttgaggctggagctggctggtcggggacaggaaagaaggtggtggaagataccatcagaaactggaatctgtatgaagtcttccataactgattcaaggttcacactcacagtctacatgctctgagaaactagaaacccgaattaaccagaagttcgcccagaagacctgtctgaaatgtggtggtttcagcaaggcctcagttttcttccgtcggcccttgtaatttggacatttgctaccttcatattctcatatatcactgcaataacactccaccatgttgaccctgcattgccttatatcagcgacacagggacaatacctcctgaaagatgcctctttggagtaatgctaaatatcgctgcagttttaggcattgctaccatgtatgttcgttacaagcaagttcatgcactgaaccctgaagagaaccttatcatcaaattaaacaaggctggccttgtacttgggatactgagttgtttaggactttcccttgtggcaaatttccagggctatgtgcttcacctggttactacggcagcagaatggtccatgtcattttccttttttggatttttccttacttatattcgtgattttcagaaaattactttgcgggtggaagccaatttacatggattaaccctctatgacactgttccttgccctgttaacaatgaaagaacaccactgctttccagagattttcagtaactggatataagtcttctgtgatgattgtgattctcagggactgggaaaagatgcacaaaagttgcttattatactgtgaaaatttgaatcaattaatcaaggctgacagtgacactaatgaaacatgatatcaggaaaaatgtaataagccatctggtaagttttcttaaaggatgttgttaagaagtccatctaaaaacatgtctagacttttttatatccagaaaataaaaccaaaggataatatcattgtagtgtttgctactttatcaatgaaagcctgaagtacaccgagtagtctctatacttggccttaaacatattattttaaaagtatcttttgttaggagtacttttatgagagacattttccatggcacaccgtaatcagcattggtaaccaaatcatttggaatcacggcttaaaactgaagttttattatattaatacatttcttacagtacttaaaaatgtgttgctgttgttgttgttgttattgttgttgttgaatcttttctgtaaataggagcctgcctgaaataatctgagttctttgatggcttaaattttgcctctctgcacccccaaacaaacacaaaatcaatgggtatttattctggccacatgaatattaacagatctatcatatatgcttataataatttcatcaagtctggtctctgagattagaatttttaattaccagtaaaagagagagattatttgcaaatttgctaccattttgttctttataaaataaaggttacagctgatgacattgttcagtagtgtaaattacttgctgctaaccctgactatctgagttcaatatgtaggatccacatagtcaaaagaaagaaaagttatcctttggccttgacctccatatgcaaatacacatacacaataactaaatgtgataatagaaataaacattaatgttcctaaataaggttgcaaagtctgtaaacaaaaggatatgattattaacataaaaattacattatagttataatctttgatttttcatttagagaaatttatacttagtagtaagattagttttgatcatatatttagtctttttattggaatgtgatccttttgaaacctaaatctgaagaagagactgaaatccaaaataaaattctgaatcttt

SEQ ID NO: 2630 - DNA, 1351 bp, Mus musculus
ggtcttgaggttggacctacgtagccgctgcggtccaaggagaggagtgtcttggactagtccgctggcagatagaggcggccttctcgagtcgtgtcaaggctaggacgcgacgccctctacgttcttaaggcctcagactttcttctgcggccggctggactggatgctcgaaggcctgggcctttcctacagctgagccaacgggaacgcggaacctccgtggatctgccaatagagagcgctcggccgtgggcaggcggggcctctgatccccggagcacctggaacccagcacctgcgcttagatccggctggaaaacaccacatgacttttcattggcagatgtgctacctgaacactgaacagttcctaccagaacctctgctgtgagcaatccgaaagctggccaatctcctccaggctggccaggatccagcccttagagtaactcaagagttccacctgctgtgttatctggactcccactaagtgcagcactgtgccttcggagcagcaccaacaagaatgtatcccttcatccctccagctagactactaccaggatctccagcaccctttcttccttctggaccatcgtgtccccaacccagtggtccatatccaggccctgctgtacgagtccctggccccacaaggtcatatgtttcaacaaatgtgccctttccagagctacctaggccaaatagcgcacccacagatccagttggtcctttaggtacacagggatccatgtcttctggaccttgggcaccaggaatgggagggcagcatcctaatgtgccatatctatttccagagtcatctcccactcctcctcttccagtgtcaggagcaccacctgttgcatgggtcacagtgccaccgggggcctgggaaccaccagcgcagtatcctactcctgaagcgtcatatcccagcccaggactccagccttccccgaataatccttacccactgccgccaggaccttctgctgcttcaccagggcctggtagcctccatagaatgaatgaaatcccgggtggctccccttccgattcgtccaacccggagagcaccttggagagcactggacaaaagaagcacctgaagctagacaacaaatccatcaagaggagacgatccaagaagaaaagcaagcgggtaacctggggagacatcaagactttaactcacaaagctgaaagcttggggaaacaacaaggacacaataccactgaccccaaaatgatgctgctatgtttaatgactatgctacatgttaattctcagcatgaaagtgaagggtctaaatgacttctcaaggagaataaaaggcacacctgt

SEQ ID NO: 2631 - DNA, 1581 bp, Mus musculus
  misc_feature 6, 7, 8, 9: n = A,T,C or G
aaccannnngggaacagcgtgcatgattttgcagagccctctgtgaacctctccatctgattggtagccttcctgaaaggagcatcctctttcagggctccatccctcattggctgtttattcatgcagagccacttggaggaagtctgcagccaaggtcctagtagaaccattgttttgaaacctctaggaggttaaacacttaaaaacaaactctacaaattgctctccagtgtcctcctggttagggccaaacagcacgtgttgcagtagagacacattctctgaagactgtaaaggactgtgtttacatccgcctcctccgtgtgttgacaggaaacatgtcaaactgactgttccccacaagaaaagtgtgtcagctcttcttactctgtcacctgtattctaaaatattgactcctagaatgtcacagcacaggcagttgccacgaatctttaagaggaaggaatacaagcaggcgactgcacttcttgaggcgttacaaataagattcgtgttgaatctgttcagttgacttccctgccccccggagcccgttatgtggaggcaatttctcagaaatcagaatctagtagggattgtctctctctctctctctatgttttgaatacttgaacatgacaagtccagtttaaaatgtctttttccttttaggacacagttgcaggatgggtaagaatctggttgatctcttctgtcataggtctcatgtgtatgtgtgcaagtgtaaaccagagggttagcattccccttcctttgtagaccactgaattattgggcaatagtttattttgttgttattggctttttgtttttgtttttgtttttttttaaattggcaccaaacagttctgaaactgtcaagtcagcaaagttcaatgtccgctatgattttgggtttacttcccagagggccatgtcaaatcagaagaaggctccttgggagagcataccctgcccatggatgctcttttcataaacacagatgcccatgttctgaatatctgttactttctgacaagtgatgttgtgtgttgtcatctgaaccctagagaagcatcgtagatgagggaaccttggcggtcatgtatcgtggctagggtgggcacgatcagagggtcacgtgcccgagaaagctccagcaaagcgtgagaacttgcctcagtgtgggggggaagggctgagatacagaagccaccttgccccagaagaatttcagcggcggctgtatgagaaattctgtttccttatttcacacctgggaagactcagcagccagcagctgaggggccatccactaagcacaagaggaattcgttctacccaaggagccccgtgcctctcaaatgcgctccgagtttgttatggtttctattcttacaactaacggtatcaaaaccacttcctgggattgtacaagtgctgccagaataaatgtttcccccttctaaggaaaaaaaaacaaaacaaaacaagacaaaaaatccgacagtgctcatgtttgacgtgtgcgctggactcttttgaatgaataaagaggaagggcttgttgggattcc

SEQ ID NO: 2632 - DNA, 3183 bp, Mus musculus
gatacgcggacggccaacatccgaggactccggccttgagtaacctgctcccgtgaccttttcgcaccccgcacgccgaggcccgcgcggcgcccgcctcgcccttgcgtgtctgccgcccctgccgaaccctgcgttcccctgaccacgcgcagctgccaccgccactcgtcatggcggccctcagcaagtccatccctcataactgctacgagatcggccacacttggcacccctcctgcagggtctccttcctgcagatcacttggggcgccctggaggagtccctcaggatctacgcacccctgtacctgattgcagctgttctccggaagcgcaagctggagtattacctgtacaaactgcttcctgagatcctccagtccgcctccttcctgactgctaatggggccttgtacattactttcttctgcattttaaggaagatccttggaaaattctactcatggactcctggctttggtgctgctctgccagcctcatatgtggccattctaattgaaagaaaaagcaggagagggctgctcacaatttatatggccaacttggccacagaaacactatttagaatgggtgttgcaagaggaaccatcacgacgttaagaaatggagaagtccttttgttctgcatcacagcggccatgtacatgttctttttcaggtgcaaagatggcttaaaaggctttacattttctgcacttaggtttatcgtggggaaggaagaaattcccacgcactcttactcaccagagacagcgtatgccaaagtggaacagaagagggagaagcacaagggaacgccgagagcaatgagcataatcgctctggttcggactctcgtggactccgtatgcaagcatggaccaaggcacagatgctgcaagcattatgaagacaactgcatttcctactgcattaaaggcttcatcagaatgttcagcgtgggctacttgatccagtgctgtctccggatcccctctgcgtttaggcatctgtttacagaaccatcccggctcctctctcttttctacaacaaggagaacttccagctgggggctttccttggatcttttgttagtatatacaagggcacaagttgtttcctgcgctggatcaggaatctggatgacgagctgcatgctattgtggctgggtttttggcaggtgtgtcgatgatgttttataaaagcacaacaatttccatgtacctagcttccaagctggtggagacaatgtatttcaagggcatcgaggctggaaaggttccctattttcctcaagcagatacgatcatctattccatctctacagcaatttgtttccacgcagctgttatggaagttcagaacttgcgaccatcttactggaagttccttttaaggctcaccaagggcaggtttgcactcatgaaccgaaaagccctggatgtgtttggtactggcgcatctagagagtttcacaacttcatccccagactagacccacggtacacagttgtcacaccggagctgcccatagacttttcctgaagatgactgtaacttattgactgtgtctcaccattttctcctgaagagttaattatgttcaacacagaaggggcccaagctgaacctcagtgttacgtcaacgagagatgctttttctttcttttcataccaatcagaaatacagaagctttttagaaaggcgttgcttaataattaagcttcctctgtagccagaatctcattctggatcatgtagtgttgacattatgatatattgttgattaaattatgtccacaaagaatattgaataatctatgtagaaatataataagaagagtatacttaaaaattactttaaaagatatctttagttcattccaatagaattcttggtcaaaactaagaatatttcttcactttaggatttgcaaaggatctcgggtacatggattcagcccgtgatctttacgcttttgaatggatttctgtagctgtggggcgttggagatggggcattgctgctttgctgtggagcaatgtggagaaagtggccattcttatttcagggatacaaacgtgggtttcataccatttgagccagtgtcatggtggtacccatactcttttgttcagctctcagtcctgtctctcttcgagaccagatgggctggttggcagcctagtgaccttatatgataatagcaggttaggaacaaatggaaaccgacaggtgctgctgtaaaaaatgtctcagtgttcacaggagtgttacacttgaatattgtcaagcagacaacctaaaagccaatcttcacacctcctataggcagattgtgtttattttcaccacagtggctgtgctctttatagctcagtttcaatgtcattggtgttttagaaagggttaagatcctatggaacaaaagagctttgggccagtttgacagttggtaccccctctaatgcctcacctaaatggggcgttttatgacgaaaaatgtgaaaatgcagtgattgttgggagttcctctctcactaattggcttcctgttcattaaccagttctggctggagttaagggacaccagatggttggtgctgattatagaagcagtcctggacagctgactgagatatgatcacttggcttttctggggaaagttgtacttttctaagttaatatagaagtctaaagtggctgtgatgtctacagttaatgtaatatataggaattatctttaaatatataattttgttgctaaaaatgtttcaggccattgtaagttatgcagtagaacttgtgttatgacaggaattgtaactcaagacattaaaaatacttaacctcccttattcagttgcatcagcacttgtatttctgtgtaaccctacccttggttgttatagaaaattgagtccctacaaagagacagactctagtgccatcatgtaacagaaccacttgagtttgctcagaattttgcgttacgattagcgttctagagtggacttacctgcttggtaacacattgaagggtcattttgggtttggacttccacactgattaattaattaatgcagttttaggtttttattcactggaatcggactgatgattagtactgtgtttccctttgaaaatgaagtattaaagcactgagaacgcctg

SEQ ID NO: 2633 - DNA, 1846 bp, Mus musculus
gagtatggagctgtccatacggcctcggcaccgctcgacttctctagagaagctggcagccggtgccaggggcgtctgagttctcgactcttggactccgtggaggccacacggccatgcgtggcttggcgcgtggcgcgggcgcgtggggccctcttcgcgtggccctccggcctccgggggcgcggctcggcaggggcggctccccaggccctgctgccgcccgcggcctgctgcctcggctgcctggctgagcgctggcggctgcggccgtccgcgttcgccttgcggctgcccggcgccggcccgcggacccactgctcgggcgcggggaaggcagccccggagcccgccgccggaggaggaggtgccgccgcgcaggcccccagcgcccgatgggtcccggcgagcgccgccagctcgtatgaaaatccatggacaatcccaaatttgttgtcaatgacaagaattggcctggcccccgtgttgggctacccgattcttgaagaagactttaatgttgcactaggtgtttttgctttagccgggctaacggatttgttggatggatttattgctcgaaactgggccaaccaaaaatcagctttgggaagtgctcttgatccacttgctgataaagttcttatcagcatcttatatattagcttgacctatgcagatcttattccagtcccactcacttacatgataatttcaagagatgtaatgttgatcgctgctgtgttttatgtcagataccgaactctgccaacaccgcgaacactagctaagtacttcaatccttgctatgccacggctaggttaaaaccaacattcatcagcaaggtaaatacagcagtccagttaattttggtggcagcttctttggcagctccagttttcaattatgctgacagcatttatcttcagatactatggtgttgcacagcattcactacagctgcatcagcatacagttattatcactatggtcggaaaactgttcaggtgataaagggcaaatgagaagcacccagatccagcagcaaggaagcaagttcgtcatcggcagcagcgccagcgaaagctacaggactttcctgatcttggtgttcagcttgcgaaaggtcttgtcagacaaaccatgtcttcaaaactgaagaaatgtacggcgaaaataagctcgatcatgggcctatacagaatttccagtgtatttttaaatacaaataaaactataatgtagaatttttaatcttaggtttttgattaatttgtgagatgaattattcttgtttttttttttttttatgttttttaaaaacatagttggtaacatggaaacaaaggaaagcaggagggaatttcctaagattggatacacaccatacacagcatgtctatacatttttatgcttgaattttaaatctataaatacattaacagttcatgtgattaatacttgatcatttgaaaactgagaataaacttagctgtgggtactgtaaaggtgtacagagctttaaaatgcagtacattttgaaaacaaaaaagaacaaataaaacagaaggcattgaagttcacgagtagtcttccagcctctcaggtaccaaatagtttatgtatcaggataacagataacgcaggagtcagagggagaacacatgtattacgctttgcatcttacaggcaaagcatgacatcatgccttctccctgtttgtaatgggatgtttgatactggaaccagtgctcatatgtcatgtaaataggatgaaactttctatttttcaaagtttttttttttttttttaactttggggaatcttctattgttaacatgac

SEQ ID NO: 2634 - DNA, 2413 bp, Mus musculus
gagcttgaggagatggagcggaacaccagcagctgctggaagagaaggatatcctggcagaacaactgcaagccgagaccgagctcttcgctgaagcagaagagatgagagcaaggcttgctgccaaaaagcaggaactggaggagattctccatgacctcgagtccagggtggaggaggaggaagagcggaaccagatcctacagaatgagaagaagaagatgcaggcgcacattcaggacctagaagaacaactggatgaggaggagggggcccggcaaaagctgcagctggagaaggtgacagcagaggctaaaatcaagaagatggaagaggaggttctgcttctcgaagaccagaattccaaatttatcaaagaaaagaaactcatggaagaccgaattgctgagtgttcctctcagctggctgaagaggaagaaaaggcaaaaaacttggccaaaatcaggaataagcaagaagtgatgatctcggacttagaagaacgcttgaagaaggaggagaaaactcgacaggaactggaaaaggccaaacggaagctggatggggaaacaaccgatctgcaggaccagatcgctgagctgcaggcacaggtcgatgagctcaaagtccagttgaccaagaaggaggaggagcttcagggggcgctggccagaggagatgatgagacactgcacaagaataatgcacttaaagttgcacgggagctgcaggcccaaatcgcagagctccaggaagactttgagtctgaaaaggcttcaaggaacaaggctgagaaacaaaaacgggacttgagtgaggagctggaagctctgaagacagagctggaggacaccctagacaccacagcagctcagcaggaactccgcacaaaacgtgagcaggaagtggcagagctgaagaaggctcttgaggatgaaactaagaaccacgaagctcagatccaggacatgagacagaggcatgccacagcgctggaggagctttccgagcagctggagcaagcgaaaaggttcaaagccaacctggagaagaacaaacagggcctggagacagacaacaaggagctggcgtgtgaggtgaaggtgctgcagcaggtgaaggcggagtcagagcacaagaggaagaagctggatgcccaggtccaggagctccatgccaaggtgtcagagggtgacaggctcagggtagagctggccgagaaagcaaacaagctacagaatgagctggataatgtgtcaaccctgctggaagaagctgagaagaaaggtattaagtttgcgaaggatgcagctggtctcgagtctcaactacaggacacacaggagctccttcaggaagagacacggcagaaactgaacctgagcagtcggatccggcagctggaggaggagaagaacagccttcaggagcagcaggaggaggaggaggaggccaggaagaacctggagaagcaggtgttggctctgcagtcccagctggctgacaccaagaagaaagtggacgatgacctggggacaatcgagagtttggaggaagccaaaaagaaactgctcaaggatgtggaggcgctgagccagcggctggaggagaaggtcctggcgtatgacaagctggagaagaccaagaaccggctgcaacaagaactggatgacctgacggtggacctggaccaccagcgccagatcgtctccaacttggagaagaaacagaagaagttcgaccagctgttggcagaagaaaagggcatctctgctcgctatgcagaagagcgggaccgggctgaagctgaggccagagagaaagaaaccaaagcgctctccctggcgcgggcccttgaggaggccttggaggcgaaggaggaattcgagaggcagaacaagcagcttcgagcagacatggaagacctgatgagctctaaagacgatgtggggaagaacgtccacgagcttgagaaatccaagcgagccttggagcagcaggtggaggagatgcggacccagctggaggagctggaggacgagctgcaggccactgaggatgccaagtccgcctggaagtcaacatgcaggccatgaaggcccagtttgagagggacctgcaaacccgagatgagcagaatgaagaaaagaagcggctgctgcttaagcaggtgcgggagctcgaggcagagctggaggatgagcggaaacagcgggcactggctgtggcgtcaaagaagaagatggagatagacctgaaggacctggaggctcagatcgaggctgcgaacaaagcccgggatgaagtgatcaagcacgttcgcaaacttcaggcacagatgaaggattaccagcgtgaactagaagaggctcgagcatctagagatgagatttttgctcaatccaaagaaagc

SEQ ID NO: 2635 - DNA, 1228 bp, Mus musculus
gagaggcaaaactctagtgttccacgagacgctccaccaggagctggtatcatggatgccctggttctatttctgcagctgctggtgctgctcctgactctacctctacacctactggctctgctgggctgctggcagcctatatgcaaaacctacttcccttacttcatggccatgctaacagccaggtcctacaaaaagatggaaagcaagaaacgggaactatttagccagataaaagatctcaaggggacttccggcaacgtggccctgctggagctgggctgcggcaccggtgccaacttccagttctacccacagggctgcaaggtcacctgtgtggacccaaaccccaacttcgagaagttcctgacaaagagcatggctgagaacaggcacctccaatatgagcgcttcattgtggcttacggagagaacatgaaacaactggctgacagctccatggatgtggtggtctgtaccctggtgctatgttctgtgcagagccccagaaaggtcctgcaggaagtccagagagtcctgaggccgggaggcctactgttcttctgggagcacgtggctgagcctcagggaagccgggccttcctgtggcagcgagttttagagcctacctggaaacacatcggagatggttgccacctcaccagagagacctggaaagacattgagagggcacagttctccgaagtccagctggaatggcagccccctcccttcaggtggttacctgttgggccccacatcatgggaaaagctgtgaaataaactctccccaaggatgccatctgatctccccatctgcagccagaagtcaccccaatacagtacttctaaggaggggtcaggtaaagcatgagagagactctcagcgccgccgctgccgctgccagggtgatcattcatcagtttcggccactagagacagaaaactacactgctaagccctggactttgcccaacccctttctaggaccgttttctccctctctcttgtccctatggtaaagttctccctggcgtccttctgaaactacaccatgtggccccttggaactaatcccaagtcaatgcgtgtatcccctgccaggctgcctcagcctccctccccattacccactctgtccccggggttcggaggaatgggcgagcagaaaaaccttaggatgagagagcggcactcaataaagcagccagagattttattgtc

SEQ ID NO: 2636 - DNA, 3229 bp, Mus musculus
gaactacagtgtagccagccggtccggtacaatgtagcggcagccaggtgcagggcagtctgggaagtcacgtgacaagagtgatgccctcctcatgcagggtgaaaggggaacatctcaagtaaggggacaggaaggaagatccagttccaagaggtgggatgctatggaatatgatgagaagctggttcggttccggcaggcccacctcaaccccttcaacaagcagcttggtccgaggcatcatgaacaggaacccagtgagaaggtcacttctgaagacactttgcctgagctgcccgctggggagcctgaattccactactcggagcgcatgatggatctcggcctgtctgaggaccacttttcccgccctgtgggtctcttcctggcctctgatgtccagcagctgcggcaggccatcgaagaatgcaaacaggtgatcctggagctgcccgagcagtcagagaagcagaaggacgctgtggtgcggctgatccacctccggctgaagctccaggagctgaaggaccccaatgaggaggaacccaacatccgggttctcctggaacatcgcttctacaaggagaagagcaagagcgttaaacagacctgcgataagtgcaacaccatcatctgggggctcatccagacctggtacacctgcacagggtgttgttaccgctgtcacagcaagtgcctgaacctcatctccaaaccatgtgtcagctccaaggtcagtcaccaggctgagtatgagctgaacatctgccctgagaccgggctggacagccaggactaccgctgtgcggagtgccgtgctcccatctctctgagaggtgtgcctagtgaggcccggcagtgtgactacacgggccaatactactgcagccactgccactggaacgacctggctgtcatccccgcgagagtggtgcacaactgggactttgagccacgcaaggtgtcccgttgcagcatgcgctacctggcactgatggtgtctcggccagtgctccggctccgggagattaaccctttgctgtttaactacgtggaagagctggtggagatccggaaactgcgccaggacatcctgctcatgaagccatacttcatcacctgcaaggaggccatggaggcgcgactactgctgcagctccaagacagacagcattttgtggagaacgatgagatgtactctatccaggacctcttggaagtgcacatgggccgcctcagctgctcgctcactgagatccacacgctcttcgccaagcacatcaagttggactgtgagcggtgccaagccaaggggttcgtctgtgaactctgcaaagaaggggacgtgctcttcccgttcgacagccacacgtctgtgtgcaatgactgttcggctgtcttccacagggactgttactacgacaactcgaccacgtgccccaagtgtgcccggctcacattgaggaagcagtcactattccaggaacctggcctagacatggatgcctagaacactggagaacgccaggcaccgtatccacccctccggctggtgcctgctggccttgcccaccagatgtgcattctactctggagacgacccccccccccccagtatatcctccagacctcttcgtctcgggccagaaggaagtgactagtggccaccgggactcattcctcaggtgcttgtggagacttcgagtgtgtatacctggctgttgattgggtgtgctgctatcggggggtcaaaatactgcctgtgccccattgtaggactccttaggcagaggagcctgggtgtgactctccaggaaggtgggggagtcgctctcttatggcacagagccctccaggcctttaaaaccaatccttctgcaccatagagatggccttgctcctgtctagtacacccttacaactggtcagaaacttgagaggccagtccagtaagaccagaggatgcctcctgactgagttttatctctgctgaggaagatttaggttctactcagaggcacccaacccttttagcaccttgtctcctgagggacgtccggttttctctgactggggctgttcactactgtgtcccgtggatcttcccctgcatcctgagagttgtcatcgtcatccttaatctgtcagtcacgtgtgcttccccacccccctttgtacaatagggagggaaggggtctgtggaacttctcttggcagatacgcctgcttctgccacagcctagtccactttatcctggtgctctgagccgggcagctaggaacccaccctaaagaggcttagcatccagttccataggtgggactgtgtccggggaggaggttctaggtcaggtgagcctgtcagttatcattggcctcggtggcattcgggggatgaagcttttccacagaggtcactgtcctgctgacgcagtgcactgcttgaagatgaccagtcgctgggtgttaacgtaggagcctgaggtcaagagctaggaatatttgctagacccccagcaggaggcccacggcccatacaggaaggtctaagttttgaaggtgggtggggcctacacctttccacctccatgcacacaccccataaatcctacgatggaagatgtgtggagacgaggggaatctcacaataatgtggctcctgtctttcttcctgggaggcaggagttggttgtgtctgcccctttgctccttgtctgtgaattgctgttgacacacacaactagtgggcaaaggccagggcatgtcacaacctggatttccttcacctttaatgaggcacaagaagggacttctcaactggccagttgaagcttagcttactggcgtgtttgggggaaggacggacacactgccacctcctcctcactgctctttgccatcaggtggctttactcatgctgtttttctgtttcagttttcccatctggaaagcattggggagggggagttgacctgcctcagggtgaaagatcaggagtcctttgagtgtgatgtgggtcaacaatgggtccctgttccgcttcctctttggcgttaaagagggtcttaaaaccaaatgccatttcccatacccccaaatctgtgtgtttcctgccattgtatcacatgtctgtcctgagtccttggcccttcttgagcctcctgtgtaatcaacatcacgtttccaactataaatcatagtgtctaaaggaaaaaaaaaaaaaaa

SEQ ID NO: 2637 - DNA, 1724 bp, Mus musculus
gtaacgagcccacacccagcttttcccagcagcacagaaacagatcaccatcatgagtgaggtcaaccgggaatctctggaagcgatccttccacagctgaagtgccatttcacctggaatttattcagggaaggaagtatgtccagtcatatggaagacagggtgtgcaaccaggtcgaacatttaaactctgaggagaaggcaacaatgtatgacttattggcctacataaagcacctagatggcgaaagcaaggccgccctggagtgcttagggcaagctgaagatttaaggaagtcagagcacaatgatcaatcagaaattcgtcgactggtcacctggggaaactacgcctggatctactatcacatgggccgtctctcagaagctcaggcttacgttgacaaggtgagacaagtttgccaaaagtttgcgaatccttacagcatggaatgcccagaacttgaatgtgaggaaggatggacacgcctaaagtgtggaagaaatgaacgagcaaaaatgtgctttgaaaaggctctagaagagaagccaaaggacccagagtgctcctctgggatggccatcgccatgttccgcctagaagaaaaacctgagaagcagttctccgtggatgctctgaagcaggccatggagttgaatcctcagaaccagtacctgaaagttctcctggccctgaaactgctgaggatgggagaagaagctgaaggggagcgattgattaaagatgctttggggaaagctcctaatcaaacggatgtcctccaaaaggcagctcagttttacaagaaaaagggtaacctagacagagctattgagttacttggaaaagcactgcgatccacagtgaacaacagtcctctctactctttggtcatgtgccgttacagggaaatactggagcagctacagaataaaggagatgctgacagcagtgagagaagacagaggatggcagaactgagacgattaacgatggagttcatgcagaagactcttcagaggaggcgaagtcctttgaactcctactcagatctcatcgatttcccggaagtagagagatgctatcagatggtcatcagtaaggagagccccgatgttgaggaagaagacctctatgagcgctattgcaacctccaggagtaccacaggaagtctgaagacctcgcagccctggagtgtttgttgcaatttcccagaaatgaaaggtcaatcgagaaggaagaggttaaagagcaaacatagcaagcagatcttaacctccagtagcaaattgtggtggattcttggcagttgcagggataaaggagtggctgaatggttttggggtttgggaggcaacgcactttggggcacaggcaggcttttcctggcaccatgaacctgaggacaaccggaagtgtgtcagagtgcagacagacagtctctcagctctgtactgtgagacagatgtgctgtggagtgctgcttatggggagaatgtgctgaaaaaagcatgagccttcctgccaaggattgctgacaaactgctcttgattgtttctttaaggaactgctttctctccctgactcctctgctcatcctagccatacaattttccagtcagcaaacctcattactaatcatgtagggaatggagcttaaagcagacagagcaccttttgatcacattttttttctctgcaataaatgacaactcccaac

SEQ ID NO: 2638 - DNA, 1561 bp, Mus musculus
agccctctgccgccgtctgccactgcgcctgggctcactgagtggttcatctggccaggaaagcagactacacggactccagggacctgtacctataatccaagacaagatgtccagcaagggctctgtggttctggcctacagtggtggcctggacacctcctgcatcctcgtgtggctgaaggaacaaggctatgatgtcatcgcctacctggccaacattggccagaaggaagactttgaggaagccaggaagaaggcgctgaagcttggggccaaaaaggtgttcattgaggatgtgagcaaggaatttgtggaagagttcatctggcctgctgtccagtccagtgcactctacgaggaccgctatctcctgggcacctctctcgccaggccttgcatagctcgcagacaggtggagattgcccagcgtgaaggggccaagtatgtgtctcacggcgccacgggaaaggggaatgaccaggtccgctttgagctcacctgctattcactggcaccccagattaaggtcatcgctccctggaggatgcctgagttttacaaccggttcaagggccgaaatgatctgatggagtatgcaaagcaacacggaatccccatccctgtcacccccaagagcccctggagtatggatgaaaacctcatgcacatcagctatgaggctgggatcctggaaaaccccaagaatcaagcacctccgggtctctacacaaaaactcaggaccctgccaaagcacccaacagcccagatgtccttgagatagaattcaaaaaaggggtccctgtgaaggtgaccaacatcaaagatggcacaacccgcaccacatccctggaactcttcatgtacctgaacgaagttgcgggcaagcacggagtgggtcgcattgacatcgtggagaaccgcttcattggaatgaagtcccgaggtatctacgagaccccagcagggaccatcctttaccacgctcatttagacatagaggccttcacgatggatcgggaagtacgcaaaatcaagcagggcctgggcctcaaattcgcagagctcgtatacacaggtttctggcacagccctgaatgtgaatttgttcgccactgtatccagaagtcccaggagcgggtagaagggaaggtgcaggtgtctgtcttcaagggccaagtgtacatcctcggtcgggagtctccactttcactctacaatgaagagctggtgagcatgaacgtgcagggcgactatgagcccatcgacgccactggcttcatcaatatcaactcgctcaggctgaaggagtaccatcgccttcagagcaaggtcactgccaaatagaccctgacaaagacggagcgggcctccccactctgcagctctcccaggcttcagcattaattgttgtgataaatttgtaattgtagcttgttctccaccacctgactggggctgctgtgtccccccccgcccccccacagcctttgttccctggtcccctatagcctacaaaagtggtcatccaagggaagggagggtggcgggcagctgcag

SEQ ID NO: 2639 - DNA, 2238 bp, Mus musculus
tctaagcagacgcctaccccctatattcactgactgtggccccttgacacagtacactttaacctccatgggaaactaaatcagagactgtcgtgagtgatgtgaccaacagccaatcaaaacctcagaaaacagaataaacagaaagtcaggatgtggtcatgcaggctgtacgttgactttaggaagactctcccattcttccttttaaatcatttaacatacatgattggatatctagaacaggagccgtgggaactacatactggggggagcttggtcctgtttatcattttgctctccctggtttagagtgacggctacagaactgatcctatccattcacagtgagctagacagaaagttcttaactatggggccaccgaaaatctttccagcctgctgttctgcatgttgcatcgagacagcatatggttttgatacgcaaatccaatctgagagttcattcatgtactgctctgtaattgaccatgcaaattgcaatttcctacttttaatataaactttcctcattgcataaatgaagtacctgcacgcattcccttggctccgctcatctgatcatcataatagtcagattttagtgggagagctgcagctagctgaagcagatgtccgcactgtgacaaggtatttaatttctcaggtccttcgtctttttattggagattcaaatattcccttcttccctgaaacagcatcatagaaaaatgagacaatttgatgtgtgcctaaatatttcaccacaaatcaagcacatattcatgaagtcaataatgcccagggaagaacaaagggtagttcgatgttaatgtctctctgaacttgtatatgattcaagtatccacgcaagtatatattgagtttgtataagttgttacacagctcatgctgtacactatgatttgtgttatttaaatcaggcgttaaaaatttttcatgagtggctatgatactaacaccatttattttgaacaccaaagcatttgtttgtttgtctgtttaacgtgtgtgtgttttgcctaagcatgtatatacgtgtaccaaatgtgtgcctggcactggaagaggccagaggaagcatcttattccctggaactagaattacaaacagctgtgagccaccgcattcgtgcagggaaacaaacctggggtctctgtaacaacagcaagtgctcttgactgctgagcctcatccccagccccactggcattattctttttaatgaattctagggagcataggcaagagaagcagggttgtgtggtctggctttcctgtaagagctcacagtgagagccacggaagcagagaataagtggtgatatctaagatccaggaaatgctggtcagacagacttccagttacgtaagaggaatcagtttgtaagatctgctctgttataacgtgtgctgtctatagtgagtaataaatatactgcgtcctgggatatcactgagtatatttaagagttccatccacagaataaatgtgagttgatgcacgcgttagccacattgctttagacactccacaatagatatatgtgttaaaacattacattgtatcctatgtacacatacatgaatatatttgtcaaatactttaaatgaattttaaaatagaggtgagtgcaaaaatgaagtctaggtctttccttatatcatattttttttaggattctaagaaagataagtgtgagattaagttagatacttacttgcctcacagattcacctggttcatacacctccttttcatcatttaaactgtagcataacaaaatatttagaaagctttgctcattctaaagcttcaatttatatgcggggggggggatgtcctaataaaaattacacaaagaaactttgtccagatttggttattgatagttaactggagaaaagggtttctcatctcatagaagctactagaccacaaaatatcaacatcacagcagagtgaatgtcctggaggaatgggcagataagaggaacccccatacctcagactctggtatttgtcagagataagcaataaggctaggctttcagttggttgcgccctagaagaaaataaaaggaaaggccagtctgtgtgtaaatctatacccttactaattcccccacttctaagatctccagagatctttgaagctgtaagaaatacaagaattgtaaatgactaattccaattagctagcaaactgttaacc

SEQ ID NO: 2640 - DNA, 174 bp, Mus musculus
  misc_feature 31: n = A,T,C or G
tcgtttttttgacgtcagacattcacagttnatagagggattcgaatttccggttcatgggagtgctttcacccttcccgcagctgggttcccttcctttccccttcccttacaagccggtgtaacactaatttatctatccacagtggattcaataaagtgcacttgataacc

SEQ ID NO: 2641 - DNA, 842 bp, Mus musculus
gcttttcagccccgcgaccctcctcccctggccgaacatgggcgcgcgcgcgtcccaggagccccggacccgggtccgggccgggttgcgggtgctgctgccggttctgcttctggcgctgctgctgctggcgctggtggctcctggagcgcagggggctcggggccgcggggctgcggacaagaacagccaccggcgcgcgacgagcagcttctcgcagagcgtgagcagcctcttcggagaggacaacgtgcgcgcggctcagaagttactgtccaggctgaccgagcggttcgtgcagggagtggacatgttcttagagacgttatggaaagtttggatggagctcttagaagtccttgggcttgacgtgtccaacctgtcacagtacttcagcccagcctcagtgtccaacagccccacccgggccctggtgctggttggtgtggttctcctggcctactggttcttgtctctgaccttgggcttcaccttcagcctcctccacctggtgtttggccgcttcttctggctcgtgcgtgtcatcctgttctccatgtcctgcgtgtatatcctacataagtacgagggcgagccagagcacgcagtgctaccgctctgcgtcgtggtggccatctacttcatgacggggcccatgggctactggcggggcagccccggtggcttttgcagccccagtgtggaggagaagctggaacacctggagaaccaggtgaggttgcttaacatccgcctcaacagggtgctcgagaaccttgaccgctccaaggacaagtgaaggtcagctgcctagccgtccaaccagctagtgatgtcaaaag

SEQ ID NO: 2642 - DNA, 3184 bp, Mus musculus
cacgagactggtcggtcctgtaggtgcagcagccaaggagcccggcggcgggcaggggacacgagcgggacccccccggctccgaggaactgcggccctagccgccgcgtcacgcatactccgggcgccgcgagacacacataacgatactagatttgcgctgcatcttggaattcatctacacttaaaatgccacctgcgattggagggccagtgggatacacccccccagatggaggctgggggtgggcagtgttagtcggagccttcatttctattggcttctcctatgcatttcccaaatccatcactgtcttctttaaagagatagaagttatattcagtgcaacgaccagtgaagtatcatggatatcatctataatgttggctgtcatgtatgctggaggtcctatcagcagtatcttggtgaataaatacggcagccgtccagtaatgatcgctggtggttgtctgtctggttgcggcttgatcgcagcttctttctgtaacacagtacaggaactttacttgtgcattggtgttattggaggtcttgggcttgctttcaacttgaacccagctctgactatgattggcaagtatttctacaagaagcgaccactggccaacggactggccatggcaggcagccctgtgttcctctctaccctggctccacttaatcaggctttctttgatatttttgactggagaggaagcttcctaattcttgggggcctcctcctaaattgttgtgtagctggatccctgatgagaccaatagggcctgagcaagtcaagctagaaaaactcaagtccaaagaatctctacaggaagctggaaaatctgatgcaaatacagatctcattggaggaagtcccaaaggagaaaagctgtccgtcttccaaacaattaacaaattcctggacttgtcgctgtttacccataggggctttttactgtacctgtctggaaatgtggtcatgttttttggactctttacccctttggtctttcttagtagttatggtaagagtaaggatttttccagtgagaaatcagccttccttctttccattttggcttttgttgatatggtagccagaccgtccatgggacttgcagccaacaccaagtggatcagacctcggatccagtacttttttgctgcttctgttgttgcaaatggagtgtgccatttgcttgcccctttgtctacaacctacgttgggttctgtgtctacgccggagtctttggatttgcctttggttggctcagctctgtattatttgaaacattgatggacctcattggaccccagaggttctccagtgctgtgggcttggtgaccattgtggaatgctgccctgtcctcctagggccaccacttttaggccgcctcaatgacatgtatggagactacaaatacacgtactgggcttgtggcgtgatcctcatcatcgcgggtatctatctcttcattggcatgggcatcaactatcgacttcttgccaaagaacagaaagcggaggagaagcagaaaagggaaggaaaagaggacgaggccagcaccgatgtcgacgagaagccaaaggagacgatgaaagctgcacagtcgccgcagcagcacagctccggggaccccacagaggaggagagccctgtctgacctgtgaagcctggagagagcagcgtgtgacccacgacatccaaaaccatcctgctggcctctagtctaccagtggtgctcagtgcagacagtggacatttgtgtggaaaacctaccgggtgttcattggtgggattttttttttcactccttaccaatgcctgaatttaaaatatactatgctttaggtagggagtggttggcaaaggatatgggaaagaagtagtgattttctttttgtttgtttgttttgttttaatcttagcttttaacagtgtcatgaagattataatatgtgccttaagttttagtttttagaactctttagagagccttaacttttaaaaccattctgctgaattcatttgttttaaatgtcattttaaaaggaaaaataacaactagcttgcttgaggtaactaaccttaatcttgttttgttgttgtttgtaatgctttgtcagacattgttactggaacatttatgaatagaggtattggttaaaagtcgcaggtttataaaatactgactaaagtatttttctagcattatagttgcctggcatatccacctgctaggtatatatttaagaaatttgaaacataaaattttgggaacatcttggcagttccagccacagcctgtcacctgctgggcacttctcaaatgcttactacagcctcgtgctgaagtgttatcactaaactgtcacctttgctcctattcagagacactgaaatcaactgcaaaaggttagtattaacatctacaaaacaactctttaacacgtctgatttaatgtatgcagtatttcaagcagcagctgaattcagtgtaggtttccccaaaccttagttacggtatgagaatcttaggtatgtgtgggtttgaggggctctgaggtgttggttcttaggtttgaacccagggccacaagcatgctaagtgcatgctgtaccactgagccacaacccacaggcaccctggaatccttctccttgacccctgaaaccttttctcttggtttttgatagttccatttataccactactagtttagagctgtatgtgggatgattcagtaccgactgaatggatgtgcttttgtttttttacattgtttttcagtatttgcaaaaccacgagggttagagtttggcctcagggaagccaataaagataaaatgggaggaagtttgctgagaacttgtatcatgcttacgattatttgacatagtcttacctccacaccttaactttcatgaccctttcactcacctgaaatgtagaaaaatgggttcagtgtaaggataagaggaaagatggaccagattggaactacagtgttttgggttttttttttttttaacctgatgtcttctgaatagaggcaggaaaaaataagacatatgacactgaattgtactcaatgtgtttaaaataccattgtaattgacagggtgaatatagatttaaaaccttgtgtaagaagctgactttttccaaataaaac

SEQ ID NO: 2643 - DNA, 874 bp, Mus musculus
ttcaagggacagtcactgcagcttctctagaggatctacagaactggcccgattctgaggttaagtaatattgcactttaagaggaactaatttctaggcttttcatcaaagaaggaaagtattgcttcatctatgctttccttagactaaaagctcattgcagaaaactactttaaaaaatcaacactgcagagtacaacatagtaaataaagtacctgcttattttataatcttagaggatattttattataagaaactctttagcccataattagtagaaagtgtatctgaaagtgcttatttcagtgatccaggatccgaaggtttccagatacaatcttgttctctaacacggctcctggggggatgtcaattctgtcaccatgatttgcaataataataactgttccctttagtgaaacattttttccaaatgtcacatctcctgaaacagtgaggtggtccagttccagcatatcgggtatactttcaaaccttcttagataatcttgaaccttggtaaaagaactgcctaatttaaccaagggcactgtagggaattcacgcttttcactcatggtcagagatcctgcgttaaggctatagaggtttgacatcacaagcaagagatctgatgtggttttcacaggcagaaaacgactccttggaacattaatacctaaagaattctcgaaacttttaattgcagctccaactgcagtttctaactgaattacattcaggcctccatccaatgtctctggattcacaatgatttccatgtcatggcatcttgtcctgaaagtcttttaactgctccaggagaaatcctaggttgttgtgttcaatatttacttttgaccagacttga

SEQ ID NO: 2644 - DNA, 463 bp, Mus musculus
ttttttttttttttttttgagtcattgattttccttttatttaaaggtcaagccatggtctctgcagcagatggagacactgagcgtgagatttggtccatttattatttctgtctgtccatctgtccgcgtgttttccagtacgcagactgcaatcccacagacgcttttcctccaagctcccttgggttggtatctcaggaaatagcgctgatccacggaatggaacgttacagagcacatgactccgctgtgaaatgacactacactcagtccttcattccaccgtgagaggttaaggtttctaattttatatggggtagaacaggaagtgtgaattatacaaactcaaagtgcagttacagacactgtaaatgaaaaccgacagtacaagctctgaaaacctggtgatgagccacagaatctggggaaattatcatcacgaaatcaagtctcatgcgcg

SEQ ID NO: 2645 - DNA, 419 bp, Mus musculus
ccagctgatggagctctatggccgagaaccagatttgagtttagacatcaaggaaaagtttgcaaaactatgcgaggagcatggaatcattagagaaaatatcattgacctaaccaatgtcaatcgctgcctcgaggcccgagaatgaagaatggcctgagcctccagtgttgagtggagacttttcaccaggactccagcatcatcccttcctatccatacagactcccatgccaaggttctgtgatctgctctccacctgtctcacagagaagtgcaatcccgttctctccagcatgttacctaggataactcatcaagaatcaaagactttctttaaatttctctttgccaacacatggaaattctccattgatttctttcctgtcctgttcaataaatgattacacttgcactta

SEQ ID NO: 2646 - DNA, 1307 bp, Mus musculus
cttcaaaatgtctactgtccacgaaatcctgtgcaagctcagcctggagggtgatcattctacacccccaagtgcctacgggtcagtcaaaccctacaccaacttcgatgctgagagggatgctctgaacattgagacagcagtcaagaccaaaggagtggatgaggtcaccattgtcaacatcctgacaaaccgcagcaatgtgcagaggcaggacattgccttcgcctatcagagaaggaccaaaaaggagctcccgtcagcgctgaagtcagccttatctggccacctggagacggtgattttgggcctattgaagacacctgcccagtatgatgcttcggaactaaaagcttccatgaagggcctggggactgacgaggactccctcattgagatcatctgctcccgaaccaaccaggagctgcaagagatcaacagagtgtacaaggaaatgtacaagactgatctggagaaggacatcatctctgacacatctggagacttccgaaagctgatggtcgcccttgcaaagggcagacgagcagaggatggctcagttattgactacgagctgattgaccaggatgcccgggagctctatgatgccggggtgaagaggaaaggaaccgacgtccccaagtggatcagcatcatgactgagcgcagtgtgtgccacctccagaaagtgttcgaaaggtacaagagctacagcccttatgacatgctggagagcatcaagaaagaggtcaaaggggacctggagaacgccttcctgaacctggtccagtgcatccagaacaagcccctgtacttcgctgaccggctgtacgactccatgaagggcaaggggactcgagacaaggtcctgattagaatcatggtctctcgcagtgaagtggacatgctgaaaatcagatctgaattcaagaggaaatatggcaagtccctgtactactacatccagcaagacaccaagggtgactaccagaaggcactgctgtacctgtgtggtggggatgactgaagggctcagcacagtggatcacccagaagtggctctacctgtgccccaacctggcgttctagagacttcgctctccactaatggacccctgagctcctccctgtgaggatgatgacagggctgccgaccctttccccatcttagctgcccttgcctggctttctcctcattctctcctttatgccaaagaagtgaacattccagggagtggggcgtcagtctgtgacatgagacacttcctcttatgtactgtgtcgtgaataaaccgtttttactttag

SEQ ID NO: 2647 - DNA, 311 bp, Mus musculus
gtatccatgtcatgctctccttttatggccttcatcacaacccaactgtgtggccaaatccagaggtgtttgatccttctcgatttgcaccagggtcttcccggcacagccactcattcctgcccttctcaggaggagcaaggaactgcattgggaaacagtttgcgatgaatgagctgaaggtggctgtggccctgaccctgctccgctttgagctgctgccagatcccaccagagtcccaatccccataccaagaattgtgttgaagtccaagaatgggatccacttgcatctcaaaaagctccaataa

SEQ ID NO: 2648 - DNA, 459 bp, Mus musculus
gaagaatattctcaggtctttgaaatgcttcttggtggagatccatcagtacgctggggtgacaagtcctataatttgatttcctttgctaatggaatatttggctgttgctgtgatcatgctccttacgatgcaatggtcatggtgaacattgcacattatgttgatgagagagtcctagagacagaaggaagatggaagggttcagaaaaagtccgggacataccattgccagaggagctggtcttcactgtggatgagaaaatactgaatgatgtatcccaagccaaagcccaacatctcaaagctgcgtcagatctgcagatagcagcatctaccttcacatcttttggcaaaaagctcaccaaggaggaagcccttcaccctgatacctttattcagctcgctcttcagcttgcctactacagacttcatggacgccctggttgctgctatgag

SEQ ID NO: 2649 - DNA, 3868 bp, Mus musculus
aatgacatcgactccattaagaagaaagaccttcaccacagcagaggagatgagaaagcacagggtgtggagaccctccctccaggcaaagtccggtggccagactttaaccaggaggcatacgttggcggtacaatggttcgctctgggcaggacccctacgcacgcaacaagttcaaccaggtggagagtgacaagctgcacatggacagaggcatccccgacacccggcatgaccagtgtcagcgcaagcagtggcgagtggacctgccagccaccagcgtggtgatcacattccacaatgaagccaggtcagccctgctgcggacggtggtcagtgtcctcaagaggagtccacctcacctcatcaaggagataatcctggtggatgactacagcaacgaccctgaggacggggccctcttggggaaaatcgagaaggtgcgggtcctcagaaatgaccggagagaaggtctaatgcgctctcgggtccggggtgccgacgccgcccaggccaaggtcctgaccttcctagacagtcactgcgagtgtaacgagcgatggctggagccactcttggagcgggttgctgaggacaggacccgagttgtatcccccattatcgatgtcattaacatggataatttccagtatgtgggcgcctctgctgacctcaagggtggttttgactggaacttggtgttcaagtgggattacatgacaccagagcagaggcgatcccggcaggggaacccagttgcccctataaaaactccgatgatcgctggcggcctcttcgtgatggacaagctctattttgaagagctggggaagtacgacatgatgatggacgtgtggggaggagagaacttggagatctcattccgagtgtggcagtgtggtggcagcctggagatcatcccgtgcagccgcgtgggccacgtgttccggaagcagcatccctacacgttccccggtggcagcggcactgtctttgcccggaacacacgccgggcagctgaagtctggatggatgagtacaaacatttctactacgcagcggtgccttctgcacgaaacgtgccctatgggaatattcagagcaggctggagctcaggaaaaagctgggctgcaagcccttcaagtggtacctggacaacgtctacccggagctgagggttccagaccaccaggacatagctttcggggccttacagcagggaaccaactgcctggacaccttgggacacttcgcggatggagttgttggaatttatgagtgtcacaacgctggaggaaaccaggaatgggccttgacaaaggagaagtcggtgaagcacatggacctgtgccttactgtggtggaccgttcgcctgggtcactcatcaggctgcagggctgccgggagaacgacagcagacagaagtgggagcagatcgaaggcaactccaaactgcgacacgtgggcagcaacctgtgcctggatagccgcactgccaagagcggaggcctgagtgtggaggtgtgtggcccggccctgtcacaacagtggaagttctcactcaacctgcagcaataagaggcccccggggcccaacgtccacccgcacaccggcccagtttgttgatcacgtaattacgtttctgaaactttccgcaaaactatatacctcagtgttccatcacggtctgacagtcttaagtctcaagtcttcatcgaggcatgagcggggcagacagcagtgcagaagaggaaaggagcccctggggctcaggacagagggtccctcccaaggctggcgccctctgcctccctctttctgcttcctgctcacaccccagcactggccggaacaagtgggcaagcagcaatcatgtttatatctcagacagaggaagcaggggcaggcgcccccacagcgagagctcgccaatctccactctgttttacctattcaaaatcgtgtgtgtgtgtgtgaaccaggcatggtggccagtgcctgtaatcccatcactcaggaggctgaggcaggcaaggccctgtctaaggaaaaaaaaaaaaatgatttccacaaagctggcctttccttgtctgtccctgcacccgggctcagctggcctcccagccatatcccctcttccattgacatacttgctgtatttgaacgtgaactttcctctggtggacactaaatagagataaagagaatcatggtccgttccctacgcttccccgacatcaccttgtgaaccctgcaacgcagcgcagcccagagcaaaggtgcatctctggggcctcaccagccggcccacgctgctcctccagtaggggcatccccaaaccactggccccgcccacaagcgtcaatgtttaacttcagcgaggggatcgcagctgggttagaaagtctgctttgtgcccattgtcatctgtaaaactaaataggtcacctcttttggcaagtattgctttgggttttcttttaaaattaggtttcttttctttaggaaaactcaaccccacagcttctaactaatgtgagccagcaggaccctactgccttgtgacagaccagggacactggacagctgtcacccactatccctaggctcacagtggtttgaaaccctgtatgttgggtctttggtactaagctgccggcagagcacagaagagcagctcttcagcctgtgggtggaccccacgtgcccgtagccctggtgtgggtaatacccccggtatatccacaggcaactgcaggaattatgggtagagttcagatcacaaggcctgcgcactcccactgaggacctaggcatgtgttagccacagaggtgacctggatgtggggaagtgacacctggtgggctgcaggcatcatacgtgctcatctcgggtatcccagagatctcgggaatcagagttccaggtggtcagagggcctgtaggtgagtgctgtgcctcccgcctgctccagaagggggggtagctggtttcttctacctgaggggctccatgtgtgtactcaccatgtgtgtattcgccatgaccatggaccctctgcgaaggcctggccaggtgctgaccctctgtctttctacccctgccaagcaaccaacagaagagacattgtaacagacagggtgcccacatgtctaattaagttcatacaatgtccaccttccaatgtaggctctgggaactgtcactcccaggtacaggtgcaaagctgtcaaggacaaggcaggagtttgctggagtccggtcaccacgacctttgctaaccctgacacttctgcactgcatctatcagagtgactccacagatgtgagacaacatggggcgtcccaaccacacgtgtaccccaccccaccctgtggcctcttaacctttgtaccatctgattgtctggccaccagggtgccaactcaacccagctccgagcagagggggtgtgggcagggcccatcggtgagccatgtttacatgacagtgtgccaaagtgactcgccgagcttgtattgctttgtagtcatctgggctatcccaccctcccaactcctgtttttaaaactaaaaactcccaggagccctgggcgcacacaggcaaaggtggctgtcttctgtggtggtccttgagtctccgtgaagctgaaaatgatggtgtctgtgagtatgttttgcaaattcaaaatatagtttggtaattttttttccagttgatttttaaaaaaacaaaacaaaaaactgctgtacagagcttgtactttgtccattttatagatggaaaccatccttgaaattgtttaacttaaataaagagaagatactttatagataaaaaaaaaaaaaaaaaaaaaaaaa

SEQ ID NO: 2650 - DNA, 96 bp, Mus musculus
ggagtgtagccacgatcacaagaaagacgtggtcctgacagacagacaatcctattccctaccaaaatgaagatgctgctgctgctgtgtttggga

SEQ ID NO: 2651 - DNA, 1484 bp, Mus musculus
gagtaccccgcgcgcggcgggcatgataacaagcccccggagttcccacgctggtaatgtggcagtccataggcaccgtattgcgtgagacgaaccggacggcgccgggccatcattcgtcggcccgagcgatggcgctgttccggggaatgtggagcgtgctaaaagcactggggcgcacgggggtcgagatgtgcgcgggctgcgggggtcgcatcccctcgtctatcagtcttgtctgtattccgaagtgtttttccagcatgggtagctatccaaagaaacctatgagttcataccttcgattttccacagaacagctacccaaatttaaagctaaacacccagatgcaaaactttcagaattggttaggaaaattgcagccctgtggagggagctaccagaagcagaaaaaaaggtttatgaagctgattttaaagctgagtggaaagcatacaaagaagctgtgagcaagtataaagagcagctaactccaagtcagctgatgggtatggagaaggaggcccggcagagacggttaaaaaagaaagcactggtaaagagaagagaattaattttgcttggaaaaccaaaaaagacctcgttcagcatataacatttatgtatctgaaagcttccaggaggcaaaggatgattcggctcagggaaaattgaagcttgtaaatgaggcttggaaaaatctgtctcctgaggaaaagcaggcatatattcagcttgctaaagatgataggattcgttacgacaatgaaatgaagtcttgggaagagcagatggctgaagttggacgaagtgatctcatccgtcgaagtgtgaaacgatccggagacatctctgagcattaagatggaagacggagttgtcattgggattaggcccaagaaaccagttaggtctcaaagccttaaagtgtcaaactagaacggataaaggtggttaacctttgacattcagatcatttttctgtagccatggactttctgttaatactttgagccttgacagaagatgatgctgagttctgccttttgcttaagaactggaacggagactgtccatgcatctgcatgcagtggtgaatcattctgcatttgatgggctagatagactgtgaagtgactttcacactggtgacagttgtgtggtggttttgtgatgtttttacactgatgaccgttacatatgggtgtggcccttgggtcccaggccggacctgctctcccagctgtggcagagctgtggataactgcattttcaaagaagctgccaggctttcctagatgaaatgattcctagacataaatcatgtgtaagttgatgtttgtatataataagcgattgctgatgtcctgatagcattttatagtagtaacagagagatttacacatctttctcaaattaagaaattatgtaccaagtctatgcataggtttttcttgcatagaataaaaactctaattttcc

SEQ ID NO: 2652 - DNA, 435 bp, Mus musculus
  misc_feature 225: n = A,T,C or G
tttttttttttttttttgcactaaataagcgtgactttatttttctttcacaaaatacaaagttttgcaccacattatagtagtgttttaacagaggaaactcccaaggtgttcactgggagaggggagagttatacaatattgatctgtgtcattcttaatacttaaaggaaactgtcatgacaaaggatgctgaccaggtccaacatgcaggttattgcttanaacttgcataaacttcaaaatggcacacatacaaagtatacaaacatttcaaaagtttaatgaaagtactgaaaagacatcccttcaaacaaagcataaccagaaaccaaatcgaagagcctaggttgtactttaattactgatataccttagtaacactgatttatatataaattatgtggtcttatgtttttgtaataaaactcttca

SEQ ID NO: 2653 - DNA, 2618 bp, Mus musculus
acagttggccttccctctgggaacacaccctcggtcaacaggggaaatccggcaaggcgctcagcgatctctgatccagaccttccaaaaggaagaaaggtggcaccagagttcctgcctctctccacaccattgcaattatgcctcctcagctgcataacggtctggacttctctgccaaggttatccagggcagcctcgacagcctgccccaggcagtgaggaagttcgtggaaggcaatgctcagctgtgccagccggagtatatccacatctgcgatggctccgaggaggagtacgggcagttgctggcccacatgcaggaggagggtgtcatccgcaagctgaagaaatatgacaactgttggctggctctcactgaccctcgagatgtggccaggatcgaaagcaagacagtcatcatcacccaagagcagagagacacagtgcccatccccaaaactggcctcagccagctgggccgctggatgtcggaagaggactttgagaaagcattcaacgccaggttcccagggtgcatgaaaggccgcaccatgtatgtcatcccattcagcatggggccactgggctcgccgctggccaagattggtattgaactgacagactcgccctatgtggtggccagcatgcggatcatgactcggatgggcatatctgtgctggaggccctgggagatggggagttcatcaagtgcctgcactctgtggggtgccctctccccttaaaaaagcctttggtcaacaactgggcctgcaaccctgagctgaccctgatcgcccacctcccggaccgcagagagatcatctcctttggaagcggatatggtgggaactcactactcgggaagaaatgctttgcgttgcggatcgccagccgtctggctaaggaggaagggtggctggcggagcatatgctgatcctgggcataactaaccccgaaggcaagaagaaatacctggccgcagccttccctagtgcctgtgggaagactaacttggccatgatgaaccccagcctgcccgggtggaaggtcgaatgtgtgggcgatgacattgcctggatgaagtttgatgcccaaggcaacttaagggctatcaacccagaaaacgggttttttggagttgctcctggcacctcagtgaagacaaatccaaatgccattaaaaccatccagaaaaacaccatcttcaccaacgtggccgagactagcgatgggggtgtttactgggaaggcatcgatgagccgctggccccgggagtcaccatcacctcctggaagaacaaggagtggagaccgcaggacgcggaaccatgtgcccatcccaactcgagattctgcacccctgccagccagtgccccattattgaccctgcctgggaatctccagaaggagtacccattgagggtatcatctttggtggccgtagacctgaaggtgtcccccttgtctatgaagccctcagctggcagcatggggtgtttgtaggagcagccatgagatctgaggccacagctgctgcagaacacaagggcaagatcatcatgcacgacccctttgccatgcgacccttcttcggctacaacttcggcaaatacctggcccactggctgagcatggcccaccgcccagcagccaagttgcccaagatcttccatgtcaactggttccggaaggacaaagatggcaagttcctctggccaggctttggcgagaactcccgggtgctggagtggatgttcgggcggattgaaggggaagacagcgccaagctcacgcccatcggctacatccctaaggaaaacgccttgaacctgaaaggcctggggggcgtcaacgtggaggagctgtttgggatctctaaggagttctgggagaaggaggtggaggagatcgacaggtatctggaggaccaggtcaacaccgacctcccttacgaaattgagagggagctccgagccctgaaacagagaatcagccagatgtaaatcccaatgggggcgtctcgagagtcaccccttcccactcacagcatcgctgagatctaggagaaagccagcctgctccagctttgagatagcggcacaatcgtgagtagatcagaaaagcaccttttaatagtcagttgagtagcacagagaacaggctaggggcaaataagattgggaggggaaatcaccgcatagtctctgaagtttgcatttgacaccaatgggggttttggttccacttcaaggtcactcaggaatccagttcttcacgttagctgtagcagttagctaaaatgcacagaaaacatacttgagctgtatatatgtgtgtgaacgtgtctctgtgtgagcatgtgtgtgtgtgtgtgtgtgtgtgtgtgtgtgtgtgtgtgtgtgtgtgtacatgcctgtctgtcccattgtccacagtatatttaaaacctttggggaaaaatcttgggcaaatttgtagctgtaactagagagtcatgttgctttgttgctagtatgtatgtttaaattatttttatacaccgcccttacctttctttacataattgaaattggtatccggaccacttcttgggaaaaaaattacaaaataaa

SEQ ID NO: 2654 - DNA, 1068 bp, Mus musculus
atgccggcccacatgctccaagagatctccagttcttacacgaccaccaccaccatcactgcacctccctccggaaatgaacgagagaaggtgaagacagtgcccctccacctggaagaagacatccgtcctgaaatgaaagaagatattcacgaccccacctatcaggatgaggagggacccccgcccaagctggagtacgtctggaggaacatcattctcatggtcctgctgcacttgggaggcctgtacgggatcatactggttccctcctgcaagctctacactgccctcttcgggattttctactacatgaccagcgctctgggcatcacagccggggctcatcgcctctggagccacagaacttacaaggctcggctgcccctgcggatcttcctaatcattgccaacaccatggcgttccaaaatgacgtgtacgactgggcccgagatcaccgcgcccaccacaagttctcagaaacacacgccgaccctcacaattcccgccgtggcttcttcttctctcacgtgggttggctgcttgtgcgcaaacacccggctgtcaaagagaagggcggaaaactggacatgtctgacctgaaagccgagaagctggtgatgttccagaggaggtactacaagcccggcctcctgctgatgtgcttcatcctgcccacgctggtgccctggtactgctggggcgagacttttgtaaacagcctgttcgttagcaccttcttgcgatacactctggtgctcaacgccacctggctggtgaacagtgccgcgcatctctatggatatcgcccctacgacaagaacattcaatcccgggagaatatcctggtttccctgggtgccgtgggcgagggcttccacaactaccaccacaccttccccttcgactactctgccagtgagtaccgctggcacatcaacttcaccacgttcttcatcgactgcatggctgccctgggcctggcttacgaccggaagaaagtttctaaggctactgtcttagccaggattaagagaactggagacgggagtcacaagagtagctga

SEQ ID NO: 2655 - DNA, 703 bp, Mus musculus
ttcgcagcatgccaccatacaccattgtctacttcccagttcgagggcggtgtgaggccatgcgaatgctgctggctgaccagggccagagctggaaggaggaggtggttaccatagatacctggatgcaaggcttgctcaagcccacttgtctgtatgggcagctccccaagtttgaggatggagacctcaccctttaccaatctaatgccatcttgagacaccttggccgctctttggggctttatgggaaaaaccagagggaggccgcccagatggatatggtgaatgatggggtggaggaccttcgcggcaaatatgtcaccctcatctacaccaactatgagaatggtaagaatgactacgtgaaggccctgcctgggcatctgaagccttttgagaccctgctgtcccagaaccagggaggcaaagctttcatcgtgggtgaccagatctcctttgccgattacaacttgctggacctgctgctgatccaccaagtcctggcccctggctgcctggacaacttccccctgctctctgcctatgtggctcgcctcagtgcccggcccaagatcaaggcctttctgtcctccccggaacatgtgaaccgtcccatcaatggcaatggcaaacagtagtggactgaagagacaagagcttcttgtccccgttttcccagcactaataaagtttgtaagac

SEQ ID NO: 2656 - DNA, 423 bp, Mus musculus
actttcatgttcgagggccatgacaccacagctagtggtatctcctggatcttctatgctttggccacaaatcctgaacatcaacagagatgcaggaaggagatccaaagtctcctaggagatgggacttctatcacctggaatgacctggacaagatgccctatactaccatgtgcatcaaggaggccctgaggatctaccctcctgtaccaagtgtgagcagagagctcagctcacctgtcacctttccagatggacgttctttacccaaaggtatccatgtcatgctgtccttttatggccttcatcacaacccaactgtgtggccaaatccagaggtgtttgatccttctcgatttgcaccagggtcttcccggcacagccactcattcctgcccttctcaggaggagcaaggaactgc

SEQ ID NO: 2657 - DNA, 503 bp, Mus musculus
tgaaatgcaatagctcgcttttaataacaacatacaaaatctggagaaagccccaaagtagtgcccactcccagagaccaaggaatggagccagacaggagccacgctcccatgcctgctctccaacccagaggggctgagctcgacatacacagctgagctctctggatctggggcactagacccagcagcaacaggaggctcagcttccagtttattccagttgggtagaggaggcctcagagcacactgccagggtgaggcgtgggctgatgacccacatggcctcttgcacccaccgaggacaatgcagactcatgagaagcctggtctcctctctgcctagaaagccaggctgaagacaagaccagcatgctgaccaaagcacggggcaaaggggacagcaccagcctcgctctaagctctggccccagggtggttctgcctacaaccttcccgggagggttccacccgggtccccatcagacatccctcagcagaag

SEQ ID NO: 2658 - DNA, 3129 bp, Mus musculus
cgccgggcggcttggggggccgccgcccgccggactccgcgtccgccccgccaccggtgccagccatggagccccgagccccccgccgccgacacacccaccagcgcggctacctgctgacgcgggacccgcatctcaacaaggacttggcttttactctggaagagagacagcagttgaacattcatggattgttgccgccctgcatcatcagccaggagctccaggtccttagaataattaagaatttcgaacgactgaactctgacttcgacaggtatctcctgttaatggacctgcaagacagaaatgagaagctcttctacagcgtgctcatgtctgatgttgaaaagttcatgcctattgtttacacccccaccgtgggcctcgcatgccagcagtacagtttggcattccggaagccaagaggcctctttattagtatccatgacaaagggcacattgcttcagttcttaatgcatggccagaggatgtcgtcaaggctattgtggtaactgatggagagcgcatccttggcttgggagaccttggctgtaatgggatgggcatccctgtgggtaaactggccctttacacggcatgtggaggggtgaacccacaacagtgtctacccatcactttggatgtgggaacagaaaatgaggagttacttaaggatccactgtacatcgggctgcggcaccggcgagtcagaggccctgagtatgacgccttcctggatgagttcatggaggcagcgtcttccaaatatggcatgaattgccttattcagtttgaagattttgccaatcggaatgcatttcgtctcctgaacaagtatcgaaacaagtattgcacatttaacgatgatattcaaggaacagcgtctgttgcggttgcgggtctccttgcagctcttcgaataaccaagaacaagctctctgatcagacagtgctgttccagggagctggagaggctgccttggggattgctcacttggttgttatggccatggagaaagaaggtttatcaaaggagaatgctagaaagaagatatggttggttgactcaaaaggactaatagttaagggtcgtgcatctctcacagaagagaaagaggtgtttgcccatgaacatgaagaaatgaagaatctggaagccattgttcaaaagataaaaccaactgccctcataggagttgctgcaattggtggtgctttcactgaacaaattctcaaggatatggctgccttcaacgagcggcccatcatctttgctttgagtagtccgaccagcaaagcggagtgctctgcagacgagtgctacaaggtgaccaagggacgtgcaatctttgccagcggcagtccttttgatccagtcactctcccagatggacggactctgtttcctggccaaggcaacaattcctacgtgttccctggagttgctcttggggtggtggcctgcggactgagacacatcgatgataaggtcttcctcaccactcgtgaggtcatatctcagcaagtgtcagataaacacctgcaagaaggccggctctatcctcctttgaataccattcgaggcgtttcgttgaaaattgcagtaaagattgtgcaagatgcatacaaagaaaagatggccactgtttatcctgaaccccaaaacaaagaagaatttgtctcctcccagatgtacagcactaattatgaccagatcctacctgattgttatccgtggcctgcagaagtccagaaaatacagaccaaagtcaaccagtaacgcaacagctaggatttttaactttattagtaaaatcttgaagttttcatgatctttaagggtcagaatcttttatgatgattcatagagagcttagaataaggtgattttagtttaataacaactcatgggagtctattaggataaattaggataaatttcacaccagacggttttgtttcacttactgtggatatttatgttttctctgttgattattctctttatgaattctgtttaaaagctactgtacctgctgctagaaagtcctcactgatatgtaggaggctaatggaagacccactagtaataaattaatatagcataacttgattatatttaagtgcctacagttctttcttgactattttgctaaaatctctaaacagaaaagataaacacaaacttgggtatagctgaacttttactaaacagaagcactactttgttgcctagagaaaaatcttctcaggacttttattccaggcctccgttagctttgttctctttgtacacctgactcaacacctctgagaaagctcactgctgtttacagtacccttgcgtagccttagctcatcagcgtcttctgtcgttgttatgttatatcccatagagtagagctctcgaacccaaacactccataggaaacaccctttctcatctctgagcaaccctggccctgtcgagatatcgggtgtttttgttagtgtagcctgggacgtgagagggctgcaggagggtccttgagacggggccctggaacccacctctgagacaagggagtcagatgccagacagtggttcccagacaagctcaggcctccatgaagatcacctgctctaatgtccctgtgcttagttcggaggactgagagctcatggcatgagtaaatacatctctcaatgcctacctttctatcagatattaaaatatgttaattaccaaaaccattctctgagaaaaaaaaaaccaagcctttccagtgtattaatttactggacacgttgataatggcatgactagaaacagccttaactcctaagtcaggttcaagaacattctgtgtatctagagactcctgactttgaagttgctttaaagcctgtgtggtttccggcgggcaggctctgtacagtgagctccttgaagctttcaaggtgtgagctaaaacgggtacagacttcctaatgacaacattgtgactaacggtttcaacagtgtagttatttgagaaagccatttcagaatttctatcttttcttgtatgtttccatgttgtcaggtagttgtaaatgaatgtatttacctatgcaaaagatttattaaagcctagagaatatg

SEQ ID NO: 2659 - DNA, 323 bp, Mus musculus
attcggcacatggggaaggctttcaggtggcttctgtgaaggagcctgtcactggctctaggctgtaaacaggcctgaggtccaaggcttgtcccctgtcttttcctgtctcaccgacctcatctaggtacgtaggtgccatgcagccccggacgctcctcactgtggccctcttggctctcctggcatctgcccgagctgaagaggtagagggatccttgctgctgggctctgtacagggctacatggaacaagcctccaagacggtccaggatgcgctaagtagcgtgcaggagtccgatatagctgtggtggccagggcg

SEQ ID NO: 2660 - DNA, 1892 bp, Mus musculus
gtcctggactgactcccacaactctgccagtctccagcccctgcccttcagtggtacagatggcgttctcccagtacatctccttagccccagagctgctactggccactgccatcttctgtttagtgttctggatggtcagagcctcaaggacccaggttcccaaaggcctgaagaatccacccggaccctggggcttgcccttcattgggcacatgctgactgtggggaagaacccacacctgtcactgacacggctgagtcagcagtatggggacgtgctgcagatccgcatcggctccactcctgtggtggtgctgagcggcctgaacaccatcaagcaggccctggtgaggcagggagatgacttcaagggccgaccagacctctacagcttcacacttatcactaacggcaagagcatgactttcaacccagactctggacccgtgtgggctgcccgccggcgcctggcccaggatgccctgaagagcttctccatagcctcggacccgacgtcagcatcctcttgctatttggaggagcacgtgagcaaggaggctaaccatctcgtcagcaagcttcagaaggcgatggcagaggttggccacttcgaaccagtcagccaggtggtggaatcggtggctaacgtcattggtgccatgtgctttgggaagaacttcccccggaagagcgaggagatgctgaacatcgtgaataacagcaaggactttgtggagaatgtcacctcagggaatgcagtggacttcttcccggtcctgcgctacctgcccaacccggccctcaagaggtttaagaccttcaatgataacttcgtgctgtttctgcagaaaactgtccaggagcactaccaagacttcaacaagaacagtatccaagacatcacaagtgccctgttcaagcacagcgagaactacaaagacaatggcggtctcatccccgaggagaagattgtcaacattgtcaatgacatctttggagctggctttgacacagtcaccacagccatcacctggagcattttgctacttgtgacatggcctaacgtgcagaggaagatccatgaggagctggacacggtggttggcagggatcggcaaccacggctttctgaccgtccccagctgccatatctagaggccttcatcctggagatctaccgatacacatcctttgtccccttcaccatcccccacagcacaacgagggacacctcactgaatggcttccacattcccaaggagcgctgtatctacataaaccagtggcaggtcaaccatgatgagaagcagtggaaagacccctttgtgttccgcccagagcggtttcttaccaataacaactcggccatcgacaagacccagagcgagaaggtgatgctcttcggcttgggaaagcgccggtgcattggggagatcccggccaagtgggaagtcttcctcttcttagccatcctgctgcagcatctggagtttagtgtgccaccgggtgtgaaggtggacctgacacccaactatgggttgaccatgaagcccgggacctgtgaacacgtccaggcatggccacgcttttccaagtgaagattgtcgaggcatcggtggggccgtcacccttgtttcttttccttttttaaaaaaaaaaaaaaaacagcttttttttttttgagagatacaattctttccccatttaattcatctccaagcaattttacaatagtgtctatcatgttcaccccataacccatactcattaggacttatgatttaagattcctcctaccctgtcttgcttgccgcacctcatgctaatctagtttttgactcaatagatttgcctactctggctgtctcatataaatcgaatgaattatg

SEQ ID NO: 2661 - DNA, 1961 bp, Mus musculus
gcagcctgcggagtgaagcgccgccatgtacgccctcgccctcttcgccagccttctggccaccgctctgaccagccctgtccaagacccgaagacatgctctgggggctcagcagtgctgtgcagagatgtgaagacggcggtggactgtggggccgtgaagcactgccagcagatggtctggagcaagcccacagcgaaatcccttccttgcgacatatgcaaaactgttgtcaccgaagctgggaacttgctgaaagataatgctacgcaggaggagatccttcattacctggagaagacctgtgagtggattcatgactccagcctgtcggcctcgtgcaaggaggtggttgactcttacctgcctgtcatcctggacatgattaagggcgagatgagcaaccctggggaagtgtgctctgcgctcaacctctgccagtcccttcaggagtacttggccgagcaaaaccagaaacagcttgagtccaacaagatcccggaggtggacatggcccgtgtggttgcccccttcatgtccaacatccctctcctgctgtaccctcaggatcacccccgcagccagccccaacctaaggctaacgaggacgtctgccaggactgtatgaagctggtgtctgatgtccagactgctgtgaagaccaactccagctttatccagggcttcgtggaccacgtgaaggaggattgtgaccgcttggggccaggcgtgtctgacatatgcaagaactacgtggaccagtattccgaggtctgtgtccagatgttgatgcacatgcaggatcagcaacccaaggaaatctgtgtgctggctggcttctgtaatgaggtcaagagagtgccaatgaagactctggtccctgccaccgagaccattaagaacatcctccctgccctggagatgatggacccctatgagcagaatctggtccaggcccacaatgtgattttatgccagacctgtcagtttgtgatgaataagttttctgagctgattgtcaataatgccactgaggagctcctagttaaaggtttgagcaacgcatgcgcactgctccccgatcctgccagaaccaagtgccaggaggtggtgggaacatttggcccctccctgttggacatctttatccatgaggtaaaccccagctctctgtgcggtgtgatcggcctctgtgctgcccgcccggagttggtggaggcacttgagcagcctgcgccagccattgtatctgcactgctcaaagagcccacaccgccaaagcagcccgcacagcccaagcagtcggcattgcccgcccatgtgcctcctcagaagaatggtgggttctgtgaggtgtgcaagaaacctgtcctctatttggaacataacctggagaaaaacagcaccaaggaggaaatcctggccgcacttgagaagggctgcagcttcctgccagacccttaccagaagcagtgcgatgactttgtggctgagtatgagcccttgctattggagatcctcgtggaagtgatggatcctggatttgtgtgctcgaaaattggagtttgcccttctgcctataagctgctgctgggaaccgagaagtgtgtctggggccctagctactggtgtcagaacatggagactgccgcccgatgcaatgctgtcgatcattgcaaacgccatgtgtggaactagtttcccagctgcagaagtcacctacttgtgggtctagggtaatgaacacatagatctatttgacttaataagtaggaaccccctttgcccttcccccatctcctctcccttactgtagcatttctgtcatgtaagaggttctgacagcaccttccgtgtcccctttctgctcgaaggatgaggataccttgggcatcagctccccggctgcccttttcacccacctgctggaggggggtggtgagccagagggcaggagcat

SEQ ID NO: 2662 - DNA, 454 bp, Mus musculus
gcccagaggctcaatgttaagccattgcacgaattgcagcatttgctgatgctgccgtagaccccattgattttccacttgcgcctgcatatgccgtacctaaggttcttaaatatgcaggactgaaaaaagaagacattgccatgtgggaagtaaatgaagcattcagtgtggttgtgctagccaacattaaaatgctggagattgacccccaaaaagtaaatatccacggaggagctgtttctctgggccatccaattgggatgtctggagcccggattgttgttcatatggctcatgccctgaagccaggagagttcggtctggctagtatttgcaacggaggaggaggtgcttccgccctgctgattgagaagctgtagacaacctgttttaggagacagttccatgtgaccggctgaagtaaatgtgactcccttgggccaggttatat

SEQ ID NO: 2663 - DNA, 3947 bp, Mus musculus
cagtgcacagagcctcctcggctgaggggacgcgaggactgtcctcgccgccgtcgcgggcagtgtctagccaggccttgacaagctagccggaggagcgcctaggaacccgagccggagctcagcgagcgcagcctgcagctcccgcctcgccgtcccggggggcgtcccgcctcccaccccgcctctggacttgtctctttctccgcgcgcgcggacagagcgggcgcttaggcccgagcgagcccgggggccgccggccgggaagacaacgcgggcaccgattcgccatggagggcgccggcggcgagaacgagaagaaaaagatgagttctgaacgtcgaaaagaaaagtctagagatgcagcaagatctcggcgaagcaaagagtctgaagttttttatgagcttgctcatcagttgccacttccccacaatgtgagctcacatcttgataaagcttctgttatgaggctcaccatcagttatttacgtgtgagaaaacttctggatgccggtggtctagacagtgaagatgagatgaaggcacagatggactgtttttatctgaaagccctagatggctttgtgatggtgctaacagatgacggcgacatggtttacatttctgataacgtgaacaaatacatggggttaactcagtttgaactaactggacacagtgtgtttgattttactcatccatgtgaccatgaggaaatgagagaaatgcttacacacagaaatggcccagtgagaaaagggaaagaactaaacacacagcggagcttttttctcagaatgaagtgcaccctaacaagccgggggaggacgatgaacatcaagtcagcaacgtggaaggtgcttcactgcacgggccatattcatgtctatgataccaacagtaaccaacctcagtgtgggtacaagaaaccacccatgacgtgcttggtgctgatttgtgaacccattcctcatccgtcaaatattgaaattcctttagacagcaagacatttctcagtcgacacagcctcgatatgaaattttcttactgtgatgaaagaattactgagttgatgggttatgagccggaagaacttttgggccgctcaatttatgaatattatcatgctttggattctgatcatctgaccaaaactcaccatgatatgtttactaaaggacaagtcaccacaggacagtacaggatgcttgccaaaagaggtggatatgtctgggttgaaactcaagcaactgtcatatataatacgaagaactcccagccacagtgcattgtgtgtgtgaattatgttgtaagtggtattattcagcacgacttgattttctcccttcaacaaacagaatctgtgctcaaaccagttgaatcttcagatatgaagatgactcagctgttcaccaaagttgaatcagaggatacaagctgcctttttgataagcttaagaaggagcctgatgctctcactctgctggctccagctgccggcgacaccatcatctctctggattttggcagcgatgacacagaaactgaagatcaacaacttgaagatgttccattatataatgatgtaatgtttccctcttctaatgaaaaattaaatataaacctggcaatgtctcctttaccttcatcggaaactccaaagccacttcgaagtagtgctgatcctgcactgaatcaagaggttgcattaaaattagaatcaagtccagagtcactaggactttcttttaccatgccccagattcaagatcagccagcaagtccttctgatggaagcactagacaaagttcacctgagcctaacagtcccagtgaatattgctttgatgtggatagcgatatggtcaatgtattcaagttggaactggtggaaaaactgtttgctgaagacacagaggcaaagaatccattttcaactcaggacactgatttagacttggagatgctggctccctatatcccaatggatgatgatttccagttacgttcctttgatcagttgtcaccattagagagcaattctccaagccctccaagtatgagcacagttaccgggttccagcagacccagttacagaaacctaccatcactgccactgccaccacaactgccaccactgatgaatcaaaaacagagacgaaggacaataaagaagatattaaaatactgattgcatctccatcttctacccaagtacctcaagaaacgaccactgctaaggcatcagcatacagtggcactcacagtcggacagcctcaccagacagagcaggaaagagagtcatagaacagacagacaaagctcatccaaggagccttaacctgtctgccactttgaatcaaagaaatactgttcctgaggaagaattaaacccaaagacaatagcttcgcagaatgctcagaggaagcgaaaaatggaacatgatggctccctttttcaagcagcaggaattggaacattattgcagcaaccgggtgactgtgcacctactatgtcactttcctggaaacgagtgaaaggattcatatctagtgaacagaatggaacggagcaaaagactattattttaataccctccgatttagcatgcagactgctggggcagtcaatggatgagagtggattaccacagctgaccagttacgattgtgaagttaatgctcccatacaaggcagcagaaacctactgcagggtgaagaattactcagagctttggatcaagttaactgagcgtttcctaatctcattccttttgattgttaatgtttttgttcagttgttgttgtttgttgggtttttgtttctgttggttatttttggacactggtggctcagcagtctatttatattttctatatctaattttagaagcctggctacaatactgcacaaactcagatagtttagttttcatcccctttctacttaattttcattaatgctctttttaatatgttcttttaatgccagatcacagcacattcacagctcctcagcatttcaccattgcattgctgtagtgtcatttaaaatgcacctttttatttatttatttttggtgagggagtttgtcccttattgaattatttttaatgaaatgccaatataattttttaagaaagcagtaaattctcatcatgatcataggcagttgaaaattttttactcatttttttcatgttttacatgaaaataatgctttgtcagcagtacatggtagccacaattgcacaatatattttctttaaaaaaccagcagttactcatgcaatatattctgcatttataaaactagtttttaagaaattttttttggcctatggaattgttaagcctggatcatgaagctgttgatcttataatgattcttaaactgtatggtttctttatatgggtaaagccatttacatgatataaagaaatatgcttatatctggaaggtatgtggcatttatttggataaaattctcaattcagagaagttatctggtgtttcttgactttaccaactcaaaacagtccctctgtagttgtggaagcttatgctaatattgtgtaattgattatgaaacataaatgttctgcccaccctgttggtataaagacattttgagcatactgtaaacaaacaaacaaaaaatcatgctttgttagtaaaattgcctagtatgttgatttgttgaaaatatgatgtttggttttatgcactttgtcgctattaacatccttttttcatatagatttcaataagtgagtaattttagaagcattattttaggaatatagagttgtcatagtaaacatcttgttttttctatgtacactgtataaatttttcgttcccttgctctttgtggttgggtctaacactaactgtactgttttgttatatcaaataaacatcttctgtggaccagg

SEQ ID NO: 2664 - DNA, 120 bp, Mus musculus
ggcacaggtgatgctagatatatcttaagaaaaatgaaattcttatttctggtataattaccccaatattaaattcaagtctttgaaaatagtagagatggtgagtctctggaggcgata

SEQ ID NO: 2665 - DNA, 1805 bp, Mus musculus
gttctccatacccttggtcgcgcttaacgtgggagtgaggcgccgcctatcgctgttcttgaaccctcggacgcccgtggcggccgactggaccttgctcccggaggagatgggcttcgagtacttggagatccgagagctggaaacgcgccctgaccccactcgcagtttgttggatgcctggcaggggcgctctggcgcgtctgtcggcaggctgctagagctgctggccttgttagaccgtgaggatatactgaaggagctgaagtcgcgcatcgaggaggactgccagaaatacttaggtaagcagcagaaccaggagtccgagaagcctttacaggtggccagagtggaaagcagtgtcccacaaacaaaggaactgggaggcatcaccacccttgatgaccccctaggacaaacgccggaacttttcgatgcctttatctgctactgccccaacgatatcgagtttgtgcaggagatgatccggcaactagaacagacagactatcggcttaagttgtgtgtgtccgaccgtgacgtcctgccgggcacctgtgtctggtccattgccagcgagctaattgagaaaaggtgtcgccgcatggtggtggttgtttctgacgattatctacagagcaaggaatgtgacttccagaccaagtttgcactcagcctgtctccaggtgtccaacagaagcgactgattcctattaaatacaaggcgatgaagaaggactttcccagtatcctgcggttcatcactatatgcgactataccaacccttgcaccaagtcctggttctggacccgccttgccaaggctttgtccctgccctgaagatgaccctgggagccctagggcagaggggaagatgagactgatgcggagccagattctctgatgccgtcctgtctacatctttgactcccctgggctcaacccgtgttcaatgatgactggcctgagcaactaggactgcctttcctcccagccacccatgcctgtgcacgcacctcagtacacacatgcctcctcgcacacacaggcatctgcatatgtgtgtttcctttgggacagctcccaaggatagctgagtggaagagttctatcatcaagggggcctggccatctccctggacaaaagtggggtgcctttgctacaggtagtggcacgggcctatagtttcagcatttgggaggtagaggcaggagaatcaggagttcaagcttatccttggcaacacacctagtttaaggtcagcctgggctacatgagagcctacctcccccatcccctacccccagaaaagaaggaaaatctgggggcactgtggatttctcctctcttttctctacctgttgaaagcaaagtctaggaaggccccaaacatgatagcatttgggcccttagtaagctgaagataaaaaggagaagctgtttggcttcgccccacaaagcagctgcaggctcagctgttttctccccagcagcgaggtttgcatcttcttattcctttcacgttctctaccatagaggcaatgtcatggtccctctcagggtacaccccagggccctgagtccccaagaaagtgagtctcccctcagtgtctgggggaggaatgaggcctctgtgcacggtctcatggggcatttcactgcttgatgttgagcattttaaagcaacctgggtcaagtgtaaacctcctccacctgtgttagaggtttcatgggaatgtcaataaagaaaagaagggctaaaaaaaaaaaaaaaaaaaaaaaaaaaaaaaaaaaaaaaaaaaa

SEQ ID NO: 2666 - DNA, 2547 bp, Mus musculus
tcgactcgatccagaaactactaaccatgggtttttttttatttagccctacaaggtacttggatggtatctctgggttcttccaatgggccttcttgctcagtctatttctggtgctgttcaaggcagtccaattctacttacgaaggcagtggctgctcaagaccctccagcatttcccatgcatgccttcccactggctttgggggcaccatctgaaggacaaggagctccagcagattcttatatgggtagagaaattcccaagtgcctgcttacagtgtctctcggggagcaatatacgagtcctgctttatgatcctgactatgtgaaggtggttctggggagatcagatccaaaggcttctggaatttatcaattctttgctccctggattggttatggtttgctcctgttgaatgggaagaagtggttccagcatcggcggatgttgactccagccttccactatgacatcctcaaaccctatgtcaaaatcatggcggactctgtcaatataatgctagataaatgggagaagcttgatggccaggaccaccctctggagatcttccactgtgtttcattgatgacactggacactgttatgaagtgtgctttcagctaccaaggcagtgttcagttggatgaaaattccaagttgtatactaaggctgtcgaggatctaaacaacctgactttctttcgcctgcggaatgccttttataagtacaacatcatctacaatatgtcctctgatggacgtttgtcccaccatgcctgccagattgctcacgagcacacagatggagtgatcaagatgaggaagtctcagctgcagaatgaggaagagctgcagaaggccaggaagaagagacacttggatttcttggacatcctcttgtttgccagaatggaggataggaacagcttgtctgatgaggacctgcgtgcagaggtggacacattcatgtttgagggtcatgacactacagccagtggaatttcctggattttctatgctctggccacccaccctgagcaccaacagagatgcagagaggaggtgcagagcattctgggtgatggaacctctgtcacatgggaccatctgggccagatgccctacaccaccatgtgcatcaaggaggccctgaggctctatccaccagtaatatctgtgagtcgagagctcagctcacctgtcaccttcccagatggacgctccatacccaaaggtatcacagccacaatttccatttatggcctacatcataacccacgtttctggccaaacccaaaggtgtttgacccctctagatttgcaccagattcttctcaccatagccatgcttatctgccattctcaggaggatcaaggaactgcattgggaaacagtttgctatgaacgagctgaaggtggctgtggccctgaccctgctccgctttgaattgctgccagatcccaccaggatcccagtccccattgcaagacttgtgttgaagtccaagaatgggatccacctgtgtctcaagaagctaagataattctgatggagtcagggcagctccagaggtctgctgcctgcaatacctgcttttgtctctggcttttctgtactttgctttctctttgattcccattcttctgctctctgcaatgtgtcctgtcatctcatctttctgccctcatttctgtagcttttcctctagacaccttcctaacctgtgcatgtacctgtttcccatctcgctttaactctgaccagccactgaacctgcagccagcagcctgtcccccagcctgttcacccctcataaccattgcactgacagaggaagatatattttagagggagacacttgtacctttctctcccttcagttattagactcttgggacaatggacatcatgaattaaaacgttcttagaaatcacatgctgggagaaaattaacactaaaatctggtaccagccagaggaaggaacttgactcaaaataagagatttttagatatttctgtctgtctcatagttaaaattaatgttttcctgctttctggcatatgcctcatcttttctatgaagtagtaatactgatacagaaaggtagagagaaatgaatagtttttgctactttgggccaaactgtgaaaaaatccattttatttcatcaatttctgtttcccaatttcatttaagacacaggaaaactactcagcatgaactttggggagccagagcagttttggcaatccagggaagcatgttgccatctggtccctactgttagaatgtggtagaattctcagctcctgagaggttgttctctgcttttgactcctgagctggttgtgttaaaatgcaagttggcgttttttgtgaacctaaagaattttctgaatttaacccggtcttatttgtttaaaattactcgaatattccccttaatgatttggagaattcccattaaaatcccatgacatggatgtggagtcttttgtgaccatggggagaaactataaagaagtgtttgctgtcca

SEQ ID NO: 2667 - DNA, 3120 bp, Mus musculus
caccatccgggcgggcagcatgggcacgtccgcgcgctgggcgctgtggctgctgctcgcgctgtgctgggcgccccgggacagcggcgccactgcaagcgggaagaaagccaaatgtgatagctcccagtttcagtgcacaaatggccgctgcattaccctgctgtggaaatgtgatggagatgaagactgtgcggatggcagcgacgagaagaactgtgtaaagaagacgtgtgctgagtctgacttcgtgtgcaaaaacggccagtgtgttcctaacagatggcagtgtgacggggatcctgattgcgaagacggttctgatgaaagccctgaacagtgccatatgagaacatgccgcataaatgaaatcagctgtggcgcccgttctactcagtgtatccccgtgtcctggagatgcgatggtgaaaatgattgtgacaatggagaagatgaagaaaactgtggcaacataacatgtagtgcagatgagttcactggctccagtggccgctgcgtctccagaaactttgtgtgcaatggccaggatgactgtgacgatggcagtgatgagctggactgtgctccaccaacctgcggagcccacgagttccagtgcagcacctcttcctgcattcccctcagctgggtgtgtgatgatgacgcagactgttcagaccaatcagacgagtctcttgagcagtgtggccgtcagcctgtgatacataccaaatgtcctaccagtgagatccagtgtggctctggcgagtgcattcacaaaaaatggcggtgtgacggagaccctgactgcaaggacggcagcgatgaggtcaactgcccttctcgaacctgccgacctgaccagtttgaatgtgaagatggtagctgtatccacggcagcaggcaatgcaatggcatccgagactgtgttgatggctctgatgaagtcaactgcaaaaacgtcaatcagtgcctgggccctggaaagttcaagtgcagaagcggggaatgcatagacatgagcaaagtatgtgaccaggaacaagactgcagagactggagtgacgagcccctgaaggaatgccatatcaacgaatgcctggtcaataatggtggctgttcccatatctgcaaagacctagttataggttatgagtgtgattgtgcagctgggtttgaactgatagataggaaaacctgtggagatattgatgaatgccaaaacccggggatctgcagtcaaatttgtatcaacttaaaaggcggttacaagtgtgaatgtagtcgtggctatcaaatggatcttgccactggcgtgtgcaaggcagtaggcaaagagccgagtctgatcttcactaatcgaagagacatcaggaagattggcctagagagaaaggaatacatccaacttgtagagcaactaaggaacacggtggctctcgatgcggacattgcagctcagaagctgttttgggctgatctcagccagaaggccatcttcagtgcctcaattgatgacaaggttggtagacattttaaaatgatcgacaatgtctataatcctgcagccattgctgttgattgggtgtacaagaccatctactggactgatgcggcttctaagactatttcagtagctaccctagacggagccaagaggaagttcctgtttaattctgacttgcgagagcctgcctccatagctgtggatccgttgtcgggctttgtttactggtcagactggggcgagccagctaaaatagaaaaagcaggaatgaatggatttgatagacgtcctctggtgacggaggacatccaatggcctaatggaattacactcgaccttgtcaaaagccgcctctactggctggattccaagttgcacatgctctctagtgtggacctgaatggtcaagatcgtaggatagtgctcaagtctctggagttcctagctcatcctcttgcactcaccatatttgaggatcgcgtctactggatagatggagaaaatgaagcagtgtacggtgccaataaattcactgggtcagagctggccactctagtgaataatctcaatgatgcccaagacatcattgtctaccatgaactcgtccagccgtcaggtaaaaactggtgtgaagacgatatggagaatggaggatgtgaatatctctgcctgccagcaccacagatcaatgaccactctccaaaatatacctgttcctgtcccaatgggtacaatctcgaagaaaatggacgagagtgtcaaagtacttcaactcctgtgacttacagtgagacaaaagatatcaacacaacagacattctacgaactagtggactggttcctggagggatcaatgtgaccacagcagtatcagaagtcagtgttcccccaaaagggacttcagctgcctgggccatccttcctctcttgctcttagtgatggcagcagtaggtggctacttgatgtggaggaattggcaacataaaaacatgaaaagcatgaactttgacaatcctgtgtacttgaagaccactgaagaggacctgtcgatagacattggtagacacagcgcttctgtaggacacacatacccagcaatatcagttgtaagcacagatgatgatctggcttgagttctgaacaaatcttggtctatgaggtctacaccaataacaccctactctggaatggtaacagagccagcgctgaagtctcctttcttcctcccatctggaagaacatcaagatatctttttgtggatcaagtttgagtacttgatcatttttatattacttttgtaaatattcttggccacattctacttcagctctggatgtggttaccaagtatctgtaacccttgagcccctagacagtattgccatctctggccaaatatgcactttccctagaaagccatattccagcaatgaaccttgtgctatagtgactcccacctgtacatacattgtataggccacctgtacatatcccagagaacaatcactattcttaagcactttgaagatatttctatgtaaattattgtaaactttttcaatggttgggacaatggcaataggataaaacgggttactaagatgaaattgcc

SEQ ID NO: 2668 - DNA, 516 bp, Mus musculus
ttagagtgtcaccaaagctttatttacatgcgtcatcatctcttttacaaactagattatggttttaaatggaatacacaggcaatatctacaaacgccacgggaagtacgcacctccattccaccgggaaggggcagattcccaaatcaaactggttttgatccttgagaagaaaggcggcagagctaactcacggcagcgtatggttagacaaggtcctcagtacccagaatgcagcaggattgcgtctgcctcaaaccagacgaccaactgctgcaggtgtttaaacatggccacgcgccacacgaaattctagtttgtgtggggtagaagcaagaaatcaaaacaggccatttttacaggtaatgtgtacagaggttgttttcattcatgcaacttttttcttaaaaaaaaaaaaaaaaacccaaaaaacgttaaccacgtgaagcctaaatgcacaacacacttttcagtattcaccaattcttctggtctccttcacacctgtccacatt

SEQ ID NO: 2669 - DNA, 1489 bp, Mus musculus
gcaggtactcggccacaggttacggctcttctacctcttgataagaatggatttccagagttgtctttatgctattgctgaagaactgggcagtgaagacctggctgccctcaagttcctgtgcttggactacatcccacacaagaagcaggagaccatcgaggatgcccagaagctatttctgaggcttcgggaaaaggggatgttggaggaaggcaatctgtctttcctgaaagagctgcttttccacatcagtcggtgggacctgctggtcaacttcctagactgcaaccgagaggagatggtgagagagctgcgggacccagacaatgtccagatttctccctacagggtcatgctctttaagctctcagaagaagtgagcgagttggaattgagatcttttaagttccttttgaacaatgagatccccaaatgtaagctggaagatgacttgagcctgcttgaaatttttgtagaaatggagaagaggaccatgctggcagaaaataacttggaaaccctaaaatcaatctgtgaccaggtcaacaagagcctgctggggaagatcgaggattatgaaagatcaagcacagagagaagaatgagtcttgaaggaagggaagagttgccaccttcagttttggatgagatgagcctcaaaatggcggaactgtgtgactcgccaagagaacaagacagtgagtcacggacttcagacaaagtttaccaaatgaagaacaaacctcggggatactgtctgatcatcaacaatcatgatttcagcaaggcccgggaagacataacccaactccgaaaaatgaaggacagaaaaggaacagactgtgataaagaggctctgagtaagacctttaaggagcttcattttgagatagtatcttacgacgactgcactgcaaatgaaatccacgagattctagaaggctaccaaagcgcagaccacaagaacaaagactgcttcatctgctgtatcttatcccacggtgacaagggtgtcgtctatggaacggatgggaaggaggcctccatctatgacctgacatcttacttcactggttcaaagtgcccttccctgtctgggaaacccaagatctttttcattcaggcttgccaaggaagtaacttccagaaaggagtgcctgatgaggcaggcttcgagcaacagaaccacactttagaagtggattcatcatctcacaagaactatattccggatgaggcagactttctgctgggaatggctacggtgaagaactgcgtttcctaccgagatcctgtgaatggaacctggtatattcagtcactttgccagagcctgagggaaagatgtcctcaaggagatgacattcttagcatcctgactggcgtgaactatgacgtgagcaataaagacgacaggaggaacaagggaaagcagatgccacagcccaccttcacactacggaagaagctcttcttccctccctaa

SEQ ID NO: 2670 - DNA, 912 bp, Mus musculus
atggccccgcccgcgctccaggcccagcctccaggcggctctcaactgaggttcctgctgttcctgctgctgttgctgctgctgctgtcatggccatcgcagggggacgccctggcaatgcctgaacaacgacgctccggccctgagtcccaactcaacgccgacgagctacggggtcgcttccaggacctgctgagccggctgcatgccaaccagagccgagaggactcgaactcagaaccaagtcccgacccagctgtccggatactcagtccagaggtgagattggggtcccacggccagctgctactccgcgtcaaccgggcgtcgctgagtcagggtctccccgaagcctaccgcgtgcaccgagcgctgctcctgctgacgccgacgacccgcccctgggacatcactaggcccctgaagcgtgcgctcagcctccagggaccccgtgctcccgcattacgcctgcgcctgacgccgcctccggacctggctatgctgccctctggcggcgcacagctggaactgcgcttacgggtagccgccggcagggggcgccgaagcgcgcatgcgcacccaagagactcgtgcccactgggtccggggcgctgctgtcacctggagactgtgcaggcaactcttgaagacttgggctggagcgactgggtgttgtccccgcgccagctgcagctgagcatgtgcgtgggcgagtgtccccacctgtatcgctccgcgaacacgcatgcgcagatcaaagcacgcctgcatggcctgcagcctgacaaggtgcctgccccgtgctgtgtcccctccagctacaccccggtggttcttatgcacaggacagacagtggtgtgtcactgcagacttatgatgacctggtggcccggggctgccactgcgcttga

SEQ ID NO: 2671 - DNA, 1427 bp, Mus musculus
aatctgcacagggacacaggaacaccgtttcttctgactccgggaaacatccagtgtagccgaaactgtcccagcccagtgaggagcccaggatgttcctgaaggctgcggtgctgaccctggccctggtggccatcaccggcacccgggctgaggtcacttcggaccaggtggccaatgtggtgtgggattactttacccagctaagcaacaatgccaaggaggctgtagaacagtttcagaagacggatgtcactcagcagctcagtaccctcttccaggacaaacttggggatgctagtacgtatgctgatggggtgcacaacaagctggtgccctttgtcgtacagctgagtgggcatctagccaaggaaactgagagggtgaaggaagagatcaagaaggagctggaggacctacgtgaccgcatgatgccccatgccaacaaagtaacccagacgttcggggagaacatgcagaagttgcaggagcacctgaagccctatgccgtggacctgcaagatcagatcaacacacagacccaggaaatgaagctccagctgaccccatacatccagcgcatgcagaccacgatcaaggagaatgtggacaacctgcacacctcgatgatgccccttgccaccaacttaaaggacaagtttaacaggaatatggaagagctcaaggggcacctaaccccccgtgccaacgagctgaaggccacgatcgaccagaacctggaggatctgcgccgcagcctggcccctctgacggtgggcgtgcaggagaaactcaaccatcagatggagggcctggccttccagatgaagaagaacgcggaggagctccagaccaaggtctctgcaaaaatcgaccagctgcagaagaatctggccccgctggtggaagacgtgcagagcaaggtgaagggcaacacggaagggctgcagaagtctctggaagacctgaacaggcagctggagcagcaggtggaggagttccgacgcactgtggagcccatgggagagatgttcaacaaggctctggtgcagcagctggaacagttcagacagcagctgggtcccaattcgggggaggtggaaagccacttgagcttcctggagaagagcctgagggagaaggtcaactcctttatgagcaccctggaaaaaaaggggagcccagaccagcctcaagccctccccctcccggagcaggcccaggagcaggctcaggagcaggtgcagcccaaacctctggagagctgagctgtccctggtgccctcagcccatcacagcagcagacacctgtcctgccccaccacctgtctgtcactctgtccccaggcacttcttgtaccagcttgaggacacatgtcctgtgggaggtgaagcctcatctcgctactcaataaagcaactgagaa

SEQ ID NO: 2672 - DNA, 4356 bp, Mus musculus
acagaaagcccaggcacagtggaacagcggtttccaggagctgctggtcccatcttccaaggctctgctcaactcagagcgcttcttccaaagtctacatcttggtggactttgcagaggaaaccgggaggtagagacacgtgaggtcgtgatggaacttgaagaggaccttaagggaagagcagacaagaacttctcaaagatgggcaaaaagagtaaaaaggagaagaaagaaaagaaaccagcagtcagtgtgcttacaatgtttcgttatgcaggttggctggacaggttgtacatgctggtgggaactctggctgctattatccatggagtggcgctcccacttatgatgctgatctttggtgacatgacagatagctttgcaagtgtaggaaacgtctctaaaaacagtactaatatgagtgaggccgataaaagagccatgtttgccaaactggaggaagaaatgaccacgtacgcctactattacaccgggattggtgctggtgtgctcatagttgcctacatccaggtttcattttggtgcctggcagctggaagacagatacacaagatcaggcagaagttttttcatgctataatgaatcaggagataggctggtttgatgtgcatgacgttggggagctcaacacccggctcacagatgatgtttccaaaattaatgaaggaattggtgacaaaatcggaatgttcttccaggcaatggcaacattttttggtggttttataataggatttacccgtggctggaagctaacccttgtgattttggccatcagccctgttcttggactgtcagctggtatttgggcaaagatattgtcttcatttactgataaggaactccatgcttatgcaaaagctggagcagttgctgaagaagtcttagcagccatcagaactgtgattgcgtttggaggacaaaagaaggaacttgaaaggtacaataacaacttggaagaagctaaaaggctggggataaagaaagctatcacggccaacatctccatgggtgcagcttttctccttatctatgcatcatatgctctggcattctggtatgggacttccttggtcatctccaaagaatactctattggacaagtgctcactgtcttcttttccgtgttaattggagcattcagtgttggacaggcatctccaaatattgaagccttcgccaatgcacgaggagcagcttatgaagtcttcaaaataattgataataagcccagtatagacagcttctcaaagagtgggcacaaaccagacaacatacaaggaaatctggaatttaagaatattcacttcagttacccatctcgaaaagaagttcagatcttgaagggcctcaatctgaaggtgaagagcggacagacggtggccctggttggcaacagtggctgtggaaaaagcacaactgtccagctgatgcaaaggctctacgaccccctagatggcatggtcagtatcgacggacaggacatcagaaccatcaatgtgaggtatctgagggagatcattggtgtggtgagtcaggaacctgtgctgtttgccaccacgatcgccgagaacattcgctatggccgagaagatgtcaccatggatgagattgagaaagctgtcaaggaagccaatgcctatgacttcatcatgaaactgccccaccaatttgacaccctggttggtgagagaggggcgcagctgagtgggggacagaaacagagaatcgccattgcccgggccctggtccgcaatcccaagatccttttgttggacgaggccacctcagccctggatacagaaagtgaagctgtggttcaggccgcactggataaggctagagaaggccggaccaccattgtgatagctcatcgcttgtctaccgttcgtaatgctgacgtcattgctggttttgatggtggtgtcattgtggagcaaggaaatcatgatgagctcatgagagaaaagggcatttacttcaaacttgtcatgacacagacagcaggaaatgaaattgaattaggaaatgaagcttgtaaatctaaggatgaaattgataatttagacatgtcttcaaaagattcaggatccagtctaataagaagaagatcaactcgcaaaagcatctgtggaccacatgaccaagacaggaagcttagtaccaaagaggccctggatgaagatgtacctccagcttccttttggcggatcctgaagttgaattcaactgaatggccttattttgtggttggtatattctgtgccataataaatggaggcttacagccagcattctccgtaatattttcaaaagttgtaggggtttttacaaatggtggcccccctgaaacccagcggcagaacagcaacttgttttccttgttgtttctgatccttgggatcatttctttcattacattttttcttcagggcttcacatttggcaaagctggagagatcctcaccaagcgactccgatacatggttttcaaatccatgctgagacaggatgtgagctggtttgatgaccctaaaaacaccaccggagcactgaccaccaggctcgccaacgatgctgctcaagtgaaaggggctacagggtctaggcttgctgtgattttccagaacatagcaaatcttgggacaggaatcatcatatccctaatctatggctggcaactaacacttttactcttagcaattgtacccatcattgcgatagcaggagtggttgaaatgaaaatgttgtctggacaagcactgaaagataagaaggaactagaaggttctggaaagattgctacggaagcaattgaaaacttccgcactgttgtctctttgactcgggagcagaagtttgaaaccatgtatgcccagagcttgcagataccatacagaaatgcgatgaagaaagcacacgtgtttgggatcacgttcttcttcacccaggccatgatgtatttttcttatgctgcttgtttccggttcggtgcctacttggtgacacaacaactcatgacttttgaaaatgttctgttagtattctcagctattgtctttggtgccatggcagtggggcaggtcagttcattcgctcctgactatgcgaaagcaacagtgtcagcatcccacatcatcaggatcattgagaaaacccccgagattgacagctacagcacgcaaggcctaaagccgaatatgttggaaggaaatgtgcaatttagtggattcgtgttcaactatcccacccgacccagcatcccagtgcttcaggggctgagccttgaggtgaagaagggccagacgctggccctggtgggcagcagtggctgcgggaagagcacagtggtccagctgctcgagcgcttctacgaccccatggctggatcagtgtttctagatggcaaagaaataaagcaactgaatgtccagtggctccgagcacagctgggcattgtgtcccaagagcccattctctttgactgcagcatcgcagagaacattgcctacggagacaacagccgggtcgtgtcttatgaggagattgtgagggcagccaaggaggccaacatccaccagttcatcgactcgctacctgataaatacaacaccagagtaggagacaaaggcactcagctgtcgggtgggcagaagcagcgcatcgccatcgcacgcgccctcgtcagacagcctcacattttacttctggacgaagcaacatcagctctggatacagaaagtgaaaaggttgtccaggaagcgctggacaaagccagggaaggccgcacctgcattgtgatcgctcaccgcctgtccaccatccagaacgcggacttgatcgtggtgattcagaacggcaaggtcaaggagcacggcacccaccagcagctgctggcgcagaagggcatctacttctcaatggtcagtgtgcaggctggagcaaagcgctcatgaactgtgaccatgtaagatgttaagtatttttattgtttgtattcatatatggtgtttaatccaagtcaaaaggaaaacacttactaaaatagccagttatctattttctgccacagtggaaagcatttagtttggtttagagtcttcagaggctttgtaattaaaaaaacaaaaatagatacagcatcaaatggagattaatgctttaaaatgcactataaaatttataaaagggttaaaagtgaatgtttgataatatatacttttatttatactttctcatttgtaactataactgatttctgcttaacaaattatgtatgtatcaaaaattactgaaatgtttgtataaagtatatatagtgaaaaaaaaa

SEQ ID NO: 2673 - DNA, 2830 bp, Mus musculus
gtgctgaataaaccccaggatggcggaagcacaccaggcagtagctttccagttcactgtgaccccagacggggtcgacttccggcttagtcgggaggctctgagacacatctacctgtctggaatcaactcctggaagaaacgccttattcgaatcaagaatggcatccttaggggtgtgtaccctggcagccccaccagctggctggttgttgtcatggcaacagttggttccaactactgcaaggtggacatctccatgggactggtcgattgcatccagagatgcctcccggaaaggtatggccactttgggaccccacagacagaggcacttctcagcatggtcatcttctccaccggagtctgggcgacaggcattttcttcttccgacaaaccctgaagctgctgctctcctaccacgggtggatgttcgagatgcacagcaagaccagccatgccaccaagatctgggctatctgtgtccgtctcctgtccagccggcggcccatgctctacagcttccaaacgtcactgcctaagcttcctgtccccagcgtgccagccacaattcaccggtacttggattctgtgcggcccttattggatgatgaagcatattaccgcatggagacattggccaaggaattccaggacaagactgcccccaggctgcagaaatacctggtgctcaagtcatggtgggcaactaactatgtgagtgactggtgggaagaatatgtctacctccgaagcaggagccccctcatggtgaacagcaactattatgccatggattttgtgcttattaagaacacaaatgtgcaagcagcccgtctaggcaatgccgttcacgccatgatcatgtatcgccgcaaactggaccgtgaagagatcaagccggtcatggcactgggtatggtgcccatgtgctcctaccagatggagaggatgttcaacactacacgcatcccaggcaaagagacagacttgctacagcacctctcagagagcaggcacgtggctgtctaccacaaaggtcgcttcttcaaggtctggctctatgagggctcgcgccttctcaagccccgagacctggagatgcagttccagagaatcctcgacgacccttccccacctcagcctggggaggagaagctggcagccctcaccgcaggaggaagggtagagtgggcagaggcacgtcagaccttcttcagctctggcaagaacaagatgtctctggacgccatcgaacgtgctgctttctttgtgaccctggatgaagattctcattgctacaaccctgacgatgagaccagtcttagcctctacggcaaagccttgctccatggcaactgctataacaggtggtttgacaaatctttcacccttatctcctgcaagaatggcctgttaggcctcaacaccgaacactcgtgggcagacgcgcccatcattgggcacctctgggagtttgtcctgggcactgatacctttcacctgggctacacggagacaggacactgtgtgggtgagccaaacaccacgttgccaccccctcagcggctgccgtgggacattcccgagcagtgccggaaagccatcgagaactcgtaccaagtagccaaggcactggccgatgacgtggagctctactgcttccagttcttaccctttggcaaaggtcttatcaagaagtgtaggaccagccccgacgcttttgtgcagattgccctacagctggctcatttccgggacaaaggcaagttctgcctgacttacgaggcctcgatgacaagaatgttccgagaggggcggactgagactgtgcgttcctgtaccaacgagtccgcagcctttgtgcaggccatgatgaaggggtcccataagaaacaagacctccaagatctcttccggaaagcctccgaaaagcaccaaaacatgtaccgcctagccatgacaggggctgggatcgaccggcacctcttctgcctttacatcgtctccaagtacttaggagttagctctcctttcctggctgaggtactttctgaaccctggagcctctccaccagccagatcccccagttccagatctgcatgtttgacccaaaacagtatcccaatcatctgggtgctggaggtggctttggtcccgtggcggatgatggctacggggtctcttacatgatcgcaggagaaaacaccatgttcttccacatctccagcaaatactcaagttcagagacgaacgcccagcgctttgggaaccacatccgccaagcactgttggacatcgccgaacttttcaaaatttccaagacagacagctgaggaaaagagataccccagctgccctctggtccccacctggtggaagaagaggcctgtggccagctcacaggcataaggggtggcgtgcacacacgcccagttcggagaacagctcttgaggcagtgctccccggaggaggcagtgctccctgggcagatactgctcctctagggcccccgctggaggtgggattggagcagcaggggaattttgatttttttttttttttttttggcttggtagatgttaataaaaataaggctgtataattcttacttggctgttaggtgcctatgtttttgttagagaacgataaggccctttcctgccccagctcagcctaggatggaggcgatggaaggggtcggagaatgttcataatgggcttcttacctgctttgaaatgggtgctcttcttgaataatgcggacttggagagcgctgtccaacctctcatgtgcacttggaataaattcttactttagaacctt

SEQ ID NO: 2674 - DNA, 918 bp, Mus musculus
atgctgccgagattgggcggccccgcgctgccgctgctcctgccgtcgttgctcttgctgctgctcttgggcgcgggcggctgcggccccggggtgcgcgccgaggtgctgttccgctgcccaccctgcacgcccgagcgtctggccgcttgcgggcccccacccgacgcgccctgcgccgagctggtgcgagagcccggctgcggctgctgctccgtgtgcgcacggcaggagggcgaagcatgcggcgtctacatcccgcgctgcgcccagacgctacgctgctatcccaacccgggctccgagctgcccctgaaggcgcttgtcacaggcgcgggtacctgtgaaaagagacgcgtgggcaccaccccacagcaggttgcagacagtgatgaccaccactctgagggaggcctggtggagaaccacgtggatgggaccatgaacatgttgggaggtggtagcagtgctggccggaagcccctcaagtcaggcatgaaggagctggctgtgttccgggagaaggtcaatgaacagcaccggcagatgggcaagggtgccaaacacctcagtctggaggagcccaagaagttgcgcccgcctcccgccaggaccccttgccagcaggagttggaccaggtcctggagcggatctccaccatgcgccttccggatgatcggggccccctggaacatctctactccctgcacatccccaactgtgacaagcatggccggtacaaccttaagcagtgcaagatgtctctgaacggacagcgcggggagtgctggtgtgtgaaccccaataccgggaagcccatccagggagctcccaccatccggggagaccccgagtgccatctcttctacaacgagcagcaggagactggtggggcccatgcccaaagtgtgcagtaa

SEQ ID NO: 2675 - DNA, 494 bp, Mus musculus
ttaagaacaagtttctctaaaatccttcagccaccagtgaaatgatcaggcagaataaaaacttctgtagagggagtgctgtcatcaaaaataaatacagttgcatgggctgctcaaagagaaaccaaactgaacaggaaggcggggctggaacattatcttaaacgccctcaatggtggttcactgggctgaggctaggcaggaagcaggtctggtcaccatcttagagcaggaggtcatgctgcacagaccaaattaagctctgatgatgcacatggacctgtgacaaaagtgacatccatcagggtccagagtgggtcaagacagccaacctggctcctcactgctgcaactccttcatcctgttaaaggcactgcctgcacaaaaccactctatctaggtctcattaaaagtgtagttcaagaagatagtctcctagatcccattaggatacttaataacacacttcagaaactttccgaaaacaaattg

SEQ ID NO: 2676 - DNA, 494 bp, Mus musculus
tttttttttttttttttccaaaagcacgtggtttttattacggtgagctgtagtgcacattggtttctttagtaattctaagccgatacaggttccccactaggagtatacgtggggagtgactgggcgcagtgacagtgacaaaccagtgacccactgtgatccttagaaagttacattagcaatcaggagagaaagggaagtgtgaggtggtccagaggcaggatgtgagcagagcactcccccgatgctcacatggtggagggaggctgttcccctatctctaaggaactggggcttagtggttgagatgttccactgcctgcagggggcaccttctaaaaagcttttcaggccctaagtccatgggtgttggaaaagcccacagatgctctgttcttgcggggttctgggtcccctccttcacccgggggaggaccatcggcggtttcttgctggcttccaccttcttcagggcgagccttgtggtgtcc

SEQ ID NO: 2677 - DNA, 2514 bp, Mus musculus
tggtcctctggtagaggggctcctcggagcagcgggccggaccactgcagatctctgtccctctggcctcaggcttctggatttcgagcctcctagatctgcctccgctgaattactctcacctacttctgttctctgcaccagaaatctgagatccaggagtatcagcaggcaaagatgtctaatgagccaccccctccttatccaggaggtcctacagccccactactggaggaaaaaagtggagccccacttaccccaggccgaacctcaccagctgtgatgcagcctccaccaggcatgccactgccttctgctgacattgcccctccaccctatgagccacctggccaaccagtgcctcagcctggctttgtgcccccccatatgaatgcagatggcacctacatgcctgcaggtttctaccctcctccagggcctcacccacctatgggctattatccaccaggaccctacccaccagggccctaccctggccctgggggccacacggccacagtattggtcccatcaggggcagccaccacggtgacagtactgcagggagagatctttgaaggcgcaccagtgcagacagtgtgtcctcactgccagcaggccatcaccaccaagatctcctacgagataggcctgatgaactttgtgctgggtttcttctgctgcttcatggggtgtgacctgggctgctgtttggtcccctgcctcatcaatgacttcaaggatgtgacgcacacatgtcccagctgcaaagcctacatctgcacatacaagcgcttgtgctaacagagccagacttggactcccctacctattagtctggcccccatgtgctttgctccccatgctcagtggtcactatcccctcaactccccacttagggttggaagttctgccactgtactctggaaatcctgtcctcaccttgcccttccctgagcatccgactcttccagcaacaattctgttggatttaaggccaagggccagtgggtggcatggggtggcactaatcttgtgtgttgcttggacatttgcaattcagaagataagctagagaggctcttactagggccctcatttctccttttctgtataagtataaggcccaggctggtccttactcttcctgggaccaaaagcacccagaggcattaacaggtccccagactagggcctacactgagggtagaacctggaaccacagttgttgctgacctgctggaatgaagtcagagtatcatctaaagttaagtagacccaagcaagacagggtcttaaggcctgggtttaagtggggcttcttgtctggggtaccaagatagggaaagaaagaaataatgactgccagccctggacctcagaattctcaggtatggaaacactcaagagctgcctggtatgaagcaaagaggatcctgggctatttaaagctctggtaaccgagaagaacttgcccctgttcttacctagcttctttgagtcagtcagtgtgcagagctcctttctggccacacctctgtgaacccctatattttctgggactggaaggaatgaatgcccatgtcctgtctacttctgtgtctgtgctatgtgggggtgcaacttctgcctggtggtttgtgacatggcagatcagaagtgcctccttgtaggttcattggtctctggaataagtgccagcctttttgccatagttgacttgcttccatattggagctcctcagtaggaacagctgtggcactgggctggggaccaggaagaagtcacaagtggtgggagtatcctagggacatgagtcgtgcccagggtataaacccaaacctggtcatttcttgaacagtctgtgaatatgcctgtgtggacgctgtatcctgctgctgtccctctcctggtctctcacactgcatggcctcctatcactgtgaattgtggcctggtcgcagtttgtagtttcattaaatggccctttcactcccctgccctgggcctctgctgtcttgcctggcttccttcttttctgagagacagggtgggactataggtagtctagtggcaggcaggagcccgggcctgggaaacaacacatttaagaacccaattacaccaaaccagaatttatatatatagacctgccctggggaaacccagctgttctgggccagggcattggtttctgccatttgcataattagatgtccaggctgcagaacctgagaactggagccccgtcttagcttagtaacttcttaacctatagctattgctctttcgtccttaaacaagacagcactactggactaagacctgatagtctgaagatgacacactgaagtctcggcactcagttcttggtaaatcaatcttctgaactgtgaaggtggtgggctcagtctctttgagtttccctgctgttctaccattttttcacacaaagacttttataggaatagattcctactaataaaaatgtttaacttcatatttctatttt

SEQ ID NO: 2678 - DNA, 645 bp, Mus musculus
  misc_feature 1, 2: n = A,T,C or G
nnttcgcctgcaaattatattctctttaaaggcaaatggaagaagccattcgatcctgagaacactgaggaagctgagttccacgtggacgagtccaccacggtgaaggtgcccatgatgaccctctcgggcatgcttgatgtgcaccattgcagcacgctgtccagctgggtgctgctgatggattatgcaggcaatgccactgctgtcttccttctgcccgatgatgggaagatgcagcatctggagcaaactctcagcaaggagctcatctccaagttcctgctaaacaggcgcagaaggttagcccagatccacttccccagactgtccatctctggagaatataacttgaagacactcatgagtccactgggcatcacccgaatcttcaacaatggggctgacctctccggaatcacagaggagaatgctcccctgaagctcagccaggctgtgcataaggctgtgctgaccatcgatgagacaggaacagaagctgcagcagtcacagtcttactagccgttccttattctatgccccctatcctgcgcttcgaccaccctttccttttcataatatttgaagaacacactcagagccccctctttgtgggaaaagtggtagatcccacacataaatga

SEQ ID NO: 2679 - DNA, 1893 bp, Mus musculus
cttcaccacgggctgaacgtcttccgggagggccatgcgaagcagctgaagaacagagtggaagcctccatcaccaaggcaaactcattcttggggcagaaggcaagtgctgggctcctgggtgcccatgccgccgccatcacagcctatgcccttacgctgaccaaggcctcggaggacctgcggaatgttgcccacaacagcctgatggccatggctgaggaaactggtgaaaacctctactggggcttagtccttggctctcaggacaaagttgtgttgcgccccgcagacccccgtagcccaacagaacctgtgccccaggccccagccttgtggatcgaaaccacagcctatgccctgctccacctgcttctgcgtgagggaaagggaaaaatggctgacaaggctgcatcctggctcacccaccagggaaacttccacggggcattccgcagtacccaggacactgtggtcaccctggatgccctgtctgcctactggatcgcttcgcacaccactgaggagaaagcactgaaggtgacgctcagctccatgggccgcaatgggctcaagacccacgtgctacacttgaacaaccaccaagtcaagggcctggaggaggagctgaagttctccctgggcagcacaatcagtgtcaaggtggaaggaaacagcaaaggcaccttgaagatccttcgtacctacaacgtcctggacatgaagaacaccacatgccaggaccttcagatagaagtgaaggtcacagacgctgtggaatatgcatggagcgcctacgaagactatgaagacgactataacatgccagctacagatgatcccagcgttcccttgcagcctgtcacgcccctgcagctatttgagggtcgtcggagccgccgcaggagggaggcccccaaggtggctgaagagcgggagtccagagttcactacactgtgtgtatctggcacaatggcaagctggggctgtctggcatggccatcgcagacatcaccctcctgagtggattccacgccctgaggggtgacctggagaagctgacctccctctctgaccgttacgtgagtcactttgagactgacgggccccatgtcctgttgtactttgactcggtccctaccacccgggagtgtgtgggcttcggagcctcgcaggaggtggttgtgggactggtgcagccatccagtgctgtcctgtatgactactacagccctgatcacaagtgctctgtgttttatgctgcacccaccaagagccagctcctggccacactgtgctctggagatgtatgccagtgcgctcaggggaagtgccctccactgctaaggtcactggagcgaagggtggaggacaaggatggctaccggatgaggttcgcctgctattatccccgagtggagtatggcttcacggttaaggttcttcgagaagatggcagagctgccttccgtctctttgagtccaagatcacccaagtcctgcatttcagaacggacaccatggcctccataggtcagacccgcaacttcctgagccggacctcttgccgccttcgtttggagcctaacaaagagtacttgatcatggggatggacggggaaaccagtgacaacaagggagacccccagtacttgctggactcaaatacctggattgaggagatgccttcggaacaaatgtgcaagagcacccgccatcgggcagcctgtttccagctcaaagacttcctgatggagttcagcagccgggggtgccaggtgtgaggccttaggactctggctctctgagctcagctcagggtcagggcctcgctggatgaggggctctgctctacagggtaaataaaagaaaagctttttgacaaaaattga

SEQ ID NO: 2680 - DNA, 1872 bp, Mus musculus
  misc_feature 863, 869, 873: n = A,T,C or G
atgctgccagtgctctacaccggcctggcggggctgctgctgctgcctctgctgctcacctgctgctgcccctacctcctccaagatgtgcggtacttcctgcggctggccaacatggcccggcgggtgcgcagctaccggcagcggcgacccgtgcgtaccatcctgcgggccttcctggaacaagcgcgcaagaccccacacaagcccttcctgctgttccgagacgagacgctcacctacgcccaggtggaccggcgcagcaaccaagtggcgcgggcgctgcacgatcaactgggcctacgacagggggattgcgtagccctcttcatgggcaatgagccggcctacgtgtggatctggctgggactgctcaaactgggctgtcccatggcgtgcctcaactacaacattcgtgccaagtctctgctgcactgctttcaatgctgcggggcgaaggtgctgctggcctccccagatctacaagaagctgtggaggaggttcttccaaccctgaaaaaggatgccgtgtccgtcttttacgtaagcagaacttctaacacaaatggtgtggacacaatactggacaaagtagacggagtgtcggcggaacccaccccggagtcgtggaggtctgaagtcacttttaccacgccagcagtatacatttatacttcgggaaccacaggtcttccaaaaagcggaaccatcaatcatcatcgcctaaggtatgggacaagccttgctatgtcgagtgggaatcacggccaaggatgtcatctataccaacaatgcccctgttccaacagtgcaacgctcaagatcggccttcacggatgcatcctgggttggggctactttanccttgncggngcaaattctcaagcmagccarttttgggaacgactggcaggaaatacaacgtcaacggtcattcagtacattggtgaactgcttcggtacctgtgcaacacaccgcagaaaccaaatgaccgggaccacaaagtgaaaaaagccctgggaaatggcttacgaggagatgtgtggagagagttcatcaagagatttggggacatccacgtgtatgagttctacgcatccactgaaggcaacattggatttgtgaactatccaaggaaaatcggtgctgtcgggagagcaaactacctacaaagaaaagttgcaaggtatgagctgatcaagtatgacgtggagaaggacgagccggtccgtgacgcaaatggatattgcatcaaagtccccaaaggtgaggttggactcttggtttgcaaaatcacacagctcacaccatttattggctatgctggaggaaagacccagacagagaagaaaaaactcagagatgtctttaagaaaggcgacatctacttcaacagcggagacctcctgatgatcgaccgtgagaacttcgtctactttcacgacagggttggagatactttccggtggaaaggagagaacgtagctaccacagaagtcgctgacatcgtgggactggtagattttgttgaagaagtgaatgtgtatggcgtgcctgtgccaggtcatgagggtcgaattgggatggcctccctcaagatcaaagaaaactacgagttcaatggaaagaaactctttcaacacatcgcggagtacctgcccagttacgcgaggcctcggttcctgaggatacaagataccattgagatcactgggacttttaaacaccgcaaagtgaccctgatggaagagggcttcaatcccacagtcatcaaagataccttgtatttcatggatgatgcagagaaaacatttgtgcccatgactgagaacatttataatgccataattgataaaactctgaagctctga

SEQ ID NO: 2681 - DNA, 742 bp, Mus musculus
gtggacaactggcgtccagctcagccgctaaagaatagaaagatcaaagcgtcctttaagtaaaacaaccctgcagcaggggtccgaaggcacaagtgtgaccgcctctctgtagctaagcgcagttacggctgggtgatttggatcccgactcgcatctggtattgtagaccttttacctctcatccgttgtgcttactaacaaaatgtgaaaagcaagacccaggtgtctcatgtggtggcagcacagtggcaggccagtggtcaacttagggcatcttttctctgccacggcagcgcaatgcaaagagcagacatggcctcttgcttctcttcacacccataggataatgaatactcaggcctgtttgttaaaatgctatttttaaaaccatatgaaggtaggataattaattacaagtccacatcatgagacaaactgaagtaacttaggcaaaacaggtaaaacagtcatagttttgtgattataaatgagatgaatgttcacccttccaagatcttatattaaagaaaaaattttaaaaagcttatatatttgtagcaaagttattcttaaatatgaattatgttataacttagtgacttttgatttctagaggtgtaaatgaggatgtaaaaattgatatagttgtgatacagagtatatttcccttcagataacataccacaacacaatggataatgtattttagatatattctctaataaaattgagaactct

SEQ ID NO: 2682 - DNA, 2126 bp, Mus musculus
cgagtgaccctgggggagggagctgtgttctgttgagacgactcctctctgatgtacaataagaaaaaacagaacacagctccctccacgagtgaccctgggggaatttttcgaccatcccttgctccaacgtaaggaacagaacttgagaccttgtcacaggaacataaagtcagattgctaaacttctgcatttactgagaaacatggtgaagcgagtggcaattgtgggagctggggtcagcggcctggcctccatcaagtgctgcctggaagaggggctggagcccacctgcttcgagaggagcagtgacctggggggactttggagattcacggaacatgttgaagaagggagagccagtctttacaagtctgtggtttctaacagcagcagggagatgtcgtgttacccagattttccttttccagaagactatccaaactttgtgccaaattctctattcctggaatatctcaaactctactcaacccagttcaaccttcagagatgcatttatttcaataccaaagtgtgcagtataacaaaacgcccggattttgctgtctctggacagtgggaagtggtcactgtcacaaacgggaagcaaaactcagccatctttgatgctgtcatggtctgcactggttttctaactaacccacatctgcccctggattccttcccaggtatactaacttttaagggggagtacttccacagccgacagtataaacatccagacatatttaaggacaagcgagtccttgtagttggaatggggaattctggcacagatattgccgtggaggccagccacttagcaaaaaaggtgttcctcagcactactggaggggcatgggtgatcagccgagtctttgattcagggtacccatgggacatgatattcatgacacgatttcagaacatgctcagaaatcttctcccaactccaattgtgagttggttgatatcaaaaaagatgaacagctggttcaaccacgtgaattacggtgtagctccagaagacaggactcagctgagagagcctgtgctaaatgatgagctcccaggccgcatcatcactgggaaagtgtttatcaagcccagcatcaaggaggtaaaggaaaactctgtcgtgttcaacaacacaccaaaggaggagcccattgacatcatcgtctttgcgactggatatacttttgcgttccccttcctcgatgaatccgtagtgaaagttgaggatggccaggcatcactgtacaagtacatcttccctgcgcatctgccaaaaccaactctggctgtgattggcctcatcaagcccctgggctccatggtacccacaggagagacacaagctcgatgggttgttcaggtcctaaaaggtgcaactacattaccaccgccaagtgtcatgatggaggaagttaatgaacggaagaaaaacaagcatagcgggtttggcttgtgctactgcaaggctttgcaaacagattatataacatacatagatgacctcctgacctctatcaacgcaaaaccggatctgcgggccatgctcctgactgacccacgactggctctgagcatcttctttggcccatgtaccccttaccatttccgcctgactggtccaggaaaatgggaaggagccagaaaggccatcttgacccagtgggaccgaacagtgaaagtcaccaaaactcgaaccatacaagaatccccatcttcctttgaaactttgctgaaactctttagttttctggctttgctcatagctgtcttcttgattttcctgtaagtgaaagatctaactggcttttcaaatgtatggagtataacgttccaactcctctaatgtaacaactttgtcttcataatcataaaccatatccaaagaatgaaaccctaccccctcccctttccggttcacctcactggcagcttggtattgctgggtctcttgcagctccattaggtttaatgccagaagataaggtccagcacttttgttcacttaaaatgttggaaggatccaggcccttttcaggaagaagctgcccccagagaatactctgagcattctttcgccctaaaaaagcaagtttcctagatcttaatg

SEQ ID NO: 2683 - DNA, 3036 bp, Mus musculus
gacagcggagcgcggtggcgtcgacgtctagtgtctcagtgctcccgtctgtggctaactaagcagccagcagccaggcagctcgcgacctgcggccaggcagccaaccatgctcaacttcggcgcttctctccagcaagcttcggaggggaaaatggaactaatttctgaaaagcccagagaggggatgcatccctgggacaaagctgagcagagtgactttgaagcggtggaagcgctcatgtccatgagctgcgactggaagtctcatttcaagaaataccttgaaaacaggcctgtcacaccagtgtctgatacctccgaggatgacagcttgcttccagggacgcctgaccttcagacagtcccagcattttgtttaacgccaccttacagcccctctgacttcgaaccctcccaagggtcaaatctgactgcatcagcgccatctactggccacttcaaatctttctccgatgctgccaagcctccaggcgccactcctttcaaagaggaggaaaagaatcctttagctgcccctcctcttcctaaggctcaagccaccagtgtcatccgtcacacagctgatgcccaactgtgcaaccaccagtcctgccccgtgaaagcagctagcatcctcaactatcaggacaattctttccggagaagaacccacggaaatgttgaggctactcgaaagaacataccctgtgctgcagtgtcaccaaacagatccaagcctgagcccagcacagtgtccgatggtgatgagaaggcgggcgctgcactatatgactttgctgtgccttcctcagagacagtaatttgtaggtctcagccagctccttcgtccccagtgcagaagtcagtactggtgtcttcacctacagtatccactgggggagtgccacccctgcctgtcatctgccagatggttccccttcctgccaacaactctcttgttagcacagttgtccccagcactcctcctagccagccaccagctgtctgctcacctgtgttgttcatgggcactcaggtgcctgagggcaccgtcgtgtttgtggtaccccagcccgttgtgcagagcccaaggcctccagtggtgagccccagtggcaccagactgtctcccattgcccctgctcctggattctctccttcagcagcaagggtcactcctcagattgactcgtccagagtaagaagtcacatctgtagccacccagggtgtggcaagacttactttaaaagttcccatctgaaggcccacgtgaggacacacacaggggaaaaacctttcagctgcagctggaaaggctgtgaaaggaggtttgctcgctccgatgaactgtccagacaccggcggacacacacaggtgagaagaagtttgcctgtcccatgtgtgaccgtcggtttatgaggagcgaccatttaaccaagcatgcccgacgccacctatcagccaagaagctgccaaactggcaaatggaagttagcaagttaaatgacattgctctgcctccgacccctgcttccgcacagtgacggccagaagatggagacgcagaataaactttggtcagagtcaggagccagtgatggtgtcaagtgcttctgcaaggctgtggccctccaaaagggcctaaagtagaagccctggcctgggggaggccccgcctgggtgaaatgacaagaagtgcttcagccacaggcaggtcacagaggacagggctcagttcttaccacagagagagaggagaacccttttattcctcccttattttagtctggaaagtttcggctgaggtgagcgcagcacaggttttgaatcacatacacattggggactttgtttttgccatttatacttgagaccagctttgcagtgtgattctttcaaaggattggtttcaagaatatagaggctggaaattacggtacagaaatggagctagaaaatgagtttgtgttacacagagatgtcatcttctcctagagttatcttgtttcttattcctagtctttccagtcaaatccgtggatgtagctaagtatatctaaaactcatttttccactattgttggtatttgaagttgaacagctgtacattgctgtgggggagccaaaggattggaaccctcattaatttaattgcttggaaatgcagctaaaattcttctttggcattttgttttgaaagtttaggcattttactctactttagattttagtttgcttgcagttttttgtgtagatttgaaaattgtataccaatgtgttttctgtaggcttaaaatacactgcactttgtttagaaaaaaatctggagatgaaaatatgtattataaagaagagatgtcaagaatttgagataactccttgagaaagttggctttatgtcatcagcaaaggacacttaacgtcaagcatacactgtggtttttttgtttttttgtttttttttttcaaattagaaagtttaatgaccgttacagatggacagtgtctttttatttataggagtttttcaggatgtcagagtagataggtaggaaaattgttattagaacattcgcttctaccttgaaaaggatgttaatgtggtcatgttcttagcaccacagtgtctgggcatctgggaaactccgagacttttttaaagtgtcatgatgtgatcacacctgcagtttggggcatcgaatccagggccttgcatgtcttctgtaagagctctcatcgctgacctgtatcccccgcaagagcaatgacttttgctaacagtatttcttttctgttgtaaagtggacagatgatacacttggtcgcaaaggtaaattattcaaaatccacagtgaaaacctcaccacactttcccatttaaactatttccatatctcagaggtttctgacatgcaaacttgaacccttgaaagaagagttttcttaaaaattataaaaaatcacgagttacaatttgcacaatattttttgttgaactttataccttgtttacaataaagacttttctttg

SEQ ID NO: 2684 - DNA, 920 bp, Mus musculus
ctaagatggaagcgttttgggagtcacgggctggccactgggccgggggtccggctccggggcagttttaccgcatcccgtccacccccagcggcctcatggacccggcgtcggcgccctgcgagggtcccatcactcggacccagaaccccatggtgaccgggacatcggtactcggggtgaagttcgacggcggagtggtgattgctgcagacatgctgggctcctacggctccctggctcgtttccgcaatatctctcgtattatgcgagtcaacgacagcactatgctgggtgcctcgggagactacgctgatttccagtatttgaaacaagttctcggccagatggtgattgatgaagagctgttgggagatggacacagctatagccctagagctattcattcatggttgacaagagccatgtacagccgccgctccaagatgaatcccctgtggaacaccatggtcattggaggctatgctgacggagaaagcttcctcggttatgtggacatgcttggtgtagcttatgaagccccttcactggccactggttatggtgcatacttggctcagcctctgcttcgagaagttctagagaagcagccagtgctgagtcagactgaggctcgggagcttgtggagcgctgcatgagagtgctgtactacagagatgcccgttcgtataaccggtttcaaattgccactgtgactgaaaagggtgtcgagatagaaggaccgctgtccgcacagaccaactgggacatcgctcacatgatcagtggctttgaatgaaatccagttgaatgtccagagtgttgaagctttgctcttctaaacgtgactgtagctggctcaaaggcagacttttgtaaaataaatcagtcgtttgaagtgttcaaaaaaaaaaaaaaa

SEQ ID NO: 2685 - DNA, 1301 bp, Mus musculus
ttctttgtgtgtcctacagggctccctgagccaggtccctgtttgatggcagttatgaaaaattacctcctcccgatcctggtgctcttcctggcctactactactattctacaaatgaagagttcagaccagaaatgctccagggaaagaaagtgattgtcactggggccagcaaagggattggaagagaaatggcatatcatctgtcaaaaatgggagcccatgtggtattgactgccaggtcggaggaaggtctccagaaggtagtgtctcgctgccttgaactcggagcagcctctgctcactacattgctggcactatggaagacatgacatttgcggagcaatttattgtcaaggcgggaaagctcatgggcggactggacatgcttattctaaaccacatcactcagacctcgctgtctctcttccatgacgacatccactctgtgcgaagagtcatggaggtcaacttcctcagctacgtggtcatgagcacagccgccttgcccatgctgaagcagagcaatggcagcattgccgtcatctcctccttggctgggaaaatgacccagcctatgattgctccctactctgcaagcaagtttgctctggatgggttcttttccaccattagaacagaactctacataaccaaggtcaacgtgtccatcactctctgtgtccttggcctcatagacacagaaacagctatgaaggaaatctctgggataattaacgcccaagcttctcccaaggaggagtgcgccctggagatcatcaaaggcacagctctacgcaaaagcgaggtgtactatgacaaatcgcctttgactccaatcctgcttgggaacccaggaaggaagatcatggaatttttttcattacgatattataataaggacatgtttgtaagtaactaggaactcctgagccctggtgagtggtcttagagcagtcctgcctgatacttctgtaagccctacccacaaaagtatctttccagagatacacaaattttggggtacacctcatcatgagaaattcttgcaacacttgcacagtgaaaatgtaattgtaataaatgtcacaaaccactttggggcctgcagttgtgaacttgattgtaactatggatataaacacatagtggttgtatcggctttacctcacactgaatgaaacaatgataactaatgtaacattaaatataataaaggtaatatcaattttgtaaatgcaaaactagtaactatgaatggagtttatttaacatgattcctttaagtctaaacaaatg

SEQ ID NO: 2686 - DNA, 2157 bp, Mus musculus
acccagtggcagactcgtagcgagcgaggcagcaccttcgactcagatcacaggagatacacctgttcttaaaagtgaaagaagaaatctaagaaaaacgctatggcaaagagaataaaagctaagcccacttcagacaaacctggaagtccatatcgctctgtcacacacttcgactcactagctgtcatagacatccctggagcagatactctggataaattatttgaccatgctgtagccaaatttgggaagaaggacagccttggaacccgggagatcctgagtgaagaaaatgaaatgcagccaaatggaaaggtttttaagaagttaattcttgggaattataaatggataaactatcttgaagtgaactgcagagtgaataactttggaagtggcctcactgcattgggactgaaaccaaagaacaccattgccattttctgtgagaccagggcagagtggatgattgcagcacagacttgctttaagtacaactttccacttgtgactttatatgccacacttggcagagaagctgtagttcatggattaaatgaatctgaggcttcctatctgattactagtgttgagcttctggaaagcaaactgaaggcggccttagtagatatcaattgtgttaaacatatcatttatgtggataataagactatcaatagagcagagtaccctgaggggcttgaaattcacagcatgcaatcagtagaggagctgggagccaagccagaaaacttgagcgttcctccaagtagaccaaccccttcagacatggccattgtcatgtacaccagtggttctacgggccgccccaagggattgatgatgcatcataccaatttgattgctggaatgacaggccagtgtgaacgtatccctggactaggaccgaaggacacatatattggctacttacctttggctcatgtgctggaactgacagcagagatatcatgcttcacctatggctgtaggattggatactcttcaccccttacactgtctgaccagtccagcaaaatcaagaagggaagcaagggtgattgtactgtactgaaacccacacttatggccgctgttccggaaatcatggatagaatttataagaatgttatgagcaaggttcaagagatgaattatgttcagaaaactctatttaaaatcgggtatgattacaaattagagcaaatcaagaaaggctatgacgcccctctttgtaatctgatactgtttaaaaaggtgaaggatttggtgggagggaatgtccgcatgatgctgtatggcggcgcgccactgtcccctcagacacaccgattcatgaatgtctgcttgtgctgccccattggtcagggatatgggctgacagaatcatgtggtgctggaacagttactgaagttactgactacactactggaagagttggagctcctcttatttgctgtgaaattaaactgaaagactggcaggaaggtggttatacagttcatgataagccgaaccccagaggtgagattgtgatcggtggccagaatatctccatgggatattttaaaaacgaagagaaaacagcagaagattattgtgttgatgaaaatggacaaaggtggttttgcactggcgatattggagaattccatcctgatggatgcttacagattatagatcgtaagaaagatctggtaaagttacaagcaggagaatatgtatttcttgggaaagtagaagctgcactgaagaattgtccactgatcgacaacatctgtgcttttgccaaaagtgaccagtcctatgtgatcagttttgtggttcctaaccagaaaaagttgactcttttggcacaacagaagggggtagaaggatcttgggttgatatttgcaataatcccgccatggaagctgaaatactgaaagaaattcgagaagctgcaaatgccatgaaattggagcgatttgaaattccgatcaaggttcggttaagcccagagccatggacccccgagactggtttggtaacagatgccttcaagctgaaaaggaaggagttgaagaaccattatctcaaagacgttgagcggatgtatgggggcaaataaaatgcggctctctgatttccatttgcacaggaggtggcctga

SEQ ID NO: 2687 - DNA, 583 bp, Mus musculus
aatggaggaggaggaggtcgagacctttgcctttcagcagaaattgcccagttaatgtccttgatcatcaataccttctactcgaacaaagagatctttctgagggagctcatctccaattcatcggacgctctggataaaatccgttacgagagcctgacggaccccagtaaactggactcggggaaggagctgcacatcaatctcattcccagcaaacaggaccgaaccctgaccattgtggataccgggattggaatgaccaaggccgacttgatcaataaccttggcaccattgccaagtcgggcaccaaagccttcatggaggctttgcaggctggtgcagatatctctatgattggccagtttggtgttggtttttactctgcctatttggttgctgagaaagtgactgtcatcacgaagcatagcgacgatgagcagtatgcctgggaagtctcagctgggggattcttcacagtgaagactgacacaggtgaaccagatgggtcgtggaacagaggttatcttgcatctgaaagaagaccaacagggtaattcggagaaagagaataaggagatt

SEQ ID NO: 2688 - DNA, 510 bp, Mus musculus
ttttttattacatataatttacttaatttagtaaattcagtcttgagatttttaattcttggtctacttgttcttcttagcacatcgcatatattccaaaacaactaaaaattattttcttgattaacaacccaactggcatacatagtacatacagttagtcagacatttttgtgtaatctggggtagaattataaggtctaaaacatatatggctagaataaaaaaatgtaatgaccaaaaatgaataatctataatgttaataaatggcaccagctccagacacttttaactgtaataaatattctttatgaaattttgacttctgtttttatccagatccttaatggagtatgagccttcagtttccagcatggcaaccagaaattatttgattagtactcagatatattgtatgtaagggatgataaatcctgaaaaaaacggaaaaacatagtcttgaggtacaaatacagcagtcaacatgaatattcccctcagggacatga

SEQ ID NO: 2689 - DNA, 1596 bp, Mus musculus
ccagcactgggcaaggaagggcaggagcagagagtgaggtggtgttcactgggtcggaggatggaggcgcacaacgtatcagcccccttcaatttctccctgccgcctggctttggccaccgggccacagacactgcgctcagcgtcattctggtagttatgttgctgctcatcatgctctcgcttggctgcaccatggagttcagcaagatcaaggctcacttctggaagcccaaaggggtgatcatcgccatagtggcccagtacggtatcatgcccctcagtgctttccttctgggcaaggtctttcatctgaccagcattgaggctctggccatcctcatctgcggctgctctcctggggggaacctgtctaacctcttcaccctggccatgaagggggacatgaacctcagcattgtgatgaccacctgctccagcttcactgccttgggcatgatgcctctcctcttatacatctacagcaaaggaatctacgacggagatcttaaggacaaggtgccctacaaaggcattatgttatcactcgtcatggttctcattccttgcgccatagggatcttcctgaagtccaaaaggccacactatgtaccctacgtcctcaaggcaggcatgatcatcactttctccctctctgtggctgtcacagtcctgtctgtcatcaatgtgggcaacagcatcatgttcgtcatgacaccacacttactggctacctcctccctgatgcctttcactggcttcctgatgggctacattctctctgctctcttccgactaaatccaagctgcagacgcaccatcagcatggaaacaggattccaaaacgtccaactctgttctaccatcctcaatgtcaccttcccccctgaagtcattggaccactgttcttctttcctctcctttatatgatttttcagcttgcagaaggacttctcttcattattatcttccggtgctatttgaaaatcaaacctcagaaggaccaaacaaaaattacctacaaggctgctgcaacagaagatgctactccagcagctctggaaaaaggtacccacaacgggaataatcctcctacacaacctggcctttcccctaatggcctgaactctggtcagatggcaaattagaatgtgaaaacttagaagcaacaaggaaagtaacacctagtgtgccagattgtctagcacttccagcaaaccttcaacagcagaatcatgaagcaatgaactgaggcagaagggcatctatccaggaaccatcatccatccccaaaaatctgctatttgtttaaaagataaaaaagaactaggcaaagtggttcctccctataattccaatgctcagagactcaaggtcaaccttgagtacacagcaagactgtctcaagaaaccaagaacactttcagcagctatgaactcttatgaaggctctatgaaacagctacatctgataaacattatcactatttctagactttccaataagcaggtgttttgctcattaagcatccacaacctgcttcatgttgtaactcaaaaggaaataaactacaactggtagttctaacttacct

SEQ ID NO: 2690 - DNA, 789 bp, Mus musculus
atgcttgctttgtccacattgctggcatcaggcccaggcacctgctctgctctgagcaaatggctgctcttcgcatgctgtggatgggtttggtcctcctgggtctcttgggattcccacagaccccagcccagggccatgacacagtgcagcccaactttcaacaagacaagttcctggggcgctggtacagcgcgggtcctcgcctccaactcaagctggttccgggagaagaaagctgtattgtatatgtgcaagacagtggtagccccctccacagaaggcggcctcaatctcacctctaccttcctcaggaaaaaccagtgtgagaccaagatcatggtactgcagcctgcgggggctcctggacactacacctacagcagcccccactcgggcagcatccactccgtgtcagtggtggaggccaactatgacgagtacgctctgctattcagcagaggcaccaagggcccaggccaggacttccgcatggccaccctctacagcagaacccagactctgaaggacgagctgaaggagaaattcaccacctttagcaaggcccagggcctcacagaggaggacattgttttcctgccccaaccggataagtgcattcaagagtaaacgcaggtgagagaagtcagtcagagggctggtcacatggtgacctggcctcaggactcccttgctctgtcactctcaagatcccagccctggctccccaaagtacctctacaccctccagctttgccttgacaaagaaataaaagtccaaagcaagtc

SEQ ID NO: 2691 - DNA, 1709 bp, Mus musculus
ccactgtggaattcccgggtcgacccacgcgtccggctgagctctgggcagaaccatcgttcctgattcttcaaggtggaccccaagggggaaatccaacaaaagcagtggcccccagacagtctaggacacacagatgtaaacctagagatgagacctgaggagagctggagccgagttggccttgtacagtgtgaagaagcagactctgccttggaagagcccatcaacgtagaggaggaagatggaggtcttcaaatctgccgtgtatgtggggacaaggccaatggctaccacttcaatgtcatgacgtgtgaaggatgcaaggggtttttcagaagggccatgaaacgcaatgtccggctgaggtgccccttccgcaagggaacctgcgagatcacccggaagacacgacggcagtgccaggcctgccgtttgcgcaagtgcctggagagtggcatgaagaaagagatgatcatgtccgatgccgctgtggagcagaggcgggccttgatcaagaggaagaagagggaaaagattgaggctccaccgcctggagggcaggggctgacggaagaacagcaggcgctgatccaggagctgatggacgctcagatgcaaacctttgacacaactttctcccacttcaaggatttccggctgcctgcagtgttccacagtggctgtgagcttccagagtttctgcaggcctcactgttggaagaccctgccacatggagtcaaatcatgaaagacagggttccaatgaagatctctctgcagctgcgcggagaagacggcagcatctggaactaccaacccccttccaagagcgacgggaaagagatcatccctcttctgccacacctggccgatgtgtcaacctacatgttcaagggcgtcatcaacttcgccaaagtcatatcctactttagggacctgcctattgaggaccagatctccctgctgaagggggccacttttgagatgtgcatcctgaggttcaacacgatgttcgacacggaaacgggaacctgggagtgcggccggctggcttactgcttcgaagaccctaatggtggcttccagaaacttctgttggatccattgatgaaattccactgcatgctgaagaagctacagctgcataaggaggagtatgtgctgatgcaggccatctccctcttctccccagatcgtcctggtgtggtccagcgcagcgtggtagaccaactgcaggagaggtttgccctcaccctgaaggcctacattgagtgtagtcggccatatcctgctcacaggttcctgttcctgaagatcatggccgtcctcactgagctgcgaagcatcaacgcccagcaaacccagcagttgctgcgcatccaagactcgcacccctttgccaccccactcatgcaagagttatttagcagcacagatggctgagtggctgcccctgagtggagatctcatggggcagctagacccagacattctgaattgccacttctagggctagacagatggacatactgatagccaacaacgccctctgactgcagctggttagcatttctcaggaaaagacatgggagcccccaagttcagcctgtgggaagtgctggcctatgagttaagacaatctttgtggttgggaataaacttccaaatcccgctaaaaaaaaaaaaaaaaaaaaaaaaaaaaaaaa

SEQ ID NO: 2692 - DNA, 1278 bp, Mus musculus
  misc_feature 19: n = A,T,C or G
cttggtaccgagctcgganccactagtaacggccgccagtgtgctggaattcggcacgaggcttagctgtagctagtgtgggagcctgggaagtctaggagcaaagtctctcaagcagacagaaagctacagcttcacacattgtgttgcctgccagctttccccagaggctgccctcagcagggcatctcatcccatcatgtggctgcctctgcttctgggtgccttgctgtgggcagtgctgtggttgctcagagaccggcagagcctgccggccagtgatgctttcatcttcatcactggctgtgactctggctttgggcgccttctggcactgcaacttgaccagaagggcttccaagtcctggccggctgcctgaccccctctggagcagaagacctgcagcagatggcctcctcccgcctccacacaacactactggatatcactgatccccagaatgtccagcaagttgccaagtgggtgaagacacgtgttggagaaactggactttttggtctggtgaataacgctggcgtagctggtatcatcgggcccacaccatggctaacacaggatgatttccagagagtactgagtgtgaacacactggggcccatcggtgtcacccttgccctgctgcccctgctacagcaggccaggggtcgggtggtcaacatcaccagtgtcttgggccgcatagcagccaatggcgggggctactgtgtctccaagtttggcctggaggccttctctgacagcctgaggcgggacatggctccgttcggagtacaagtctccattgtggagcctggcttctttcgaacccctgtgaccaacctggagagtctggagagcaccctgaaggcttgttgggcccggctacctccagctatacaggcccactacggggaagccttcctcgatacttatcttcgagtacagcgccgcatcatgaacctgatctgtgacccagaactaacgaaggtgaccagctgcctggagcatgccctgactgctcgccacccccgaacacgctacagcccaggctgggatgccaagctgctctggctgcctgcctcctaccttccagccagggtggtggatgctgtgctcacctggatccttccccggcccgcccagtcagtctcctgattccagctttacagcaagaggctgattttgaaaagcaaggcatctatttctgtgtctacccagtgctgcctggtttctgataccaattaggctctcaataaatatgtatgctttaaatcaaa

SEQ ID NO: 2693 - DNA, 5560 bp, Mus musculus
actagtctcgaccatgtaccatcacggagacgacaccaacagtgacatgaacagtgacgacgacatgagccgaagtgggagagaaaccccaccccctcgaccatctcatgcttttggcagtgagcgagacctggagcgcaggggcagaagcagagatgtggagcctcgagaccgctggccatacaccaggaatcccagaagcaggctgcctcaacgggatctttctcttcctgtgatgtcaagaccacattttggactggacagagatgatgacagacgttccatggattatgagtctcgatcccaggatgccgagtcataccagaatgttgtggaactcaaagaggacaagaagcctcagaatccaattcaggacaacctggagaactacagaaagctgctctcgctgggagtccagcttgccgaagatgaccgacactctcacatgacacaaggccactcatcgaggtccaagagagctgcctacccaagcaccagccgaggtctcaaacccatgcctgaggccaaaaagccatcccacaggcgtgggatctgtgaggacgagtcttctcatggagtgataatggaaaaattcatcaaggatgtggctcgcaaccccaaatccggaagagcaagggagctgaacgagcgtcctcctccaaggttccccaggcctaatgataactggaaggacagttcctccagcagaagagagtcagtgatccaggagaggggttatgaagggagcgcatttaggggcggcttccggttcaacgcagacctggcttccagaagcagagctctagaaaggaagaggcgttaccactttgattctgatgagcggggttcgggccatgagcataaaagctgtgtgaggaagaagccttttgagtgtggtgctgagatgagacaggctatgagcatgggcaacctgaacagcccttccttctctgagtcgcagtcaatcgattttggggccaacccatacgtgtgtgatgagtgcgggaggcagttcagtgtcatctctgagtttgttgagcaccagatcatgcacactagggagaacctctatgaatatggagagtcctttattcatagcgtggctgtcaatgaggtgcaaagaagtcagggtggggggaaacgctttgagtgtaaggaatgtggagaaaccttcagtaggagtgctgccctggcagagcaccgccaaatccatgctagagaatatcttgcagaatgtagagatcaggaggatgaggagaccatcatgcctagcccgacctttagtgagctgcagaagatgtatggcaaagataagttctatgagtgcaaggtgtgcaaggagacctttctgcacagttccgccctgattgagcaccagaaaatccatggtagaggcaactcagatgacagagataatgagcgtgaacgcgaacgtgatcgtctacgtgcacgtgcacgagagcagcgtgagcgcgaacgtgaacgggagcgtgagcgtgagcttggggaaccctttctgacctgtccaaacttcaatgagtttcggaagatgtacaggaaagacaaaatctatgagtgcaaagtgtgtggggagagctttcttcatctctcatccctgagggagcatcagaaaatccatactagaggaaacccatttgaaaataagagcaggatgtgcgaggagacctttgtccctagtcagtctctccgacggcgccagaaaacttacagagagaagctgttcgactttaacaatgccagggatgcactgatgggaaactcagactccagcgagcatcagaaaaaccgttcccgaaggaacttctttgagggcagaggatttgagaaacccttcgttgaatctcagaagagtcatactataacaagaccacctgaaaacaaagacgatgacaagccgttcacaatcagtgtcaaccctaatgacaagctgaaactccccatcatggaaaatggctcccagggcaaatcctgtgagaggtctgttattcatagcttgggctccgcagaagctcagaagagtcatggtggactggggttcagtaaaccaagaccagtggcagagtctagcacccagagctcaagcagcatttactaccccagagcacactctggaggcaacacctatgaaggaaaagaatacaaggactctatcatccatagcttgccagctcctcgacctctgaaacgtcatagagcaaatgaccatattcaatgtgatgaggggggagaatcctccatttatatcccagatattattaataagggaaggaagattcctgccagagaagatgcttatgaaggaagtagcagcagcaactaccacacaccaaatgtatcccgtgctgagcctccaagtctttctggagagtcccatgactctaagcaggatgtcacgttttcagttcccagctcaagtgttcgtgaacaccagaaagctcgtgccaaaaagaagtacattgagcccaggaacaacgagacctctgttatccactccctaccttttggtgagttgcttgcaggtcaccgtagggcaaagttctttgagtgtcaggaatgcggggaggcctttgctcgtaggtctgagctcattgagcaccagaagattcatgatagagaaagaccttctggaagccgacattatgagcgctctgtcatccgcagccttgcgcccagtgaccctcagaccagttatgcccaagaacgtttcatccaagaacaagtgcgtaaattcagagcgtttggacaacgctcaactaccagcaacaacctcagtgtacagaaaatctatgcccaagagacatttaatgccgaggagccccatgataaagaaactcatggtcaaaaaattcatgacaaagagccatatggtaaggagcccagtggcaaggagccccatggtgatgagccccaggacaaagaaccccttgttcaggagatgcgcagtgaagagccccatgatgataagccccatggccaggagccccatgatgataagccccatggccaggagccccatgatgataagccccatggccaggagccccacggtgatgagccccatggccaggagccccacggtgatgagccccatgacaaggaacccattgatcaggagatgcgcagtgaagagccccacagtgaagagtctcatggtgatgagccccatggtgaagagtcccatggccaggagaaagttgaagatgctaccattcaggcctcagtttctgaagagcatcagaaagatgacgctggtgatgcaatctatgaatgccaggactgtgggctgggctttactgatctcaatgacctcacaagccaccaggacacccatagcagaaaggctctggttgacagtcgtgaatatgcacattctgaagttcatgcccactccgtcagcgaatttgagaaaaaatgctctggagagaaactatatgaatgtccaaaatgtggggagtctttcattcacagctcgttacttttcgagcaccagagagttcacgaacaagaccagctgtattccgtaaaggcctgttatgacgctttcatcgctctgttgcccgttagaccaaggagaaattgcactgttgaaaggaatcctgccgtttctgggtcagccattcgatgccgtcagtgtggacaaggcttcattcacagttctgccctaaatgagcacatgagacagcacagagataatgaaataatggaacagagtgagctttcagatgagattttcattcaaggcctagccctcactgagtatcaggggagtgaaacagaagagaagcttttcgagtgcacaatctgtggggaatgcttcttcactgccaaacagctcggggaccaccacaccaaagttcacaaggatgagccctatgagtatgggccctcctacacccatgcctcctttctcaccgagcccctcaggaagcacatcccactgtacgaatgcaaagattgcggccagtccttcctagacgacactgtcatcgctgagcgcatggtgtttcatcctgagcgagaaggtgggtcagaaatagtagctgccactgcccaagaggtcgaagccaatgtcctcatcccacaagaagtactgcgaatccaggggtcaaatgcagaagctgctgagcccgaagtggaggctgcagagcccgaggtggaggctgcagagcctgaggtggaggctgcagagcctattggagaggctgaagggccagatggagaagctgctgagcctgatggcgaggctgagcagcccaatggagaggctgaacagccaaacggtgatgctgacgagccagacggagccgggatcgaagacccagaagagagagctgacgagcctgaggaagacgtcgaagagccagagggagatgcagatgagcccgatggtgcagacattgaagacccagaagaggaaggagaagatcaagagattgaggttgaagaaccatactacaactgtcatgaatgcgcagaaacgttcgcttccagctcagcctttggcgagcatctgaaaagtcacgccagtgtgatcatcttcgagccggccaatgctcctggagagtgctctggctacattgaacgggccagcaccagtgcaggtggtgcggagcaggcagacgacaagtacttcaaatgtgatgtgtgcgggcaactcttcaacgaccgcctctcccttgccagacaccagaattctcacactggttgagtaaccaggctgaagaaaagaagagcaaagccaaaccttcttcccagaaccagacccttaataaatcacaaagagagcctaaaccaacccataatgtctataagaaattcaccttcctgtatacataccggacttcacatcaaagactttcactctcatcacagactgaaaaaagaaaagacattgaacgcagggactctttcagttttagctgttccctatggaacatcagtgtatatttgggaaagctagagtgaacatctacatcttccatttcatctaagtaactagattgagggaaacctagtgacaattccagaccacagaggttgccccagtcgactgtaaatgatacccctttcataccctatacataatgattcctgccatgtatataaatgagcaaatcagtgatacatatatttggatttagtgtgctatagaatttacagtttactctacagagctacctagcctggtactctgattttttccctgaggaggaagagagcaacaatttagcatatatttgtaagtattgtccatgcagaagcttttctgtgcatcatttgaaccccattagtatcctttccagtaatggagtgttctgtcccctacctcttagatagtcctgtgaaggtgtgggtgtgaaagatcgtgtgtctttgaatcctggctgtgtggaaacaggcattttagcttctacagccatttggtgtgcacccagaccccttgagactgattgtgtaaccctttacaatatatggatttgtctctgtgacccaaatcaacccatccctacatttatataccttacagtggttttcttgc

SEQ ID NO: 2694 - DNA, 1751 bp, Mus musculus
gttcgctatggatctggtcgtgttcctagcgctcactctatcctgtcttattctcctctcactatggagacagagctctgggagagggaagctccctcctggccccacgcctctcccaattattggtaacttcctccagatagatgtgaagaacatcagccaatccttcaccaacttctcaaaagcttatggccctgtgttcactctgtatttgggctcaaagcctactgtcatattgcatgggtatgaagcagtgaaggaagctctgattgatcgtggggaggagtttgctggtagaggaagctttccaatggctgaaaaaattattaaaggttttggcgttgtttttagcaatggaaacagatggaaagagatgagacgatttacactcatgaccctgcgaaatttgggcatggggaaaaggaacattgaggaccgtgttcaagaggaagcacagtgtcttgtggaagaactgaggaaaaccaaaggctcaccctgtgaccccaccttcatcctgagctgtgctccatgcaatgtcatctgctcaattattttccagaatcgttttgattataaggataaggaatttcttatcctcatggataaaataaatgagaatgtcaagattctgagctccccatggttgcaggtctgcaatagtttcccttcactcattgactattgtcctggaagtcatcacaaaatagtaaaaaattttaattatctaaaaagttatttgttggagaaaataaaagaacacaaggaatcactggatgttacaaacccccgtgactttattgattattacctaattaaacaaaaacaggtaaaccacattgaacaatcagagttttcacttgaaaatctggcaagcactatcaatgacctctttggtgcagggacagagaccacaagcacaacactgagatatgctctcctactcctgctgaagtacccagatgtcacagctaaagtccaggaagagattgaccgtgtggttggcaggcaccgcagcccctgcatgcaagacaggagccacatgccctatacagacgccatgattcatgaggtccagagattcatcgacctcctccccactagcctgcctcatgcagtgacctgtgacattaaattcaggaaatacctcatccccaagggaactacagtaataacatcactgtcatcagtgctgcatgacagcaaggagtttcccaacccagagatgtttgaccctgggcactttctaaatgcgaatggaaactttaagaaaagtgactacttcatgcctttttcaacaggaaaacggatttgtgctggagagggcctggcccgcatggagctgtttctaatcctgacaaccattttacagaacttcaaactgaaatctctggtccacccaaaagaaattgatattaccccagtgatgaatggatttgcctctctgccacccccttaccagctctgcttcattcctctctaaagagatcagactttctggcccctgctgtgatgccttctacaattgtctcaggtctttatccacatccctccctatcagggatatggtatctttcatcctggcttacagaaccctcttctctcaagacccagcaaacacatacagtttctggagttatagtacaaatgcacttgtattttctcttttatataacagttttctgattccttgtgtttatgtgtatccattcttgagtaaaaataaagcttcactgtaaagaaaaataaaactc

SEQ ID NO: 2695 - DNA, 6734 bp, Mus musculus
ggtgccgggagcagcatgcggagcccgcagacgctgcccctctggacacctcagcctgaggcctctccgtgagtcacgggggtaccatcccccaccagggcagaggctggaggccactgccaagcatggcgcccacctggagtcccagcgtggtgtctgtggtgggtcctgtggggctcttcctcgtactgctggccagaggatgcttggctgaagaaccacccaggtttatcagagagcccaaggatcagattggagtgtcgggaggcgtggcctccttcgtgtgccaggccacgggtgatcctaagccacgggtgacctggaacaagaagggcaagaaagtgaactcacagcgcttcgagaccattgactttgacgagagctctggggcggtcctgaggatccagccacttcggacgcctcgggatgagaacgtgtacgagtgtgtggcccagaactcggtgggcgaaatcacaattcatgcaaagctcaccgtccttcgagaggaccagctgcctcctggcttccccaacattgacatgggcccccagttgaaggttgtagagcgcacacgcacagccaccatgctctgtgctgccagcgggaacccggaccctgagatcacctggtttaaggacttcctgcctgtggaccccagtgccagcaacgggcggatcaagcagcttcgatcaggtgccctgcagattgagagcagcgaggagacagaccagggcaagtacgagtgtgtggccaccaacagcgctggggtgcgctactcatcacctgccaacctctacgtgcgagtccgccgtgtggccccacgcttctccatcctgcccatgagccacgagatcatgcccggtgggaatgtgaatatcacttgtgtggccgtgggctcacccatgccctacgtgaaatggatgcagggggccgaggacctgacgcctgaggatgacatgcccgtgggtcggaatgttctagaactcacggatgtcaaggactcagctaactacacttgtgtggccatgtccagcctgggtgtgatcgaggccgtggcccagatcactgtaaaatctctccccaaagcccctgggactcctgtggtgacggagaacactgccaccagtatcactgtcacatgggactcgggcaaccctgaccccgtgtcctactacgtaattgagtataagtccaaaagccaggatgggccgtatcagatcaaagaagacatcaccaccacgcgctacagcatcggaggcctgagccccaattctgagtatgagatctgggtgtcagctgtcaactccattggccagggccctcccagtgaatcggtggtgacccgcacaggtgagcaggcaccagccagcgctcccaggaatgttcaggcccgcatgctcagcgccaccaccatgatcgtgcagtgggaggagcctgtggagcccaatggcctgatccgtggctaccgtgtctactataccatggagccggaacacccagtgggcaactggcagaaacacaatgtggacgacagtctcctgaccactgtgggcagcctgctggaagacgagacctacaccgtgcgcgtgctcgccttcacgtcggtgggcgacggaccactgtcagaccccatccaggtcaagacccagcagggagttcctggccagcccatgaacttgcgggctgaggccaagtcagagaccagcattgggctctcgtggagtgcaccacgacaggagagtgtcattaagtatgaactgctcttccgggagggcgaccgaggccgagaggtggggcgaaccttcgacccaaccacagcctttgtggtggaggacctcaagcccaatacggagtatgcgttccggctggcggcgcgctcgccgcagggcctgggcgccttcaccgcggtcgtgcgccagcgcacgctgcaggccaaaccgtcagccccccctcaagacgttaagtgcaccagcttgcgctccacggccatattggtaagttggcgcccgccaccgccagaaactcacaacggggccctcgtgggctacagcgtccgctaccgaccgctgggctcagaggacccggaccccaaggaggtgaacaacatacccccgaccaccactcagatccttctggaagctttggagaaatggacggagtaccgtgtcaccgccgtggcttacacagaggtgggaccagggcccgagagctcgcccgtggtcgtccgcaccgatgaggacgtgcccagcgcgcccccgcggaaggtggaggcggaggcgctcaacgccacagccatccgagtgctgtggcgctcgcccacgcccggccggcagcacgggcagatccgcggctaccaggtccactatgtgcgcatggagggtgccgaggcccgcgggccaccgcgcatcaaggacatcatgctggcggatgcccaggaaatggtgataacgaacctccagcctgagactgcttactctatcacagtagccgcgtataccatgaaaggcgatggcgctcgcagcaaaccgaaggtggtggtgaccaagggagcagtgctgggccgccccaccctgtcggtgcagcagacccccgagggcagcctgctggcgcgctgggagccccccgcggacgcggccgaggacccggtgcttggctaccgcctgcagtttgggcgcgaagacgcggccccggccacgttggagctggctgcgtgggagcggcggttcgcggcgcctgcacacaagggcgccacctatgtgttccggctggcagcgcggggccgcgcggggttgggcgaggaggccgcggcagcgctgagcatccccgaggacgctccgcgcggcttcccgcagatcttgggcgccgcgggcaacgtgtccgcgggctccgtgctactgcgctggctgccacccgtgcccgccgagcgcaacggcgccatcatcaagtacacggtgtccgtgcgggaggccggcgcccctgggcccgcgaccgagacggagctggcggcggccgcccagccgggggccgagacagcgctcacgctgcgagggctgcggccggagacggcctacgagttacgcgtgcgcgcacacacgcgtcgcggcccgggccccttctcacccccgctgcgctacaggctcgcgcgggacccagtctccccaaagaacttcaaggtgaagatgatcatgaagacttcagtgctgctgagctgggagttccccgacaactataactcacccacaccctacaagattcagtacaatgggctcaccctggatgtggacggccgcacgaccaagaagctgatcacacacctcaagccacacaccttctataatttcgtgctcaccaaccgtggcagcagcctggggggcctgcagcagacggtcactgccaggaccgcctttaacatgctcagtggcaagcctagcgtcgccccgaagcccgacaatgacggtttcatcgtggtctacctgcctgatggccagagtcctgtgaccgtgcagaactacttcattgtgatggtcccacttcggaagtctcgaggtggccagttccctgtcctactaggtagtccagaggacatggatctggaggagctcatccaggacatctcccggctgcagaggcgcagcctgcgccactccagacagctggaggtgcctcggccctacatcgccgctcgattctccatcctgccagctgtcttccatcctgggaaccagaagcaatatggtggctttgacaacaggggcttggagccaggccaccgctatgtcctctttgtgcttgctgtgttgcagaagaatgagcctacatttgcagccagtcccttctcagaccccttccagctggacaacccggaccctcagcccattgtggacggcgaggagggcctcatctgggtgattgggcctgtgctggccgtggtcttcatcatctgcatcgtgattgccatcctgctgtacaagaacaaacctgacagcaaacgcaaggactcagagccccgcaccaaatgcttactgaacaatgccgaccttgccccccatcaccccaaggaccctgtggaaatgcgacgcatcaacttccagacaccaggtatgctcagccacccacccatccccatcacagacatggcggagcacatggagagactcaaagccaacgacagcctgaagctctcccaggagtacgagtccattgaccccgggcagcaattcacgtgggaacattcgaacctggaggccaacaagcccaagaaccgctatgccaacgtcatcgcctatgaccactcacgagtcatcctgcagcccctagaaggcatcatgggtagtgattacatcaatgccaactatgtggacggctaccggcggcagaatgcatacattgccacgcaggggcccctgcctgagacctttggggacttctggcggatggtgtgggagcagcgatcggccactgtggtcatgatgacgcgactggaggagaaatcacggatcaaatgtgaccaatactggcctaaccgaggcaccgagacatacggcttcatccaggtcaccctactagataccatggagctggctaccttctgcgtcaggactttttctctacacaagaatggctctagcgagaagcgtgaggtgcgacatttccagttcacggcatggcccgaccacgggtaccccacgcccttcctggcattcctgcgaagagtcaagacctgcaacccgcctgatgctggccccattgtggtccactgcagcgcgggtgtggggcgcactggctgcttcatcgtaattgacgccatgctagagcgcatcaagacagagaagaccgtggatgtgtatggacatgtgacactcatgcggtcgcagcgcaactacatggtgcagacagaggatcagtatggcttcatccacgaggcgctgctggaggctgtgggctgcggcaataccgaggtccctgctcgcagcctctacacctacatccagaagctggcccaggtggagcctggcgagcacgtcacgggcatggagcttgagttcaagaggctcgccagttccaaggcacacacttcgcgcttcatcaccgccagcctgccttgcaacaagtttaagaaccgactggtgaacatcctgccgtacgagagctcgcgtgtctgcctgcagcccatccgcggtgtggagggctctgactacatcaatgccagctttatcgacggctatagacagcagaaagcctacattgcaacacaggggccactggcagagaccacagaggacttctggcgagctctgtgggagaacaactctactattgtcgtaatgctcaccaagctccgagaaatgggccgggaaaagtgccaccagtactggccagccgagcgctctgcccgctaccagtactttgtggttgacccgatggcagagtataacatgccacagtacattctgcgtgagtttaaggtcacagatgcccgggatggccagtcccggaccgtccgacagttccagttcacggactggccagagcagggtgcacccaagtcaggggaaggcttcattgacttcatcggccaagtgcataagaccaaggagcagtttggccaggacggacccatctcagtgcactgcagcgccggagtgggcaggaccggagtgttcatcaccctgagcatcgtgcttgagcggatgcgctacgagggcgtggtggacattttccagacagtgaaggtgcttcggacccagaggcctgccatggtgcagacagaggacgagtaccagttctgcttccaggcggctttggaatacctgggcagttttgatcattatgcaacataagccatgggccccgcccaacacctcagccctgcgccaagtgccctggatgtgagcctaggcccgccgctgggcaggatgcggcccagggagacctcctcttcgcggagacaggcgctgccttcctcattcccttctgattccaaaacgaggttccagggtggggggttggggtggagagagaaggagccactgctccccaggctggggtcacacagggaccgacctctgcttccgcactcccctgcctgccttttggcaacattttttttcttatttttttttaatagtgtatattttttttctttttctttttttcttttttttttttaagaaaaaaacaaaatcgtgccggtcaaaactttgaaaaagaaacaagatcactgtttgtgcctctgtgggaggcctattttttcatagttagtgtgccgtgtggcggctatgtgcggccacttcgacggcttctgtgtgtgcatctttcccacatgcccgacactgcccccatccccatgtgaatggtgcgcttagtttttatttttaacctttttactttttttttaatcaatcttcagacatatcagatatggagggtgaggcgctgggggcactcgggccagactacagggacatggccaccaaggacacagtggctggccttgctgctcccagtccctggcacaccagggagggtcctcgtctactcatgacctctgtgccccgcatggaggacctgggactacgggacacttgggggatatccaaccccctggagcaactgaggtctctctttgtaggagagtgggtcagtactcgtccccgctgttttttgggcagaagcagcaggtgacgcccctgtatgtagataaaccaactttgtattaaagaaagattcgtccg

SEQ ID NO: 2696 - DNA, 1668 bp, Mus musculus
gcccggcgtctaaacacaggtgggagcgggagatcccgacaggtgagccccgcgcccagcagtcgcaaggatggagttcgtcaagtgtctaggccacccggaggagttctataacctgctgcgattccgcatgggaggccggcggaattttatacccaagatggaccaggactcactcagcagcagcttgaagacctgctacaagtatctcaatcagaccagtcgcagctttgccgcggttatccaggcgctggatggggacatacggcacgccatatgtgtgttctacctggttctccgagccctggatacagtggaggatgacatgagcatcagtgtggagaagaagatcccactgctgtgtaacttccacactttcctctatgacccagagtggcggttcactgagagcaaggagaaggaccgacaagtgctggaggacttccccacgatctccctggagtttagaaatttggctgagaaatatcaaacagtgatcgatgacatctgccaccggatggggtgtgggatggcagaatttgtagacaaggatgtgacctccaaacaggactgggacaagtactgccactacgttgctgggctggtgggaattggcctttctcgtctattctctgcctcagagtttgaagaccccatagttggtgaagacatagagtgtgccaactcaatgggtctgttcctgcagaaaacaaatatcattcgtgattatctggaagaccaacaggaaggaaggaagttttggcctccaggagggtgtggggcagatacattaagaagttggaagactttgctaagccagagaacgtagatgtggccgtgcagtgcttgaatgaactcataaccaacaccctacagcacatccctgacgtcctcacctacctgtcaaggctccggaaccagagtgtgtttaacttctgtgctattccacaggtaatggccattgccacactggctgcctgttacaataaccagcaggtattcaaaggagtagtgaagattcggaaggggcaagcagtcaccctcatgatggatgccaccaacatgcctgccgtcaaagctatcatataccagtacatagaagagatttatcaccggatccccaactcagacccatcatcaagcaaaaccaagcaggtcatctccaagatcaggacacagaaccttcccaactgccagctcatctcccgaagccactactcccccatttacctgtcatttatcatgctcttggctgccctgagctggcagtacctgagcaccctgtcccaggtcacagaagactatgtccagagagaacactgattttgtttagccggaagtggaagttcccgtggagtgggtttttccttttcctccagctggattttgacttcccttgtttttcctcctactctaaaatctttgggagaactgagtgtgggacctttaggaactgggcagaggaaaggatgccttgccctcagcagcctggtgctggctgggacttggttcctctgcctcttgtagccactggcagcgtgccgactgctgcacttgtgaggccacgtgtgatggtcacaagagcctagtgaacctggctagaatgctgattggatttatttaatttgaaacagcctttgaatacctatgacaatagaaaatgaaagc

SEQ ID NO: 2697 - DNA, 1385 bp, Mus musculus
cgggggccgcagccggtggccggctcgccgtgggcccgttcccggctctccacgctcggttcctctcgctctgcggagactggaggacggaccccgcggagctgtggcggcagaatggcgcagaccgccatgtccgagacttacgatttcttgtttaaattcttggtcatcggaaatgcgggaactggcaaatcttgcttgcttcatcagttcattgaaaagaaattcaaagatgactcaaatcataccataggaatggaatttggctcaaagataataaatgtcggtggtaaatatgtaaagttacagatatgggacacggccggccaggagcggttcaggtctgtgacgagaagctactacagaggtgcagctggggcactccttgtctatgacatcaccagccgagaaacctacaatgcgcttactaattggttaacagatgccagaatgctggcgagccagaacatcgtccttatcctctgcgggaacaagaaggacttggatgccgaccgggaagtcaccttcctcgaagcctccaggttcgcacaagagaatgagctgatgttcctggaaaccagtgcactgactggcgagaacgtcgaagaggctttcatgcagtgtgcaaggaaaatacttaacaaaattgaatcaggtgaactggaccccgagaggatgggctctggcatccagtatggagacgctgccctgagacagctgcggtcacctcgacgtacacaggctccaagtgcacaggagtgtggctgttaggcgccccagtgacacaggttcagcggtgggtcctggagtacagccgccggaggctgaagaggctggagtttttactaccatcttttctactcggcacagaagtagatcttcctggggaacggtgtacactggcagccgggggctcagcagccattctgcgaactaactcagcggacagtacctttagaagccacatggatgcagacccctgccccacacgtacccttcacgttccgttaaatccagcttgtgctggccacggcccagcacgttcccacagcacagagccggtgtgacatgacagaaccctgcactcagtgagctttctttttaaactcccaggaaatgcagttgtgaatgtgagagagcgtgctttctcattgcgttggttaactcccaggacatgcagtcatggacgtgagcgtgctttcctccttgtgttggttatgcgtatgacccggtatgaaaggactctggtgtgaacagccagtgcgtttcttatttaatccctctccccccaccccttttacactgtttctgtgatccacacctgaaatgctaaacccacaggactcattaacacctggaaataaagtggaacggagtttctcacg

SEQ ID NO: 2698 - DNA, 4084 bp, Mus musculus
cgctggtggcgctggggcctgcagagcctgcggggcttgcgggagctctcctgcgggcccgggccccgcccccgccgcagcggggcgtcgccggcgccgggtgcgtgtgggaggcggggacgagccgcggcgagcaaagtccagtctgcgcgccacccgctgcggccaacacgcgcgtgaagttcaggctgagatggatcttgaggcagcgagaaacggaacagcacggcgcctagacggcgactttgaactaggcagcatcagcaaccaaggcagagaaaagaagaagaaagtgaatttaattggcctgttgacactgttccgatactctgactggcaggataaattgtttatgttcttgggcaccctcatggccatagctcatggatcaggtcttcccctcatgatgatagtctttggagaaatgacagataagtttgtagataatactgggaacttttccttgccagtgaatttttcattgtcaatgctaaatccaggaagaattttggaagaagaaatgactagatatgcatactactattcgggactaggtggtggagttcttgtggctgcctatatccaagtctcattctggactttggcagctggccgacaaataaagaaaatcaggcaaaaattttttcatgccatcctccgacaagaaatgggctggtttgacatcaagggcaccactgaactcaacacacgtctaacagatgacgtctccaaaatcagtgaaggaattggtgacaaggttggaatgttctttcaagcaatagccacgttttttgcaggattcatagtggggttcatcagaggatggaagctcaccctcgtgatcatggccatcagccccatcctggggctctctacagctgtttgggcaaagatactctcaacatttagtgacaaagagctagctgcatatgcaaaagcaggtgccgtggctgaagaggctccgggagccatcaggaccgtgatagctttcgggggccagaacaaagagctagaaaggtatcagaaacatttagaaaatgccaaaaagattggaattaaaaaggctatctcagccaacatctccatgggtattgctttcttgttaatatatgcatcctatgcactggccttctggtatggatccactctggttatatcaaaagaatatacaattggaaatgcaatgacagtcttcttctcaatcctcatcggggctttcagtgtggggcaggctgccccctgtattgatgctttcgctaatgcaagaggagcagcctatgtgatctttgacattattgataataatcctaaaattgacagtttttcagagagaggacacaaaccagacaacatcaaaggaaatttggagttcagtgatgttcatttttcctatccatctcgggctaatatcaagatcttgaagggcctcaacctgaaggtgaagagtggacagacagtggctctggttggcaacagcggctgtggaaaaagcacaactgtccagctgctgcagaggctctacgaccccacagagggtaagattagcatcgatgggcaggatatcaggaactttaacgtcaggtgtctaagggaaatcattggtgtggtaagtcaagagcccgtgctgttctctactacgatcgctgaaaatatccgctatggccgtgggaatgtaacgatggatgagattgagaaagccgtcaaagaggccaatgcctatgacttcatcatgaaactgccccagaaatttgacaccctggttggtgatagaggggcgcagctgagtgggggacagaaacagagaatcgccattgcccgggccctagtacgcaaccccaagatcctcctgctggacgaggccacctcagccctggacactgaaagtgaagctgaggtgcaggccgcactggataaggccagagaaggccgaaccaccattgtgatagctcaccgattgtctaccatccggaacgcagatgtcatcgctgggtttgaggatggagtcattgtggaacaaggaagtcacagtgagctgatgaagaaggaagggatctacttcagactcgttaacatgcagacagcaggaagccagatcctgtcagaagaatttgaagttgagctaagtgacgaaaaggctgctggagatgtggccccaaatggctggaaagcacgcatatttaggaattctacaaagaaaagtcttaaaagtccacatcagaataggctggatgaagaaaccaatgaacttgatgcaaacgtgccaccagtgtcttttctgaaggtcttaaaactgaataaaacagagtggccctactttgtggtgggaacagtctgtgccattgccaatggagccctccagccggctttctccatcatcctgtctgagatgatagctatctttggccctggggatgacgcagtgaagcagcaaaagtgtaacatgttctccctggtcttcttgggcctaggagtcctctccttctttactttcttccttcagggcttcacgtttgggaaagctggagagatcctcaccacaaggctccggtccatggcctttaaagcgatgctaaggcaggacatgagctggtttgatgatcataaaaacagtactggagcactttctacaagactcgccacagatgctgcgcaagtccaaggagccacgggaaccaagttggctttaattgcacagaacacagccaaccttggaaccggtattattatatcatttatttacggttggcaactgacacttctgctgttatcggttgttccattcattgctgtagcaggaattgttgaaatgaaaatgttggctggcaatgccaagagagataaaaaggaaatggaagctgctggaaagattgcaacagaggcaatagaaaatattcgaactgttgtatccttgacccaagaaagaaaatttgagtcaatgtatgttgaaaaattgcatggaccttacaggaattcggtgcggaaggcacacatctacggcatcacttttagcatctcccaagcattcatgtatttttcttatgctggctgttttcgatttggttcttacctaattgtgaatggacatatgcgcttcaaagatgtcattctggtcttttctgcaattgtgcttggcgcggtggctctaggacacgccagctcatttgctccggactatgcaaaagccaagctgtctgcagcatacttgttcagcctgtttgaaagacaacctctgattgacagctacagtggagaagggctgtggcctgataagtttgaaggaagcgtgacatttaatgaagtcgtgttcaactatcccacccgggccaacgtgccagtgcttcaggggctgagccttgaggtgaagaagggccagacgctggccctggtgggcagcagtggctgcgggaagagcacagtggtccagctgctcgagcgcttctatgaccccatggctggatcagtgctcttagatggtcaagaagcaaagaaactcaatgtccagtggctccgagctcaactgggcattgtgtcccaggaacccattctctttgactgcagcatcgcagagaacatcgcctatggagacaacagccgggtcgtgcctcatgatgagattgtgagggcagccaaggaggccaacatccaccccttcatcgagacgctgccccaaaaatataacacaagagtaggagacaaggggacgcagctctctgggggccagaagcagaggattgccatcgcccgagccctcatcagacagcctcgggtcctactgctggatgaagccacgtcagctctggatactgagagtgaaaaggttgtccaggaagcactggacaaagccagggaaggccgcacctgcattgtgatcgctcaccgcctgtccaccatccagaacgcggacttgatcgtggtgattgagaacggcaaggtcaaggagcacggcacccaccagcagctgctggcgcagaagggcatctatttctcaatggtcaacatccaggccggcacacagaacttatgaactcttgttacagtatatttttaaaataaattcaaatcgtttttcactttaaaaaaaaaa

SEQ ID NO: 2699 - DNA, 1786 bp, Mus musculus
tttttttttttttagtctttcgtgggtcatacatctgtgtcactgtgatgcctctgaaaggtctagcaaattgtctgtctatcaccccaccgccaccatgctgacctcaggactcctcctggtggctgcagtggccttcctcagcgtcctggttttgatgtctgtctggaagcagagaaagctctcaggaaagctgcctccaggacccaccccactgcccttcgttgggaacttccttcagctgaacacagagcaaatgtacaactctctcatgaagatcagccaacgttatggtcctgtattcaccatctatctgggatctcgccgaattgtggtgctgtgcggacaggaggcagtcaaggaagctctggtggaccaagctgaggaattcagcgggcggggcgagcaggctaccttcgactggcttttcaaaggctatggcatagccttcagcagcggggagcgagccaaacagctaaggagcttctccatcgccacgctgcgggacttcggcgtggggaagcgtggcatcgaggagcgcatccaagaggaggcgggctttctcatcgattcatttcggaagacgaacggtgctttcattgaccccaccttctaccttagccgaacagtctccaatgtcattagctcaatcgtcttcggggaccgctttgactatgaggacaaagagttcctgtcacttcttagaatgatgctgggaagcctccagttcactgctacctccatggggcaggtctatgagatgttttcttctgtgatgaaacacctgccagggccccagcaacaggcctttaaggagctgcaaggcctggaggactttataaccaagaaagtggaacacaatcagcgcacgctggatcccaattccccaagggacttcatcgactccttcctcatccgaatgctggaggagaagaagaaccccaatactgagttctacatgaagaacttggtgctgactacacaaaatctcttctttgctggcacagagaccggcagcaccaccctgcgctatggctttctgttgctcatgaagtacccagatattgaggccaaggtccatgaggagattgatcgggtgattggcaggaaccggcagcccaagtatgaggaccgaatgaagatgccctatacggaggctgtaatccatgagatccagagatttgcagacctgatccccatgggcctggctcgaagggtcaccaaggacaccaagtttcgagatttcctcctccccaagggtactgaagtatttcctatgctgggctctgtgctgaaagaccccaagttcttctccaaccccaaagacttcaacccaaagcacttcctagatgacaagggacagtttaagaagagtgatgcctttgtgcccttttccattggaaaacggtattgtttcggagaaggactggctaggatggaactcttcctcttcctcacaaacatcatgcagaacttccacttcaaatccacacaggcaccccaggacatcgatgtgtctcctagactcgtgggctttgtcacgatcccaccaacctacactatgagtttcttgtcccgttgatcctgggctgcatgaggttaaagggaatgattgagaccagacaagtcaggggttgaaacttagaaaaggtcaaaggtacagaagaaacagaggacacttcgtagacttgcagaggatatttcaaaggtagccagagaagggggaaattatactatgttgtcaataggaataataaaataataaaagtagatattatttatggca

SEQ ID NO: 2700 - DNA, 1937 bp, Mus musculus
cgttttcttagctgctcttctctccagaagcttctgccggttcccccagctctgggtactcggctctgcgtcgtgccgccatgatgggccaccgtccagtgctcgtgctcagtcagaatacaaagcgtgaatctggaagaaaagttcaatctggaaatatcaatgctgctaagacaattgcagacatcatccggacatgtttgggacctaagtctatgatgaagatgcttttggacccaatgggaggcattgtgatgaccaatgatggcaatgccattcttcgagagattcaagtccaacatccagcagccaagtccatgattgaaattagcagaacccaggatgaagaagttggagatgggaccacatcagtaattattcttgcgggagaaatgctgtctgtggctgagcactttctagagcagcagatgcacccaacagtggtgattggtgcttaccgcatggcactggatgatatgatcagcactctgaagaaaatcagtacacctgttgatgtcaataaccgtgatatgatgctgaacatcatcaatagctctattactacaaaagtcatcagtcggtggtcttctttggcatgcaatattgccctggatgctgtcaagactgtgcagtttgaagagaatggccgaaaggaaattgacatcaagaagtatgcaagggtggaaaagatccctgggggcatcattgaagactcatgtgtcttacgtggagtcatgattaacaaggatgtgacccatcctcgaatgcgccgttatatcaagaaccctcgaattgtgctactggattcttctctggagtacaagaaaggagaaagccagaccgacattgagattacacgagaggaggattttacccgaatcctgcaaatggaagaagaatatatccagcagttgtgtgaggacattatccagctgaagcccgacgtggtcatcacagagaagggcatctcagatttagctcagcactacctcatgcgggccaacgtcacagctattcgaagagtccggaagacagacaataatcgcattgctagagcctgtggggcacggatagtcagccgaccagaggagctgagagaagatgatgttggtacaggtgcaggcctattggaaatcaagaagattggagatgagtacttcactttcatcactgagtgcaaagacccaaaggcctgcaccattcttcttagaggagccagcaaggagattctgtcggaagtagaacgcaacctccaggatgccatgcaagtgtgccgaaacgttctcctggaccctcagttggtgcctggtggtggagcctcggagatggctgtggcccatgccttgacagaaaaatctaaggccatgactggtgtggaacaatggccatatagagctgtggcccaagctttagaggtcatccctcgtaccttgatccagaactgtggggcgagtaccattcgtctgcttacctcccttcgggccaagcacacccaggagaattgtgagacctggggtgtgaatggtgagactggtaccttggtggacatgaaagagctgggaatatgggagccgttggctgtgaagctacaaacatacaaaacagcagtggagactgcagttctacttctgcggattgatgacattgtctctggccacaagaagaaaggtgatgaccagagccggcaaagcagtgctccagatggtggccaggagtgagtggtgagcaaggtgacttcaacgtgcagaaccagcagtctcccctttcctgagccagagttccaggaacactgtggacatctttgtttgcaaaggatcaagttgaggggcagccccagtctgtcccatctcagtttgcaaaaagcactgacatgtatctcttctctattgtaagctttccatttagtttgcttccaatgattaaatctaagtcatttg

SEQ ID NO: 2701 - DNA, 1810 bp, Mus musculus
cgtccccagccgcggccgttcctcatcggcgtgagcggcggcaccgctagtggcaagtcaacagtgtgtgagaagatcatggagctgctgggacagaacgaagtggaccgccggcagcgcaagttggtcatcctgagccaggactgcttctacaaggttctgacggccgagcagaaggccaaggctttgaagggacagtacaattttgaccacccagatgcttttgataatgatctgatgcacaagaccctgaaaaacattgttgaaggcaaaactgtcgaggtccctacctatgattttgtgacccactcaaggttaccagagaccactgtggtctacccagctgatgtggttctgttcgagggcatcttggtattctacacccaggagatccgggacatgttccacctgcgcctctttgtggacacagactctgatgttaggctgtctcgaagagttctccgggatgtgcaacgaggaagggacctggagcagatcctgactcagtacaccgcctttgtgaaaccagcctttgaggagttctgcctgccgactaagaagtacgctgacgtgatcatccctcgaggagttgataatatggtggccatcaacctgatcgtgcaacacatccaggacatcctcaacggggacctgtgcaagcggcaccgaggcgggcccaacgggcgcaaccacaagaggaccttccccgagccaggagatcaccctggggtgttggccactggcaagcgctcacacctggagtctagcagcagaccccattgaggaccagcatatgtaggttccccacagacccaggattaagggcctggggacgaccactggctcctaaaagcacagtcagggatccctctcaatgagtgggacctagggtggcatcaggaccaaagccttccttgcacggagggcagactcatgctgacagagcattctggggtcctcccattcctctcattggaggaggccacaggtctctgggtcactgtcccaaacagcatagtaagcccatggtaccagcttccccaggggatgcgggacacaaatcatggtgcaacaggaaacagcccgggcactggctggtctggtgttgacagtgagcccaagggaagtgcttccccgtatggtgtggcttgtgtccatgttgcagaagtaaagctcgcagagatgttagatcccttgtttgttttgtggcaggctgtttgtgagctctgaacctagttttacaaccgaccactgggctatggtccagtttaaggagcctgaggcagggaccctaaggactacccacatgactctatctgggggcctggatcttgggtagatgggagtgggccatcaggtctcttgtggctgaaacattgtctcccaattctgcaggcagccttgaaccagggggctgcctgtgtacaagtcacttgggtaacagttcatggctagcatgccaggcaggctctctccagccagggagcacttcagtgcagaggcaggtgaccgtggctgcctaaagccagctagtctcctgcacacccagctcaagctcctggcttcacaaacgctcccttctgtgttgtcaagtttgtcgtccctccccatgggacggctgtttttggaagtgccctctttggtcgccacaagccatggcacgggacgtctcgttttatgttcaatacaactgtggatcacagcagctgagctgtgatgagctcggggctgccttctgctagtgctgggctggttttgttgaactgaaaccctctttggagggagaatcaataaataacataaacattaa

SEQ ID NO: 2702 - DNA, 2878 bp, Mus musculus
ctggatgtggcagagggagccagcatgatcctcttggcagtgctttttctctgcttcttctcctcctactctgcttccgttaaaggtcacacaactggcctctcattaaataatgagcggctatacaagctcacgtactccactgaagtgtttcttgatgggggcaaaggaaaaccgcaagacagcgtgggctacaaaatctcatctgatgtggacgttgtgttactgtggaggaatcctgatggtgatgatgatcaagtgatccaagtcacgataacagctgttaacgttgaaaatgcgggtcaacagagaggcgagaagagcatcttccagggcaaaagtacacctaagatcatagggaaggacaacctggaggctctgcagagacccatgcttcttcatctggtccgggggaaggtcaaggagttctactcctatgaaaacgagccagtgggcatagaaaatctcaagagaggcttggctagcttattccagatgcagctaagctctggaactaccaacgaggtagatatctctggggattgtaaagtgacctaccaggcccaacaagacaaagtggtcaaaattaaggctctggatacatgcaaaattgagcggtctggatttacaacggcaaaccaggtgctgggcgtcagttcaaaagccacatctgtcactacctacaagatagaggacagctttgtcaccgctgtgcttgcagaagagaccagggcttttgccttgaacttccaacaaaccatagcaggaaaaatagtgtcaaagcagaaattggagctgaagacaactgaagccggcccaaggatgatccccgggaagcaagtggcaggtgtaattaaagcagttgattccaaatacaaagccattcccattgtgggacaggtcctcgagcgtgtctgcaaaggatgcccttctctggcggagcactggaagtccatcagaaagaacctggagcctgaaaacctgtccaaggccgaggctgtccagagcttcctggccttcatccagcacctccggacttcgaggagagaagagatcctccagattctgaaggcagagaagaaagaagtgctccctcagctggtggatgccgtcacctctgctcagactccagactcgctagaagccatcctggactttttggatttcaaaagtgacagcagtatcatactccaggaaaggttcctctatgcctgtggctttgccacccaccctgatgaagaactcctacgagccctccttagtaagttcaaaggttcctttgcaagcaacgacatcagagagtcggttatgatcatcattggagccctagtcaggaagctgtgtcagaatgaaggctgcaagctcaaggcagtggtggaagctaagaagctgatcctgggaggacttgaaaaaccagagaagaaagaagacaccacaatgtacctgctggccctgaagaatgccttgcttcccgaaggcatcccgctccttctgaagtatgctgaggctggagaagggcccgtcagccacctggccaccactgttctccagagatacgatgtctccttcatcacagatgaggtgaagaagaccttgaacaggatataccaccagaatcgtaaggttcatgagaagacggtgcgcacaactgccgctgctgtcatcttaaagaacccatcctacatggatgtgaagaacatcctgctgtccattggggaactcccgaaagagatgaacaaatacatgctcaccgttgtgcaagacatcctgcattttgaaatgcctgcaagcaaaatgatccgtcgagttctcaaggagatggctgttcacaattatgaccgtttctccaagagtggatcctcttctgcctatactggctacgtagaacgtagcccccgtgcagcgtccacatacagccttgacatcctttactctggctctggcattctgaggagaagtaacctgaacatcttccagtacatcaaaggaacagagcttcatggtagtcaggtggtgattgaagcccaagggctggaaggcttaattgcagccactcctgatgaaggagaggagaaccttgactcttatgctggcatgtcagccatcctgtttgatgttcagcttaggcctgtcacattttttaatggatacagtgatttgatgtccaaaatgctgtcggcatccggcgaccctgtcagcgtggtgaaagggcttattctgttaatagaccattctcaggatattcagctgcaatctggactaaaggccaatatggagatccagggtggtctagctattgatatttctggttcaatggaattcagtctgtggtatcgcgagtctaaaacccgagtgaaaaatcgggtggctgtggtgataaccagcgacgtcacagtggatgcctcttttgtgaaagctggtctggaaagcagagcggagacagaggctgggctggagttcatctccacagtgcagttctcacagtacccgttcttggtctgcatgcagatggacaaggctgaagccccactcaggcaattcgagacaaagtatgaaaggctatctacaggcaggggatatgtctctcggagaagaaaagagagcctagtggccggatgtgaactccccctccatcaacagaactctgagatgtgcaacgtggtattcccacctcagccagaaagcgataactccggtggatggttttgattcccgtgggttcccttccaccagaacgatatgctatgacgtgcctgacccttgctctctgagagcacagtgtttacatatttacctgtatttaagatgtttgtaaagagcagtggagaacttcagttgattaaagttgaacctattcaggagaagacccacagtgtcc

SEQ ID NO: 2703 - DNA, 600 bp, Mus musculus
tcgtggtgtgcccagctcttccaaggactgctgcgcttcggggcccaggtttcgacagactcttcaaaatgccatcccaaatggagcacgccatggaaaccatgatgcttacgtttcacaggtttgcaggcgacaaagaccacttgacaaaggaggacctgagagtgctcatggaacgggagttccctgggtttttggaaaatcaaaaggatcctctggctgtggacaaaataatgaaggacctggaccagtgccgagatggcaaagtgggcttccagagctttctatcactagtggcggggctcaccattgcatgcaatgactattttgtagtaaacatgaagcagaaggggaagaaataggccaactggagcactggtacccccaccctggtgcgtgttcaccacggggtcacttgaggaatctgccccactgcttcttgtgagcagatcaggacccttaggaaatgtgcaaatgagatccaactccaattcaacaatctgagagagaaaacttaatccaatggcagagaagcttctgagttttatattgtttgcatcccattgccctcaataaagaaagtcctttttttaagttctg

SEQ ID NO: 2704 - DNA, 2072 bp, Mus musculus
ggacgtgctttcacagtctaagccgaaccgaaccgaaccgaaccgaaccgaaccgggccgagttgcgccgaggtcagccgaggtggccagaggaccccagcatctcgggcatctttcgcttcgtgcgcgcatcgcgtacctacaccgcaactccgtgcctcgctctccggcaccctctgcgaatcgctcctgcagcaaagccaccatgccaatcactcgaatgcggatgagaccctggctagagatgcagattaattccaaccaaatcccagggctgatctggatcaataaagaagagatgatcttccagattccatggaagcacgctgctaagcacggctgggacatcaacaaggatgcctgtctgttccggagctgggccattcacacaggccgatacaaagcaggagaaaaagagccagatcccaagacatggaaggcaaacttccgttgtgccatgaactccctgccagacatcgaggaagtgaaggatcagagtaggaacaagggcagctctgctgtgcgggtgtaccggatgctgccacccctcaccaggaaccagaggaaagagagaaagtccaagtccagccgagacactaagagcaaaaccaagaggaagctgtgtggagatgttagcccggacactttctctgatggactcagcagctctaccctacctgatgaccacagcagttacaccactcagggctacctgggtcaggacttggatatggaaagggacataactccagcactgtcaccgtgtgtcgtcagcagcagtctctctgagtggcatatgcagatggacattataccagatagcaccactgatctgtataacctacaggtgtcacccatgccttccacctccgaagccgcaacagacgaggatgaggaagggaagatagccgaagaccttatgaagctctttgaacagtctgagtggcagccgacacacatcgatggcaagggatacttgctcaatgagccagggacccagctctcttctgtctatggagacttcagctgcaaagaggaaccagagattgacagccctcgaggggacattgggataggcatacaacatgtcttcacggagatgaagaatatggactccatcatgtggatggacagcctgctgggcaactctgtgaggctgccgccctctattcaggccattccttgtgcaccatagtttgggtctctgacccgttcttgccctcctgagtgagttaggccttggcatcatggtggctgtgatacaaaaaaagctagactcctgtgggccccttgacacatggcaaagcatagtcccactgcaaacaggggaccatcctccttgggtcagtgggctctcagggcttaggaggcagagtctgagttttcttgtgaggtgaagctggccctgactcctaggaagatggattggggggtctgaggtgtaaggcagaggccatggacaggagtcatcttctagctttttaaaagccttgttgcatagagagggtcttatcgctgggctggccctgaggggaatagaccagcgcccacagaagagcatagcactggccctagagctggctctgtactaggagacaattgcactaaatgagtcctattcccaaagaactgctgcccttcccaaccgagccctgggatggttcccaagccagtgaaatgtgaagggaaaaaaaatggggtcctgtgaaggttggctcccttagcctcagagggaatctgcctcactacctgctccagctgtggggctcaggaaaaaaaaatggcactttctctgtggactttgccacatttctgatcagaggtgtacactaacatttctccccagtctaggcctttgcatttatttatatagtgccttgcctggtgcctgctgtctcctcaggccttggcagtcctcagcaggcccagggaaaaggggggttgtgagcgccttggcgtgactcttgactatctattagaaacgccacctaactgctaaatggtgtttggtcatgtggtggacctgtgtaaatatgtatatttgtctttttataaaaatttaagttgtttac

SEQ ID NO: 2705 - DNA, 1822 bp, Mus musculus
accaggaccatggagcccagtgtgctgctcctccttgctctccttgtgggcttcttgctactcttagccaggggacacccaaagtcccgtggcaacttcccaccaggaccccgtcccctgcccctcttggggaacctcttgcagatggacagaggaggcctcctcaagtctttaattcagcttcgagaaaaatatggcgatgtgttcacagtgcacctgggaccaaggcctgtggttatgctgtgtggaacagacaccataagggaggctctggtgggccaagccgaggctttctctggccgggggacagttgctgtcgttgagccaaccttcaaggaatatggtgtgatctttgccaatggggaacgttggaagacccttcgtagattctctctggccaccatgagagactttgggatgggaaagaggagtgtggaggagcggattcaggaggaagcccaatgtttagtggaggaactgcggaaatcccagggagcccccctggaccccacgttcctcttccagtgcatcacggccaatgttatctgctccattgtgtttggagagcgctttgagtacacagaccgtcagttcttgcgcctgctggagctgttctatcagaccttttcactcataagctcattctccagccagatgtttgagctcttctctggcttcctgaagtactttcctggtgcccacagacaaatctccaaaaacctgcaggaactcctcgactacattggccatagtgtggagaggcacaaggccaccttggaccccagtgttccacgagacttcattgatatttaccttctgcgcatggagaaggagaagtccaaccagaacgcagagttccatcaccagaacctcatgatgtctgtgctctctctcttctttgtcggcaccgagaccagcagcaccacgctccactatggcttcctgctcatgctcaagtacccccatgttacagagaaagtccaaaaggagattgatcaggtgatcggctcacaccggctaccaacccttgatgaccgcaccaaaatgccatactcagatgcagtcatccacgagattcagagattttcagatcttatacctattggagtgccacacagagtcaccaaagataccctgttccgagggtacctgctccccaagaacactgaggtgtaccccatcctgagttcagctctacatgatccacagtactttgaacaaccagacagtttcaatcctgaccagttcctggatgccaatggggcactgaagaaaagtgaagcttttctgcccttctcaacaggacaaatttttgatcaaaagtctgtgggaaagcgcatttgtcttggtgaaagcattgcccgcagcgaattgttccttttcttcacgtccatcctccagaacttctctgtggcaagccatgttgctcctaaggacattgacctcactcccaaggagagtggtattggaaaaatacctccaacgtaccagatctgcttcttggcccgctgattgggctgaggcagacaggggtcaccagtaatgttgagaatgactctgtctttgagcctctgagacagctggtggaaatcagtactcctattgcatgtctccaaatctccagggctccaaggcatgttcttcttccctgtgaatggcactggagaaatcaatcaactgtctttcttgacatgtgaaaagagacttctggagtccacatctcatgttgagtcacttcccttttcctcccaatagcccaagtgtccacttatcagctccgcatgatctgggatctgtgctaatggactctgtataaggtctg

SEQ ID NO: 2706 - DNA, 1625 bp, Mus musculus
tgagtgttgttcattggtctctggaaagcctgggcagaagtggggtagccatggagctgctgactggggctggcctgtggtctgtggccatattcaccgttatcttcatattactggtggacctgatgcaccggcaccagcgctggacttctcgctacccaccgggccctgtgccatggcctgtgcagggtaacctgctgcaggtggacctggataacatgccatacagcttgtacaagcttcaaaaccgctatggtgacgtgttcagcctgcagatgggctggaagcctatggttgtgatcaatggactgaaggcaatgaaggaagtgctgttgacctgtggagaggacactgctgaccgccctcaagtgcccatctttgagtacctgggtgtgaagcctggatcccaaggtgtggtccttgcaccctacgggcccgagtggcgagagcagaggcgattctctgtgtctaccctgcgcaactttggcctgggcaagaaatcactggaggactgggtgaccaaggaggccagacacctctgtgatgccttcaccgcccaggctgggcagcccatcaatcccaacaccatgctgaacaacgctgtgtgcaatgtgattgcatctctcatttttgcccgtcgctttgaatatgaagacccttacctcatcaggatgcagaaagtactggaagatagtttgacagaaatctctggcttaattcctgaggttcttaatatgttccccatactcctgcgcatcccaggactgcctgggaaggtcttccaaggtcagaagtccttactggccatagtggagaatctgttgactgagaataggaacacctgggaccctgaccagccaccccgaaatttgactgatgccttcctggcagagatagagaaggtaaaggggaatgctgagagcagcttcaatgatgagaacctgcgcatggttgtgctagacctgttcactgcagggatggtgaccacctcaaccacactgtcctgggccctgctgctcatgatcctgcatccggatgtgcagcgcagagtccaacaggaaatcgatgcggtcatagggcaggtgcggcatccagagatggcagaccaggctcgtatgccctacaccaatgctgtcattcatgaggtacagcgctttggggacattgctccactgaatttgccacgcatcacaagtcgtgacattgaagtgcaggacttcctcatccccaaggggtcaatcctcatccccaacatgtcctccgtgctgaaggatgagactgtctgggaaaagcccctccgcttccatcctgaacacttcctcgatgcccagggccactttgtgaagcctgaggccttcatgccattctcagcaggccgcagatcatgcctgggtgagcccctggcccgcatggagctcttcctcttcttcacgtgcctcctgcagcactttagcttctcagtgcccaatggacagcccaggcctagaaaccttggtgtctttccttttccggttgccccctacccctaccagctctgtgctgtgatgcgtgagcaaggacactaattccagtcatggtaggcagggcaggctgagccatgcaaaataaaccaatcttgtggctgc

SEQ ID NO: 2707 - DNA, 1734 bp, Mus musculus
agcagttttaacaacagggttcccagaagcaccaccaggattggagtgctctaggctttagaagatggggttctgtcgcctgttgctcttagctattgttctcctaacctcatggttctctactgccaaaggtgaagtgagcctttgtgattttccaaaaataagacatggaatactatatgatgaaaagaaaaatgagcccttttcctctgttcttagtgggaagattttatactactcctgtgaatataattttgcatctccatcaaattccttctggactcgcatcacttgcacagaatcaggatggtcaccaactccgaagtgtctcaggctatgcttctttccttttgtggaaaatggtaattctacatcttcaggtcaaacccatgtagaaggtgacattgtacaagtggtctgcaatcaaggctacagccttcagaataatcagagcaccatcacctgtgctgaagagggctggtccattacccccaaatgcatttccaccaatccaacagggaaatgtgggccccctccacctattgacaatggagacatcacctccttgtcgttaccagtatatgcatcattatcatcagttgaatatcagtgccagaagtattatctacttaaaggaaataagacaataacatgtagaaatggaaagtggtctgagccaccaacctgtatatatccaacagggaaatgtgggccccctccacctattgacaatggagacatcacctccttgtcattactagaatatgaaccattatcatcagttgaatatcagtgccagaactattatgtacttaagggaaagaagacaataacatgtagaaatggaaagtggtctgagccaccaacctgtttatctgcatgtgtaatatcagaagccattatggaaagacataacatacttctcagatggagacaaagcgaaaaggtttatattcagtcaggagaggatattgagtttggatgtaaacctagatataaaagagcaaaaggatcactgccatttcgtacacagtgcattaatggtcacatcaattatcccacttgtatgttaaatcacaatacgtttattcattgattttattgtttgtacgtttgggttttttatttgtttggttgtttgtttgcttgtttttgtttttcaagacagggtttctctgtgtagccctggaactcactctgtagatcacgctggcctcaaactcagaaatcggcctgacttttcctcccaaggtgctgggattaaaggcgtgcaccaacactgcctgctgattttattgcttagaaatgcacatgaatattactgctacagtttcaacttccatttgaagtatcaactcatttcttctcataaatataaactttttagttatatggtgatcaatttgtaactttaaagacaattgccaaaatgcaaaagcagtaatacaaaactcctaatccaaaatatgatatgtccaaggacaaactatgtcaaacaagaaaatttgatgtaagtttttcagcattgtttttctattcagaacttcctcagattttcctggataccttttgatgtaacgttttgatttataatgaatgaacgatatattgactcattcttcaaatttagtattatttctgaatcatgtaacaaccaaactatcatatattatagtactaatgcatataattaaaaactatctaatactttcatatcaataaaaaaatctaagg

SEQ ID NO: 2708 - DNA, 2955 bp, Mus musculus
atacacagcattgttaatgacagggttcccagaaggaccaccacatctggagctttaagtttgagaacatggggttctgcagcatgttgctcttatccaatatcctcctaactgcatggctttccactgctaaaggggaagtgaaatcttgtgaatttccacaattcaaatatggacgtctgtattttgaagagatcctgagacccaacttcccagtatctataggaaataagtacagctataagtgtgacaacgggttttcaccaccttctgggcttttctgggactaccttcgttgcacagtacaagggtggaagcctgaagtcccatgtgtcaggaaatgtgttttccattatgtggagaatggagaatttgcatactgggaaaaaatatatgtgcagggtcagtctttaaaagtccagtgttataatggctatagtcttcaaaatggtcaagacacaatgacatgtacagagaatggctggtcccctcctcccaaatgcatccgtatcaagacatgttcagtatcagatatagaaattgagaatgggtttttttctgaatcttttcgtacatatgctctaaatagagaaacatcctatagatgtaaacagggatatgtgacaaatactggagaaacgtcaagatcaataacttgccttcaaaatggatggtcacctcaaccctcatgtattaagtcttgtgaaagaccagtatttgagaattctgtaactaagaataatagtacatggtttaagctcaacgacaaattagactatgaatgtctcattggacatgaaaatgaatataaacataccaaaggctctataacgtgtacttattatggatggtctgatacgccctcatgttatgaaatagaatgcagcgttcccattctagaccgaaaactagtcgtttctcccagaaaagaaaaatacagagttggagatttgttagaattctcctgccgttcaggacacagagttgggccagattcagtgcaatgttaccactttggatggtctcctagtttccctacatataaaggtcaagtagcatcatgtgcacaacctcctgaaattcctaatggggaaattaatggagcaaaaagagttgaatacagccatggtgaggtggtgggatatgattgcaaacctagattcctactgaagggacccaataaaatccagtgtgttgatgggatgtggacaaccttgcctgtatgtgttgaggaggagagaacatgtggagacattcctgaacttgaacatggctctgtcaagttttctgtccctccctaccaccatggagattcagtggagttcacttgtgcagaaaccttcacaatgattggacttgggtcagtttcttgccttagtggaaagtggacccagcttcctaaatgtgttgcaacagaccaactggagaagtgtagagtgctgaagtcaactgacatagaagcaattaaaccaaaaagaaatgaatttcagcataactccaccatgtattacaaatgtagagacaagcaggagtatgaacactcaatctgtatcaatggaaaatggaatcctgaaccaaactgtacaaggaaaacatcctgccctcctccaccacagattccaaataccctagtgattgaaaccactgtgaaatacttggatggagaaaaattatctgttctttgccaagacaattacctaactcaggacccagaagaaatgatgtgcaaagatggaaggtggcagtcattacctcactgcattggacttccttgtggacctccaccttcaattcttcgtggtactgtttctcttgagctagagagttaccaacatggggaagaggttacataccattgttctacaggctttggaattgatggaccagcatttattaaatgtgaaggaggaaagtggtctgacccaccaaaatgcataaaaacgaattgtgacgttttacccacaattgaaaatgccataataagaggaaagaagaaaaaatcatataggacaggagaacaagtgacattcagatgtcaatctccttatcaaatgaatggctcagacactgtgacatgtgttaatagccggtggattggaaagccagtatgcaaagactcaagagggaaatgtgggcctcctccacctattgacaatggagacatcacctccttgtcattaccagaatatgaaccattctcatcagttgactatcagtgccagaagtattatctccttaagggaaagaagacaataacatgtagaaatggaaagtggtctgagccaccaacatgcttacatgcatgtataataccagaaaacattatggaagcacgcaaaataattcttaaatggagacacactgaaaatatttattcccattcaggggaggatattgaatttgaatgtaaatatggatatcataaagcaagaggatcaccgccatttcgtacaaagtgcattagtggcaccatcaattatcccacttgtgaataaaatcgtaatacatttattagttgattttattgtttagaaaagcacaagcatgtcactaatatactttcaatttgcatttgaaatattgtttaactcatgtcttctcataaatataaacattttgttatatggtgattaatttttaactttaaagatgattgccaaaatgcaaatgcagtacattcaaaactcctaatccaaaccattatatgtccaaggacaaactcaaaaaagaaaatttgatgtatgttttcagcattgttttctattcagacctccttcagatttcctagatatcttttgatgtaatgttttgatttatagtgaatgaaagatatattgactcattcttcaaattaatatgatttcccaaagcatgtaagaaccaaactatcatatattatatcactaatgcatataattaatcactatataatactttcaaataaaagaatctaag

SEQ ID NO: 2709 - DNA, 927 bp, Mus musculus
attgtacaacctttctccaacttcttgttctcttcccacactctgttctcagcctcctccgctcccctccgcctgttctcaggatcatgaaggtcgccagtggcagtgccgcagccgctgcaggccctagctgttcgctgaaggcgggcaggacagcgggcgaggtggtacttggtctgtcggagcaaagcgtggccatctcgcgctgcgctgggacgcgcctgcccgccttgctggacgagcagcaggtgaacgtcctgctctacgacatgaacggctgctactcacgcctcaaggagctggtgcccaccctgccccagaaccgcaaagtgagcaaggtggagatcctgcagcatgtaatcgactacatcagggacctgcagctggagctgaactcggagtctgaagtcgggaccaccggaggccggggactgcctgtccgcgccccgctcagcaccctgaacggcgagatcagtgccttggcggccgaggcggcatgtgttccagccgacgatcgcatcttgtgtcgctgaggcggcgcactgagggaccagatggactccagcccttcaggaggcaagaggaaaaaagtgctctcggttccccaggggatctctgggaaagacactaccgcagccaccggactcttggcggatcggtccagtgggtagagggtttgatcaacagagcctcaccctctccacctttcagcctccagagactttggggagggggttaatcaaccccgcgtgtttctgttttattgaaaaagcagacattttttttaaatggtcacatttcgtgcttctcggatttctgaggaaatattttatattgtatattacaatgatcactggctgaaaatattgttttacaatagttctatgggggtgggttttttgttgttattaaacaaacactttagat

SEQ ID NO: 2710 - DNA, 1451 bp, Mus musculus
aatctgcacagggacacaggtacaccgtttcttctgactccgggaaacatccagtgtagccgaaactgtcccagcccagtgaggagcccaggatgttcctgaaggctgcggtgctgaccctggccctggtggccatcaccggcacccgggctaaggtcacttcggaccaggtggccaatgtggtgtgggattactttacccatctaagcaacaatgccaaggaggctgcagaacagtttcagaagacggatgtcactcagcagctcagtaccctcttccaggacaaacttggggatgctagtacgtatgccgatggggtgcgcaacaagctggtgccctttgtcgtacagctgagtgggcatctagccaaggaaactgagagggtgaaggaagagatcaagaaggagctggaggacctacgtgaccgcatgatgcctcatgccaacaaagtaacccagacgttcggggagaacatgcagaagttgcaggagcacctgaagccctatgccgtggacctgcaagatcagatcaacacacagacccaggaaatgaagctccagttgaccccctacatccagcgcatgcagaccacgatcaaggagaatgtggacaacctgcacacctcgatgatgccccttgccaccaacttaaaggacaagtttaacaggaatatggaagagctcaaggggcacctaaccccccgtgccaacgagctgaaggccacgatcgaccagaacctggaggatctgcgccgcagcctggcccctctgacggtgggcgtgcaggagaaactcaaccatcagatggagggcctggccttccagatgaagaagaacgcggaggagctccagaccaaggtctctgcaaaaatcgaccagctgcagaagaatctggccccgctggtggaagacgtgcagagcaaggtgaagggcaacacggaagggctgcagaagtctctgaaagacctgaacaggcagctggagcagcaggtggaggagttccgacgcactgtggagcccatgggagagatgttcaacaaggctctggtgcagcagctggaacagttcagacagcagctgggtcccaattcgggggaggtggaaagccacttgagcttcctggagaagagcctgagggagaaggtcaactcctttatgagcaccctggaaaaaaaggggagcccagaccagcctcaagccctccccctcccggagcaggcccaggagcaggctcaggagcaggctcaggagcaggctcaggagcaggtgcagcccaaacctctggagagtggtgcccctgagctgtccctcagcccatcacagcagcagacacctgtcctgccccaccacctgtctgtcactctgtccccaggcacttcttggacacatgtaccaacttgagtcctgtgggaggtgaagcctcatctcgctactcaataaagcaactgagaa

SEQ ID NO: 2711 - DNA, 1200 bp, Mus musculus
gcacgagttggaggcctgtatccaagccagtgtgccagccttcatcttctccagctcagttgatgttgcagggcccaactcttacaaggagattgtcttgaatggccatgaggaagagtgtcatgaaagtacatggtctgatccatacccatacagcaaaaagatggctgagaaggcagtgctggcagccaatgggagcatgctaaaaaatggtggcactttgcaaacttgtgcattaaggcccatgtgcatttatggggagagaagtccactcatttctaacataataattatggcccttaaacataagggtattctgagaagttttggcaaattcaacacagccaacccagtatatgtgggcaatgtagcctgggcacacattctggctgccaggggccttcgagaccccaagaagtcaccaaatatccaaggagagttctactacatctcagatgacacccctcaccaaagctttgatgatataagttacaccttgagcaaggagtggggcttctgccttgattccagctggagccttcctgtgcccctactgtactggcttgcattcctgctggaaactgtgagcttcctcctgagtccaatctacagatatatacctccctttaaccgccacttggtcacactgtcaggtagcacattcactttctcctacaagaaagctcagcgagatctgggctatgagccacttgtcagctgggaggaagccaagcagaaaacctcagagtggatcgggacactagtggagcagcacagggagacactggacacaaagtctcagtgatggaagagggtgagacatggccctgggtgtaatcaagtccttcagcaagtagagacacacaagacaggtgctgctgccttcttttgacacagaggccaatttagtgccttaatcaagtcaccaaagccttgccagtcactgacccagccacaagccttttttctgaaattcctctccaaagacacacggcatctgtgccccagcttctggtccaagcccctcagcacctctcatacctcagagctctttccattaatttctctccgcattcaaaacatgtatagccttcagaaaattctgcttgctttatgaagcccaatggaagaaacaattatttgtcaatacctcatctgtggattgtgattttctgtaaataaacaattatatgtcccttc

SEQ ID NO: 2712 - DNA, 6634 bp, Mus musculus
attggagtctgattcccagatgtgctgggtatcattgttgtgtttcgatgtgacaatgaccttatctgctacaaggaaggcagaataaaaaccgacaccaaactggccaatcagttcagaggttgactgaccatcttcttgagcttctgtcattttgtttaaaaactcgcttgttccagatttggctatggtgccgagatttttaaccaactcctctctagtcattcctacacccgagactgtgacatgcagcaggtttttctctttgtcacacttaatcttgaccgttaactcctcatttccagcgagtgcattttcatcagttagggagatgagccttatcttgtctaaagcatcagaagcatttgaaatcagttctctcaggaaaatctctttatttttatacaaagaattgatgataagtttcatcatcctgttcacttcagcttggaaggcgaacttttcagatttttctctaagttctcttatctgtgatgcgtttaacccatccaactgaatagcttcttcctctcttggactgttggctgctgccgcggtgcttctctggggttactgctgtgtacccgaagtctccagcttccagctacacaaataggcctctggaggagcttctaagtcacccacacctggggctgtcttcttctgaagctgtctgggacagctttgctagtcaactgattcaaaataactccagatatcacatcaaggatacagagcctggcaaaagatcaccctgaacaaaatcagagggaaagaaaagatattaaagcagcggctctctcagggagagagactaggggaatcctagaagccacaagccaaagagctagaagccgatttgaatcttttggggaacaattattaaacaggagttgacacatggtttgggacttgcacgttctgccatggaggagtcttcagtgacagttggcacaatagacgtttcttatctgcccagttcatcggaatacagccttggccgatgtaaacacaccagtgaggactgggttgactgtgggttcaaacctaccttcttcagatctgcaacactgaaatggaaggagagccttatgagccggaagaggcccttcgtgggaaggtgctgctattcctgcacgccacagagctgggaaaggtttttcaaccccagtatcccatctctgggtttgcggaatgttatttatatcaatgaaacgcacacaaggcacagaggatggctggcgagacggctgtcttacatcctttttgttcaagagcgagacgtccataagggcatgtttgccaccagtgttactgagaatgtactgagcagcagcagagtccaagaggcaattgctgaagtggctgcggagttgaacccagatggatctgcccagcagcagtccaaagccatccagaaggtgaaaaggaaagccaggaagatcctccaggagatggtcgccaccgtctccccagggatgatcaggctgactggctgggtgttactaaagctcttcaacagcttcttctggaacattcagattcacaagggtcaactcgagatggtcaaggctgcaactgagacgaacctgccgctcttgtttctgccggtgcacagatcccacattgactacctgttgctcaccttcatcctcttttgccacaacatcaaggcgccgtacatcgcctcgggcaataatctcaacatccccgtcttcagtaccttgattcacaagcttgggggctttttcataagacggaggctcgatgaaaccccagatggacgcaaagacattctgtacagagcgttgctccatgggcatgtagttgaactcctccgacagcagcagttcctggagatcttcctggaaggcacccgctcccgcagtggcaagacctcctgtgcccgggcaggcgtcctctcagtggtagtgaatactctgtcgtccaacaccatccccgacatcctcgtcatacccgtgggcatctcgtatgatcgcataatcgaaggtcactacaatggcgaacagttgggaaagcccaagaagaacgagagcctctggagtgtggcgagaggcgttatcagaatgctgcggaaaaactacggctacgtccgagtggattttgcacagccattttccttgaaggaatatttagaaggccagagtcagaaacctgtatctgcccccctttctctggagcaagcactgttaccagcgatccttccttcaagaccgaatgatgttgctgatgaacatcaagacctatccagtaacgagtccagaaacccagcagacgaagccttccgacgaaggctgattgcaaacctggctgagcacattctcttcaccgccagcaagtcctgcgctatcatgtccacccacattgtggcctgtctgctcctctacagacacaggcagggaatccatctctccacgcttgtggaagacttctttgtgatgaaggaggaagtcctagctcgcgatttcgacctaggcttctccgggaattcagaagatgtcgtcatgcatgctattcagcttctggggaactgtgtcacaatcacccacacgagcaggaaagatgagttttttattactcccagcacaactgtcccgtcagtctttgaactcaacttctacagcaatggcgtacttcatgtgttcatcatggaagccatcatagcttgcagcatctatgcagtcctgaataagaggtgctctggagggtccgctggaggcctcggcaacctgatcagccaggagcagctggtgaggaaggccgccagcctgtgctaccttctctctaacgaaggtaccatttctctgccctgccagactttttaccaagtttgtcatgagacagttggcaagttcatccagtatggcattctcacagtggcagagcaagatgaccaggaagatgtcagtcctggccttgcagaacagcagtgggacaagaagcttccggaactgaactggagaagtgacgaggaagatgaagacagtgactttggtgaggagcagcgagattgctatctcaaggtgagccagtccaaggagcaccagcaattcatcacctttcttcagaggcttctaggtcccctgctagaagcctacagctctgctgccatctttgtccacaacttcagcggtccagttcccgagtctgagtacctgcagaaactgcacaggtaccttatcaccaggacggaaaggaacgttgccgtgtacgctgagagtgccacatactgtctcgtgaagaacgctgtgaaaatgtttaaggacatcggggttttcaaagagaccaagcaaaagcgagtgtctgttctagaactgagcagtactttcctacctcagtgcaaccggcagaaactcctagagtatattctgagttttgtggtgctgtagcgatctcctcagcacctatctcgagcgaggagctgatgagtcccttgcagcctccagtctgacccagagtggcaggtatcctggcatggcccagcctgccctaccccgaggagacttccaggaagacacgtgccttctgcccccgtggacctgcgctcctcccaacacagacgcagtggcctgcgcagagcactcagggccagtgccatctgtgattcatgatcactaggttataggtgaaatctcagtaagttattttggagtttattaaaggttcacattttaagtacaacttttcaggctagttactgtgatggacattgaggtgtttgtagaactgactcttatatagtaagtaataatgtttcctttaaaataattgggccatccattctctgtctccattatcgctgtcaacagaagttatggtttgtatgtgagccctttcctctcaactgctttactaaggagcaatgttgtcctgcgccggcacactcaagatgtatctgagtagctgcctgaaagcagatgacactgcagtcaggaggtgagaggctgaggaaagagccagcatcaggaggtgactctggttggcaagggtgagctgtgcttggccaggaaggtggcattaaaggctgtgctcacgtgacaagagtgcctttgagctgtaatgaccagtgtttagagtccctgttgctgatacctttgagtgattgacacctgctgcttttgaggagctcggctgcagtgatcactggcgtgtggcactctggctacaaactgctgacccaggggttccagacactgctcactcactgggtgctgtgctgtggctagtgtatggcttgtacccagatggcgcactgtgcagcctgtgtagcatgcacagtgacccagctgagtggcaggtggttggaggcaaggacatttatgtgggccacatacccaaacttcctgccatgtaaaggcgagtgattgtgaaagcacctctgttgtagtgggtaggtgcctttctcatgagcggggagcataactgttagttatttgtggtgattatggcagatttcaagatcacgtgacaatgcagtctctaattgttcactgtccatatatatgattttacggaattatgaatttttctgatgagtgttgtatagatgatttgaattgataaaagtattagggatgaggtttgtactttcctgaacttgaatttcaaacactaactgtatcctatgagtgacgtgtgtgttgggggagggtgggcctgcctggtgttacacagagcatggcgtggctggtctggagcgcatagcaataatactgtgctgtggtgacctccgcccttgccttgtgcatgtcacacctccttttcctttgcttcacctctgtcaactgtagcgactttggtgtgcagtgagatgctcacctttagcctctgctcccctaactaggctggcacttcccttggctgtacttggggacacccagagaggctggtgtactcccttgggtttatctgtggggactcaagcattttattggtctctgtttttttttttttccctctaaatggaaactgtaggtggcttcctctgatctgtctgccagtgggtgttgctgccctgcttgtcagctctgcaaatgagcgctgctccccacgttgcgcagagacgtgtgcgtcccacgtcccttgccgtgctctcccttttggtaggtgttactttaagaactgcagtcagacttgctgttgcctgacaattaactcactgtgaggataggcacgcacgcttttcataattaactggtgctttgaaacctttcttatggaagaaaaatctcaaccaaagttatgctcttcctgacaagctgacccttgagttaattttagcacaactcattcttcagtgcctcattatgaaagacaaaaagcatcacaataaggcttccaggtagccctgttccctaatgaacattcccaagttttccagcgtgggtggcttctcgacgttaactaggtcgtattaattattacagttactctacgcattctgtcaagttgaatgcatgcccttcagggaagactgtgagtcaagtttaataaataaaacctaatactaagcaatatgaagctgcactctgcttttaagtgagccaagccaagtaagccagagggggaggggcatttgctttccaaatcctaaggaaaaatgaaggcaaaacaagtgttatgtccattcagccaggaacacactctagccttcctgactctcttaaactgtggacgtcaggaggccgaatgcagaaaagtatatctgggatggatggcagggaatagaagctaggactgcagttcctgtcctgccgccttggttcctgcagtgccctgcggtgcggacaggactgcatctgatagtacacagactgatgcacgtagcatttcccaaactgtttggacctcaggaccttttccctctgggacactgcatgccgtggaaaaccttttcagaaactacattcattgttctttaagcagaccaaaagtcacaacagtggcaggcaggctgcatgctttttgtatcgctcacgatgcactgtggtgtgctcgggtatctttcctcactggagagagcaagcacaggaagctggctgcagtgccttcctcatgaaggatctaccacaaccctggcctttttaaaactgagagtagcagaattaatagagaaattaaaaaattaaaattggggtaaataacaaaggttttaattcagatctagaagaaaactgcacagttgaacgcagatttttatccataggtaactgtagtgttttgaaatgataggccctacctttgaagtttctaagacttattatgggatgtaaatctgttttttaaaaacactttttaggggcttgagagctgccacctggcatttagtttagtgcggccagtgactgcttcaagagacttctgaccttgcttcccaacagctaaagggctaactgtctttatggaaggcacttgttacagtatttgcccattgtacagagcaatgctacattgttgtaaaaagaattgctattgtaaaaaagcactgtgtgactttgtgaaggacactgccttggaaatgttgactgacgtttatgcctggtgatagcattcccgagaagcatggacatggagttttgttttaataaaccaaaaaccagaaaaaaaaaacccg

SEQ ID NO: 2713 - DNA, 1810 bp, Mus musculus
  misc_feature 657: n = A,T,C or G
acacaagaacttcagaacattgctgcagaatactgatacaggcgctgcagctgccttcactatggatggtgtgagcacagccatcttgcttctcctcctggctgtcatctctctgtccctgaccttcagctcacggggcaagggccagctgcctccaggacccaaacctctcccaatcctgggaaacctgctgcagcttcgctcccaagacttgctgacctccctcaccaagcttagcaaggagtatgggtcggtgttcacggtgtacctggggtccaggcctgtgatagtcctcagcggataccaaactgtgaaggaggctcttgtggacaaaggggaggagttcagtggccgaggcgcataccccgtctttttcaacttcaccaggggcaacggcatcgccttctccgatggagagcgctggaagatcctcagaaggttctctgtccaaatcctgcggaactttggcatgggaaaaagaagcatcgaggagcggatcctggaagaaggcagcttcctgctggaggtgctgaggaaaatggaaggcaagccctttgaccccgtgtttatcctgagccgctctgtgtccaacattatctgctctgtcgtcttcggaagtcgcttcgactatgacgatgagcgtctgctcaccatcanccactttatcaatgacaacttcaagattatgagcagcccttggggcgagatgtacaacatcttcccaagtgtccttgattggatacctgggccacacaaacgcttgttccggaactttggaggcatgaaagatctcattgcccgcagcgtccgcgaacaccaggattccctggaccccaactctccccgggacttcatcgactgcttcctcacaaagatggcacaggagaagcaagacccactgagccacttcaatatggataccctgctgatgaccacacacaacctgctcttcggtggcacagaaaccgtgggcaccacactgcgtcacgccttccttattcttatgaaataccccaaagtgcaagcccgcgtgcaggaagagattgaccgtgtggtggggcgctcgcggatgccgacgctggaagaccgtacatccatgccttacacagatgcagtgatccacgaagtgcaacgctttgctgacgtcatccccatgaacctgcctcaccgtgtcactcgggacacacctttccggggcttcctgatacccaagggcacagatgtcatcacactccttaacactgtgcactacgactcggaccagttcaagacgcctcaggagttcaatcctgaacattttctggacgacaatcattctttcaaaaagagccccgccttcatgccattttcggctggacgtcgactgtgtctgggagagccactggcgcgcatggagctcttcatatacttcacctccattctgcagaacttcacattgcagccgctggtggatcctgaggacatcgacctgaccccgctcagctcagggctgggcaatttgccaaggcctttccagctgtgtatgcacattcgctgagtactgcgcccagggacccctgtccttcttccagttggggttcactgtcataggcctccattgatatctctctcacatgatcttcccttaaccctgggcctgccacgtatcagtactttaccccgcctatcttaagcccatcttcatggaaagaatgacgtgacaaaggtgaaatacccgtcttatacgcacagaacctattctatgatgcacccttttcctgtctgtttgtatcatttcctagtaaatatcttaataactgaaaaaaaaaaa

SEQ ID NO: 2714 - DNA, 1480 bp, Mus musculus
gccgcaggctgcccacacaggccgcccgctgttttcccttgctgcagacatgctgtggatctgggctgtcctgcctctggtgcttgctggctcacagttaagagttcatactcaaggtactaatagcatctccgagagtttaaagctgaggaggcgggttcatgaaactgataaaaactgctcagaaggattatatcaaggaggcccattttgctgtcaaccatgccaacctggtaaaaaaaaagttgaggactgcaaaatgaatgggggtacaccaacctgtgccccatgcacagaagggaaggagtacatggacaagaaccattatgctgataaatgcagaagatgcacactctgcgatgaagagcatggtttagaagtggaaacaaactgcaccctgacccagaataccaagtgcaagtgcaaaccagacttctactgcgattctcctggctgtgaacactgtgttcgctgcgcctcgtgtgaacatggaacccttgagccatgcacagcaaccagcaatacaaactgcaggaaacaaagtcccagaaatcgcctatggttgttgaccatccttgttttgttaattccacttgtatttatatatcgaaagtaccggaaaagaaagtgctggaaaaggagacaggatgaccctgaatctagaacctccagtcgtgaaaccataccaatgaatgcctcaaatcttagcttgagtaaatacatcccgagaattgctgaagacatgacaatccaggaagctaaaaaatttgctcgagaaaataacatcaaggagggcaagatagatgagatcatgcatgacagcatccaagacacagctgagcagaaagtccagctgctcctgtgctggtaccaatctcatgggaagagtgatgcatatcaagatttaatcaagggtctcaaaaaagccgaatgtcgcagaaccttagataaatttcaggacatggtccagaaggaccttggaaaatcaaccccagacactggaaatgaaaatgaaggacaatgtctggagtgaaaactacctcagttccagccatgaagagaggagagagcctgccacccatgatggaaacaaaatgaatgccaactgtattgacattggcaactcctggtgtgttctctttgccagcaaatggtagttgatactcagtgagggtcaaatgactagcaggttccagggactgcttctgttattctctgcagttgctgagatgaaccattttctctgtctactgcaatttttacattcaaatgtccatgaaatttgtattaaatgtgaagtggaatctgcagtgtttgtgtttatattcatatactatgaactgaggagaattataaactgaaacaaatactcgcagttaattgaagaccttccattgatggacagttcttttcctctctatatggaaatgtataatagaagaaataatttttaaattaaagtatctctttttgcatttca

SEQ ID NO: 2715 - DNA, 855 bp, Mus musculus
ctggggtaaacaggacggtgactcctacttctgtggacatcacccgtgaccttggggtgcagggctggctgaactcaacacccaccttagtctcatggtgtggtggaaaagcacctgcaagaccagagggagcctgaagactgtgatggggtagtttccatagtgacccgggtccttcttgtgtttcagccacagcgaccatgtccaatcctggtgatgtccgacctgttccgcacaggagcaaagtgtgccgttgtctcttcggtcccgtggacagtgagcagttgcgccgtgattgcgatgcgctcatggcgggctgtctccaggaggcccgagaacggtggaactttgacttcgtcacggagacgccgctggagggcaacttcgtctgggagcgcgttcggagcctagggctgcccaaggtctacctgagccctgggtcccgcagccgtgacgacctgggaggggacaagaggcccagtacttcctctgccctgctgcaggggccagctccggaggaccacgtggccttgtcgctgtcttgcactctggtgtctgagcggcctgaagattccccgggtgggcccggaacatctcagggccgaaaacggaggcagaccagcctgacagatttctatcactccaagcgcagattggtcttctgcaagagaaaaccctgaagtgcccacgggagccccgccctcttctgctgtgggtcaggaggcctcttccccatcttcggccttagccctcactctgtgtgtcttaattattatttgtgttttaatttaaacgtctcctgatatacgctgcctgccctctcccagtctccaaacttaaagttatttaaaaaaa

SEQ ID NO: 2716 - DNA, 1217 bp, Mus musculus
taactagtctcgagttctatttattttcattggcttgtagtcctagccatgttgtctttcataaggaggtgagttttggatccactacaggaggacttccgacgtccaacaccatccaccaggtatcaggattccaactgtgtgtgaaattatgccaagtgacaggttataaagatactaaagtacgaagaagaggggctgcaatgagactaattctacagtgatggagtcagctcatgtggaggggagagtttggattcacacacaccctcccgtgggcgttttccctttctctccagattttaaaatttgggttatattgactgattccttgtaggctcttgagagtatgttgttgttagtgggttctttctagttccagatgaatattagattgttaggaaataatgcaatcttaagaagccattagccagcctaggcctttaggagacttaaactttttttctttttcatgaagaatggcgacatcaccagtgtctttcctttgaaagttagcttagcttataattaaattattattttaaatattctttgaaaaagaaaagctaatccgtctcctttctagtgcaatttccacgtgcatacactttaaatacgatgctaatgtacagctgccttcctcctcgtctttgaaacagaagctttgattcgctgcgtcaaatataatggcaaccttagtatttccacatacccaatgctagtgtgtgcttatatcataggatgaagaaagtggcatcttgtttatgggataaggctcctaatgattgttaaaaaaattgcctcattatcctgtaaacctgtttaacccaagaggcttgtctgatgcttgaaaaaatcttgctatgaatttgcaatgaaaatgttagtgcattcgacatgtttttctgtaatagagagcattagtgaacaccagaatttaatttccatacttgtacaggtaggactattcttcagctctctactccaggcaagccattccttaaggcatcttgtataattccaaagaaaaataggcaaatgtggaaacagttttagcatattttagaattttggcatgtaaagtgttttgttgaaccttatggccgtcaagactaattgctatagtttacacctagatattccatctctttttaaacgtggcatattttcaaactggatcctgactattttaaaattaaaaagaattatgatgacca

SEQ ID NO: 2717 - DNA, 2826 bp, Mus musculus
ggcggctgggccccttcagccctgcagaagttcctggggcctcacgactcggctcctcatggacatgatggggctgccagggaccagcaaacacatcaccttcctcctgctttgccagctaggcgcctcaggcccaggtgatggctgctgcgttgagaagacatcgttcccagagggagcctcaggctcacccttaggacccaggaacttgagttgctacagggtttccaagacagactatgagtgctcctggcagtatgatggccctgaggacaatgtttctcacgtcctgtggtgctgctttgtccctccgaaccatacccacaccggccaggagcgctgccgctacttctcctcaggcccagaccgcactgtgcagttctgggaacaggacggtatccctgtgctgtccaaggtcaacttctgggtggagtctcggcttgggaaccgaaccatgaagtcccagaagatatcccagtacctgtacaactggaccaagacgacccctcccctgggacacatcaaggtgtcacaatcacacgggcagttgcgaatggactggaatgtgtctgaagaggccggtgctgaggtacagttcaggcgccggatgcccacaacgaattggaccttgggtgactgcggacctcaggttaactctggctcaggtgtgcttggtgacatttgtgggagcatgtctgagtcctgcctctgcccttctgagaacatggcccaagagatccagatacggaggaggaggcggctctcctcaggagcccctggaggtccctggagtgattggagcatgcctgtgtgtgttccacctgaagtccttccccaggccaagattaagttcttggtggagcccctgaaccaaggtggaaggaggcgtctaaccatgcaaggacagtcaccacagctggcagtcccggaaggctgccgaggcaggcctggtgcgcaggtgaagaaacacttggtgctggtgcgcatgctgtcctgcaggtgccaggctcagacctcgaagaccgtgcccctgggcaagaagctgaacctctccggggccacctatgacctgaatgtgctcgccaaaactcgtttcggtcgcagcaccatccagaagtggcaccttcctgcccaagagctcacagagacaagagccctgaatgtcagcgtgggaggcaacatgacatccatgcagtgggcagcccaggctcccggcaccacctactgccttgagtggcagccatggttccagcacaggaaccacacacactgtaccctgattgtaccagaagaagaagatcctgccaagatggtgacacacagctggagctctaaacctaccctggagcaggaggaatgttaccgcatcacagtgttcgcctccaagaaccccaagaatcccatgctgtgggccacagtcctgtccagttactactttgggggtaacgcctcgagagccggtactccacgacacgtgtcggtgaggaaccaaaccggggactcggtgtccgtggagtggacggcgtcacagctgagcacctgcccgggggtcctgacgcaatacgtcgtgcgctgcgaggctgaagacggcgcgtgggagtcagagtggctcgtgccacccactaaaacccaagtgacacttgacggactgcgcagccgagtgatgtacaaggttcaggtgcgagcggacactgcgaggctcccgggtgcctggagtcatccccagcgctttagctttgaggtgcagatttcccgtttatccatcattttcgcgtctctgggaagcttcgccagcgtcctcctcgtgggcagtctcggatacattggcttaaacagggccgcctggcacttgtgcccacccctgcctacaccctgtggcagcactgccgtggagttccctggcagccagggcaagcaggcttggcagtggtgcaaccctgaggacttcccggaggtgttgtacccgcgagatgcgctggtggtcgagatgcccggagacagaggcgacgggacagagtcgccccaggccgcccctgagtgcgccctggacacaaggcggcccttggagactcagaggcagaggcaggtgcaggcactgtcagaggccaggcgcctgggcctggctagggaggactgtccccgtggtgacctggcccacgtgacactcccgctgctcctgggaggtgtgacccagggagcctctgtacttgacgatctttggaggacccataagactgcggagccgggaccgcccactttggggcaagaggcctgactgttgcatctccagcctgctccctcctcaggagcccctaaactgcaacagctgttcataatggctgtcctattttatagatgtgattcttgaggcccagagaaggtgactgtcttgcctgatgtcacacagcgtttgcaggacgcagacccaggcctttctccccgttctgtagcacccttctcttctcccacccactccctccagcgcctatagccacaccgcctgtgaggggaacatggaaacctccaagaaggggaaagtgcttcatgcagcctcgcttggtatcctcagggcaaggctggaccctatcactggtctgtttatttttgggggggtccttccagtctgaggggacatggtcagtcacaggctcattttgcctccagcgtccttggctggggtcacagaatgactctagagcgtcataaattaggttacctaaaaagcagggcctagacattcacgggaagtttatatgtctggactcagtttccctattagagtattgggcacttaataaatgggccttcccagagactgagaaacta

SEQ ID NO: 2718 - DNA, 1880 bp, Mus musculus
ggcaggcacagcctctggtctaagaagagagggcactgtgcagaagccatcgctccctacagagccgccagctcgtcgggatgcagggagccacgaccctagatgccgcctcgccagggcctctcgccctcctaggccttctctttgccgccaccttactgctctcggccctgttcctcctcacccggcgcaccaggcgccctcgtgaaccacccttgataaaaggttggcttccttatcttggcatggccctgaaattctttaaggatccgttaactttcttgaaaactcttcaaaggcaacatggtgacactttcactgtcttccttgtggggaagtatataacatttgttctgaaccctttccagtaccagtatgtaacgaaaaacccaaaacaattaagctttcagaagttcagcagccgattatcagcgaaagccttctctgtaaagaagctgcttactgatgacgaccttaatgaagacgttcacagagcctatctacttctacaaggcaaacctttggatgctcttctggaaactatgatccaagaagtaaaagaattatttgagtcccaactgctaaaaatcacagattggaacacagaaagaatatttgcattctgtggctcactggtatttgagatcacatttgcgactctatatggaaaaattcttgctggtaacaagaaacaaattatcagtgagctaagggatgatttttttaaatttgatgacatgttcccatacttagtatctgacatacctattcagcttctaagaaatgaagaatctatgcagaagaaaattataaaatgcctcacatcagaaaaagtagctcagatgcaaggacagtcaaaaattgttcaggaaagccaagatctgctgaaaagatactataggcatgacgattctgaaataggagcacatcatcttggctttctctgggcctctctagcaaacaccattccagctatgttctgggcaatgtattatattcttcggcatcctgaagctatggaagccctgcgtgacgaaattgacagtttcctgcagtcaacaggtcaaaagaaagggcctggaatttcagtccacttcaccagagaacaattggacagcttggtctgcctggaaagcactattcttgaggttctgaggctgtgctcatactccagcatcatccgagaagtgcaggaggatatgaatctcagcttagagagtaagagtttctctctgcggaaaggagattttgtagccctctttcctccactcatacacaatgacccggaaatcttcgatgctccaaaggaatttaggttcgatcggttcatagaagatggtaagaagaaaagcacgtttttcaaaggagggaagaggctgaagacttacgttatgccttttggactcggaacaagcaaatgtccagggagatattttgcagtgaacgaaatgaagctactgctgattgagcttttaacttattttgatttagaaattatcgacaggaagcctatagggctaaatcacagtcggatgtttttaggtattcagcaccccgattctgccgtctcctttaggtacaaagcaaaatcttggagaagctgaaagtgtggcagagaagctttgcagagtaaggctgcatgtgctgagctccgtgatttggtgcactcccccaaatgcaaccgctactcttgtttgaaaatggcaaatttatatttggttgagatcaatccagttggttttgggtcacaaaacctgtcataaaataaagcagtgtgatggtttaaaaaatgtcatggcaatcatttcaggataaggtaaaataacattttcaagtttgtacttactatgatttttatcatttgtagtgaatgtgctttt

SEQ ID NO: 2719 - DNA, 1976 bp, Mus musculus
gtaggcggagcgtgggtactgctctgcttggccctcctggctctcagcgcagctcttgatccctgcctcctccgccgccttagtctagctcgtctctgaacaggccgcagttccccgatttgcgattcctgggctcaaagctctgcggctactgcgtctggttgtctctgctcctgagagatgacgctcaagtcgagcgaaggcgagggagggaacagcatgcgcaccgcactttcggacctctacctggagcacttactacagaagcgtaaccgacctgagacttcattgaaccagtcaaatgttactactgaggacatgtacaccaatgggtcccctgctccaggtagccctgcccatgccaaaggtcaggaggctcggagagttcgtctcatacaatttgagaagatcacagaagagcccatggggatcactttgaagctgaatgaaaaacagtcgtgtaccgtggccagaattctccatggcggcatgattcatagacaaggctcccttcatgttggggatgagatcctagaaatcaatggcacaaatgtgactaatcactcagtagatcagttgcagaaggcaatgaaggaaaccaaaggaatgatctcattaaaagtcattgctaatcagcagagtcgccttcctgcgctacagatgttcatgagagcacagtttgactatgatccccaaaaggacaaccttattccttgcaaggaggcaggactgaagtttgttactggagacattatccagataatcaacaaagatgacagcaattggtggcaggggcgggtggagggctcctccaaagagtctgcaggattaatcccttctcctgagctacaggaatggagagtggcaagcgtggctcactctgctccaagtgaagcaccaagttgcagtccctttgggaagaagaagaagtgtaaagacaagtacctggctaagcacagttccatttttgaccagttggatgttgtttcctatgaggaagttgttcggctccctgcattcaagaggaagaccttggtgttgatcggagccagtggggtgggtcgtagccatattaagaatggtctgctcagtcacaatccagagaagtttgcgtaccctgccccatatacaacccggccaccaaagaagagtgaggaagatgggaaggagtatcatttcatctcaacagaggagatgacgaagaacatctctgccaatgagttcttggagtttggcagctatcagggcaacatgtttggcaccaaatttgaaacagtgcaccagattcataagcaggacaagattgccatccttgacattgagccccagaccctaaagactgttcggacagctgagctttcacctttcattgtgttcatcgcacctactgaccagggcactcagactgaagccctgcagcagctgcagaaggactctgaggccatccgtagtcagtatgctcattactttgacctctctttggtgaataatagtgttgatgaaactcttaagaaattgcaagaagcctttgaccaggcttgcagttctccacagtgggtgcctgtctcctgggtttactaagcttacagaattggcaaacatgtttcagccagcatttggaatgccacctccccgcaccccctcccttgcttaagccaaaagggttgcttcaacttttagctctgctgttttcttactcaggctcctaaaggggtgaagctttcctactatctacatttcaaaatgatctctggaaaattgccataagaataaccaaatgcaatgctactgcatagataaaccaactgtccccctgaagcctgagctcctttgctttcaactatagaatgtctttttactctggaataaatatcttctgaaaactttctaaaatgccaaaatcaaacagctgtgcaatagaatgtctgctgtagggaaaatcttccaaagcaataaaaatgctgctgtgttaaagt

SEQ ID NO: 2720 - DNA, 2539 bp, Mus musculus
gtgcgtcctgcgggggaggaggcgcggagaggcggcaagcgcagccggggaggtgggggcagaggcacagacagaggcgcggaggctccgagagagaagacgtggagggagggacggagcctggacagcggtggacccgggccgcgcgcgccaggcaaagagcagcgcgcagcaggcgccgggcaccgagaggggaggcactggtgatctctgcccgtccatgcacagagctccctctcccacagcggaacagccacctggcagaggggataacacacgccggaccccccaacccagattcaaggcaagtgccccagccatggcactgcctcggacactgggtgagctacagctgtatcgggtcctgcaacgcgccaacctcctctcttactacgagaccttcatccagcagggaggagatgatgtacagcagctgtgtgaggctggcgaggaggagttcctggaaatcatggcactcgtgggcatggccaccaaaccactccatgtccgacgtctacagaaggctctgagagaatgggccaccaatccagggctcttcagccaaccagtgcctgctgtgcccgtctccagcatcccacttttcaagatctctgagacagctggtacccggaaagggagcatgagcaatgggcacggcagcccaggagaaaaggcgggcagtgctcgaagctttagccccaagagtcccctcgaacttggagagaagttgtcgccactccctggaggacctggggcaggggatccccggatctggccaggccagagcactccagaatctgatgttggagcagggggagaagaggaggccgggtctccccctttctccccacctgcagggggaggagtctctgaagggcctggggttgggggggtggcagctggtggtgcagggggttgtccagaccgcctggaaccagagatggtgcgaatggtggtggagagtgttgagaggatcttccggagtttccccaggggtgacactggagagatcgcatccctgttgaagctgaataagaagctggcgcggagcgtcgggcacatctttgagatggacgatcatgacgcccagaaggaagaggagatccggaagtacagcgtcatctacggccgcctggactccaaaaggcgggagggcaaacagcttagcttgcacgagctgaccatcaacgaggctgctgcccagttctgcatgagggacaacactcttttactgcgaagggtagaactcttctcactgtcccgacaagtagcccgagagagcacctatctttcttccttgaagggatccaggcttcactctgaagaattgggagggccaccactgaagaaactgaaacaagaggttggagaacagagtcacaatgaaatccagcagcctcctccaggccctgagtcctatgcacccccataccgccccagcctagaggaggacagcgccagtctgtctggggagagcctggatggccacttgcaggctgtggggtcgtgcccaaggctgacgccgccccctgctgacctgcccctggcattgccagcgcatgggctatggagccgccacatcttgcagcagacactgatggatgaggggctgtggctcgcccgcctcgtctcccatgatcgtgtgggccgactcagcccctgtgtgcctgcgaagccgcctctcgcagagttcgaggaggggttgctggaccgctgccctgccccgggacctcatcctgctctggtggagggccgcaggagcagcgttaaagtggaggcagaagccagccggcagtgaaagtgggggaagtctcagacccaggacccagacttctggctcacttagacccccacattctccatccttgcactcgccactaccctagaaggatccttctgctgccctctgcctcccatccgccccatgggcacaggactatggggcttcaagcaataacaggcaggggcctggccagaggacacaaggacggtgcaaggtgtgccctcacccggcttaggggcacggactttgcctccagcctgctggggctctcctttctctcataccacacacacacacacacacacacacacacacacacatattctccaggtggccagcagtggtgtgagcaactgaactacttcacttggacacggagaaagaacttccccaggaaggtctagcgacttacagtggaaccttcactctgagactgggggcttgggaaaactgggtctcccctccccatccccatttttcgtgcttctagtttgtttctttaatttaacaagtgctgcagtttgcccacccgttcttatctcccccctccccgcagacctttttttcagcactgtgtgggagggtgccccgaagttccctccaccagccccttagaggcctgggttggaccctgggcctcctcaaccggcaggactgcagcacctgtcggacacttagcgtgtctttcttttcagattgtgtacagtagattatttattttgttattttggaataaaatttattttatggcttagg

SEQ ID NO: 2721 - DNA, 2493 bp, Mus musculus
ttcccgcgcttctgctccgccctccgcagccctccacagtcaccccggagaccagccgtgttaagctctctgctctgaagctgactgacttccatggcagccgcgaagaaagcagttctggggccattggtgggagcagtggaccagggtaccagctcgacacgttttttggttttcaattcaaaaacagctgaacttcttagtcatcatcaagtagaaataaaacaggaattcccaagagaaggatgggtagaacaagacccgaaggaaattctgcagtctgtttatgagtgtatagagaaaacgtgtgagaaacttggacagctcaatattgatatttccaacatcaaagccattggtgtcagcaaccagagggaaaccacagtagtctgggacaaggtcaccggagagcctctctataatgccgtggtgtggcttgacctaagaacccagtctactgttgagaaccttagtaaaagaattccaggaaataataactttgtcaagtccaagacaggccttccacttagcacgtatttcagtgcagtgaaacttcgttggctccttgacaacgtgaaaaaggtccaagaggctgttgaagaaaatagagctctttttgggaccattgattcatggcttatttggagtttaacaggaggaatccatgggggtgtccactgtacagatgtaacaaatgcaagcaggacgatgctttttaacattcattctttggaatgggataaagagctctgcgaattttttggaattccaatggaaattcttcccaacgttcggagttcttctgagatctatggcctaatgaaagctggggccttggaaggtgtaccaatatctgggtgtttgggggaccagtctgctgctttggtgggacaaatgtgcttccaggatggacaggccaaaaacacgtatggaacagggtgcttcttattgtgcaacacgggccataagtgtgtattttctgaacatggcctcctgacaaccgtagcatataaacttggcagagacaaacctgtgtattatgcgttggaaggttccgtggctatagctggtgctgtaatccgctggctaagagacaaccttggaattattaagtcctctgaggaaattgaaaaacttgctaaggaagtaggtacttcttatggctgctacttcgttccagcattttcagggttatatgcgccttattgggagcccagtgcaagagggatcatctgtggactcactcagttcaccaataaatgtcatatcgcttttgctgcactagaagctgtttgtttccaaacccgagagattttggatgccatgaatcgcgactgtggaattccactcagtcatttacaggtagatggaggaatgaccagcaataaaattcttatgcagctacaagcagacattctgtatattccagtagtgaaaccctccatgcctgaaacaactgcactaggcgctgccatggcagctggggctgcagagggggttggtgtgtggagtcttgaacctgaggatttgtcagctgtcacaatggagcggtttgaacctcagatcaatgctgaagaaagcgaaatccgttactccacatggaagaaagctgtgatgaagtcaattggttgggttacaactcagtctccagaaagtggtatcccataaataataccacctcacggatttccaagatgcaagctttttaatgtgatatgaaaatctgactattctgtctcatagtataatgatgctattcatagactctgatttttttcataagccactggctgcatgatcctctaagcagacctatgacttgaaataaagaaagtgcagcagaaagaatcctccagaaacatttaatttttttttaacattgacagttaagatcgggtcagtcacctttgaggctgacctctgcctccactgtcatgatgtcctacactattcccgttaaggtctagggtgattttggtatcctgtctattgaaatgtgccattcagtatattcagatgctagtggattacacatgtttgaggaagaggttgttactaacctgttcaaaatgagtggcttcttgcttgtttgcttttaacagctcagatgtcttcttttctatatattagaaggccacaacattactggatatttcaaatggaaacatctaaagaattgttggataattgaatttgctaattcttgtggcttaagacatttttctgtacagttgtttgcccaaaattccaaccttgtcaggtgttttacactgtcccactaactaccatagctttctgtctggctcttacaggatagaacactttctttttctgcttttttttcatttctcctttttatatttttattctgtatgtataacatacatgcctatatattttatatgctgagagtaacccatttataaattaagagcacattatattcaataagttataagagggctggtcttaagtggactactatgtatacag

SEQ ID NO: 2722 - DNA, 902 bp, Mus musculus
cccaagatcagcaggtgtcagctatccagaggaggaaatcgtttggcttggccaactgaggctgtgctggaccccagcttgcttgctgttatcgaacgcagtcggcacaccatcttgtgtcgctaccggcaatgggcttggagctctacctggacctgctgtcacaacccagccgcgctgtctacatcttcgccaagaagaatggcatccccttccagacgcgtaccgtggatatactcaaagggcagcacatgagcgagcaattctcccaggtgaactgcttaaacaaagttcctgtactcaaagacggaagcttcgtgttgaccgaaagcacagccatcttgatttacctgagttccaagtaccaggtggcagaccactggtacccggccgacctacaggcccgtgcccaagtccacgaatacctgggctggcatgccgacaacatccgtggtactttcggagtgctcctatggaccaaggtgttggggccactcattggggtccaggttccccaggagaaggtggaacggaacagagatagaatggtcctggttctgcaacagctggaggacaagttcctcagggacagggccttccttgttggccagcaggtgacgctagcggatctcatgtctctggaggagttgatgcagcccgtgggccttggctataacctgtttgagggacggcctcagctgacagcatggcgagagagggtggaggcgttcttgggtgctgagctgtatcaggaggctcatagcaccatcctgagcatcctgggacaggcagccaagaaaatgttaccagtaccccctccggaggtccatgccagcatgcagcttcgaattgctaggattccttgagtggtctgaccagcaataaagactcattttgtgtta

SEQ ID NO: 2723 - DNA, 1796 bp, Mus musculus
tgaattcgtggctctcttgcttgcttttctctctctcttgcttcttgctctcttttcctgaagatgtaagaataaagctttcccgcagaagattctggtcttgtggtgttcttcctggccggtcgtgagaaccccgtcaataacaattggtcccgaaacccgggacgagaaaatccgggacgagaaaaaacttcggactcgcgcaggtgggatactgcattccagaaccagaacgcagatcaaggttataaggttcccgtaacacagactgttgagaagggttcactgcccgtattcagactcatcagctggggcacgacggtgataaaggtcccgtaaagcagactgttaagaaggattcaactgtatgaattcagaacttttccagctggggaacgagagtaccaatgttcctcctgcggatcaagagaagctttttatccagaagctacgccagtgttgtgtcctctttgactttgtctctgacccactgagtgacctgaagtggaaggaagtaaagcgcgcttcactgagcgagatggtggagtatatcacccacaaccggaacgtgatcacggagcccatttaccccgaggccgtccacatgtttgcagttaacatgttccgaaccttgccaccttcctccaatcccacgggagcagaattcgacccagaagaggatgaaccaacgttagaagcagcctggcctcatctgcagcttgtttatgaatttttcttaagatttttagagtctccagatttccaacccaatatagcaaagaaatatattgatcagaagtttgtattgcagcttctagagctgtttgacagcgaggatcctcgggagagagattttctaaaaaccaccctgcacagaatctatgggaagttcttaggcctgcgtgcttacatcaggaaacagatcaataatatattttataggtttatctatgagacagagcatcacaatggcatagcggagttactggagatcctgggaagtataattaatggatttgccttaccactgaaggaggaacacaagattttcctgctgaaggtgttgctgcccttgcacaaagtgaagtccctgagtgtctaccatccccagctggcgtactgtgtcgtgcagtttttagagaaggacagcaccctcactgaaccagtggtaatggcacttctcaaatactggccaaagactcacagtccaaaagaagtaatgttcttaaatgaattagaagaaattttagatgtaattgaaccatcagagtttgtgaagatcatggagcctcttttccgacagttagccaaatgtgtttccagccctcacttccaggtggccgagcgggcgctctattactggaacaacgagtacatcatgagtttaatcagtgacaacgcagcgaagattctgcccatcatgtttccgtccttataccgcaactcaaagacccactggaacaagacaatacacggcttgatatacaacgccctgaaactcttcatggagatgaaccaaaaactcttcgatgactgcactcagcagttcaaagcagagaaactcaaagagaagctaaaaatgaaagagcgagaagaagcatgggttaaaatagaaaatctagccaaagcgaatccccaggtactaaaaaagagagtaactcgggagtgttgaggctttgcgtgaatgtctgagatagggcctggctccaccccaggaagggaggccaacgtcactaacactgtatgtgcaaatgtccgaataaaacactttccaactttgtaaaaaaaaaaagctt

SEQ ID NO: 2724 - DNA, 2432 bp, Mus musculus
atcccggcgcgctcgccgcgagctcagggccactctggttctcggtgaggccgactccgttctggctggaggatcctgactcccttgctcgccgaccccttgcgcgtgacgaccgatctcaggctgagcaatggcgtttcaaaaggcagtgaaggggactattcttgtgggtggaggagctctggccactgttttgggactctctcagtttgctcattacagaaggaagcaagtgagcctggcatatgtggaagcagcaggatacctcacggagcctgtgaacagggaacctccctccagagaagctcagctcatgactttgaagaacacacccgaatttgacatccttgttatcggaggcggagccacagggtgtggctgtgcactagatgccgtcaccagaggactgaaaacagcccttgtagagagagatgacttctcatcggggactagcagtagaagcactaaattgatccacggtggtgtgcgatacctccagaaggctatcatgaacttggatgttgagcagtataggatggtgaaagaagcccttcacgaacgtgccaacttactagaaatcgctcctcatttatcagctccggtgcctatcatgcttccactttacaagtggtggcagttaccttattactgggtgggaatcaagatgtatgacctggttgcagggagtcaatgcctgaagagcagttacgtcctcagcaaatcccgagccctggagcattttcccatgctccagaaggacaagctggtaggcgccattgtctactatgacggacaacacaacgatgcacggatgaacctcgccatcgccctcactgctgccaggtacggggctgccacggccaattacatggaggtggtgagcttgctcaagaagacagaccctgaaaccggcaaagagcgagtgagcggtgcgcggtgcaaggatgtgctcacagggcaggaatttgacgtgagagccaaatgcgttatcaatgcctccggccctttcacagactccgtgcgcaaaatggatgataaaaacgttgttcccatctgccagcccagtgccggggtccatattgtgatgcccggatactacagccctgagaacatgggacttcttgatcctgcaaccagtgatggcagagtgattttcttcttgccttgggagaagatgacaattgctggcaccactgatacgccaacggacgtcacgcaccatcctattccttcagaagaagacattaacttcatcctgaatgaagtgcggaactacctgagttctgacgttgaagtgagaagaggggatgtcttggcagcctggagtggtatccgtccccttgttaccgatcccaagtctgcagacactcagtccatctctcgaaatcatgttgtggacatcagtgacagcggactcatcacaatagcaggtgggaagtggaccacctaccgctccatggcagaagataccgtggatgcagctgtcaagtttcacaacttgaatgcgggaccgagtaggactgttgggctgttccttcaaggaggcaaagactggagccccacactctacatcaggcttgtccaggattatgggcttgagagcgaggttgcacaacatctggccaaaacctatggtgacaaggctttcgaggtggccaaaatggcaagtgtgactggaaagcggtggcctgttgttggagtgcgtcttgtgtcagaatttccatacattgaagcagaggtgaaatacgggattaaggagtatgcctgcactgcagttgacatgatctcacggcgcacccgcctggcctttctcaatgttcaggctgcagaggaagccctgcctaggattgttgaactaatgggaagagagttggactggagtgaattgaggaaacaggaagaacttggaacagccacgagatttctgtactatgaaatgggctacaagtctcgaacagaacaacttacagatagcactgaaatcagcctgctgccttcagacatcgataggtacaagaagagatttcacaagtttgatgaagatgaaaaaggcttcattaccattgttgatgttcagcgtgtcctagagagtatcaatgtacaaatggacgaaaacacactgcatgaaattctctgcgaagtagatttgaacaaaaatggacaggttgagctgcacgagtttctgcagctgatgagcgcagttcagaaaggaagggtctctggaagccgacttgccatcctgatgaaaactgccgaggagaacttggaccgcagagttccaatccccgtggaccgtagttgtggaggattgtgagtctgaccagtaaatccgccaccagcaagcataggacagccagcgctatgtacaaccagagatgacttaaactctaaaatagtggatctcgtagctgccttttttaaaacaaacaaac

SEQ ID NO: 2725 - DNA, 1974 bp, Mus musculus
tcggcttccggcggcgtgctcgcggtgcggagaccggaagggtctgtgcttgctgccgagactgttggtccttttagaaacatctccatcatgtcttgtgacactcaagaagctaccagagagtgcctgggtatgaaccttgatggcaacaaagagcctgtgtcgctggtagaaagcggcgtcagaagtgagtcggagcatctccaagtcactattggagccactgtacccactggctttgaacaaacggctgcgggggaagtgagagagaaactgaagtcggcctgcagaatcagcaaagaccgcggaaagatctattttgatattgcagtggaaagtctggctcaggttcattgtctgagatcagttgataacttgtttgtggttgttcaggagtttaaagattaccagttcaaagatacgaaggaagaagttctaagagactttgaagaactggctggaaaactcccatggtcagaccctttaaaagtctggcaaattaacaccactttcaagaagaagaaagcaaagcgcagaaaggcaaatcagagtgcaggtaaagagaaggctgactgtggacaaggagacaaagcagatgagaaagatggtaagaaaaagcatgccagcagcacttcagattcacatatcttggactattatgaaaatccagccatcaaagaagagatatcaaccttagtaggtgatgtcttgtcgtcttgcaaagatgaaactggtcaaagcttaagagaagaaactgaaccacaggtacagaagtttagagtcacctgcaacagagcaggagagaaacattgctttacctccaatgaggctgcgagagattttgggggtgctattcaagagtactttaagtggaaggctgatatgaccaactttgatgtagaggttctcctgaacatccatgataatgaagtcattgttgctattgcactgacagaagagagtctccatcgcagaaatattacacattttggacctacaactcttaggtcaactcttgcctatgggatgctcaggctctgtgaacctaagcctactgatgtaatagtggacccaatgtgtggaacaggggcaataccaatagagggggctactgagtggtctcactgttaccatattgctggggacaataacccactggcagtgaacagagcagcaaataacatctcatctctattgactaagagccagattaaagatggaaaaacaacctggggtttgcccattgatgctgttcagtgggatatctgcaacctcccactgagaactgcttctgtggatattattgtaacagatatgccatttggaaaaaggatgggatccaagaagagaaattggaatctctatccagcttgccttcgggaaatgagccgtgtctgtagaccagggacaggcagagctgtactgcttactcaggacaagaaatgttttaccaaggccttatctggaatgggacatgtgtggcgaaaggtccatgtagtctgggtgaacatcgggggccttcatgctgcagtttatcttctaaagcgcactgctcaagcctttgttcatccttcagatcaagatgaaggaagagaccctccttggtaaagaaaagagtgaagacaacttattaatatttgtagttcctaacactggaaatatcagcataaagaacttgctttgggagaaaaatagcagaaaagtaacttacagtacaggttacactgcttgaccactccagaatgcttgatttctagcaaggtgattgtaatggtatttcttaagaagcctacactgcttggcttctaagtgtcagaacactttaggccatattctattgcttgtgcaacctactgttttatggtctaaattctttgtatcatctcagaagcagaagtatcccttaagatctacagttttatcatctgctttaaaataaatatacaacctaaacagagcaaaaaaaaaaaaaaa

SEQ ID NO: 2726 - DNA, 1671 bp, Mus musculus
aggctcaggaggagtttgagagtggaggaactgcacaccagccgccgcgggagtaggaacccgagagcgaccctgacagagtcatgtggctggaactcatcctggcttctgtgctgggctttgtcatctactggtttgtctcccgggacaaggaggagaccttaccacttgaagatgggtggtggggcccagggtcaaagccatcagccaaagaagatgagagcatccggcccttcaaggtggaaacatcagatgaggagatcaaggacttgcaccagaggatagataggttccgggcatccccacctttggagggcagtcgcttccactatggcttcaactccagctacctgaagaaagtggtgtccttctggaggaatgagtttgactggaggaagcaggtggagatcctcaaccaatacccacactttaagaccaagattgaagggctggacatccacttcatccacgtgaaacctccccagctgccctcaggccgcactccaaagcccttgctgatggtgcacggctggcctggctccttctatgagttctacaagattatcccactgctgacagaccccaagacccacggcctgagtgatgagcacgtgtttgaagtcatctgtccctcaattcctggctatggcttctcagaggcatccagcaagaaaggtttaaattcggtggccactgcgaggatcttctacaagctgatgtcacggctgggcttccagaagttctacattcaaggcggcgactgggggtctctcatctgcaccaacatagcccagatggtgcccaaccacgtgaaaggtttgcacttgaatatgtctttcatttcaagaaacatttattccctgacccctctcctgggccaacgttttgggagatttcttggctacacagagaaggatctggagctcttgtacccattcaaggaaaaggttttctacaacatcatgagggagagtggctacttacacatccaggccaccaagccggacactgtgggctgtgctctgaatgactctcctgtgggcctggctgcctacatcttagagaagttctccacctggaccaagtcagaataccgtgaactggaggatggaggcctggagaggaagttctccctggaagatctgctgactaacatcatgatctactggacgacaggaaccattgtctcctcccagcgcttctacaaggaaaacttgggccagggtgtcatggtccatagacatgaggggatgaaggtctttgtgcccactggctattcagccttcccttctgagatcctgcatgccccaaaaaagtgggtgaaggtcaagtaccccaaactcatctcctattcctacatggaacgtgggggccactttgctgccttcgaagagcccaagcttctggcccaggacatccgcaagttcgtgtccctggctgagctgcagtgatgacgctacacaccaaccatggctttagcagcagccctggttccttcccagtcatacttatggaagatgtgcccttccagaggaataagtttgttccctgaccacactgggggacccagacttcaaccccacagagtcctctcttaccacccccatatcgtcgccccactgcatagctgtgttaagctacatggctttaatgataaatgggtttatttct

SEQ ID NO: 2727 - DNA, 696 bp, Mus musculus
tagatgctttcacaaaccccacccacaaaacaacacatgttcttaagtcctcagttttgtgttcacctcggcctcatagtacccactctgacctgctgtgtaaacgacccggacctaccaaaatgaccgcacctgcaataaagatacacatcatgtcgtcttcacacctcttctacctggcgctctgcttgctcaccttcaccagctccaccacagctggaccagagaccctttgcggggctgagctggtggatgctcttcagttcgtgtgtggaccgaggggcttttacttcaacaagcccacaggctatggctccagcattcggagggcacctcagacaggcattgtggatgagtgttgcttccggagctgtgatctgaggagactggagatgtactgtgccccactgaagcctacaaaagcagcccgctctatccgtgcccagcgccacactgacatgcccaagactcagaaggaagtacatttgaagaacacaagtagaggaagtgcaggaaacaagacctacagaatgtaggaggagcctcccacggagcagaaaatgccacatcaccgcaggatcctttgctgcttgagcaacctgcaaaacatcgaaacacctaccaaataacaataataagtccaataacattacaaagatgggcatttcccccaatgaaatatacaagtaaacattc

SEQ ID NO: 2728 - DNA, 1796 bp, Mus musculus
gcaaaggaatgctttgcaagcctccagggctccccaggaggagcagcatggcctcaggcatggccatcaccttagcccttgccatctttgccttgggtgtcaatgcacagatgccaatacccgtttccagagaagaacaagaacaacactatcccataccgatagactgcagaatgagcccatggagcaattggtcagagtgtgatccttgcctcaaacaaaggtttcgctcaagaagcattttagccttcggacagtttaatgggaaaagctgtgttgatgttttgggagacagacaaggctgtgaaaccacccaggagtgtgaagagatacaggaaaactgtggaaatgactttcagtgtgagacaggcaggtgcataaagaggagacttctgtgtaatggtgacaacgactgtggagattattctgatgagaatgactgtgacgatgacccacgcaccccatgccgtgaccgagtagcggaagaatcagagctgggactaagagcaggctatgggatcaacatcttagggatggagcccctgagaacaccttttgacaatgagttctacaacggactctgtgaccgggtacgagacgaaaagacatactatcgcaaaccttggaatgtagtttctctgatctatgaaaccaaggctgataaaagtttcagaactgagaactatgacgaacacttggaagtattcaaagccatcaaccgagagaagacctcgaattttaatgcagattttgccctaaaattttcacccaccgaagtacctcaaaagggagctggggaagtctccccagcagaacactcttcaaaagctacaaacatttcagctaaatttaccatttcatatttcatgggaaaaaattttcgaagactatcatcttatctttcgcagtcgaaaaagatgtttgtgcacttgagaggagtggtccaactggggagatttgtaatgaggaatcgggatgttgtgctgaggtcaactttcctggatgatgtaaaagctctaccaacttcctatgaaaagggagaatattttggatttttggaaacctatgggactcactacagtacctctgggtccctgggaggacaatatgaaattgtctatgtcttggataaagcttccatgaaagagaaaggtgttgacctgaatgatgtaaaacattgtcttggatttaatatggatttacgtattcctctacaagacgacttaaaggatgcatcagtcacagcaagtgttaatgcggatggttgcataaagacagataatgggaaaactgtaaacatcacccgcgataacatcatagatgatgtcatttcattcataagaggagggactagggagcaagcaattctcctgaaagagaagattctcagaggagacaagacatttgataagactgacttcgccaactgggcctcgtccctggcaaacgctccagctctcatcagtcaaagaatgtcccctatatataatctcattcctttgaaaataaaagatgcatacataaagaagcaaaatttggaaaaggctgttgaagactatatagatgaattcagtactaaaaggtgctacccatgtctaaatggaggtactataattcttctggatgggcagtgcctgtgctcctgcccaatgatgtttaggggaatggcctgcgaaatccatcaaacaatatagccttcaggaaacaaagcaaaccctggttcacatggaagggggaaaaaaaaaaggacaaaaaaaaaaaaatcccaggactttccaacttagcatcttaccctg

SEQ ID NO: 2729 - DNA, 3295 bp, Mus musculus
atccactcaggttcaggtggtgtgggccaagcggccatttccattgccctcagtctgggctgccgcgtcttcaccactgtgggctctgcagagaagcgagcatacctccaggccaggttccctcagcttgatgacaccagctttgccaactcgagggacacatcatttgagcagcacgtgttactgcacacaggtggcaaaggggtcgacctggtcctcaactcactggcagaagagaagctgcaggccagtgtgcggtgcttggctcagcatggtcgcttcttagagattggcaaatttgatctttctaacaaccaccctctgggcatggctatcttcttgaagaacgtcactttccatgggatcctgctggacgccctttttgaggaggccaatgacagctggcgggaggtggcggcactcctgaaggctggcattcgtgatggagtcgtgaagcccctcaagtgcacagtgtttcccaaggcccaggtggaagatgccttccgctacatggctcaggggaaacacttggcaaagtccttgtccaggtacgggaggaggagcctaggctgtgctgccaggggctcagccaccctgatttctgccatctccaagaccttctgcccagcccataagagttacatcatcactggtggcctaggtggctttggcctggagctggcccggtggctcgtgcttcgcggagcccagaggcttgtgctgacttcccgatctggaatccgcaccggctaccaagccaagcacattcgggagtggagacgccagggcatccaagtgctcgtgtcaacaagcaacgtgagctcactggagggggcccgtgctctcatcgccgaagccacaaagctggggcccgttgggggtgtcttcaacctgggccatggtttgagggatgccatgctggagaaccagaccccagagctcttccaggatgtcaacaagcccaaatacaatggcaacctgaaccttgacagggcaacccgggaagcctgccctgagctggactactttgtggccttctcctctgtaagctgcgggcgtggtaatgctggccaaactaactattgcttcgccaactctaccatggagcgtatatgtgaacagcgcaggcacgatgtcctcccaggccttgccgtgcagtggggtgccattggtgacgtgggcattgtcctggaagcgatgggcaccaatgacacagtcatcggaggtacgctgcctcagcgcatctcctcctgcatggaggtactggacctcttcctgaatcagccccacgcagtcctgagcagctttgtgctggcagagaagaaagctgtggcccatggggacggggacaaccagagggatctggtgaaagctgtagcacacatcctaggcatccgagacctcgcaggtattaacctggacagcacgctggcagacctcggcctggactcgctcatgggtgtggaagttcgtcagatcctggaacgagaacacgatctggtgctgcccatgcgtgaggtgcgaaggctcacgctgcggaaacttcaggaaatgtcctccaagactgactcggctactgacacgacagcccccaagtccaggagtgacacgtctctgaagcagaaccaactgaacctgagcacactgctggtgaaccctgagggtcctaccctaacccagctcaactcggtgcagagctctgagcggcctctgttccttgtgcaccccattgagggttccaccaccgtgttccacagtctggctgccaagctcagtgtgcccacctacggcctgcagtgcacccaagctgcccccctggatagcattccgaacctggctgcctactacatagattgcatcaagcaagtgcagcctgagggaccccaccgcatagctgggtactcatttggagcctgtgtagccttcgagatgtgctcccagctgcaggcccagcagggcccagccccgacccacaacaacctcttcctgtttgacggctcacacacctacgtgttggcctacacccagagctaccgggcaaagatgaccccaggctgtgaagccgaggccgaggctgaggccttatgcttcttcataaagcagtttcttgatgtggaacacagcaaggtgctggaggccctgctgccactgaagagcctggaagatcgggtggctgcctccgtggaccttatcactaagagtcaccacagcctggaccgccgagagctgagctttgctgccgtgtccttctaccacaagctccgggcagctgatcagtataagcccaaggccaagtaccatggcaacgtgacactgctgcgtgccaagacaggcggcacctatggcgaggacttgggtgctgactacaacctctcccaggtgtgtgacgggaaggtgtctgtgcacatcattgagggtgaccaccgcacactgctggagggcagtggcctggaatccatcatcaacatcatccatagctccctggctgagccacgagtgagtgtacgggagggctagacctccaccatgaagccacgctccacacctgccaccagagatgctccgatccccaccacaccctgagtgcaggaactggggagggtcctgctggtgggacccctccccccagtggcccagcaccacccgctcccctggtggctgctacaaacagaccatcacgcgtgtgttcccagccgcgtagtggggttcccagagccactgacttggagacaccctggtctgtgaagagtcagtggaggcaggagccaaactgagccttttctaccgtgtggcatttgccacgctggtcgtttctccattaaattctcatatttattgcattgctgggaaagacccccaggggtgactcattccagaaccccctaaaatgggagaagccatgtggggaagatttctgggaaagtttctagactcaatacacaggctgctggctggagcccctttttgtcttgtcctgtccctgctcactgcagggcaggatatggagagggctggttcccagggaacaaggaccccagcagacactgtagcccgtggcccttggtccccagcatccccggctgccccatgatgcagggccatcctgactctgcggaccgcaccgggcactgactgtctgttttccaagacgaaaatgatgcttgggttttgacttttctgcagctgtcagtgtgaagaagtgtctggactgtgtcatttttacaccaacctggtaaaaatgctgctcttgatgctctcctgatcccacaattaaactgcacgtgagcgaaaaaaa

SEQ ID NO: 2730 - DNA, 2119 bp, Mus musculus
gctcctcatctcactcgggcctatgccaaagatgtaaaatttggtgcggatgctcgagccttaatgcttcaaggtgtagaccttttagccgatgctgtagctgttacaatggggccaaagggaagaacagtgattattgaacagagttggggaagtcccaaagtaacaaaagatggggtcactgttgcaaagtcaattgatttaaaggataaatacaaaaatatcggagctaagcttgttcaggatgttgccaataacacaaatgaagaggctggggatggcaccaccactgccactgttctggcacggtctattgccaaggagggctttgagaagatcagcaaaggggctaatccagtggaaatccggagaggtgtgatgttggctgtggatgctgtaattgctgaacttaagaaacagtctaaacctgtgacaacccctgaagaaattgctcaggttgctacaatttctgcaaacggagacaaagacattgggaacatcatttctgatgcaatgaagaaggttggaagaaagggtgtcatcacagtgaaggatggaaaaaccctgaatgatgagctagaaattattgaaggcatgaagtttgatagaggatatatttccccatattttattaacacatcaaaaggtcaaaaatgtgaattccaagatgcctatgttttgttgagtgaaaagaaattttccagtgttcagtccattgtccctgctcttgaaattgctaatgctcatcggaagccattggtcataatcgccgaagatgttgacggagaagctctaagcacgctggttttgaacaggctaaaagttggtcttcaggttgtagcagtcaaagctccagggtttggggacaacaggaagaaccagcttaaagatatggctatcgctactggtggtgcggtgtttggagaagagggtttgaatctaaatcttgaagatgttcaagctcatgatttagggaaagttggagaggtcatcgtcaccaaagatgatgccatgcttttgaaaggaaaaggtgacaaagctcacattgaaaaacgtattcaagaaatcactgagcagctagacatcacaactagtgaatatgaaaaagaaaagctgaacgagcgacttgctaaactttcagatggagtagctgtgttgaaggttggaggaacaagtgatgttgaagtgaatgagaagaaagacagagttactgatgctctcaatgctacaagagcagctgttgaagaaggcattgttctaggagggggctgcgctctgcttcggtgcatcccagccttggattcattaaagcctgctaatgaagaccagaaaataggtatagaaattattaaaagagcacttaaaattcctgcaatgacgattgctaagaatgcaggtgttgaaggatctttgatagttgagaaaattctgcagagttcctcagaagttggttatgacgccatgcttggagattttgtgaacatggtggaaaaagggatcattgatccaacaaaggttgtgagaactgccttactggatgctgctggggtggcctccttgctaactacagccgaagctgtagtgacagaaattcctaaagaagagaaggaccctggaatgggtgcaatgggtggcatgggagggggtatgggaggcggcatgttctaactcctagagtagtgctttgcccttatcaatgaactgtgacaggaagctcaaggcaggttcctcaccaataacttcagagaagtcacctggagaaaatgactgaagagaaggctggctgaccactgtaatcatcagttactggtttcctttgacgatatataatggtttactgctgtcattgtccatgcctacagataatttattttgtatttttgaataaagaacatttgtacattcctgatgctggttgcaagagccatataccagtgtcctgctttcaacttaaatcactgaggcatctctactcttctgtgagtcatcaggactgtagcgctgtgtcaacaaaacatagagagttcagaagacagcctttctgtggaagggtgggaatgattgtgtacaaagtagagaagtatccaattatgtgacaacctttgtgtaataaaatttt

SEQ ID NO: 2731 - DNA, 1706 bp, Mus musculus
agccgagtaggaccgagctgctgcagacgcgccgggtcactcgagccagcaccaccgttctcacgccctgagctgcagacagctaggcggttttatctagtttgaaccaggctgctggagcttgctccctcccgccctctctcttttttttccacggggctgtttttttaatttggctgcaattgcatgaaatcccaatggtgtagaccagtggcgatggatctaggagtttaccaactgagacatttttccatttctttcttgtcgtctttgctgggaaccgaaaacgcttccgtgagacttgacaatagctctggtgcaagtgtggtagctatcgacaacaaaatagagcaagctatggatctggtgaaaagccatttgatgtatgcggtgagggaggaagtggaagttctgaaggagcagatcaaagaactaatagagaaaaactcccagctggagcaggagaacaatctgctgaagacgctggccagtccggagcagctcgcccagtttcaggcccagctgcagactggctcccctccggccaccacgcagccacaggggaccacacagccccctgcacagccagcatcccagggctcaggatcaaccgcatagcctcctaggccccaacagaactggctgctgctgctgctgtctgaactgaacagaccgaagagatgtgctagagagaagccgcctccacagtcacccatttcattgctgtctacgaaagagacgtgagactcacacgctgttctcgctttctccccagtattaagcactcataagcttttggcttgaagaaatgtactagttgagtgaattaaaggttaatcagagagtgagcagggatgtgccctgtgcaacgtggcagatgtctgaggaatggtttaattgaccccgaggagctctgtgccttttcaaccctccccagccgcccaccctgcttctgagagctcgggcggctcgccttcgtggggctcgcctgcgtggggttcgaaagtgggctgctcctggattctgcgctctcttctccttcccttcaaagaactcggagaggccagaaacaagactgcaatggggggcggggggagggatgatgcagtccttatacaaaaccgacaactgtcaccaaagcttataaaacacgatagtactgtccctcttttctgaaccatcagaagacacaaaactgttagtgacacaacggtgacaggtagctgggacctaggctatcttattatgaaggttgttttgcttgttgtatatttgtgtatgtagtgtaacgaatttgtaccatagaggactgtccgtaactactgtttagcttctacacattgaaatgtagatgtttcattggctgtctgaaaaggtgtggcttgtccttcctagagagatctacttaaaaactgctttgtggcaaaaaccacacctgaagaaattttaagaatttggcccagttagtcactctgtgtaatcccggaatctagctgctgaagtcttgcgaagtaaactccccgtgaccgatgtcagttaagctggtgatacctggagaagtggtcagttgctaaggaagtggatttcccagtaggggtttctgcacctcacctgtatagtcgttctgcgcatgtcccccacacagtccccacctgtatttacctgttctacttgtcacctttcaataaagcatatcaaatgttgat

SEQ ID NO: 2732 - DNA, 1808 bp, Mus musculus
aagagggtgggaggcgaggtcgatgtctgtggccggagcggacggtgcagattgcgagccggcctaaaagcgtgctctttggcgtaaattgcaatcgattagggatcgtttctcagactcaagttagaagtgagagttcagataagtgaggccgacattgctgccttgaagaaggggagaatggatttatcaggagtgaaaaagaagagcttgctaggagtcaaagagaataataaaaagtccagcactagggctccttctcctaccaaacgcaaggaccgatctgatgagaagtccaaggatcgatctaaagataaaggggccactaaagagtcaagtgagaaggatcgtggcagagataagactcggaagaacgcatggcttcaagcggacaaggcagtaccaggtctaggtccagctcaacctccagctcgggctccagcaccagcacaggctcaagcagtggctccagctcgtcctctgcatccagccgctcaggaagctccagcacgtcccggagctccagttctagcagctcctccggctccccaagcccttctcggcgcaggcatgacaacaggcgcgtcccgctccaaatccaaaccacctaaaagagatgaaaaagagaggaaaaggcggcacgttcacctaaaccaaccaaagtgcacattgggaggctcaccagggaatgtgaccaaggatcatatcatggaaatattttctacttacgggaaaatcaaaatgattgacatgcctgtcgagaggatgcatcctcacctctccaaaggctatgcatatgtggagtttgagaatcccgatgaagcagagaaggctctgaaacacatggatggaggacaaattgatggccaagagatcactgctactgctgtgttggcaccctggcctcggccaccacctcggcgattcagccctcctaggaggatgcttccaccacctcccatgtggcgtaggtcacccccacggatgaggagaaggtctcgatccccaagacgcaggtcccctgtgcgtaggaggtctcgctctcctgggccgccgccgccacaggagccgatccagctccaactcctcccgataagcagggacattgattcgtacctctgtaacttatgttgccccagactctgttttgtccttttctctagccaagtgagggtctgtagagaaaggatcccttactgggtacagcagttgagatatctcctctacagaagggttctggcttgtagagctactgttggttcacggctgctcccatagaggtgccctgtagttttctggctagaaagttcatcccttcagttcttgataggctggtagcagagccagctggaacctatggcagcacacggatttccacagatgacccagaaccagacagcctggtctagcccccgctgtgccacacctgtgcaaaggaccacactgctgttctgttgggccgaccatgccctgctgagtacgcttcaacttagagggctaaaacctttgaaggattcctccacaaatggttacctttctgtccccgtgtctctgttactttctagaatttgtgagccagttctacagggtcctcatgaaacctaccccaccccgttgtcacctgccattcatggtgatgttgcaggttaaccttggcagtgtgtacattgcccctttttgcttttattgtacagtcagtactataaaatttgttttgagttttataactttgtagcattttagataaggttgtgtttgtacttgtgtagagtgaaaggactgttgaataaaacctaggattagaatgc

SEQ ID NO: 2733 - DNA, 981 bp, Mus musculus
atgtaccaggattatcccgggaactttgacacctcgtcccggggcagcagcggctctcctgcgcacgccgagtcctactccagcggtggcggcggccagcagaagttccgggtagatatgcctggctcgggcagtgccttcatccccacaatcaacgccatcaccaccagccaggacctgcagtggatggtacagcccacagtgatcacctccatgtccaatccctatccacgctcacatccctacagtcccctgccaggcctggcttcagtccctgggcacatggctctccccagacctggagtgatcaagaccatcggtaccaccgtgggccgcagaaggagagatgagcagctgtctcctgaggaggaggagaagcgtcgaatccggagggagagaaacaagctagctgcagccaagtgtcggaaccgtcgccgggagctgacagagaagctgcaggcggagaccgaggagctggaagaggagaagtctgggctgcagaaagagattgctgagctgcagaaggagaaggagaagctagagttcatgaaggtggctcacggccccgtgtgcaaaatcagccccgaggaacgccgatcgccccccacctccgggctgcagtccttgcgcggtacgggcagtgccgttggccccgtggtggtgaagcaggagcctcccgaagaggacagcccctcttcctcagcagggatggacaagacccagcgctctgtcatcaagcccatcagcatcgccgggggtggtttctacggggaagagcctctgcacacccccatcgtggtgacctccacgcctgccatcactcccggcacttcaaaccttgtcttcacctaccccaatgtcctggagcaggagtcgccttcgtcgccctcagagtcctgctccaaggctcaccgcagaagcagtagcagtggggaccagtcatcagactccttgaactcccccacacttctagccctgtaa

SEQ ID NO: 2734 - DNA, 1593 bp, Mus musculus
gggatgctgacctcaggactcctcctggtggctgcagtggccttcctcagcgtcctggtcttgatgtctgtctggaagcagagaaagctctcaggaaagctgcctccaggacccaccccactgcccttcattgggaacttccttcagctgaacacagagcaaatgtacaactctctcatgaagatcagccaacgttatggtcctgtattcaccatctacctgggacctcgccgaattgtggtgctgtgcggacaggaggcagtcaaggaagctctggtggaccaagctgaggaattcagcgggcggggcgagcaagctaccttcgactggcttttcaaaggctatggcgtagtcttcagcagcggggagcgagccaaacagctaaggcgcttctccatcgccacgctgcgggacttcggcgtggggaagcgtggcatcgaggagcgcatccaagaggaggcgggctttctcatcgattcatttcggaagacgaacggtgcttttattgaccccaccttctaccttagccgaacagtctccaatgtcattagctcaattgtcttcggggaccgctttgactatgaggacaaagagttcctgtcactgcttcgaatgatgctgggaagcttccagttcactgctacctccatggggcagctctatgagatgttctcttctgtgatgaaacacctgccagggccccagcaacaggcctttaaggagctgcagggcctggaggacttcataaccaagaaagtggaacacaatcagcgcacgctggatcccaattccccaagggacttcatcgactccttcctcatccgaatgctggaggagaagaagaaccccaatactgagttctacatgaagaacttggtgctgactacactaaatctcttctttgctggcacagagaccgtcagcaccaccctgcgctatggctttctgttgctcatgaagcacccagatattgaggccaaggtccatgaggagattgatcgggtgattggcaggaaccggcagcccaagtatgaggaccgaatgaagatgccctatacggaggctgtaatccatgagatccagagatttgcagacatgatccccatgggcctggctcgaagggtcaccaaggacaccaagtttcgagatttcctcctccccaagggtactgaagtgtttcctatgctgggctctgtgctgaaagaccccaagttcttctccaaccccaaagacttcaacccaaagcacttcctagatgacaagggacagtttaagaagaatgatgcctttgtgcccttttccattggaaaacggtattgtttcggagaaggactggctaggatggaactcttcctcttcctcacaaacatcatgcagaacttccacttcaaatccacacaggcaccccaggacatcgatgtgtctcctagactcgtgggctttgccacgatcccaccaacctacactatgagtttcttgtcccgttgagcctgggctgcatgaggttaaagggaatgattgagaccagacaagtcaggggttgaaacttagaaaaggtcaaaggtacagaagaaacagaggacacagagtaga

SEQ ID NO: 2735 - DNA, 1031 bp, Mus musculus
tggaggttccacgggtaagtgcggacttcgccttccgcagctccgggtctgagctactggaactccgcgctgggctagggaaccggctccggtgggatggaggcgggcggcgtggcagactctttcctttctagtgcctgcgtgctcttcaccctgggcatgttctccactggcctctcggacctcaggcatatgcagaggacacggagcgtggacaacatccagttcctgccttttctcaccacggatgtcaacaacctgagctggctgagttacggagtcttgaagggagatgggacccttatcatcgtcaatagcgtgggggccgtgcttcagactctttatatcctggcatatctgcactacagtcctcagaagcatggtgtgctcctgcagacggcaaccctgctggctgtccttctcctgggttatggctacttttggcttctggtgccggaccttgaggcccggcttcagcagctaggcctcttctgtagcgtctttaccatcagcatgtacctctccccactggctgatttggccaagatcgttcagactaaatcaacccagcgcctctccttctccctgaccattgccacgctcttttgctccgcctcttggtctatttacgggtttcgcctccgagacccatacatcgcggtgcccaaccttccaggaatcctcaccagcttaatccgcctcgggcttttctgcaagtaccctccagagcaagacaggaagtaccgcctcctgcagacctgaccccaggcacccgagtgccaactggataccaaacagagctcctgtttctgctggtccttgtgaccagttccatggatgcaataggttgtgagaaaaagatgactttgaaactaaagggaccaaagatctttccttagatcagataggacctgtgggatgaaatcacatttttacaggagatcatcttttctcatttcggaggctgaggtggtattagaatgtgccttaaaataaactgttccccacccctgaaaaaaaaaaaaaaaaaa

SEQ ID NO: 2736 - DNA, 492 bp, Mus musculus
gtgttggtggcagctgggaaaggaaacctcattgccaccatgaacttctccggcaagtaccaattgcagagccaggagaactttgagccattcatgaaggcaataggtctgcccgaggacctcatccagaaagggaaggacatcaagggggtgtcagaaatcgtgcatgaagggaagaaaatcaaactcaccatcacctatggacccaaagtggtccgcaatgagttcaccctgggggaggagtgcgaactggagaccatgactggggaaaaagtcaaggcagtcgtcaagctggaaggtgacaataaaatggtgacaactttcaaaggcataaagtccgtgactgaactcaatggagacacaatcaccaataccatgacattgggcgacattgtctacaagagagtcagcaagagaatttagacaaggctatatttcatattcttttacagtgtaaaattaatacaataaagttacctttcttttggaata

SEQ ID NO: 2737 - DNA, 12653 bp, Mus musculus
atggcggaggagggaaccggcgtacggtgttggctactgcagctgcaggagttcctgtccgcagcagaccgctgcagtgctgccggggccagttaccagctgattcgtagtctggggcaggagtgcgtgctgagcactagctctgcagtgcaggcattgcagatttccttagttttttccagagactttggtttgcttgtgtttatccggaagtcgcttagcattgaggactttcgtgattgtagagaagaagccctaaagtttttatgtgttttcttagagaaaattgaccagaaggttatgcattactctcttgatattaagaatacttgtaccagtgtttacacaaaagatagaactgctaagtgtaaaattccagccttagaccttctgattaagttacttcagatactaagaagtaccagactcatggatgaatttaagattggagaattatttaacaaattctatggagaacttgcatcaaaatcaaaactacctgatacagttttagaaaaagtctatgagctcctgggagtattaggtgaagttcatcctagtgagatgataaaccattcagaaaacctgttccgagcttttctgggagaacttaagacccagatgacatccacagtaagagaacctaaatttcctgtcttagctggctgtctgaagggactatcctcacttctgtgcaacttcactaagtccatggaagaagatccccagacttcaaaggaaatttttggttttacatttaaagcaattcgtcctcagattgagatgaagcgatatgctgtgcccttagctggcctacgattacttaccctgcatgcatctcaattcactgcctgccttctggacaactatattactttatttgaagtactgtctaagtggtgtagccatacaaatgtggaattaaaaaaagctgcacattcagccctggagtccttcctgagacagatttcgtttactgtggcagaagatgcagagttgcataagagcaggctgaagtactttatggaacagttctatggaatcatcagaaatacagactcgaacaacaaggaattagccattgctattcgcggatatggactatttgcaggaccttgcaaggttataaatgcaaaagatgttgacttcatgtacgtggagctcattcagcgctgtaagcagatgttcctcacccacgcagatgcttctgaggatcatgtttaccagatgccaagtttccttcagtctattgcaagtgtcttgctttaccttgacacggttccggaggtatatactccagtactggaacatctcatggtggtacagatagacagcttccctcagtatagtcccaaaatgcagttggtgtgctgtaaagcaataataaaacttttcctagccttatcagagaaaggaccagttcactggaattgcattagtgctgtggtgcaccaaggtttaattagaatatgttctaaaccagtggtccttcaaaaggatgttgagtctaggtctgataaccgttcggcctccgaggaagtcagaactggcaggtggaaagtacctacgtacaaagactatgtggatctttttcagcatcttttaggctgtgaccagatggaggattttattttaggagatgaaacatttctctttgtgaactcctcccttaaaagtctgaatcatttactctatgatgaatttataagatcagttttgaagattgtggaaaaattggatcttacactggaaaaacagactgttggagagcaggaggatggaagcactgctgatgtctgggtgatcccaacttcagatccagcagctaatttgcaccctgctaaaccaagtgatttttcagctctcattaacctggtggagttttgcagggagattcttcctaggaaacatgtaggcttttttgagccatgggtgtactcatttgcatatgagttaattttgcagtctacacgattgccactcatcagtggtttctacaaattgctttctattgcagtgaaaaatgccaggaaaataaaatattttgagggaatcagcccaaagagtctgaaacattctcctgaagatacagaaaagtattcttgctttgctttatttgcaaagtttggcaaagaggtatcagttaaaatgaagcaatacaaggatgaactgttggcctcttgtttaacctttgttctgtccttgccacatgacatcattgaacttgatgttagagcctacgttcctgcattgcagatggctttcaagctgggcctgagccatatgccactggcagaaataggtctacatgcccttaaagagtggtcagttcacattgataagtctatactgcagccttactacaaagacattctcccctgccttgatggatatctgaatacttcaaccttatcagatgaaaccaagagccactggggattgtctgcactttctcgggctgcccagaagggatttaatagacatgtagtgaagcatctaaaaaggactagaaatagttcgcctgatgaagcactgtccttagaagagataagaattaaagtagtacaaatacttggctctctgggaggacaaataaacaaaagccttgtaacagctacatccggagaaaggatgaagaagtacgtggcgtgggatgcggagagaagactcagctttgcagtgcccttcagagagatgaagcctgtcatttatctggatgtctttctgcctcgggtcactgaattggctctttctgctagcgaccgacaaactaaagtagcagcttgtgaactgttacacagcatggttatgtttatgttgggaagagcgactcagatgcctgaaggtcaggggttgccgcccatgtaccagctttataagcacacgtttcctgtgctgcttcaacttgcgtgtgatgtggatcaagtgacaaggcagctctatgaaccgcttgttatgcagctgatccactggttgactaacaataaaaaatttgaaagtcaagatactgttgccttattagaagccatactggatggtattgtggaccctgttgacagtactttaagagatttttgtggacggtgcgttcaagaattcctcaaatggtccattaagcaaacaacacctcagcagcaagagaagagtccagtaaacagcaagtcacttttcaagcggctctacagccttgcacttcatcctaatgctttcaagaggctaggtgcagcacttgcttttaatcacatctacaaggaattcagggaagaaggatccctggtagaacagtttgtgtttgaagccttagtgacatatatggaaagtctggccttggcacatgaagatgagaaatccttaggcacagttcagcagtgctgtgatgccatcgatcacctaagacgcatcattgaaaagaagcatgtctctttaaacaaagcaaaaaagcgacgtttgccacagggatttccacctttgacatcattatgtttattggatctggtcgagtggcttttggctcactgtggaaggccccagacagaatgtcgacacaagtccatggaactcttttataaatttgttcctttactgccaggcaacaaatccccttctttatggttgaaagaccttataaaaaagaaaggtatttcttttctcataaacacatttgaaggaggggcaagcagcagtgatcagccagcaggcattcttgctcagccaaccctcgtctacttacaagggccaatcagcctgcgaggagtgctacaatggctggacctcctccttgcagcactggagtgctacaacacatttattgagaaggagactgtgcaaggacaagaggtcctgggtgctgaagtacagtcttcacttttgaagtcagtggctttctttttagaaagcatagcaacccatagcgctagagcagtagaacaacgctttggctccggggcgccgggccctcccagcctccacgaggaagagaagtacaattacagcaagtgcacagtcttagtccggatcatggaattcaccacaaccctgctcatcgcctctccagaggactgcaagctcctggagaaggacttgtgtaatacaaatcttatgcaggtcttagtgaaaatgatctgtgagcccatgagcttaggtttcaatattggcgatgtccaggttatgaaccatcttcccagcatttgtgtgaacctgctgaaagctcttaggaagtccccgtacagagacatgctggagactcacctgaaggagaaagtgacagtacagagtgttgaagagctctgttccattaacttgtgtagctctggggctcgccaagaaaggtctaagttactttctatcttatcagcctgtaaacagcttcacaaagctggtttctctcatgttatatcaccatctcagtctacagcattgaaccattccgttggcatgagactgctgtccttggtttataaaggcattgtgcctgcagaggaaaggcagtgcctgcagtctttggaccccagctgtaagagcctagccaatggactcctggaattagcctttggttttggaggactgtgtgaccatcttgtgagtttgctcctgaattcggcaatgctgtctacacaatatctgggcagttcacagagaaatattagcttctcccatggggaatatttctacagtttgttctcagaagtgatcaacagtgagctgttgaagaatcttgatattgctgtatcaaggctcatggagtcatcttcggataatcccaaaatggtgagcactgttttaaatggtatgctagacacaagcttcagggatcgagctgttcagaaacaccaaggactgaagcttgcaactgcaattctgcagaactggaggaagtgtgattcatggtgggccccagattctgccccagagagcaaaacaactgtgctgtctttgctggcaaagatgttgcagattgattcagctttatcttttgatacaaatcacagctcattttctgaaatcttcacaacatacgctagtctacttgctgatacaaagttgggtctacacttaaagggccaagctatcattcttcttccattcttcaccagtcttagagaaggcagtctagaaaacctaaagcatattctggaaaaactcattgtttgcaatttccccatgaagtctgatgaatttcctcctgattccctaaagtacaataattatgtggactgcatgaaaaagtttctagatgcactggagttatctcagagtcctatgttgtttcagttgatgacagatatactttgtcgggaacagcgacatattatggaagaattgttccaaaccactttcaaaaggattgctaggcagagtccatgtgtcacacagttaaatcttctggaaagtgtgtacacaatgttccggaaggctgacctcccttcaaatgtcactcgccaggcatttgtagatcgctctctcctcaccttgttgtggcactgtgacttggacacactgaaagagttctttagtagaattgtggtagatgccattgatgtgttgaagtccagatttacaaagctaaatgaatttacttttgacactcaaatcaccaagaagatgtgctattacaagatgctagctgtgatgtattctcgtcttttaaaagatgatgttcactctaaagaagctaaaattaatcaagcttttcatggctcccgtgttgcagaaggaaatgaactcacaaagacacttcttaagttgtgccatgatgcatttacagagaacatggtgggggagagccagttgctggagaagagaagactttatcattgtgctgcatacaactgtgccatttctctgataagctgtgtcttcaatgagttgaaattttaccaaggttttttatttaatgaaaaaccagaaaagaacttgtttatttttgaaaatttgatagacctgaaacgttgctatacatttcctatagaagttgaggttcctatggaaagaaagaaaaagtacattgaaattaggaaagaggccagggatgcagcaaatggggcttcaggcagtcctcattatatgtcttcattgtcatatttgacagacagtagcctaagtgaagaaatgagtcaatttgatttctcaactggagttcagagctattcatacagttctcaagatcgtaaacctaccactggccattttcagagacgggagcatcaagattccatgacccaggatgacatcatggagttagagatggatgagctcaatcaacatgaatgtatggctcccatgatagccctgattaagcacatgcagagaaatgtgattgcacctaagggagaagagggttcaataccaaaagatcttccaccgtggatgaaatttcttcatgacaaactaggaaatgcatcagtatctttaaatatctgtctcttcttagccaagcttgttattaatacagaagaggtctttcgcccttatgcaaagcactggctcagccccctgctacagctagctgtttgcgagaacaacagagaaggaattcactacatgatggtagaaatagtagctaccattctctcttggactggcttggctacacctacaggagtccctaaagatgaagtgttagcaaatcgattgcttcgttttctaatgaagcatgtcttccatcccaaaagagctgtgtttaggcacaaccttgaaattattaaaacccttgttgaatgctggaaggagtgtctttccatcccttacaggttaatatttgaaaaattttcccataaggaccctaattctaaagacaattctgtgggaattcagttattaggcattgtgatagctaataacttgcctccctatgacccaaattgtgacataaccagtgccatgtattttgaagctttagtcaataacatgtcctttgtgaagtataaagaagtatatgcagctgcagcagaagttttaggacttattcttcaatacattactgagagaaaacacgtgatagcagagttggtatgtgaactggttataaaacaactgaagcaacatcaaaatactatggaagacaaatttattgtttgcttaaacaaaatagcgaagggcttccctcctcttgctgacaggttcttgaatgctttgttctttctgctgccaaaatttcatggagtaatgaagacactttgtctggaagttgtactttgtcgagcagaggagatcacaggcctatacttacagttaaagagtaaagactttcttcaagtcatgagacatagagatgatgaaagacaaaaggtgtgtttggatatagtttataagatggtggcaaaattaaaaccaatagaactccgagaacttctgaatcctgttgtggaatttgtttcccatccttctccaacatgtagagaacaaatgtataatattcttatgtggattcatgacaattacagagatcaagagagtcaaaatgatgaagattcccaggaaatatttaaactggcaaaagatgtactgattcaaggactgatcgacgagaacgttggactccaactaattattcggaatttctggagccatgaaaccagattgccttccaatacattggaccgattgctggcattaaattctttatattcccccaagatagaagtccactttttaagtttagcaacaaactttctgcttgaaatgaccaggatgagcccagattatctaaaccccatttttgagcatcctctgtcagaatgtgaatttcaggaatatactatagatcctgactggcgttttcgtagtactgttcttactccgatgtttattgagacccaggcctctccaagtattctccatacccaaacccaagaagggcccctctcagaccaaaggcagaagcctggacaagtgcgggccacccaacaacaatatgatttcactccaacacaagcttcagttgaaaggagctcatttgattggctgactgggagcagcattgacctactggcggatcacaccgtcttctcttcagagaccttgtcttcctccttgctgttttcccacaaaaggactgaaaagtcacagagaatgtcttgtaagtcagtaggaccggactttggaacaaaaaagctgggccttcctgatgatgaggtggataaccaagtgaaaagtggcactccgagccaggcagatattctgagattgcgcagaagatttttaaaggaccgagaaaagttgagtttgctgtatgccaaaaggggcctcatggaacaaaaactagagaaggatatcaagagtgagtttaaaatgaagcaggatgcgcaggttgttctgtacagaagttatcgtcatggcgatcttcctgatatccagatccagcacagtggtctgatcacccccttgcaggctgtggcccagaaagacccaataattgcaaaacaactcttcagcagcttgttttctgggattttgaaagaaatgaataaatttaagacaacatctgaaaagaacatcatcactcaaaatttgctccaagatttcaaccgcttccttaatacaactttcttgttctttccaccctttgtctcttgcatccaggaaataagttgccaacacccagacttcctgacacttgacccagcctcagttcgagtgggatgcctggctagtctgcagcagccgggaggtatccgtcttctggaagaggccctactccggctgatgcccaaggaaccacccaccaaaagagttcggggcaagacttgcttgcctcccgatgttctccggtggatggaacttgctaaactctatcgttcgattggggagtatgatgttctccgtggcatttttagcagtgagttaggaacaacgcaggacactcagaacgcactattagcagaagctagaagtgattattgtcaagctgctaagttgtatgatgaggctttaaataaactggagtgggtggatggtgaacccacagaagctgagaaggagttttgggagctggcatcgcttgactgttacaacaacctctctaaatggaaagaacttgagtactgttctacagtcaatatagtcagtgagaactctcttgacctaagtaaaatgtggagtgaaccattttatcaggagacgtatctgccatatgtgatccgtagcaaactaaagctcctgcttcaaggagaaggcaaccaatctctgctaacatttgtggatgaagccatgaacaaggagctgcagaagacggtcctggagcttcagtatagtcaagagctgagtcttctttacatcttgcaggatgatattgacagagccacatactacattaaaaatggcattcagattttcatgcaaaattattctagtattgatgttctgttatatagaagtagactcgccaagttacagtctgtacagactttagcagaaattgaggagttcctaagttttatatgtaaacatggtgacttatcatctctgggtcccctaaggagacttctaaaaacctggaccagcagatacccagatgttgtgacagacccaatgcacatctgggatgacatcatcacaaatcgctgcttctttctcagtaaaatagaagagagactgactgctccttcaggagatcacagtatgagtgtggatgaggatgaagagtccattgacagggaagtgtacgagccaaaggaagatgttcgttgcatgcttcagagctgcagattcaccatgaaaatgaagatgatagaaagcgcctggaagcagagtaatttctcactctccatgaaactcctgaaagagatgcataaagaatcaaaaacaagagaaatttggcgagtgcagtggttgcatagttactcccagctgaaccactgccggagccacactcagagccctcgggaacaagtcctcaatacgctcaaaaccatcacgctgttggatgaaagtgatatttcaaactacttaaataaaaacattcaggcctcttgtgaccagagcattctcttgggcacaacttgcagaatcatggctgatgctctcagcagagagccagcctgcctgtctgacctggaggagaacaaggtgaactcaatcttgacactttccggatctaatgcagagaacacagagacggtaatcacgggtctgtaccagagagcattccatcacctctccaaggccgtgcagtcagctgaagaggaaacccagctttcctgctggggccatgaggctgctgctgagcgggcccatgcttatatgacactggtaggcttctgtgaccaacaactccgaaaggtagaagagagtgcctcacagaagacaagtgcagaaatggaagcatatccagcacttgtggtggaaaaaatgctgagagcattaaagttaaactcttctgaagccaggctgaaatttcctagattacttcagattatagagcagtattcagaggagaccttaaacataatgacaaaagagatttcatctattccttgctggcagttcattggctggatcagccacatgatggccttactggacaaagaggaagctattgcagtacaacatactgtggaagaaattgctgataactacccacaggccattatctacccttttataataagcagcgaaagctactcctttaaaaacacttcttctggtcataacaataaagcatttgttgagaggataaaaagtaaacttgatcacggagaagtgattcacagttttattaacgccttagaccagctctccaatcctgacctgctcttcaaggactgggtttctgatacaaaagatgaactaggaaagaatcctgtgaataagaaaaatattgaaaagttgtatgaaaggatgtatgctgccttgggtgaccttcgtgctccaggcctggggccctttcggaggaggttcatacaggcgtttgggaaagaatttgtcaagagctttgggaatggtggttctaagctgcttacaatgaaggtcgatgacttttgtaagatcactggctcgctacttgtaaggatgaaaaaagactcaaagctacctgggaacctgaaagagtattccccctggatgagtgagttcaaagcgcagttcctgaaaaatgaactggagattcctggacaatatgatggaaaaagcaaaccactgcctgaatatcacgtgcggatctctggatttgatgagcgggtaaaagtgatgctctccttgaggaagccaaagcgcattgttattcgaggccatgatgaaaaggaatacccgttcctggtaaaaggtggtgaggacctccgtcaagaccagcgcattgagcagatctttgaggtcatgaatgccattctctctcaggatgctgcctgcagtcagagaaacatgcagttaaggacttaccgtgtcgtgccaatgacctctagattaggattaattgaatggattgaaaatactatgaccttgaaggatcttcttttgagtaatatgtcacaagaggagaaagtggctaataacagtgaccccaaagcgccgatccgtgactataaagactggctgatgaaagtgtcggggaaaagcgatgctggagcctatgtgctaatgtacagccgagctaaccgtacagaaacagttgtagctttcagaagaagggaaagtcaagtgccgcctgacctcttaaagcgggcctttgtaaagatgagcaccagccctgaggccttcctggcactgcgttcccactttgccagctcccatgcactgctgtgcatcagccactggctcctcgggattggagacagacacctgaacaatttcatggtggccatggagacaggcagtgtgattggaattgactttggacatgcgtttggatcagctactcagtttcttccagtccctgagttgatgccttttcgtctaacccgccaatttgtcagtctcatgttgccaatgaaagaaacgggtctcatgtgcacggtcatggtgcatgcactgagggctttccgctcttgtgcaggtctgctcactgacaccatggaaatttttgtgaaggaaccctcctttgattggaagagttttgagcagacaatgctgagaaaaggaggatcatggattcaagaaataaatgtaacggaaaagaattggtatccacaacataaaatacgctatgctaagagaaagttagcaggggccaacccagctgttataacttgtgatgagctatatctaggccatgaagcttcatccgcctttaggagttatacagctgtagctcgaggcaacagagactacaacattcgtgcacaagagccagagagtgggctttcagaagagactcaagtgaagtgcttggtggaccaggccacagaccccaatatccttggcaggacttgggaaggatgggagccctggatgtaaagtctgtggtgtcaccaatcataaagcattctgtctccgagaggacctcctagaccttcgctgacagcagtatatttctgacagacagaggaaatctactttatggtgctggcgagatggtcagataaaggcatttgttaccaatgctaatggcctaactaacttcaatcccagaaacccatattggaggcagtgaaccaactccaggaagttgtcctttgacctccacacatgtaaaaaataaagaatatgacaaatataaaaaa

SEQ ID NO: 2738 - DNA, 2999 bp, Mus musculus
tcaggctgcagcagagccccgagagctttgtgaaggaggaccgccgcacacccgcctccggcacacacagccaaccacagctgagcgacagccaacaagagccaatcacaaggcacctttgaatactcaggatgcagatgtcttcagcccttgcttgcctcatcctgggcctggttctggtctctgggaaagggttcactttacccctccgagaatcccacacagcccatcaggccaccgacttcggagtaaaagtgtttcagcaggtggtccaggcctccaaagaccggaatgtggtcttctctccctatggcgtgtcctcggtgctggctatgctgcagatgaccacagcggggaaaacccggcggcagatccaagatgctatgggattcaaagtcaatgagaagggcacagctcatgccctccgccagctctccaaggagctcatggggccgtggaacaagaatgagatcagtactgcggatgccatctttgtccagcgggacctagagctggtccagggcttcatgccccacttcttcaagctcttccagactatggtgaaacaggtggacttctcagaggtggaaagagccagatttatcatcaatgactgggtggaaaggcataccaaaggtatgatcaatgacttactggccaagggggctgtagacgagctgacacgcctggtgctggtgaatgccctctacttcagtggccaatggaagacccctttcttagaggccagcacccaccagcgcctcttccacaagtctgatggcagcaccgtctctgtgcccatgatggctcagagcaacaagttcaactacactgagttcaccacccccgatgggctcgagtatgacgtcgtggaactgccctaccagcgggacaccctcagcatgttcatcgctgcaccctttgagaaagatgtgcacctctccgccctcaccaacatcttggatgctgaactcatcagacaatggaagggcaacatgaccaggctgccccgcctcctcatcctgcctaagttctctctggagactgaagtggacctcagagggcccctggagaagttgggcatgcctgacatgtttagtgcaaccctggccgacttcacaagtctttccgaccaagagcagctctctgtagcacaggcactgcaaaaggtcaggatcgaggtaaacgagagcggcacagtggcgtcttcctccacagcctttgtcatctcagcccgcatggcccccacggagatggttatagaccgatcctttctctttgtggttcggcacaacccgacagagacaatcctcttcatggggcaagtgatggagccttgacagtgggaagagacgccttcatttggacgaaactggagatgttataagcagaaactctgaagaaaaggttatttaaaggactctatggggagaaagagaaggcaactcctccttaccccccacactggtaatctttccaaccagcatcccagacctcggactcttgaagggaaaagagtctaactccctcctccctagggattcctaccccacaaaggtctcatggaccatagaactcacagtacctggatctgcccagcatgccctttggacccagttcccaccgaggccccagcagagtggagggcacaacactttcattcagcaaaatcgtttgtgttccagtcacactgtgggcacctcttgcatcgcctgccattgctgtggagggtgccatgggccaaaggaaaaagcactgtcctatctcaaggtccactgtggaaatgtccaccttgcccacctccaaggggcaacggatagacagatcaaatggtggcccaatagcgagccttctccctgctccctcccttgacacagcttgcttatgttatttcagagtgtaggtgacttgtttacacagcttttttcgacccacaaacttttttcatttggaaagggtgtaagaaaagtcggacgtgtgtgtgcctggctcttcgtccccagtctcccagtgggggggccctggggagattccaggggtgtgattgaatatttatctcttgctcttgtatgtttgttggggagaagaagcacttttaaggaaaatgcttcttatttaaaccgtggcatacggcatcccatttggggtctgcatccctgtatgtcaggggtgcatcactccacaaacctgcccctctgggtagcctcgtgatggggctcacactgccgcctagtggcagccgaacacacccttacccggtccctccctccctccccccccccccccccccccgtggctctttttccttagggaccttgccaaggtgatgcttggcaacccacgttaaaggaaggggggaaaaaagattagatggaagagagagagatttgagagagggcaaagtggtttcaaatttttccaaggcatccagaagcagagagggaaaaggggctgtgtgacctaacaggacagaactttctccaattactgggtgagtcagagctgcactggtgactcacttcaatgtgtcatttccggctgctgtatgtgagcagtggacacgtgggggggcgggggggggatgaaagagacagcagctcctggtcaaccaccttagttagataatcttttttgaaagcttcctagctggaggtatgatcagaaaaccaatttactgaaaaactgcacaagaaggtaccgtgaatgaatttcctagcaggccactctgcatctgttatgtctccaccggaaaaaaaataatcatgttggtgtttttgcttttctctctctccctctttctctctgatttttttttcctctcttttcattatgcactggacagccacacaccgtgtaccatagggccccaaatgtggggtcacatggtcttgaattttgttggttacatatgcctttttgttgttgtttgtcttcacttttgatatataaacaggtaaatatgttttttaaaaaatactaaatatagagaatatgcaaac

SEQ ID NO: 2739 - DNA, 1160 bp, Mus musculus
atttggctccgaggccaagaattcggatccaaggcgggcgcggggaaaatggcggcggcagctgcggcgggggcgaatgggagcggaggcagcagcggcatggaagtggatgcagcagtccccagcgtgatggcctccggagtgactgggagtgtttccgtcgctcttcatccccttgtcatccttaacatctcagaccattggatccgcatgcgctcccaggaggggcggcctatgcaggtgattggggctctgatcgggaagcaggaggggcgaaatatcgaagtgatgaactcctttgagctgctgtcccacaccgtggaagagaagattatcattgacaaagaatattattacaccaaggaggagcagtttaaacaggttttcaaggagctggagtttctgggttggtataccacaggggggccacctgacccctcagacatccacgtccataagcaggtgtgtgagataattgagagtccgctctttctgaagttgaaccctatgaccaagcacacagatcttcctgtcagcgtttttgagtctgtcatcgatataatcaatggagaggccacaatgctgtttgctgagctcacttacactctggccactgaggaagctgaacggatcggtgtagaccacgtggcccggatgacagcaacaggcagtggggagaactccactgtggctgaacacctgatagctcagcatagtgccatcaagatgctgcacagccgtgtgaagctcattttagaatatgtcaaggcctctgaagcaggagaggttcccttcaaccatgagatcctgcgggaggcctatgccctatgtcactgtctcccagttctcagcactgacaagttcaagacagacttttatgatcaatgcaatgacgtggggctcatggcctacctcggcaccatcaccaaaacgtgcaacacaatgaaccagtttgtgaacaagttcaacgtcctctacgaccgacaaggcattggccggcgaatgcggggactgtttttctgatgatggttctggaagggatggtgtgtggggctcagacagctgttccatggacctgagtaccacattccctttagagaaactcattaataaaagagcagccccttaaaaaaaaaaaaaaaaaaaaaaaaaaaaaaaaa

SEQ ID NO: 2740 - DNA, 2247 bp, Mus musculus
gcctagcttgcggtggcattaagactatgtcgtgggcgcggagccgactgtgctcgactctgtccctggcagctgtttctgcgcgtggtgcaacgacggaggggccggcgcggcgggggatgagcgctgggccagcgccacaggagccgggcatggagtatcaggatgctgtgcgcacgctcaacaccctgcaaaccaatgccagctacctggagcaggtaaagcgccaacggagtgacccccaggcgcagctggaggctatggagatgtacctggcacggagtggactgcaggtggaggacttgaaccggctaaacattattcatgtcactgggaccaaagggaagggctccacctgtgccttcaccgaacggatcctacggaattacggcctgaagaccggcttctttaggtctcctcacatggtgcaggtgcgggaccggattcgaatcaacgggaaaccaatcagccccgagctcttcaccaagcacttctggtgcctctataaccagctggaggagttcaaggacgacagccatgtctccatgccctcttacttccgcttcctcacactcatggccttccatgtcttcctccaagagaaggtggacctggcagtggtggaggtgggcattggcggggcttttgactgcaccaacatcatcagaaagccagtggtgtgtggagtctcctctcttggcattgaccacaccagtctactaggagatacagtggagaaaatagcatggcagaaagggggcatctttaagcctggtgtccctgccttcactgtggtgcagccagaaggtcccctggctgtgctgagggatcgagcccagcagattggatgcccgttgtacctgtgtccgccattggaagccctggaggaggttggactgccattgagcctgggtctggagggagcacaccagcggtctaatgctgccttggccttgcagctggcccactgttggctggagcggcaggaccaccaagacatccaggagctgaaggtatccaggccaagcatacggtggcagctgcccctggcacctgtgttccgccctacccctcacatgaggcgtgggcttcgggacacagtgtggcctggccggacacagatactccagcggggaccccttacctggtacctggatggcgcccataccaccagcagtgtgcaggcctgtgtgcactggtaccgccagtcattggagcgcagcaaacgcaccgatggagggtccgaagtacacatcttgctcttcaactctactggtgacagggactctgctgccctgctgaagctgctgcagccctgccagtttgactacgctgtcttctgccccaacgtgacagaggtttcatccataggaaatgcagaccagcagaacttcactgtgactctggaccaggtgctgctccgctgcctccaacaccagcagcattggaacggcctggctgagaaacaggctagctccaacctctggagcagctgcggcccagaccctgctgggccaggctccctgctgctggccccgcacccacctcagcctactaggacgagctccctcgttttcagctgcatctcccacgccttgctgtggatcagccaaggccgggatcccatctttcagccccagagccttccaaggaatcttctcaaccaccccacagccaacagcggggccagcattctccgtgaggctgctgccatccatgtactggttacaggaagcctgcacctggtgggcggggttctgaaactgctggatccctctatgtcccagtagccaaggaccatcctacatcggtctgcctttccacagactcttatactcagtgccttgtgatttctgctctcagattttttcggactggcccagggtcctgggctcttggtagagtgtagggatgggagaggctctctgtacctcggcctctccttcctctggcagagacagcagggtgcttcccagagtccccaccatcgtagcaggctttcagcctggcccatctccctgctgcctccaggctcaggtccagcttactgttgcagctgcctgagcagcctggatcctgcctgaggttagaccagagacctcctcctccctcccaatgctttctggcaaaagagagggcccttgcctggcatttggggactgtgttgctggaactaattgaagcttttaaacccttttattttttattttttgtaaataaatgacaaaacttttgattgaaaaaaaa

SEQ ID NO: 2741 - DNA, 752 bp, Mus musculus
cccaaagagcagcggctgagggaagaagaacgccaaagccagtctgacgcaaggacgcctgaccttctccagcaagtgctgcctctcttcccactgcaccctaggcccagccacccacagcccagagctcagatggaaagtgtgcaggagctgatccctctggccaaggagatgatggcgcagaagccccgagggaagctagtgaagctatacgttctgggcagtgtgctggcgctcttcggtgtggtgctcggcctagttgagacggtgtgcagccctttcacagccgccagccgtctgcgcgaccaagaggctgcagtggtggagctgcgggaagcttgtgaacagcagtccctccacaagcaggccctgctggcaggaggcaaggcacaggaggcgaccctgtgcagccgggccctgtccctccggcagcacgcctcttaaggccggtgactgacagagaagggagacacagatcatgacccaggtgggcaacagagtcacatgctgtttcaaggtgccaccgaatccagaactgaccctacacagatcacctaaggggtctgggactgatttgctgctgtgcacacactgtgatttgccctagctgtgcgatgcaatcaaggagctatcacttttcattagagaaggagacaggccttttatacagttatttttattgttattattattattattgcaatgactatcgttttgcattttgaaataaaaaccttttatactcaaaaaga

SEQ ID NO: 2742 - DNA, 1708 bp, Mus musculus
cagtaacttgtttttgcagagactgataggcggatcgggcgtggcccgagcgcgccccactcagggaaagctgccgtccctctttgcctttgagcgccgcagccctgagaatcgcatctggcttggaaacggtcccaggactggagccaccaagaaagccgaaggcagtcgcgaagagccgaggacgcccagagactctgcggcttccgggaagcggaaccgagcctacccggaaggagccaacctcacctgaggctcgctgagcaccggcaggcgttaaacctaacggagcccacgtcatggcggcagacgggacaggggtagtcggaggaggggctgtcggcggcggcctgcccaaggacggtttgcaggatgctaagtgcccagagccaatccccaatcggcggcgcgcttcctcgctgtcccgtgacgcgcagcgccgagcctatcagtggtgccgggagtacctgggcggggcctggcgccgagcgcggccggaggagctgagcgtttgtcccgtgagcggaggcctcagcaacctgctcttccgatgctcactaccgaaccacgtacccagtgtgggcggggagccccgggaggtgctgctacgactctacggggccatcctgcagggtgtagactccttggtattagaaagcgtgatgttcgccattctcgcagagcggtctctagggccccagctttacggagtgtttccagagggccgcttggaacagtacctcccaagccggccgttgaaaactcaagagctccgggacccagtgttgtcgggagccattgcaacgaggatggcccgtttccatggtatggagatgcccttcactaaggagccccgatggttgtttgggaccatggagcggtacctgaagcagatccaggacttgccttccaccagccttccccagatgaacctggtagagatgtacagcctcaaggacgagatgaacagcctcaggaagttactagacgataccccgtcaccagtggtcttctgccacaatgacatccaggaaggaaacatcttgttgctttcagagccagacagtgatgataacctcatgttggttgattttgagtacagtagttataactacaggggctttgacattgggaatcatttttgtgagtgggtttatgattatacttatgaagaatggcctttctacaaagcaagacccacggactaccccactagagaacagcagctccattttattcgccattatctggcagaggttcagaagggtgagatcctctccgaagaggaacagaagaaacgggaagaagaattgctgctagagatcagtcggtactccctggcatctcactttttctggggtctgtggtccaccctgcaggcttcgatgtccactatagagttcggctacttggagtatgcccaatctcggttccagttctacttccagcagaagggccagctgacgagttccccatcatcctgaggatccaaccccacctcaagtttctcctggagcctccggggcaggaccttggagggaggggcagagagcagacgacccccagagacggggctgtgcctcaaagtgagactgttgttgaaatagccgacctctgtagccttttcttagtacttgcccaaggtgggcatctgagagccccccggggctatgtactcaaataaatgaacttcacaaatataaacttg

SEQ ID NO: 2743 - DNA, 1693 bp, Mus musculus
agctacccagggacatcatccttttaaagacttttcggttctgattcttcatctgagaaaactcatttaaagctccgagaatttaaagtctccccaaatggataacaaactggatgtcttcaggagggagttagtggatgttgaaggtatccctctcttttggagcattgctgagcattggtcccaagtagagtcatttgaagcccggcctgatgacattttgatctccacatatcccaaatctggaacaacttgggtcagtgaaatactggatttgatctacaacaatggggatgcagagaaatgtaaaagggatgcaatctacaaacgagtaccattcatggagcttataattcctgggataacaaatggagttgaaatgctgaacaacatgccgtctcctcgaatagtgaaaacacaccttcctgttcagctgcttccttcctcattctggaaaaatgactgcaagattatttatgtggcacggaatgccaaagatgtggttgtttcttactattatttctatcaaatggcaaaaatccacccagagcctggcacctgggaagagttcctagagaaattcatggctggacaagtgagctttggtccctggtatgatcatgtgaagagctggtgggaaaaaagaaaagaatatcggatcctttacctgttttatgaagatatgaaagaaaatccaaagtgtgaaattcaacaaatattaaagtatctagaaaaggacataccagaagaaattttaaataaaatactctaccatagctctttcagtgtaatgaaggagaatcctagtgcaaattacactactatgatgaaagaagagatggaccactctgtgtctcctttcatgagaaagggaatttcaggcgattggaagaatcagttcactgtagcccagtatgagaaatttgaagaagattatgtcaagaaaatggaagattcaacactgaagtttagatcagagatctagggagagttggtttcttctcagtctcttttgtcaggcactaacattagagaaaaagcacattcatggttcagtcaaagaaaatgttgtatattatttttctatacttactaaaactcttggtcttgaaatgtacagatatcaggtaataattctcttctaattatattccttacagaaaggttcatatagtagtttcccttttactttatgttatcaaaataatacaattttaagaggctttataacacagtatatttttagttttagttcctaatagcttcctgtctgaaatagtctcagtggcctcctagaggaagattacatttcattaattaattcaacttcatctgtggtgattttgcattttaaaatattatgttgttaacattgccaaattatttagattcattatgtcagaatatcctgttttctcttaaaccttatttagaaatattaaattttaatgaaaaaatcagtaaaacccattttatagatttaaattaagaaaattagagatctaattattttatccttcatttcctatattgaagctattgtgaaatttattacagaaaatgttgaggcttattcaaaatactccaaattattattctattgtctattttatgtccacttaggatcactttttaaaggaaaactctgttcaataaactaatttccataaaaaaaaaaaaaaaaaaaaaaaaa

SEQ ID NO: 2744 - DNA, 1881 bp, Mus musculus
cgagctggggcagtgcttgggcgaagggccggatcgggcttggttggtaccaggaaggcggcggcctggcgtgggtcctggtggcgcctggttcgagttccacagctgctaccaggcaggtaacacttcctgtagcccccagcatgcgggcaggactaggtcccatcatcacactggccctagtgctggaggtagcatgggccggggagcttaagcccaaaccgccgcccatcttcactggccgaccctttgtggtagcatggaacgtgcccacacaagaatgtgccccacgccacaaagtgccactggaccttagggccttcgatgtgaaggctacaccgaatgagggttttttcaaccagaatatcaccaccttctactacgaccgtctaggcctgtatccacgttttgatgcagccgggacatctgtgcatggcggtgtgcctcagaacggcagcctctgtgcacacctgcccatgctgaaggaatctgtggaacgctacatccagacccaggagcctggggggctggcagtcattgactgggaggaatggcggcctgtatgggttcgaaactggcaggagaaagatgtttaccgacagtcttcacgccagctggtggccagtcggcaccctgactggccatcagacagagtaatgaagcaggcccagtacgagtttgagttcgccgctcggcagttcatgttgaacactctgcgtttacgtcaaggcagtcagacccagcacctgtggggcttctacctctttcctgactgctacaatcacgattatgtacagaactgggagagctacacgggccgctgtcccgatgtggaggtggcacggaacgaccagctggcctggctctgggccgagagcacggctctcttttctgtgtacctggacgagacactggcgtcctccgtacacagccgcaactttgtcagattcggtggtcgggaggcccttcgagtggctcacacccaccatgccaaccacgccctccccgtgtacgtcttcacgcgtcccacatacacccgaggactcacgggactgagccaggtggaccttatctctaccatcggtgagagtgccgccctgggctcagctggcgtcatcttctggggcgactcggaagacgcttcaagtatggagacctgccaatacctcaagaattacctaactcagctgctggttccctacatagtcaacgtgtcctgggccacccagtattgcagttggacccagtgccatggccatgggcgatgtgtgcgccgcaaccccagcgtcaataccttcctgcacctcaatgccagcagcttccgcctagtgcctggccatacccccagtgaaccccagcttcgacccgaggggcagctcagcgaacgcgaccgtcaactacctgagaagcactttcgctgccagtgctatctgggctggggtggcgagcagtgccaacggaactataagggggcagctggaaatgccagcagagcctgggctggatcccacctcaccagcctgctgggtttggtagctgtggctctcacctggaccttatgagggatctctccccctggatatcagtccagctggcctctggtgcaaggatctccttggcatgaggggcctgttaggggggagacaaaagtctggagtaggcagtgctcccaggatgcttagcagagcacccataccatctgtcacccccctgttcwaagggggagagaracatcccctgagatgccctcatcttgccagagaagatggagaatcgagctaggccagagaaggcctgactctactccctgctcctggatagtttataattttggggtctcttttgtaaattaaatataaaacaactcctgaaaaaaaaaaa

SEQ ID NO: 2745 - DNA, 4298 bp, Mus musculus
gaggcgctgcttccatcttctgaggttccgctcaactcagagctacttccaaattctacatcttggctgactttgcgaaggaaacccggaggtggcacgtgaggtggtgatggagtttgaagagaaccttaagggaagagcagacaagaacttctcgaagatgggcaaaaagagtaaaaaggagaagaaagaaaagaaacctgctgttggcgtatttgggatgtttcgctatgcagattggctggacaagctgtgcatgattctgggaactctcgctgctattatccatggaacattacttcccctcttgatgctggtgtttggaaacatgacagatagttttacaaaagcagaagccagtattctgccaagcattactaatcaaagtggacccaacagtactctgatcatcagcaacagcagtctggaggaagagatggccatatacgcctactattacaccgggattggtgctggtgtgctcatagttgcctacatccaggtttcactttggtgcctggcagctggaagacagatacacaagattaggcagaagtttttccatgctataatgaatcaggagataggctggtttgatgtgcatgatgttggggagctcaacacccggctcacagatgatgtctccaaaattaatgacggaattggtgacaaaattgggatgttttttcagtccataaccacatttttagccggttttatcataggatttataagtggttggaagctaacccttgtcattttggctgtcagccctcttattggattgtcatctgctttgtgggcaaaggtattgacttcatttactaataaggaactccaggcttatgcaaaagctggagcagttgctgaagaagtcttagcagccatcagaactgtgattgcctttggaggacaacagaaggaacttgaaaggtacaataaaaatttagaagaagctaaaaatgttggcataaagaaagctatcacagccagcatttcgataggcattgcctacctgttggtctatgcatcatatgcactggcattctggtatgggacatccttggtcctctcaaatgaatattctattggagaagtgcttactgtcttcttctctattttgttggggacttttagtattggacacttggccccaaacatagaagcctttgcaaacgcacgaggggcagcctttgaaatcttcaagataattgataacgagccaagcattgacagcttctcaacaaagggctacaaaccagacagtataatgggaaacttagagtttaaaaatgttcacttcaactacccatcgagaagcgaagttcagatcttgaagggcctcaatctgaaggtgaagagcggacagacggtggccttggttggcaacagtggctgtggaaaaagcacaactgtccagctgatgcagaggctctacgaccccctggagggcgtggtcagtatcgacggacaagacatcagaaccatcaatgtgaggtatctgagggagatcattggtgtggtgagtcaggaacctgtgctgtttgccaccacgatcgccgagaacattcgctatggccgagaagatgtcaccatggatgagattgagaaagctgtcaaggaagccaatgcctatgacttcatcatgaaactgccccaccaatttgacaccctggttggtgagagaggggcgcagctgagtgggggacagaaacagagaatcgccattgcccgggccctggtccgcaatcccaagatccttttgttggacgaggccacctcagccctggatacagaaagtgaagctgtggtgcaggccgcactggataaggctagagaaggccggaccaccattgtgatagctcatcgcttgtctacagttcgtaatgctgacgtcattgctggttttgatggtggtgtcattgtggagcaaggaaatcatgatgagctcatgagagaaaagggcatttacttcaaacttgtcatgacacagactagaggaaatgaaattgaaccaggaaataatgcttatggatcccagagtgacactgatgcttctgaactgacttcagaagaatccaaatcacctttaataaggagatcaatttacagaagtgtccacagaaagcaagaccaagagagaagacttagtatgaaagaggctgtggatgaagatgtgcctctggtttccttttggcggatcctaaatctaaatctaagtgaatggccttatttacttgttggcgtactttgcgctgttataaatgggtgcatacaaccagtgtttgccatagtattttcaaggattgtaggggttttttcaagagatgatgaccatgaaactaaacgacagaattgtaatttgttttccctgttctttctggttatggggctgatttcttttgttacatatttctttcagggcttcacatttggcaaagccggagagatcctcaccaagcgagtccgatacatggttttcaaatccatgctgagacaggatataagctggttcgatgaccataagaacagcactggctcactgaccaccaggctcgccagtgatgcttctagtgttaaaggggcgatgggcgccaggcttgctgtagttacccagaatgtagcaaacctcgggacaggagtcatcctctccttagtctatggctggcagctgacacttctacttgtagtaattataccgctcattgtattgggcggaattattgaaatgaagctgttgtctggccaagccttgaaggacaagaaacagcttgagatctctgggaagattgctacagaagcaattgaaaacttccgcactattgtctctttgactcgggagcagaagtttgaaaccatgtatgcccagagcttgcaggtaccatacagaaatgcgatgaagaaagcacacgtgtttgggatcacgttctccttcacccaggccatgatgtatttttcttatgctgcttgtttccggttcggtgcctacttggtggcacaacaactcatgacttttgaaaatgttatgttggtattttctgctgttgtctttggtgccatggcagctgggaatactagttcatttgctcctgactatgcgaaagccaaagtatcagcatctcatatcatcaggatcattgagaaaacccctgagattgacagctacagcacagagggcttgaagcctactctgttagaaggaaatgtaaaatttaatggagtccagtttaactatcccacccgacccaacatcccagtgcttcaggggctgagcctcgaggtgaagaagggccagacgttggccctggtgggcagcagtggctgtgggaagagcacagtggtccagctgctcgagcgcttctacgaccccatggctggatcagtgtttctagatggcaaagaaataaagcaactgaatgtccagtggctccgagctcaccttggcattgtgtcccaggagcccattctctttgactgcagcattgcagagaacatcgcctatggagacaacagccgggccgtgtctcatgaggagattgtgagggcagccaaggaggccaacatccaccagttcatcgactcactgcctgataaatacaacaccagagtaggagacaaaggcactcagctgtcgggtgggcagaagcagcgcatcgccatcgcacgtgccctcgtcagacagcctcacattttacttctggacgaagcaacatcagctctggatacagaaagtgaaaaggttgtccaggaagcgctggacaaagccagggaaggccgcacctgcattgtgatcgctcaccgcctgtccaccatccagaacgcggacttgatcgtggtgattgagaacggcaaagtcaaggagcacggcacccaccagcagctgctggcgcagaagggcatctacttctcaatggtccaggctggagcaaagcgctcatgagctgtgactatctgaggtgctaagtatttttaatattggtgtttaaacatggcaccaaaccaaagttaaaaggcaagggctgttaaaggtaactccatcaagatgagaagccttccgagactttgtaattaaatgaaccaaaatcggaaacaaacaaacaaacaaacaaacaagccatagttaaacagggccatgtttttaattgcattacgtgattcataagagaacatatagttttttaaaataaaatgtataattttgtttcagtttttaatttctaccctactttcttaaatgattataaagattgtaaaaagcactatttcttaaattgcctataaaaattaaattttcatat

SEQ ID NO: 2746 - DNA, 1725 bp, Mus musculus
gtgcctggccacgcggtattgccaggaggctgggaggtgagggggaggtccaacacaatccaactgacaaggatggactacgccatgaagtctctcagcctcctgtaccccaggtcgctgtccaggcatgtggcagtgagcacggcagtggtgacccaacagctggtgtctaagcccagccgggagaccccgagggccaggccctgtcgtgttagcaccgcagatcggaaggttcgcaaaggcatcatggctcacagcttggaggacctcctgaacaaggtccaggacatcttgaaacttaaagacaagcccttctccctggtgctggaggaagatggcacaatcgtggagacagaagaatacttccaagccctggcaaaagataccatgttcatggtcctgctgaaggggcagaagtggaagcccccatcagaacagcgcaagaagagagcccagctagccctttcccagaagccaactaagaagatcgatgtggcccgggtaaccttcgacctgtacaagctgaaccctcaggactttattggctgcctgaacgtgaaggcaaccctctatgacacatactcgctttcctatgacctgcactgctacaaggccaagcgcatcgtgaaggagatcgtccgctggaccctcttcagcatgcaggccaccggtcacatgctgcttggcacctccagctacatgcagcagttcctggatgccaccgaggaagaacagcctgccaaggccaagccctcctccctcctcccagcctgtctgaagatgctgcaatgaagacccgagtcctcagaggccttccttgggccatggatgtgaccggggaccctgcgctcggctagcagcacccatgagcctggcagccagacagcttctcacctgcctgcgcctccctcacagcacagcaccaaggaaattgcaggaagggctggagccctggggtgggctggtcacaggaggacttcctagcctggcccagttccttcctttctgtctcaggtagcttagaggactaacacttagccctggcaggcacaaagtctgcccctgtgtccacttgtgccgtcttccgtgccactccctctctggtgcaccccaccatccccggtcctggctgcccacactcatcatgcagtagacattattatggtggcccccatcataccttggcctgaatcaagacaaccaagcgagcagcatgccacagcaccaactatgtctatgaccatggtgccagagtggttagcactctgtagtagaagaaaaggaggtgggggcttcgggggtctctcacctgggactctgatcactccctcctagcccccagctgcacatgatcatgaggtgtgcgagagagtgttagaggtggagattaactaaagccggcatgccagggatgcagatctggggggtcctcacctgtgccagggatgcagatctggggggtcctcacctgtgccagggagggaccttagggaatgcagatgattctgagtcacccaggcccctcctgtaagtaacctaaaagctcatagattcaccaagctggacttgggtgaaaccgcggcttagcctctcattgcctgaatggacacagttcctgttctcctgggaaaggcatgcagctgcctctcttgttctcatttttccacgaatgagtgaatggtattagagtctgcagtaaactatttatgctgaaaaaaaaaaaaa

SEQ ID NO: 2747 - DNA, 1897 bp, Mus musculus
ttaggtagggttttaccactgtgaacagacaccatgactgaggcaactcttgtaaggacctcattgaattggggatggcttacaggttcagaggttcagtccattttcatcaaggcaggagcatgacatcatggaggcaggcatggagcaggaggaactgagagttctacatcttcatctgaaggcaaacatgagaatactgacttccaggcagttaggatgagggtcttaaagcccatacccacaatgacacacctactccaacaaggctacacctactctaacagggccacaccttctaatagtgccactccctgggctgagcatatacaaaccataacatctgggcatggtagcatgggggtctctcctggcactcaggaggcagagcagacaggaaggtctctgattcggccttcccccaccttgcttcctgctcactgcctacatagggcatccatgctggccagggctacacagtgagaacctgaaacaaacttcaactagaaaataatactcgtctgatgctcctcacccagatctgcttcgtacgtgtgcatgttcttctcctctgtttcttatgcatgggttttagaaaaagatgtagtgtctcccccttactctgataggtgactccatttggtttaaatattcattggatgtctgaaggttggtgtttccagccattgatcatggggacatgctgtaatttatttaaccactcctcggtggctaggtttcatccctgtagctggcaatgctgtgaaaactgttttgtgtgtatgtagaaatctttgattacattgatattttcttggtcacatgtgtgtgtaatatacctgtgcaaggcctctgcagttgccatacttcttgggaactgccctgtcccagcatggagtgagggtttcctgccttggagctagttgatggcccgtgacttcaatgctaaaactgcattttagcaatcaaggcacatggtctgtagctccatggtttcttttattgaaagcacattaaaatgctgcttgtattactttaaaaaccaattctggattttcttcttcttttcctcctcctcctcctcttcctcttcctcctcttccttcttcttcttttgtggttttgccctgtaaaggaacatggcctgtggggtctctgggtcaggtgcatttccttggaagagtgatgtaggtgattctgtagagaaatgcaacagtgatgtttaggggaactggaaggggagtgtgtcctcccctctactgtgatgagcacagcatcttctatgtttcctgcaattgcctcttatgtaggctggaagagtgggggagagaagagagagcgggagtggagggctttcctatccatgcagatgtgacagctgtccctgtggccctatcctcccttccctgggaagtggaacaagtggatccaaacaagcatgttgcatgggaacagtgcagactcctgggagccaggacaccagatttgacttctgtttctgtcctcaccaggtctgtgaccttgagacatgaacttggcatctgtggctttcccactgtcaagtggtggggacaaagaggtgatccagctttcttgggggcagtgcagagccaacagatgagcacagatgtactctgagaactcagagatgctgtctgtacggagtgcagtcttgctgggactggagcttgttgcatgcttatctctgcagataatttcccccttgtgtccacccagtgattctcattaaggagatttctgaaactagagccagctggactaggggtccaggaagcatagaaacaccaggtgcttggaacatttgggtattacagcatattggctccctcccccctgccttgtggaaaggacatttaagactgggtcttctcatctc

SEQ ID NO: 2748 - DNA, 535 bp, Mus musculus
tataataagaatctatttattttatatttaagttcataagtcacatccacattatgttcctggtaaaaattctgaaaggacacagcaaagagcagaaagggacacctccatagagtgtctatggacccatttttgctttccaactcctaatagaaatgcctgacccagcaccctctgggaaaatcaacctttgattcaaagagatgttgttcagcaatgattacagtcacagtcacagccacatgccatcagcctatcaggaaatctgaggggaggcagacaaccagaaggaaagttgcttcctctctcaccaggaagcaactctagctccaaaccagatgggtgattcagcgccacatggagaaagataattcagccattgtgtttttaggattaagaagcactcattcactcgcggaagcctttaaatgtcactggtgcctggaaccaaatgtagtcttcccaagccgtggttcggatggaaggtctgccacatgacagggtcacagtcagtttatggccccggctgggcact

SEQ ID NO: 2749 - DNA, 1289 bp, Mus musculus
ttacctcactgctttccggagcggtagcacctcctccgccggcttcctcctcagaccgctttttgccgcgagccgaccggtcccgtcatgccgacccgcagtcccagcgtcgtgattagcgatgatgaaccaggttatgacctagatttgttttgtatacctaatcattatgccgaggatttggaaaaagtgtttattcctcatggactgattatggacaggactgaaagacttgctcgagatgtcatgaaggagatgggaggccatcacattgtggccctctgtgtgctcaaggggggctataagttctttgctgacctgctggattacattaaagcactgaatagaaatagtgatagatccattcctatgactgtagattttatcagactgaagagctactgtaatgatcagtcaacgggggacataaaagttattggtggagatgatctctcaactttaactggaaagaatgtcttgattgttgaagatataattgacactggtaaaacaatgcaaactttgctttccctggttaagcagtacagccccaaaatggttaaggttgcaagcttgctggtgaaaaggacctctcgaagtgttggatacaggccagactttgttggatttgaaattccagacaagtttgttgttggatatgcccttgactataatgagtacttcaggaatttgaatcacgtttgtgtcattagtgaaactggaaaagccaaatacaaagcctaagatgagcgcaagttgaatctgcaaatacgaggagtcctgttgatgttgccagtaaaattagcaggtgttctagtcctgtggccatctgcctagtaaagctttttgcatgaaccttctatgaatgttactgttttatttttagaaatgtcagttgctgcgtccccagacttttgatttgcactatgagcctataggccagcctaccctctggtagattgtcgcttatcttgtaagaaaaacaaatctcttaaattaccacttttaaataataatactgagattgtatctgtaagaaggatttaaagagaagctatattagttttttaattggtattttaatttttatatattcaggagagaaagatgtgattgatattgttaatttagacgagtctgaagctctcgatttcctatcagtaacagcatctaagaggttttgctcagtggaataaacatgtttcagcagtgttggctgtattttcccactttcagtaaatcgttgtcaacagttccttttaaatgcaaataaataaattctaaaaatt

SEQ ID NO: 2750 - DNA, 1894 bp, Mus musculus
ggtcctggactgactcccacaactctgccagtctccagcccctgcccttcagtggtacagatggcgttctcccagtacatctccttagccccagagctgctactggccactgccatcttctgtttagtgttctggatggtcagagcctcaaggacccaggttcccaaaggcctgaagaatccacccggaccctggggcttgcccttcattgggcacatgctgactgtggggaagaacccacacctgtcactgacacggctgagtcagcagtatggggacgtgctgcagatccgcatcggctccactcctgtggtggtgctgagcggcctgaacaccatcaagcaggccctggtgaggcagggagatgacttcaagggccgaccagacctctacagcttcacacttatcactaacggcaagagcatgactttcaacccagactctggacccgtgtgggctgcccgccggcgcctggcccaggatgccctgaagagcttctccatagcctcggacccgacgtcagcatcctcttgctatttggaggagcacgtgagcaaggaggctaaccatctcgtcagcaagcttcagaaggcgatggcagaggttggccacttcgaaccagtcagccaggtggtggaatcggtggctaacgtcattggtgccatgtgctttgggaagaacttcccccggaagagcgaggagatgctgaacatcgtgaataacagcaaggactttgtggagaatgtcacctcagggaatgcagtggacttcttcccggtcctgcgctacctgcccaacccggccctcaagaggtttaagaccttcaatgataacttcgtgctgtttctgcagaaaactgtccaggagcactaccaagacttcaacaagaacagtatccaagacatcacaagtgccctgttcaagcacagcgagaactacaaagacaatggcggtctcatccccgaggagaagattgtcaacattgtcaatgacatctttggagctggctttgacacagtcaccacagccatcacctggagcattttgctacttgtgacatggcctaacgtgcagaggaagatccatgaggagctggacacggtggttggcagggatcggcaaccacggctttctgaccgtccccagctgccatatctagaggccttcatcctggagatctaccgatacacatcctttgtccccttcaccatcccccacagcacaacgagggacacctcactgaatggcttccacattcccaaggagcgctgtatctacataaaccagtggcaggtcaaccatgatgagaagcagtggaaagacccctttgtgttccgcccagagcggtttcttaccaataacaactcggccatcgacaagacccagagcgagaaggtgatgctcttcggcttgggaaagcgccggtgcattggggagatcccggccaagtgggaagtcttcctcttcttagccatcctgctgcagcatctggagtttagtgtgccaccgggtgtgaaggtggacctgacacccaactatgggttgaccatgaagcccgggacctgtgaacacgtccaggcatggccacgcttttccaagtgaagattgtcgaggcatcggtggggccgtcacccttgtttcttttccttttttaaaaaaaaaaaaaaaacagcttttttttttttgagagatacaattctttccccatttaattcatctccaagcaattttacaatagtgtctatcatgttcaccccataacccatactcattaggacttatgatttaagattcctcctaccctgtcttgcttgccgcacctcatgctaatctagtttttgactcaatagatttgcctactctggctgtctcatataaatcgaatgaattatga

SEQ ID NO: 2751 - DNA, 756 bp, Mus musculus
ttttttttttctttcagatagaagagccaagtttatttaggtaaacctctgaatcacgttttaacaatgggaataacaatgatgatgctaataatttgccatgtggtaggcactggaacacgtttcatacaccgtctttctttgtctttcgtcatttttcccagtccccacgttctttctcactgtcaggttttgcatcaggctggatttctatttcaaaagtctcctccatgttgatctgttaaaaagtccatccaggttcagataggcaccgtgcttgttgcctctgatgtatatataacgtgtgcagactgcattttctgacttgtcctccctcagcagtcacttggatgctacatatgttgatgttaataatttactcccagtggcccaagagcctcctcttttttgtgtatacagttggttatctgtttctgaaggcttcatattatacttgtttaacttgttcaggaatgaagatgctttggacccggatccagtcacctctattgagacaggactttttactggggctacgccaacggttacaccagctgagtgggacttgccattctttatgtgaaaaaaaagatcattcgcatcatcataaaactctgaggagattgaagtatccgccagggcttcaaagtggtacttaaggaagttgtagggcttccgaaagtatttctcatccctcccatagtagaggcgctcacaggtggggtcgtaccggaactttctccaatctccattgta

SEQ ID NO: 2752 - DNA, 686 bp, Mus musculus
ttttttttttttttttgctggtctctatttttattgtttttcaattttcccaacacatgaatgacagctcattttgaaatttatttttcagtgcacttcacagcaaaaatgaaaacggaatcattaaaatggttgaacacagaccaattcttttaatttacaatttgctgaaaaatcattgtcgctgttttcaccctatgaaccctactaagagaacggtttctcagagcgcagccgcagccgcctggcacggcctacgagcgagcgccaggtgcatttgcacactgactggaagaccacgtgggcaggagcagggtaaggcaccactctggacagtaaggtagcttgcagtaacaagagtcagcaccacgagtgggtgctcagcaaatacttgaataaatgaaaaccataattagcacgattctgttcatcgccagcaattcttcaatgatagggttgtacggcttcttagcaatggctccctttctgccttcatgaaatgaggtaaggtagtactcaacaaatcgaatcattcggtcctctggcgtggctccattggtgatgcctatgaacaggtctggatgcgacatgaaatctgcgtacatctccagtaaggaacgcttcttcaggataaacgtaggaagcaccactctggttaagtccatgcccagcttgagctgtgacag

SEQ ID NO: 2753 - DNA, 947 bp, Mus musculus
  misc_feature 595, 748, 788, 817: n = A,T,C or G
tttttttttttgatttgtaattttcctttattatagaaaatacacatgttaatggagaaattatttgaacagcaaatgaaatcatattttaataagttttattttatcaattataacattataaaactgcctaaacactggtacttgtttaaaatgtgaatttgaaattttctgagaattaatattaattaatatttatattctctgccctccttaacttcttctacacaaatagatgtctgctagttacattttagtcttttatatacttctaagaacagctgtgggtgcataattcaggaaaaattcccaaaggatgaggtcatgtggcacaatcactcttatgactctcgaaccctgtttctagttccttctaaaggcatctttgtgcttcactgaccatatgtggctctagcaattctgttacatctttactcacttggaatattttcatttttcatgattatctaagatatgaaattgtgtcttattgtacccatgtattcatggatttttcttcaagcaccatttagaaacaaaggcgttgacaaacatcgaaccagcatactgatcattatcacaaagatggaagctntctcttaggatttttcatttaactgactcagtgttttgtgtccgatgtgggtgcagaaattctctcctttatttcctattcaccactgtgttaccgtgagaagtcacagagtcattcggctcggtgcatccattaccttttctgttcaccttngcagcctgctcagcttcccctttgtatttcgagcatgacnagactagtttgcgcctgaaatccttcggngtgactttcttgatgctcaaaaactgaatccttgttccatctcccgtgaggaatacctacactttcattaataagatggcagacttgagtcatcaagcttctttcatcatggtcaccgaaactaattgtg

SEQ ID NO: 2754 - DNA, 583 bp, Mus musculus
aataacgggtatttattagtgattgcttttttacgtgagaatatctcagaaactgtaggaaactgtgtttttcccaaattatacaataccatcagttaatccttacaacatgcccaaataattcccatctccatctccattggggcaaattaattggagatcatattcaaagctttactctttcatctacccactcttaccaaggcacacctctccctacatcactcagtcctttcaagatcccctttacatcagtacaagtacctcactatcaattttaacctgtaggatgttaatgatccatcactgtggtatgatgatatctgtgttcatggtaagataggacagttcatgatgtatgagtaaattggaatttgtttcatcccatctaccttttctgttgcctttctactcacaagatggttttaaattctttcttttgtttgtaatttaaataccagtgtcaattaacaaattaattctatttcttccattcatactcaaacaaaataataattactaaattgtttttcacatggtattgtcatgagtttagacataacttgaaattagtgattattca

SEQ ID NO: 2755 - DNA, 794 bp, Mus musculus
  misc_feature 681: n = A,T,C or G
ttttatttttcatttttatttttataaagtacttctgtgaccactctctaaagaaaactaattttgatgttcgcccagaagcaactttctcaagggcttcgtggatgatggcttcagaaagaataaagattgttacatatctggatctgaggttgaaaagatggacatagcatgggaacacagaaagcagtgacagacttaattgatagaaactttgtgtattcaagtttctaatagtctctcatctcccagattgtatgtacaagcaaactaaaatctaacactatcattaactattacgcagactccaaggatgcttctaagaaacatgtcttcaattggtcttgaataagtccgatcaaggcccttgttatgggcaggcttatattagtttctaatccattatcagaaaaattcaatcaattttctacaattccagcagttcctactgaaggaaggtgagggtctcagaactcactgattggcagcctatcccaccagggacttccatcttgtagattccgacatttgtcaggccaagtgtatagggactgcatccgtgataggctcctctgaaagatatgatgtctgtgtgattcgagtgtgctcgggccatcaccatggccaggtcgttggcttctgatccactgttcaccaagaaaatgaccttaagaggctcangaaggagtgctgagagcttctctgcatattcatgcattcggagaagtggaagaagacagaacctgtattgccacaagccggcctatctgtttttttgccactgcacttaccct

SEQ ID NO: 2756 - DNA, 432 bp, Mus musculus
  misc_feature 368: n = A,T,C or G
tttttttttttttttttagaaaaataggactttcttgttgtgccccggtgcccccgacaccctccccatcagagttttaaaaaccgtgagcaatttggtgagtctgaggccaggtcccgaggggtgtccctgggaccagaggaaccatagaggtgggcccttggctagggtcctgcaggttcgtgactgggcccccagggctcacagtccaattggaccacagtatgggccctgggtgcagcaggctcaggggcaggcgcactgggcacgggcccgagcgctccgttggtctgggagcaaacgctgctgacaggtgccgtagccttggccttgccgggcggctggcctccgtgcaccttgtaacgtanaagcagcacgaagatgaagaccagaacagaagcgacgatgacacctcccagcgctatgatcatg

SEQ ID NO: 2757 - DNA, 528 bp, Mus musculus
ttttttttttgtcaaaatactttattgaaggtcacaaagtcttagaaaaggaggtggtgctcacacctttaatcctagcacttgagacacagaagcaggtagagctctgtaaatctgaggccagcatcagggtggagttgtctagctcttctgtcaggttgtccaacattggaatttccagaaaatttccccagtctgcactgagaccaccggaggaagggcctttgtggggggtaccaacgtcgggccaaggtcctgggacctcagatcctggggtgacatcgggagccacgcgggatgcagcgtggttgtggagggttctggaaaacactcgcactggcacgaagtctccagggctgtcaactttgttggagttgaaagggctgatggaggggaggatgatcagggcgaaggacagcagaaggaccgctatgcaggtgcctgcatgggctggcttgctggttgactggaccacaagtgcctgcaggtgttcagctgctccagaagagacaaattttgcttttctaa

SEQ ID NO: 2758 - DNA, 910 bp, Mus musculus
  misc_feature 613, 764, 765: n = A,T,C or G
ttttttttttttcacgctgcaacaaaactttattagtgctgaaacagtgaagttttttcacatatgaaaattggaactggtttataaagaattgagaaagtatagaggtagcatccctgccattcataaaggactaccagatgcaggtacataggacaggaggacctttttgctcacagaagaagcagggtctcagccatccatgtgaaatactacacagtttcagactggaatgaaacagagctcaaagggtggaggcacatgcaataaaccagtttgaactggcttggtgtcgatgtcctctggtttaaccagaggttttaaagtaaaatgctgtaagatgttggtcaggattagaaacatctccatgcgggccagaccttctccaatacaagctcttcttcctgctgagaaagccacaaagtagtcactctttttgaagttccctttctcatcaagaaagtggccaggatcaaacttctttgggtttgggaaaatctttgccatcattcaggacagaagtcagacatgccattacacttgtgcccttgggaatgggtatcctctgaactcacatcctgcgttgtcttacgaggtgaaggaatgggaacanaatcaatgtatctctgaatctcatgcaacacagcatcagtgtacggcatgtggttcctgtcctgcatggtgggtcctcgatgtctaccaatcacatgagcaatttcttcctgatttttagctgtgactttctggtacttcagcaggagcannagcccatatttcactgggggaactgtttgctctgttccggctccaaaagatcacctatgctgccaccaggttatcatagaaaattagattttttgatgggttttccttttccttttaatcaagagtaatcaataaagccctgagg

SEQ ID NO: 2759 - DNA, 628 bp, Mus musculus
tctgcagcatggggagagatatattttattcgttccccatccatataaaaaaaaatatacacacacaacattacatactatacatatttgcaaaacctcctccactcttaccccaaccagactctccaatttttaaatgttcaaaagaaccttgaaggtgagatcaactcctggagcctctgctgcatgcgagttcaaccaggggagtctgaggtgcaggcctagaatgagacctaccccaaagttaaacagaaggactcgatcactatcttgatcttttaaaatttggttgttaaccaattctacagcttattcggttcttattgaaacaacaaatacagctttctcatgacatatttctttttatgaaaataaaaaagatggggagaaggcaattgagtcacttctgatttctgggggagggcagggaataaaggtctttgcatgaccaatggttttcatttgagaaaaaatgtgtgatctcaaactgtgatgttctgtgattcttgcagagcatacattcatagcgtctaattttattctgtgtgcactgaaattgtacagggacaggaggaaagggatggccatatttccccgaggataattcttccataccagcctatattac

SEQ ID NO: 2760 - DNA, 1028 bp, Mus musculus
  misc_feature 570, 613, 652, 708, 725: n = A,T,C or G
gagtctccagtcgtcccctgttggtgtcgggatcgctgagtagcctggagttccctcccaagctgagtcggtcccaccaagttttccgtcttcaggatttttctttttaaagactagttttgattttttttccccccgaattcttctttaagtagttaaacatcggaggagaaagaacacttcggttgcagggaagggagagagaccttccttacaacgtagattctagaaattgaaaattataagccagattattttaataagatcctaaaatgtcgagatttgtacaagatcttagcaaagctatgtctcaagatggtgcttctcagttccaagaggtcattctccaagaactagaattatctgtgaagaaagaattagaaaaaatacttaccacagcagcctcacatgagtttgagcacactaaaaaagatcttgatggatttcggaagctatttcatagatttttgcaagaaaagggacccgtctgtggactggggtaaaatccagagacctccagaagattcgattcaaccctatgaaaagataaaagccagaggcttgcctgantacatatcttctgtgttgaacaagttggtgtagtgacactcantggtggttttggaaccagcatgggctgcaaaggccctanaggtctgattggtgtaagacatgagaacaccctttttgcatcgtactgttcagcanattgaacatttgaccanaacctatcatacagatgtttcctttcgttttaatgaattctttttaccacggatgaagataccaaaaaaaatacttccagagtaccattcactgtcgtgtgaaaatctacaacctccattcaaagccgtaccccgaggatcaaataagaaatctctacttctataggccaaagatgggtcttattaaggggaaaatcctgaaacctgggaccttccagggccatgagaaatctaacctagttcttacaatttggcttgttcgtacctttttagagaaagggaaaaggaatatttggggctaaa

SEQ ID NO: 2761 - DNA, 414 bp, Mus musculus
tttttttttttttaattgaattcctttattacaagatcacccctgatgccaacttttaattcaaaatgacgtccaattcaaaacgaacctttcaatttacactaatcacaacgtcacctaaagataataatcaaaaataatttcagattgttccacattgtgtgaaccaaacagacataaacaagacacccacaaatcagaaagactttatgaatcatgttatccctcacagaaagcacagtaaaaatattatatttataatttatacaataatgatatgagaaaatacagataagatcatacaactgaagaacaattattcagatttcagctttcctccctttaaaactcttcttttttttattcgtttgaggtaaattaaaaataatgagaattgacttttaatattttccc

(The sequence listing continues in the following parts.)

1. A method for determining whether an agent possesses a defined biological activity, the method comprising the steps of:
(a) making at least one comparison from the group consisting of:
(1) comparing an efficacy value of the agent to at least one reference efficacy value to yield an efficacy comparison result, wherein each efficacy value represents at least one expression pattern of the same efficacy-related population of genes, or at least one expression pattern of the same efficacy-related population of proteins;
(2) comparing a toxicity value of the agent to at least one reference toxicity value to yield a toxicity comparison result, wherein each toxicity value represents at least one expression pattern of the same toxicity-related population of genes, or at least one expression pattern of the same toxicity-related population of proteins;
(3) comparing a classifier value of the agent to at least one reference classifier value to yield a classifier comparison result, wherein each classifier value represents at least one expression pattern of the same classifier population of genes, or at least one expression pattern of the same classifier population of proteins; and
(b) using the comparison result(s) obtained in step (a) to determine whether the agent possesses the defined biological activity.

2. The method of claim 1 comprising the steps of:
(a) making at least two comparisons from the group consisting of:
(1) comparing an efficacy value of the agent to at least one reference efficacy value to yield an efficacy comparison result, wherein each efficacy value represents at least one expression pattern of the same efficacy-related population of genes, or at least one expression pattern of the same efficacy-related population of proteins;
(2) comparing a toxicity value of the agent to at least one reference toxicity value to yield a toxicity comparison result, wherein each toxicity value represents at least one expression pattern of the same toxicity-related population of genes, or at least one expression pattern of the same toxicity-related population of proteins;
(3) comparing a classifier value of the agent to at least one reference classifier value to yield a classifier comparison result, wherein each classifier value represents at least one expression pattern of the same classifier population of genes, or at least one expression pattern of the same classifier population of proteins; and
(b) using the comparison results obtained in step (a) to determine whether the agent possesses the defined biological activity.

3. The method of claim 1 comprising the steps of:
(a) comparing an efficacy value of the agent to at least one reference efficacy value to yield an efficacy comparison result, wherein each efficacy value represents at least one expression pattern of the same efficacy-related population of genes, or at least one expression pattern of the same efficacy-related population of proteins;
(b) comparing a toxicity value of the agent to at least one reference toxicity value to yield a toxicity comparison result, wherein each toxicity value represents at least one expression pattern of the same toxicity-related population of genes, or at least one expression pattern of the same toxicity-related population of proteins;
(c) comparing a classifier value of the agent to at least one reference classifier value to yield a classifier comparison result, wherein each classifier value represents at least one expression pattern of the same classifier population of genes, or at least one expression pattern of the same classifier population of proteins; and
(d) using the efficacy comparison result, the toxicity comparison result and the classifier comparison result to determine whether the agent possesses the defined biological activity, wherein steps (a), (b) and (c) can occur in any order with respect to each other.

4. The method of claim 1 wherein the agent is a chemical agent.

5. The method of claim 1 wherein the defined biological activity is stimulation of a biological response.

6. The method of claim 1 wherein the defined biological activity is inhibition of a biological response.

7. The method of claim 1 wherein the defined biological activity is amelioration of at least one symptom of a disease in a mammal.

8. The method of claim 1 wherein the defined biological activity is partial agonist activity with respect to a biological response, or with respect to a protein that mediates a biological response.

9. The method of claim 8 wherein the defined biological activity is partial agonist activity with respect to PPARγ.

10. The method of claim 1 wherein the at least one reference efficacy value is the efficacy value of a reference agent that possesses the defined biological activity.

11. The method of claim 1 wherein the at least one reference toxicity value is the toxicity value of a reference agent that possesses the defined biological activity.

12. The method of claim 1 wherein the at least one reference classifier value is the classifier value of a reference agent that possesses the defined biological activity.

13. The method of claim 1 wherein at least one member of the group consisting of the efficacy value of the agent, the toxicity value of the agent and the classifier value of the agent is calculated from at least one member of the group consisting of gene expression levels and protein expression levels measured in living cells cultured in vitro.

14. The method of claim 13 wherein at least two members of the group consisting of the efficacy value of the agent, the toxicity value of the agent and the classifier value of the agent are calculated from at least one member of the group consisting of gene expression levels and protein expression levels measured in living cells cultured in vitro.

15. The method of claim 13 wherein the efficacy value of the agent, the toxicity value of the agent and the classifier value of the agent are calculated from at least one member of the group consisting of gene expression levels and protein expression levels measured in living cells cultured in vitro.

16. The method of claim 13 wherein the living cells are selected from the group consisting of heart cells, liver cells and adipocyte cells.

17. The method of claim 16 wherein the living cells are 3T3L1 adipocyte cells.

18. The method of claim 1 wherein the defined biological activity is the ability to affect a biological process in vivo, and wherein at least one member of the group consisting of the efficacy value of the agent, the toxicity value of the agent and the classifier value of the agent is calculated from at least one member of the group consisting of gene expression levels and protein expression levels measured in living cells cultured in vitro.

19. The method of claim 18 wherein the biological process is an acute or chronic disease in a mammal.

20. The method of claim 1 wherein the defined biological activity is the ability to affect a biological process in vivo, and wherein at least two members of the group consisting of the efficacy value of the agent, the toxicity value of the agent and the classifier value of the agent are calculated from at least one member of the group consisting of gene expression levels and protein expression levels measured in living cells cultured in vitro.

21. The method of claim 20 wherein the biological process is an acute or chronic disease in a mammal.

22. The method of claim 1 wherein the defined biological activity is the ability to affect a biological process in vivo, and wherein the efficacy value of the agent, the toxicity value of the agent and the classifier value of the agent are calculated from at least one member of the group consisting of gene expression levels and protein expression levels measured in living cells cultured in vitro.

23. The method of claim 22 wherein the biological process is an acute or chronic disease in a mammal.

24. The method of claim 1 wherein the defined biological activity is the ability to affect a biological process in a first living tissue, and wherein at least one member of the group consisting of the efficacy value of the agent, the toxicity value of the agent and the classifier value of the agent is calculated from at least one member of the group consisting of gene expression levels and protein expression levels measured in a second living tissue, wherein the first living tissue is a different type of tissue than the second living tissue.

25. The method of claim 1 wherein the defined biological activity is the ability to affect a biological process in a first living tissue, and wherein at least two members of the group consisting of the efficacy value of the agent, the toxicity value of the agent and the classifier value of the agent are calculated from at least one member of the group consisting of gene expression levels and protein expression levels measured in a second living tissue, wherein the first living tissue is a different type of tissue from the second living tissue.

26. The method of claim 1 wherein the defined biological activity is the ability to affect a biological process in a first living tissue, and wherein the efficacy value of the agent, the toxicity value of the agent and the classifier value of the agent are calculated from at least one member of the group consisting of gene expression levels and protein expression levels measured in a second living tissue, wherein the first living tissue is a different type of tissue than the second living tissue.

27. The method of claim 1 wherein at least one member of the group consisting of the efficacy-related population of genes and the efficacy-related population of proteins yields at least one efficacy-related gene expression pattern, or efficacy-related protein expression pattern, in response to the agent, that correlates with the presence of at least one desired biological response caused by the agent in a living thing, wherein the at least one efficacy-related gene expression pattern, or at least one efficacy-related protein expression pattern, appears before the desired biological response.

28. The method of claim 1 wherein at least one member of the group consisting of the toxicity-related population of genes and the toxicity-related population of proteins yields at least one toxicity-related gene expression pattern, or toxicity-related protein expression pattern, in response to the agent, that correlates with the presence of at least one undesirable biological response caused by the agent in a living thing, wherein the at least one toxicity-related gene expression pattern, or at least one toxicity-related protein expression pattern, appears before the undesirable biological response.

29. The method of claim 1 wherein (1) at least one member of the group consisting of the efficacy-related population of genes and the efficacy-related population of proteins yields at least one efficacy-related gene expression pattern, or efficacy-related protein expression pattern, in response to the agent, that correlates with the presence of at least one desired biological response caused by the agent in a living thing, wherein the at least one efficacy-related gene expression pattern, or at least one efficacy-related protein expression pattern, appears before the desired biological response; and (2) at least one member of the group consisting of the toxicity-related population of genes and the toxicity-related population of proteins yields at least one toxicity-related gene expression pattern, or at least one toxicity-related protein expression pattern, in response to the agent, that correlates with the presence of at least one undesirable biological response caused by the agent in a living thing, wherein the at least one toxicity-related gene expression pattern, or at least one toxicity-related protein expression pattern, appears before the undesirable biological response.

30. The method of claim 1 comprising the steps of:
(a) making at least one comparison from the group consisting of:
(1) comparing an efficacy value of the agent to a scale of efficacy values to yield an efficacy comparison result, wherein each efficacy value represents at least one expression pattern of the same efficacy-related population of genes, or at least one expression pattern of the same efficacy-related population of proteins;
(2) comparing a toxicity value of the agent to a scale of toxicity values to yield a toxicity comparison result, wherein each toxicity value represents at least one expression pattern of the same toxicity-related population of genes, or at least one expression pattern of the same toxicity-related population of proteins;
(3) comparing a classifier value of the agent to a scale of classifier values to yield a classifier comparison result, wherein each classifier value represents at least one expression pattern of the same classifier population of genes, or at least one expression pattern of the same classifier population of proteins; and
(b) using the comparison result(s) obtained in step (a) to determine whether the agent possesses the defined biological activity.

31. The method of claim 30 comprising the steps of:
(a) making at least two comparisons from the group consisting of:
(1) comparing an efficacy value of the agent to a scale of efficacy values to yield an efficacy comparison result, wherein each efficacy value represents at least one expression pattern of the same efficacy-related population of genes, or at least one expression pattern of the same efficacy-related population of proteins;
(2) comparing a toxicity value of the agent to a scale of toxicity values to yield a toxicity comparison result, wherein each toxicity value represents at least one expression pattern of the same toxicity-related population of genes, or at least one expression pattern of the same toxicity-related population of proteins;
(3) comparing a classifier value of the agent to a scale of classifier values to yield a classifier comparison result, wherein each classifier value represents at least one expression pattern of the same classifier population of genes, or at least one expression pattern of the same classifier population of proteins; and
(b) using the comparison results obtained in step (a) to determine whether the agent possesses the defined biological activity.

32. The method of claim 30 comprising the steps of:
(a) comparing an efficacy value of the agent to a scale of efficacy values to yield an efficacy comparison result, wherein each efficacy value represents at least one expression pattern of the same efficacy-related population of genes, or at least one expression pattern of the same efficacy-related population of proteins;
(b) comparing a toxicity value of the agent to a scale of toxicity values to yield a toxicity comparison result, wherein each toxicity value represents at least one expression pattern of the same toxicity-related population of genes, or at least one expression pattern of the same toxicity-related population of proteins;
(c) comparing a classifier value of the agent to a scale of classifier values to yield a classifier comparison result, wherein each classifier value represents at least one expression pattern of the same classifier population of genes, or at least one expression pattern of the same classifier population of proteins; and
(d) using the efficacy comparison result, the toxicity comparison result and the classifier comparison result to determine whether the agent possesses the defined biological activity, wherein steps (a), (b) and (c) can occur in any order with respect to each other.

33. A population of oligonucleotide probes selected from the group consisting of the population of oligonucleotide probes set forth in Table 1 (SEQ ID NOs: 51-102), the population of oligonucleotide probes set forth in Table 2 (SEQ ID NOs: 52, 53, 58, 59, 65, 66, 68, 69, 71, 73, 75, 76, 78, 82, 86, 88-90, 93, 94, 96, 101), the population of oligonucleotide probes set forth in Table 4 (SEQ ID NOs: 153-207), the population of oligonucleotide probes set forth in Table 5 (SEQ ID NOs: 213-218), the population of oligonucleotide probes set forth in Table 6 (SEQ ID NOs: 551-894, 155, 157, 164, 171, 178, 179, 185, 188, 204-206), the population of oligonucleotide probes set forth in Table 7 (SEQ ID NOs: 950-1019, 863, 93, 94, 97), the population of oligonucleotide probes set forth in Table 8 (SEQ ID NOs: 1036-1057, 951, 955, 957, 863, 959, 960, 63, 962, 966, 971-974, 980, 981, 984, 987, 989, 991-996, 93, 94, 998-1001, 97, 1004-1014, 1017-1019), the population of oligonucleotide probes set forth in Table 9 (SEQ ID NOs: 1239-1428, 558, 561, 158, 565, 574, 576, 578, 585, 592, 597, 600, 609, 612, 613, 617, 163, 625, 641-643, 646, 647, 655-657, 661, 666, 171, 681, 697, 700, 706, 707, 712, 720, 727, 740, 745, 748, 749, 755-757, 762, 766, 767, 769-771, 773, 778, 780, 786, 789, 794, 800, 803, 804, 188, 189, 191, 813, 814, 822, 823, 556, 828, 831, 832, 836, 840, 844, 864, 871, 876, 878, 883, 884, 889-891), the population of oligonucleotide probes set forth in Table 10 (SEQ ID NOs: 1449-1471, 952, 956, 957, 963, 975, 976, 981, 983, 984, 986, 990, 999-1001, 1004-1007, 1012-1014), the population of oligonucleotide probes set forth in Table 12 (SEQ ID NOs: 1731-1996, 52, 951, 1450, 957, 1452, 1455, 65, 68, 69, 72, 75, 1457, 967, 1458, 970, 971, 974, 1462, 82, 977, 978, 982, 90, 989, 990, 215, 999-1001, 96, 1468, 1005, 1006, 218, 1014, 1018, 1019), and the population of oligonucleotide probes set forth in Table 14 (SEQ ID NOs: 2796-3683, 1732, 1734, 53, 1740, 1449, 1450, 1747, 1748, 1037, 1759, 957, 1774, 60, 1780, 63, 1797, 962, 1808, 1041, 1809, 1817, 1818, 1820, 1824, 71, 72, 1833, 966, 1873, 970-973, 1879, 1046, 1047, 976, 1898, 1904, 80, 1910, 86, 1932, 1933, 1941, 1049, 989, 1953, 991-993, 1050, 1051, 994, 215, 216, 93, 94, 998-1001, 1465-1467, 1957, 1002, 214, 1962, 1005-1007, 1056, 1057, 1009-1014, 1974, 1975, 1977, 1979, 1016-1019, 1994, 101).

34. A method of identifying an efficacy-related population of genes or proteins, wherein the method comprises the steps of:
(a) contacting a living thing with an agent that is known to elicit a desired biological response; and
(b) identifying an efficacy-related population of genes or proteins in the living thing that yields an expression pattern that correlates with the occurrence of the desired biological response caused by the agent.

35. The method of claim 34 wherein the living thing is a mammal.

36. The method of claim 34 wherein the living thing is a human being.

37. The method of claim 34 wherein an efficacy-related population of genes is identified.

38. The method of claim 34 wherein an efficacy-related population of proteins is identified.

39. The method of claim 34 wherein the agent is a chemical agent.

40. The method of claim 34 wherein an efficacy-related population of genes or proteins is identified by:
(a) measuring the level of expression of each member of a multiplicity of genes or proteins in the living thing, contacted with the agent, to yield a multiplicity of expression values;
(b) measuring the level of expression of each member of the same multiplicity of genes or proteins in a reference living thing, that is not contacted with the agent, to yield a multiplicity of reference expression values; and
(c) comparing the multiplicity of expression values with the multiplicity of reference expression values to identify an efficacy-related population of genes or proteins, wherein each individual gene or protein has an expression value in response to the agent that is significantly different from the corresponding reference expression value.

41. The method of claim 34 wherein the expression pattern of the efficacy-related population of genes or proteins appears in the living thing before the occurrence of the desired biological response caused by the agent.

42. The method of claim 34 wherein the desired biological response does not occur in the living thing.

43. The method of claim 42 wherein the living thing consists essentially of epididymal white adipose tissue.

44. The method of claim 34 wherein the living thing suffers from a disease and the desired biological response is amelioration of at least one symptom of the disease.

45. The method of claim 44 wherein the living thing is a mammal, and the disease is selected from the group consisting of type II diabetes, hypercholesterolemia, cancer, inflammation, obesity, schizophrenia and Alzheimer's disease.

46. The method of claim 34 further comprising:
(a) contacting the living thing with an agent that is known to elicit at least two different desired biological responses in the living thing, wherein elicitation of a first desired biological response is mediated by a first target molecule, and elicitation of a second desired biological response is mediated by a second target molecule that is different from the first target molecule;
(b) identifying an efficacy-related population of genes or proteins that yields an expression pattern that correlates with the occurrence of the first and second desired biological responses in response to the agent;
(c) contacting a modified living thing with the agent, wherein the modified living thing is a member of the same species as the living thing and does not include any functional first target molecules;
(d) identifying an efficacy-related population of genes or proteins that yields an expression pattern that correlates with the occurrence of the second desired biological response in the modified living thing in response to the agent; and
(e) comparing the efficacy-related population of genes or proteins identified in step (b) with the efficacy-related population of genes or proteins identified in step (d) to identify an efficacy-related population of genes or proteins that yields an expression pattern that correlates with the occurrence of the first desired biological response caused by the agent.

47. The method of claim 46 wherein the first target molecule is a PPARα receptor and the second target molecule is a PPARγ receptor.

48. The method of claim 46 wherein the first target molecule is a PPARγ receptor and the second target molecule is a PPARα receptor.

49. A method of identifying a toxicity-related population of genes or proteins, wherein the method comprises the steps of:
(a) contacting a living thing with an agent that is known to elicit an undesirable biological response; and
(b) identifying a toxicity-related population of genes or proteins that yields an expression pattern that correlates with the occurrence of the undesirable biological response caused by the agent.

50. The method of claim 49 wherein the living thing is a mammal.

51. The method of claim 49 wherein the living thing is a human being.

52. The method of claim 49 wherein a toxicity-related population of genes is identified.

53. The method of claim 49 wherein a toxicity-related population of proteins is identified.

54. The method of claim 49 wherein the agent is a chemical agent.

55. The method of claim 49 wherein a toxicity-related population of genes or proteins is identified by:
(a) measuring the level of expression of each member of a multiplicity of genes or proteins in the living thing, contacted with the agent, to yield a multiplicity of expression values;
(b) measuring the level of expression of each member of the same multiplicity of genes or proteins in a reference living thing, that is not contacted with the agent, to yield a multiplicity of reference expression values; and
(c) comparing the multiplicity of expression values with the multiplicity of reference expression values to identify a toxicity-related population of genes or proteins, wherein each individual gene or protein has an expression value in response to the agent that is significantly different from the corresponding reference expression value.

56. The method of claim 49 wherein the expression pattern of the toxicity-related population of genes or proteins appears in the living thing before the occurrence of the undesirable biological response in response to the agent.

57. The method of claim 49 wherein the undesirable biological response does not occur in the living thing.

58. The method of claim 49 wherein the living thing consists essentially of epididymal white adipose tissue.

59. The method of claim 49 wherein the undesirable biological response is selected from the group consisting of increased blood plasma volume, increased heart size, increased blood glucose concentration and increased total cholesterol.

60. The method of claim 49 further comprising:
(a) contacting a living thing with an agent that is known to elicit a desirable biological response and an undesirable biological response in the living thing, wherein elicitation of the desirable biological response is mediated by a first target molecule, and elicitation of the undesirable biological response is mediated by a second target molecule;
(b) identifying a population of genes or proteins that yields an expression pattern that correlates with the occurrence of the desirable and undesirable biological responses caused by the agent;
(c) contacting a modified living thing with the agent, wherein the modified living thing is a member of the same species as the living thing and does not include any functional second target molecules;
(d) identifying an efficacy-related population of genes or proteins that yields an expression pattern that correlates with the occurrence of the desirable biological response caused by the agent; and
(e) comparing the population of genes or proteins identified in step (b) with the efficacy-related population of genes or proteins identified in step (d) to identify a toxicity-related population of genes or proteins that yields an expression pattern that correlates with the occurrence of the undesirable biological response caused by the agent.

61. The method of claim 60 wherein the first target molecule is a PPARγ receptor and the second target molecule is a PPARα receptor.

62. A method for identifying a classifier population of genes or proteins, wherein the method comprises the steps of:
(a) contacting a living thing with a first reference agent that is known to cause a first biological response;
(b) identifying a first population of genes or proteins that yields an expression pattern that correlates with the occurrence of the first biological response caused by the first reference agent;
(c) contacting a living thing with a second reference agent that is known to cause a second biological response, wherein the living thing is the same living thing that is contacted with the first reference agent, or is a different living thing that is a member of the same species as the living thing that is contacted with the first reference agent;
(d) identifying a second population of genes or proteins that yields an expression pattern that correlates with the occurrence of the second biological response caused by the second reference agent; and
(e) comparing the first population of genes or proteins to the second population of genes or proteins and thereby identifying a classifier population of genes or proteins that produces an expression pattern that most clearly distinguishes between the first reference agent and the second reference agent.

63. The method of claim 62 wherein the living thing is a mammal.

64. The method of claim 62 wherein the living thing is a human being.

65. The method of claim 62 wherein a classifier population of genes is identified.

66. The method of claim 62 wherein a classifier population of proteins is identified.

67. The method of claim 62 wherein the agent is a chemical agent.
